United States Patent Application Publication US 2024/0327476 A1 - sequence listing, part 64

SEQ ID NO: 121317 - DNA, 5673 bp, synthetic construct
  misc_feature 1..5673: note = Description of Artificial Sequence: Synthetic coding sequence
  source 1..5673: mol_type = other DNA
atggtgaagctggctaaccctctatatacagagtggattctggaggctattcaaaaaatcaagaagcagaaacagcgaccttccgaagagcgaatttgccatgcagtatctacctcccacggattagataagaagacggttagtgaacagttggagttgtctgtgcaggatggaagtgtactgaaagttacgaacaaaggacttgcctcctacaaggaccccgacaatccagggaggttttcatcagtgaaacccggcaccttccctaagtccgctaagggttcccgtgggagctgtaatgaccttcgcaatgttgactggaacaaattgctacgcagggccatcgagggtctggaagagccaaatggttcctctctgaagaatattgagaaataccttcgatcacagtctgacctgacaagcacaaccaataatcctgcattccagcaaagactacggctgggagcaaagagggcagtcaataacggccgcttactcaaggacgggcctcagtatagggtgaactacgggtccctggacggaaagggggccccccagtacccctctgcctttccttctagcctgccacctgtttctctgttgccccatgagaaggaccagccgcgcgcggacccaattccaatttgctccttctgtttgggaaccaaggagagtaatagggaaaaaaagcctgaggagttattgtcttgtgccgactgtggatccagtggccacccatcctgtctgaaattttgtccggagctgacaaccaacgtcaaagccctgagatggcagtgcatcgaatgtaaaacatgttcagcctgcagggttcagggcagaaacgctgataatatgctgttctgtgactcgtgcgatcgcggatttcatatggaatgctgtgaccctcccttgtcccgcatgccaaagggtatgtggatttgccaggtatgtaggcccaaaaaaaaaggcagaaagctcctgcatgagaaagccgcacagatcaagcggaggtacgccaagccaataggtaggcccaaaaacaaactgaaacagaggcttctatcagtgacatccgatgaggggtcaatgaatgcgttcacgggcagaggaagccccggccggggccagaagaccaaggtttgcacaactccctcttcaggacacgcagcttcaggaaaagattcttcctctcgtttagctgtgacggaccctacccgccctggcgccactactaaaatcacaaccacctcaacctacatctcagcgtccacgttgaaggttaataagaagactaaaggcctgattgatggtttaaccaagttctttacaccatcccctgacgggcgcaggtctcggggcgagattatcgacttttcaaagcactacaggcctcggaagaaagtgtcacagaagcagtcttgcactagccatgtgttggccaccgatacggaaatcaagattaacattaaacaggagagcgctgatgtgaatgtcattggcaataaggatgtcgtcaccgaggaggatctcgacgttttcaagcaggcccaagaactcagctgggagaagatcgagtgtgaatcgggagtcgaagactgtggcaggtacccatccgtgatcgagtttggaaaatacgagattcaaacttggtattccagtccataccctcaggagtacgcaaggctgccgaaactatacctctgtgaattctgcctcaaatatatgaagtctaagaatatactgctgcgccattcaaaaaaatgtggctggttccatccacccgctaatgaaatataccgccggaaggacctctcagtgttcgaagtcgatggcaacatgtccaaaatatactgccaaaatctttgcctgctcgccaaattatttcttgatcacaagaccctctactatgacgtcgagccattcctgttttacgttctaaccaaaaacgacgagaagggctgtcacctcgtggggtatttctctaaagagaaactctgtcagcagaaatataatgtctcatgcattatgattatgccccaacaccagaggcagggttttggaaggtttctcattgatttcagttacctcttatccagacgggagggacaggccggaagtcctgagaaaccactctcagacctcggtcgcctgtcgtatttagcttactggaagtctgtaatcctggagtatctgtatcatcaccacgagaggcatatttccatcaaagcgataagtcgagccactggtatgtgtcctcacgacatcgcaactacattacaacatctgcacatgattgataagcgagacgggagattcgtgattattcgccgcgagaagctgatcctgtcccatatggagaaattaaagacgtgttctagagctaatgagttagacccggatagtcttcgctggaccccaatccttattagtaacgcagctgtttctgaagaagaaagagaagcagaaaaagaagccgagcggctgatggaacaggcttcctgttgggagaaagaagagcaggagatccttagcactcgagcaaactcccggcagtctcctgccaaagttcagtccaagaacaagtatctccatagcccagaaagccgacccgtaactggggagagaggtcaattgctcgagttaagcaaggagtcttcagaggaggaagaagaggaagaggatgaggaagaggaagaggaggaagaagaagaggaggaggatgaggaggaagaagaagaagaagaagaagaagaagaagaggaaaacattcagagctcccccccccgactaacgaagcctcaatctgtcgcaatcaagcgcaagcgcccgtttgtgctgaagaaaaagaggggccggaaacggcgccgcatcaacagctcggttacaaccgagacaatatctgagaccactgaagtgctgaatgagccttttgacaacagcgatgaagagaggcctatgccccagcttgaacccacctgcgagatcgaggtcgaggaagatggacgaaagccggtcttaagaaaggcatttcagcaccaaccaggcaagaaaaggcagacagaggaggaggaggggaaggataaccactgctttaagaacgcagatccctgccggaataatatgaatgatgactcaagcaacctcaaagaagggtcgaaggacaacccagagcccctgaaatgcaagcaggtgtggccgaagggaactaagagaggtctgtcaaagtggcgccagaacaaagagcgaaaaacaggattcaagctcaacctctacaccccacctgaaactcccatggaacctgacgagcaagtgactgtggaggagcagaaggagaccagcgaaggcaaaacctccccctcacccattagaatagaggaagaggtaaaagaaaccggggaggcattacttccacaggaggagaacaggcgcgaagagacatgcgccccagtcagtcccaacacaagccccggagaaaagcccgaggatgacctgatcaagcctgaggaggaggaagaagaagaggaagaggaggaggaggaagaggaggaggaggagggggaggaagaggagggaggaggcaacgttgaaaaagatcctgacggcgccaagagtcaggaaaaagaagagccagaaatctctaccgaaaaagaggattcagcgcggttagacgaccacgaggaagaggaggaagaggacgaagagccttcccataatgaggaccatgacgcggacgacgaggacgactcacatatggagtccgctgaggtagaaaaggaggagcttccgagggaatcctttaaggaggtccttgaaaaccaggaaacgttcctcgacttgaacgtgcagccaggacacagcaacccagaggtactaatggactgtggcgttgacctgacggcttcttgtaatagcgaaccaaaggagctcgctggcgaccccgaggctgtccccgagagcgacgaagaaccgcctccgggggagcaggcacaaaagcaagaccaaaagaacagcaaagaagttgataccgagttcaaggagggcaacccagccactatggaaatagattccgaaaccgttcaggcagttcagagccttacacaagagtctagcgagcaggacgatacattccaggactgcgccgagacccaggaagcttgtaggtctcttcagaattacactagggccgaccagtcaccccagattgcaactaccctggacgactgtcaacagtccgaccacagctcccctgtgagtagtgtccattcccaccccggccagtccgtacgctctgtgaatagcccttctgtgccagcactggagaacagctacgcccagattagtcccgatcagtccgcgatctcggttccatccctgcagaacatggaaacaagtcctatgatggacgtgccaagcgttagcgaccacagccaacaagtcgtggattctggtttcagcgatctgggatcaatcgagtctaccactgagaattatgagaacccaagttcatatgattcaactatgggagggagtatttgcggtaacggtagtagtcagaattcttgttcctatagtaatctgacatcctcatctctcacacagagctcctgcgccgtgactcagcagatgtctaacatctcaggttcttgctccatgcttcaacaaacctccataagctccccccctacctgtagcgtgaaatctccccagggctgcgtggtcgagagaccacctagcagcagccagcagctcgcccaatgctctatggccgccaattttactccacccatgcagctcgcggagattccggagacaagtaatgcaaatattggcctgtatgagcgaatggggcaatctgatttcggcgctggccattacccccagcctagtgctaccttctctttagccaagctgcagcagttgaccaacacattgatcgatcatagcctcccttattcccactcagccgcagtgacttcttatgccaactctgcctccctgtctacgcccctttctaacacaggactagtgcaactgtcccaatctcctcacagtgtgcctggcggacctcaggcccaagccactatgacccccccccctaatttaacccccccaccaatgaaccttccgcctcccctgctccaaagaaatatggcggccagtaatataggcatatcgcacagtcagagattacagacacagatcgcctctaagggacacatctccatgaggactaaaagcgcctctctgtctccagcagccgcaactcatcagagccaaatctatggaaggtcccagacagtggccatgcaggggccagcacgcacattaacaatgcagcggggtatgaacatgagcgttaaccttatgcccgcacctgcttataacgtgaacagcgtgaatatgaacatgaataccctgaatgccatgaatgggtattctatgagtcagcctatgatgaattccgggtaccattccaaccacggttatatgaaccagacacctcaataccccatgcagatgcagatgggaatgatggggacacagccatatgcccagcagcccatgcaaacaccccctcacggcaacatgatgtacacggccccgggccatcacggctacatgaatactggtatgtctaaacagtctctgaacgggagctacatgcggcgctag

SEQ ID NO: 121318 - DNA, 5346 bp, synthetic construct
  misc_feature 1..5346: note = Description of Artificial Sequence: Synthetic coding sequence
  source 1..5346: mol_type = other DNA
atggtgaaactcgcgaaccccttgtacaccgagtggatccttgaagcaattcagaaaattaagaaacagaagcagcgacctagcgaggaaaggatctgtcacgcggtgtccaccagccatggcttggataagaaaaccgtttcagaacaactagaactgagcgtgcaggatggatcagttctcaaggtgactaacaaaggattagctagttacaaagatccagacaaccccggtagattcagttcagtgaagcccggaacattccccaaatctgccaaggggagccgggggagctgtaacgatttgaggaatgtagactggaacaagctgttaaggagagctattgagggactggaagagcccaatggaagctccctcaagaacatcgagaaatacctgcgaagtcagagcgacttaactagtacaactaataatcccgctttccagcagcgtttaagactcggagccaaaagggctgtgaacaacggccgtcttctcaaagacggaccgcagtatagagttaactatggatccctcgacggcaagggagccccccagtacccctccgcctttccttcgtctttacctcccgtcagcctactgccacacgagaaggaccagccccgagcggatcccattcctatttgctccttttgcctagggacgaaggagtcaaatcgggagaagaagccagaagagctgttaagctgtgccgactgcggcagttcggggcacccctcgtgtttaaagttttgccctgaactgaccacgaacgttaaagcattaaggtggcagtgtatagagtgtaaaacctgttctgcgtgtcgagttcaaggtagaaacgccgacaacatgcttttctgcgatagctgcgaccggggcttccacatggagtgctgcgacccacctctttctaggatgccaaaaggcatgtggatctgtcaggtgtgccgacctaaaaagaagggcagaaaactgctgcacgagaaggctgcgcagattaaacggcgttatgccaaacccatcgggcggccaaagaacaagctcaaacagcggttactctccgtgacctctgatgaggggtctatgaacgcctttacaggtaggggtagccccgacacagaaatcaagatcaacataaagcaggagtcagcagatgtcaacgtgatcggaaataaagacgtagttacggaagaagacctagacgtgttcaagcaggcacaagagctcagctgggagaaaattgagtgtgagtccggggtcgaagactgcgggcgatacccctccgtgattgagtttggcaagtacgaaattcaaacatggtattccagtccgtatcctcaagaatacgccagactgcctaagctgtatctctgtgagttttgtcttaagtacatgaagtctaaaaacatactgctccgacactctaaaaagtgcggatggtttcaccctcccgccaatgagatctaccggaggaaagacctgtcagtatttgaggtcgatggcaatatgtccaaaatctattgccagaatctgtgtcttctcgctaaactttttcttgaccacaagacactgtattatgacgtggagccgttcctattctatgttctcaccaagaatgacgagaaggggtgccacctcgtaggctacttcagcaaggaaaaactatgtcaacagaaatacaacgtgtcttgcatcatgatcatgccccagcaccagagacaaggcttcggtaggtttctgattgatttttcgtacctcttgagtcgcagggaggggcaggccggatctccagagaaaccactctcagacttaggcaggttatcctacctggcatactggaaatcagtcatcctcgagtacctctatcaccatcatgagcgacacatctccatcaaggctatctcccgcgccactggtatgtgtcctcacgacatagcgactacgctccagcacctgcacatgatcgataagagagatgggcgttttgttataatcagaagggaaaagctgattctttctcacatggaaaagctgaagacctgctcgagagctaatgagctggaccccgatagcctgcgctggacccccatcctgatatccaacgcagccgtctcagaggaggaaagggaggctgagaaggaggctgaacgcttgatggaacaggccagctgctgggagaaggaagaacaagaaatcttgagcacacgggccaattcgaggcaatcacccgcaaaagttcagtctaagaataaatacctccactcgcccgaaagccgaccagtcaccggagaacgcggccagctgttagagctgtcgaaggagtcctcggaggaggaggaggaggaagaggatgaagaggaggaggaggaggaggaggaggaagaggaggacgaggaggaggaggaggaagaagaagaggaggaagaggaggaaaacatacagtcatccccaccaagactcactaaacctcaatcagtggccatcaaacggaagcggccatttgtgttgaaaaaaaagaggggccgcaaaaggcgtaggatcaatagctctgtaactactgagacaatctcggagactaccgaggtgctgaacgaacccttcgataacagtgatgaagaacggccgatgccacagctagagccaacttgcgaaatagaggtggaggaagatggccgcaagccagtgctccggaaagcattccaacaccaacccggcaaaaagcggcagacagaggaagaagaagggaaggataatcactgcttcaagaacgctgatccgtgtcgcaataatatgaatgatgacagttccaatctaaaagagggtagtaaggataatcccgagcctctcaaatgtaaacaggtttggcccaagggtacgaaacggggcctgtctaaatggaggcaaaacaaggaacgcaaaacagggtttaaactgaacttgtacacgccacctgaaacacctatggagcctgacgaacaagtgaccgtggaagagcaaaaggagacatcagagggaaaaaccagtccttcccccattaggatcgaagaggaagttaaggagactggagaagccctgttgccccaagaggaaaatcgcagggaagagacttgtgctccagtgagtccaaatacatcccccggagagaaaccagaagatgaccttatcaagcccgaagaagaggaagaggaggaagaggaagaggaggaggaggaagaagaggaagagggcgaggaggaggaggggggcggcaatgtcgaaaaggatcccgacggcgcaaaaagccaagagaaggaagaacctgaaatttccacggaaaaggaagattctgctcgcctcgacgatcatgaggaggaggaggaagaagacgaggagccctctcacaacgaagaccatgacgcagacgatgaagacgactcacatatggaaagcgccgaagtcgaaaaggaagagcttccgagagaaagctttaaggaggtgttggagaaccaggagactttcctcgatctcaatgtgcagcctggacattcaaacccagaagtgttaatggactgtggggtggaccttactgcaagctgcaacagtgaaccaaaggagcttgccggtgatcccgaggcagtcccagagagcgacgaggaaccacccccgggggaacaagcccagaagcaggaccagaaaaactccaaagaagtggacaccgagtttaaagaggggaatccggcaacgatggaaatcgatagcgaaaccgtccaggccgtgcaatcgctgacccaggagtcatccgaacaggacgacacattccaggactgcgcagaaactcaggaggcctgtagatctcttcagaattacactcgagcagatcagagtccacagattgctaccacactcgatgattgccagcagagtgatcactcttctccggtgtcatccgtacattcccacccaggccagtccgttcgcagcgtgaatagtcccagcgtgccggctctcgaaaacagctacgcccagatctctcctgaccaaagcgctattagcgttcctagcctgcagaatatggaaacatcccccatgatggatgttcctagtgtgtctgatcattcccagcaggtcgtggatagtgggttctccgatctcggatccattgaatccaccactgagaactatgagaaccccagctcctatgatagcaccatgggtggttccatctgcgggaacgggagcagtcagaactcttgttcgtacagtaacctgactagctcctcccttacacagtcttcctgcgcggtcacccagcagatgtctaacataagcggttcttgctccatgttgcagcagacaagtatctcatctcctccaacatgttcagtgaagtctccacaaggttgcgtagtggagcgtccacccagctctagccagcagctggcgcaatgctctatggctgccaactttacgcctcccatgcagctggctgagatccccgaaacttctaatgctaatatcgggctgtacgagaggatgggccaatccgattttggcgcgggtcattacccacagccctcggcaacgttttcactcgctaaactgcaacagttgaccaacacactaatagatcattccctcccatattcccacagcgccgccgtcacctcctacgcaaattcggccagcttgtccactccattgagtaacaccggcctcgtccagctgtctcagtctccacactccgtacccggtggaccacaggcccaagcaactatgacacctcctcccaatctcacaccacctcccatgaacttacccccccctctgctgcaaaggaacatggccgcctctaatatcggcatatcacacagccagagactgcaaactcagattgcttcgaaaggacatatatctatgaggacaaagtccgcctcgctgtctcctgcagccgctacacatcaatctcaaatctacgggagatcccagacagtggctatgcaaggtcccgcccgtactctcaccatgcaaagaggcatgaatatgtccgtgaatcttatgccggcaccggcatacaacgtcaactccgtgaatatgaatatgaatacacttaacgctatgaacgggtacagcatgtctcagccgatgatgaattctggctaccatagcaaccacgggtatatgaaccaaacacctcaataccccatgcagatgcagatgggcatgatgggcacccagccttatgcccagcagccaatgcagacaccaccccatggaaatatgatgtataccgccccaggccaccacggatatatgaacaccggcatgagtaagcagtcactgaacggttcatacatgcgacggtag

SEQ ID NO: 121319 - DNA, 5346 bp, synthetic construct
  misc_feature 1..5346: note = Description of Artificial Sequence: Synthetic coding sequence
  source 1..5346: mol_type = other DNA
atggttaaactggctaacccactatataccgagtggattctggaagcaatccagaagattaaaaagcagaagcagaggccctccgaagagcgtatctgccatgccgtgagtacctctcacggcctcgataagaagacagtgagtgaacaattggagctgagcgtccaggacggaagcgtacttaaagtgactaacaagggcctcgctagctataaagaccccgacaacccgggtagattctctagtgtgaagccgggcacgttccccaaatccgccaaagggagccgcggaagttgcaacgatctgagaaatgtggattggaacaaattgctgaggcgggcgatcgaaggactagaggaacctaatgggtctagtctgaagaatattgagaaatatctgcggagtcagagcgacctcaccagcacaacgaacaaccctgcgttccagcaacggttgcgtttgggggctaaacgggctgtaaataatggcagattgctgaaagacggtccacagtaccgcgtgaattacggctcattagatggaaagggggcacctcaatatccgtccgccttcccttccagtctgccacctgtttccctgctcccccacgaaaaggatcagccacgggcggaccccattcctatttgttcattttgcctgggaaccaaagagtctaatagagagaagaaacccgaggagctgctctcatgcgccgattgtggttcaagcgggcatccttcttgtctcaaattttgtcccgagctcacaaccaacgtgaaggcgctgcgttggcagtgcatcgagtgcaagacttgctcagcttgcagagtgcaggggaggaatgcggacaacatgttattctgtgactcctgcgacagaggctttcatatggagtgctgcgatccccctcttagccgcatgcctaagggtatgtggatctgtcaggtgtgtaggcctaaaaaaaaggggcggaagctcctacacgagaaggcagcccaaatcaagcggcggtatgccaagccgattggtagaccgaaaaataagctgaaacagcgactgctgtccgtgacttcagatgaaggcagcatgaatgcttttaccggccgcggtagcccagataccgaaatcaagatcaacataaaacaggaatctgcagatgtgaacgtcataggtaataaagacgttgtgactgaggaagacctggacgtgttcaagcaggctcaggagctatcgtgggaaaagatagagtgtgagagtggcgtcgaggactgcggccgctacccttccgtgatcgaatttggcaagtatgagattcagacttggtattcctcaccctatccacaggagtacgccaggttgcccaaattgtatctctgtgaattctgcctgaagtacatgaagtccaagaacatcctgctgcggcattccaagaagtgtggatggttccatcccccggccaatgagatctaccgtaggaaggatttgtcggtctttgaggtagacggcaatatgtcaaaaatttactgccagaacctgtgcctgctcgctaaactatttctggatcataaaacactttattatgacgtcgaacctttcctgttctacgtgctgaccaaaaatgacgagaaaggctgccacttagtgggctacttcagcaaagaaaaactgtgccagcagaagtataacgtatcctgtatcatgattatgccacagcaccagcgccaggggttcgggcggttcctcatcgacttctcctaccttctctccagacgggagggtcaggcgggatctcccgagaagcccctgtcggatcttggacgcttatcctatctcgcctattggaaaagtgtgattctggaatacctgtaccatcaccatgagagacacatcagtataaaagccataagtagagccactggaatgtgtcctcacgatattgctactacattacagcacttgcatatgatcgacaagcgggacggcaggtttgtcattattaggagggagaaactaattctgagtcatatggaaaaattgaagacctgcagtcgtgctaatgagctggaccctgattcactccggtggacaccaattcttatctcaaacgccgccgtcagcgaagaggaacgcgaggctgaaaaagaagcagaacgccttatggaacaggcgtcatgttgggagaaagaagaacaggagattttaagtacacgtgcgaactcaagacaatctccagcaaaggtgcaaagtaagaacaagtacctccattccccggagtcccgcccagtcacaggagagaggggacagctcctggaactgtccaaggaaagttctgaagaggaagaggaggaggaggacgaggaggaggaagaggaggaggaggaagaagaagaggacgaggaagaggaggaggaagaggaggaagaggaggaggaggagaacattcagtcatctccgcctagacttactaagccccagagtgtcgcgattaagaggaagcgacctttcgtcttgaagaaaaagagaggacgcaaacggagaaggattaattcatctgttactactgagaccatctcagaaaccactgaggtgcttaacgaaccatttgataatagcgatgaggaaagaccaatgccccaattagagccgacttgtgagatcgaagtggaagaggatggaaggaagccggtgcttcgtaaggcctttcaacaccagcccgggaaaaaaaggcagacggaggaggaagaaggtaaagacaaccattgtttcaagaatgctgatccatgtcgcaacaacatgaacgacgactccagtaaccttaaagaaggttcaaaggataatccagagcctctgaagtgtaaacaagtttggcctaaagggacaaagcggggcctttccaagtggcgccagaacaaggagcgcaagaccggctttaaattgaatctctacacaccgccagagacacctatggaacccgatgaacaggttaccgtcgaagaacagaaggagaccagtgagggcaagacttcacctagtcctattagaattgaggaggaggtgaaagaaacgggggaggcgctattgcctcaagaggagaaccgccgtgaagaaacctgtgcaccagtttcgcctaacacctccccaggcgagaaacccgaggatgacctcatcaaacctgaggaagaagaggaggaggaagaggaggaggaagaggaggaagaggaggaagaaggtgaagaagaggaaggcggaggtaacgtggaaaaagaccctgacggtgccaaatcgcaggagaaggaggagccagagatctccacagaaaaagaggactcagctcggctggacgaccatgaggaagaggaagaggaggacgaagaaccctcccacaacgaggatcacgatgcagacgacgaggatgacagccatatggagtcagccgaggttgaaaaggaagagttaccgcgcgagtctttcaaggaggtactggaaaaccaagagaccttcctagacctgaacgtgcaacccggtcactccaacccagaggtgctgatggactgcggggtcgatctgacagcctcctgcaactccgagcccaaggagctggccggagatcccgaagccgtgcccgaatcagatgaggagccccccccaggagagcaggctcaaaagcaagatcagaagaacagtaaggaggtggacactgaattcaaggaaggaaatcctgcgacaatggagatcgacagcgaaacagtgcaggccgtgcaatctctcactcaggagagtagcgagcaggacgatacattccaagattgtgcggagacccaggaagcctgcaggtccctccaaaactatacccgtgccgaccaaagtccgcaaatcgccactaccctcgacgattgccagcagagtgatcactcttccccagtgtcctcagtccatagtcatcccggacagtctgttaggagcgttaactctccctcagtgcccgctctggaaaatagctatgcacagatttcaccagaccaaagcgcaatatcagtgccgtccctgcagaatatggagacgtctcccatgatggacgtgccctccgtctcagatcattctcagcaggttgtcgactctggcttctcagatctcggatctattgaatcaacaaccgaaaattacgaaaacccttcctcgtatgactcaactatgggaggttcaatctgtggaaacgggagctctcaaaactcatgcagttattccaatctaacatcatcatcgttgactcagtcatcttgcgctgttacccagcaaatgtcgaatatcagcggctcctgcagcatgttgcagcagacctcaatatcttcccctcccacatgttccgttaagagcccgcagggttgtgtagtggaaagacctcccagctcttcgcagcagctcgcccaatgtagcatggccgcaaattttaccccccccatgcaactggccgagatccccgagacatctaacgcaaacatcggcctgtatgagcgcatgggccagtccgacttcggggctggtcactatccgcagcctagcgcaacattttctctcgctaaattgcagcagcttacaaacaccttgattgaccactccctgccttactcgcattccgccgcagttacttcatacgctaatagcgcctctcttagtactcccttgagtaatacaggcttagttcagctgagccagtcaccacactccgtgccaggtggaccccaggcacaggcgaccatgacaccgccacctaacttgactcctccacccatgaacttaccaccaccattgctacaaaggaacatggccgcttctaacatcggaatctcccattcacagagattgcagacacagatcgccagcaagggccacataagcatgcgcacaaaatctgcatcattatcccccgccgctgccacccaccaaagccaaatttacgggcggtcccagacagttgctatgcaaggaccagctagaaccttgaccatgcaacgcgggatgaatatgagcgtaaacttgatgccagcaccggcctataacgtaaacagtgtgaatatgaatatgaatacgctcaacgctatgaacgggtacagcatgagccagcctatgatgaactccggttatcacagcaatcacggctacatgaaccaaactccgcagtaccctatgcagatgcagatggggatgatggggacccaaccatacgcacaacaaccaatgcagacaccaccccacgggaacatgatgtacactgcacccggacaccacggctacatgaacactggcatgagtaagcagtcactcaacggctcatacatgaggaggtag

SEQ ID NO: 121320 - DNA, 5346 bp, synthetic construct
  misc_feature 1..5346: note = Description of Artificial Sequence: Synthetic coding sequence
  source 1..5346: mol_type = other DNA
atggtcaaactcgctaatcctctatacactgagtggatacttgaagccattcagaaaatcaaaaaacaaaaacaacggccttccgaggaacgcatttgccatgcagtttccaccagccacggcctggataagaaaacagtgagcgagcagctcgagctgtcggtccaagacgggagcgtgctgaaagtgaccaataaggggttggcgagctacaaggatcccgacaaccccggtagatttagcagcgtgaagccggggacatttcctaaaagcgcgaagggaagccgtggttcttgcaacgatctccggaacgtagactggaacaaactcctgcgccgagcaattgagggacttgaagagcccaatggatcctctttaaagaatattgagaagtatttgagaagtcaaagcgatctgactagcactacaaacaacccagcgtttcagcagaggctgcggctcggcgctaagcgagccgttaataatggtcggttgctaaaggatggaccgcaataccgcgtgaattatggctctctagacggaaaaggcgccccacagtaccccagtgcctttccttcctccttgcctcctgtgtccctattaccacacgaaaaagaccagcccagggcggaccccatcccaatttgttccttttgcttggggactaaggagtctaaccgtgagaaaaagccagaagaactgctatcatgcgccgactgcggatcctctggacacccttcatgtcttaagttttgcccagaacttaccacgaacgtgaaggcactcagatggcagtgtatcgagtgcaaaacctgctctgcctgtcgagtgcaggggcgaaatgccgacaatatgctcttctgcgacagttgtgatagaggattccatatggagtgttgtgacccaccccttagtcgcatgccaaaaggaatgtggatctgtcaggtgtgcagacccaagaagaagggcaggaaactgctacatgagaaagctgcccaaataaagagaagatacgccaagccaattggcaggcccaagaacaagctgaagcagcgcttgttgtcagtaaccagcgacgaaggcagcatgaacgcatttactggacgaggcagtccagacactgaaattaagatcaacatcaagcaggaaagcgccgacgtgaatgtgatagggaacaaagatgtagttaccgaggaggacctggacgtttttaaacaagcccaggaattgtcttgggaaaaaattgaatgtgagtccggggtcgaggattgtggacgatacccatctgttatagagtttggtaaatatgaaattcaaacttggtactcgtctccttacccacaagaatacgcccggctgcccaagctgtatctttgtgaattttgcctgaaatacatgaaatccaagaacattttattaaggcactcgaaaaaatgcggctggttccatccccctgcaaatgaaatatacaggcgaaaggacctgtctgtcttcgaagttgatggtaacatgtctaaaatatattgtcaaaacctgtgcctgttagccaaactcttcctggaccataagaccctatattacgatgtcgagcccttcctgttttacgtgctgacaaagaacgacgagaaagggtgtcatctggtaggctatttctcaaaggaaaagttgtgccagcagaaatacaatgtatcctgtatcatgataatgccccagcaccagagacaggggttcggacgattcctcatcgacttttcttacctcttgtcccgccgggagggtcaggccggaagtcccgaaaagcccctgtctgacttaggccggttatcatatctagcctactggaaatctgtgattctagagtacttataccatcatcacgagcgccacatctccatcaaggcgattagcagggccactgggatgtgccctcacgatatagctacgacactgcagcatctgcatatgatcgacaagcgtgatggaaggttcgtgatcattcggcgcgaaaagctgattctcagccatatggaaaagctgaaaacgtgttcacgcgcaaacgagctggatccagacagtctgcggtggacacccattctcatttcaaacgcagcggtaagtgaggaagaaagagaagctgaaaaagaggctgagcggttgatggagcaggcatcttgctgggagaaagaggaacaggaaatactgtccacccgcgccaattctcggcagagcccggcaaaggttcagagtaaaaacaaatacctccactccccagagagtaggccggtcacgggcgagcggggacagctgctcgagctgtccaaagagagtagtgaggaagaagaagaggaagaggacgaagaggaagaagaagaggaggaagaagaagaggaggacgaagaagaggaggaggaggaggaggaagaagaagaggaggagaacatccagagctctcctccccggcttacgaaacctcaatctgtggccatcaaaagaaaaaggccttttgttctcaaaaagaagaggggcaggaaaaggagacgcataaactcctctgtgacgaccgagaccatctcagagaccactgaagttttgaatgagccattcgacaactcagacgaagagagacctatgccacagcttgagccgacctgcgaaatagaagtcgaggaggatggacgcaaaccggtgctgagaaaggcgttccaacatcagccaggcaaaaaacggcaaacggaagaagaggagggaaaggacaaccattgtttcaagaatgcagacccctgccggaataatatgaacgacgatagctcaaatctcaaagagggaagcaaagacaacccagaaccactgaaatgtaagcaggtgtggcctaagggcaccaagcgtggcttgtctaaatggagacagaataaagagcggaagacaggatttaagcttaatctctacaccccacccgagacccccatggaaccggacgaacaggtgactgtggaggagcagaaagagacttctgaaggaaagacttccccgtcccctatccgaatcgaggaagaggtcaaagagacaggagaggcacttctccctcaagaggagaatcgacgggaggaaacctgcgccccggtttctccaaatactagtcccggggagaagcccgaagatgatctgattaagcccgaagaggaggaagaggaggaggaggaagaggaggaggaggaggaggaggaggaaggtgaagaagaggagggaggaggcaatgtggagaaggatcccgacggagcgaagtcccaggagaaagaagagcccgagatctctacagaaaaggaagacagcgcgagactcgacgaccacgaggaggaagaggaggaggacgaggaacccagtcacaatgaggatcatgatgcagacgacgaggatgattctcatatggagtccgctgaagtcgaaaaggaagaactgccacgggaatctttcaaggaagtgctcgaaaatcaagagacgttcttggatctgaacgtacagccagggcactcaaaccccgaagtactgatggattgtggggtcgacttgaccgcctcttgcaactccgagcctaaggaactggcaggcgatccagaagcagtccccgagtctgacgaagaaccccctcccggggagcaggcccagaagcaggatcagaaaaattccaaagaggtggacacagaatttaaggaaggaaatcctgctaccatggaaattgacagcgagaccgtccaagctgtccagagtctcactcaggagtcgtcagaacaggacgacacattccaggactgtgcggagactcaggaggcctgtagatctttgcaaaactatacccgggccgatcagagtccccagatcgcaaccacactggacgactgccagcagtccgatcactcgagcccagtgtccagtgtccattctcaccccggacaaagtgtcagaagcgtgaactccccctctgtgcctgccctcgagaatagttacgcccagatctctccggaccagtcagctatctccgtgccttctctgcagaatatggagacatctccgatgatggatgtcccctccgtgtcagatcactcccagcaagtagtggacagtggcttctcagacctgggatctatcgagagcacaaccgaaaactatgagaatcccagtagttacgatagtaccatgggcggcagcatttgcggtaacgggtcaagtcagaatagctgttcgtacagcaacctcacttcatcatccctgacccagagcagttgtgcagtgacacagcagatgagcaatatcagtggctcatgctctatgttacagcaaactagcataagtagccccccaacgtgttctgttaagagtccacagggttgcgtagtggaacgccctcctagttctagtcagcaattggcccagtgctctatggccgcgaacttcaccccccctatgcagcttgccgaaattcccgagacctcaaacgcaaacatcgggctctatgagaggatgggacaatcagactttggagctggacactacccacagcccagtgccaccttttcactggccaagctgcagcagctgacaaatacgctcattgaccatagcctgccctatagccatagtgcagcagtgacttcttatgctaactcagcatccctgagcacacccctaagcaacaccggattagtgcagctcagtcagtctccacactcagttcctgggggtcctcaggcacaggcaactatgaccccgcctccaaatctgaccccgccccccatgaatcttccccctccgctgttgcaacgaaatatggctgcctcaaatattgggatctcccacagccagcggctccaaacacaaatcgctagtaagggccacatcagtatgagaacaaagtctgcctcactcagtccggcagcagctacacaccagtcgcagatttacggtcgatcgcagactgtggcaatgcaaggaccagccaggacacttacgatgcagcgcggaatgaacatgtccgtgaatttgatgcccgccccagcgtacaacgtcaactcagtgaacatgaatatgaacactctgaatgccatgaatggatatagcatgtctcagccaatgatgaatagtggctaccattccaaccacggctacatgaaccaaacgccacagtaccctatgcagatgcagatggggatgatgggtactcagccatatgctcaacaaccaatgcagactcccccacacggcaatatgatgtatacggcgcccggacaccacggctacatgaacactgggatgtccaagcagagtctcaacgggagctatatgcgccgttag

SEQ ID NO: 121321 - DNA, 4992 bp, synthetic construct
  misc_feature 1..4992: note = Description of Artificial Sequence: Synthetic coding sequence
  source 1..4992: mol_type = other DNA
atgaccgatcgcttttgggaccaatggtacctctggtacttgcgactgctgcgattgctcgatcgcgggtccttccggaacgacgggctgaaggcgtcagacgtgctgcccatcttaaaagaaaaggtcgccttcgtgtccggggggcgcgacaagaggggagggcccatcctgacattccctgcaaggtcaaatcacgaccgaatccggcaggaggatcttaggaagctggttacatatctggcatcagttccgtccgaggacgtgtgtaagcggggcttcaccgtaatcatcgacatgaggggcagcaaatgggatctgatcaaacctcttctgaaaacccttcaagaagcctttcccgccgagattcatgtcgctctcataataaaaccagataatttttggcagaaacagaaaacaaacttcggatcatcaaagtttatctttgaaacgtccatggtctctgtcgaagggctgacgaaactggttgatccctcgcagttaactgaagagtttgatgggtccctggactacaatcatgaagagtggatcgagctccgactgagcctggaagagttctttaacagtgctgtacacctgctcagccggctggaggacttgcaggagatgctcgcgcgaaaggagtttcctgttgatgtggagggctccaggcggcttattgacgaacacacacagctgaaaaagaaggtgttaaaggctccggttgaggaactggaccgggaaggacagaggctcctgcagtgcatccggtgctcggatgggttcagcggtaggaactgcatccccggaagcgccgattttcaaagtctggtgcccaaaatcacctcccttcttgataaactccattccactaggcaacatctgcaccagatgtggcatgtgcgaaaactaaaattagatcagtgctttcagttacgcctgttcgagcaggacgcagaaaagatgttcgactggatctcacacaacaaggagctgtttctgcaatcccatacagagattggagtgtcatatcagtatgcactggacctacaaacacagcataaccattttgctatgaatagtatgaacgcatacgtgaacattaacaggatcatgtccgttgcatcccgcttatcagaagctggacattacgcaagtcaacaaatcaagcaaatttcaacccagctcgatcaggagtggaagagctttgccgcagccttggacgagcgatcaaccatactggcaatgtcggccgtgtttcaccaaaaagctgaacagtttctgtctggcgtggatgcctggtgtaaaatgtgtagcgagggggggctgcctagtgagatgcaggatcttgaactggccatccaccaccaccaaacactttacgaacaggtgacacaggcgtacactgaggtgtcccaggacgggaaagctctgcttgatgttctacagcgccctctttcccctggcaactctgagagtttgactgccaccgctaactacagtaaagctgtgcaccaggtgctggacgtcgtccatgaggtactgcaccatcaacgacgcctggaatctatctggcaacatcgtaaagtgaggctgcatcagcggctgcagctttgcgtttttcagcaggatgtgcagcaggtgctggattggattgagaaccatggtgaggcttttctgtcaaagcacaccggtgtgggaaagtctctgcatcgggctagagcactgcagaaaagacacgatgactttgaggaagtcgcacaaaacacttacaccaatgctgataagctcttggaagcggcagagcaactcgctcagacgggggaatgtgatcccgaggaaatatacaaagcagcaagacatctagaggtaagaatccaagactttgtgcggcgcgttgaacagaggaaattgctccttgatatgtctgttagcttccacacccatacgaaggagctgtggacttggatggaggaccttcagaaagagatgctcgaggacgtgtgcgccgactcggtggatgccgttcaggagctcatcaagcagttccagcagcagcagaccgctactctcgacgctacattaaatgtgataaaagaaggggaggatcttattcagcagctgcgatcggcaccccctagccttggagaaccaagcgaggcacgtgattccgctgtatccaataacaagacgccacactcaagcagcatcagtcacattgaaagtgtgctgcagcagttagacgacgctcaagtgcaaatggaggagctttttcacgaacggaaaattaagctagatatcttcctgcagctgcggatattcgagcaatataccatcgaggtcaccgcagagctggacgcatggaatgaggacctgctgagacagatgaatgactttaataccgaagacctgaccttggcagagcagaggctgcaaagacatactgagcgcaaactcgcaatgaacaatatgacgttcgaggtgatccagcaggggcaggacctgcaccagtatatcactgaggtgcaagcctctggaattgagctgatatgtgagaaggatatagacctggctgcccaagtgcaggaactcctcgagttcctgcatgaaaagcagcacgagctggagctgaacgctgagcagacgcacaagagactggagcaatgtttgcagcttagacacctccaagccgaggtgaagcaggtgctgggttggatacggaatggagaatcgatgcttaatgcttccttggtgaatgctagtagcctgagtgaagcggagcagttgcagagggaacacgaacaattccagctggctatcgagagtcttttccatgcaacgtcacttcaaaaaacacatcagtcagccctgcaagtgcaacagaaagcagaggtgttgctgcaggcgggtcattacgacgcagacgccatacgcgagtgtgctgagaaagtagctctgcactggcagcagctgatgctgaagatggaggaccgtctaaaactggtcaatgcttctgtggcattctacaaaacctcagagcaggtgtgctctgtgttagagtcgcttgagcaggagtaccggcgtgacgaggattggtgtggaggccgtgataagcttggtccagccgctgaaattgaccacgtcatccccctaatttccaagcacctggaacagaaggaggcctttctcaaagcctgcactctggccaggagaaacgccgaggtgttcctgaaatacatacatcggaacaacgtgtccatgcccagcgtggccagtcacacccggggacctgagcagcaggtgaaggccatacttagcgagctactccagcgagagaatagagtgctccacttctggaccctcaaaaagagaagactagaccagtgtcagcaatacgttgtgttcgaacgcagcgcaaagcaggctctcgattggattcaggaaactggggagttctatttgtctacacacacatctacgggcgaaacgaccgaggaaacccaggagcttcttaaagagtatggggaatttagagtgccggccaaacaaactaaggagaaagtgaaattactcatccagctcgctgactccttcgtagagaagggtcacattcacgctaccgaaatacgtaaatgggtgactaccgtggacaaacactatcgggatttcagcctgcggatgggaaagtaccgctactctctggagaaggcgctcggcgtaaacacagaagacaacaaggatctcgaactggatatcatccctgccagcttatcagaccgggaggtgaaactgcgggacgctaatcatgaggtcaatgaagaaaagagaaaaagcgcacggaagaaggagtttattatggccgaattgctacaaaccgaaaaagcctacgtgcgagatctgcatgagtgtcttgagacttatctctgggaaatgacgtcaggcgtagaagaaatcccacccggaatccttaataaggagcacatcatctttggcaatatccaggaaatctatgacttccacaacaacatatttctgaaagagctagagaagtacgaacagttgcccgaagacgtgggccattgtttcgtgacatgggccgacaagtttcagatgtatgtgacctattgtaagaataagcccgattctaatcagctcattcttgaacatgctggaaccttcttcgacgaaatacagcagcgccatggtctggcaaacagcatcagctcttatctaattaagcccgtccagaggatcacaaaatatcagctgctgctgaaggaactgctgacatgctgcgaggaagggaaaggcgagctcaaggatggcctggaggtgatgctgagcgtgcctaaaaaagcgaatgatgccatgcatgttagtatgctcgagggatttgacgaaaacctcgacgtccagggcgaactgattctccaggatgcttttcaggtttgggaccctaagagcttgatcaggaagggcagagaacgacacttatttctgttcgaaatctccctagtgtttagcaaggaaatcaaagattcctccggtcacacgaagtacgtgtacaaaaataaactcttaacatctgaactgggagttaccgagcacgtggaaggggatccatgtaagtttgcactctggtctgggcggaccccttcgtcagacaacaagaccgtgttgaaagcctctaacattgaaacgaagcaggagtggatcaagaacattagagaggtgatccaggagagaattatccatctgaagggcgcattgaaggagccattgcagctgccgaagacaccagctaaacaacgcaataactctaaacgcgatggggtcgaggatatagatagtcagggggacggctcgagccagcccgacacaatctcaatcgctagcaggactagtcagaacacggtggatagtgacaaagacggaaatctcgtgcctcgctggcaccttggcccaggagatccttttagcacctatgtttag

SEQ ID NO: 121322 - DNA, 3870 bp, synthetic construct
  misc_feature 1..3870: note = Description of Artificial Sequence: Synthetic coding sequence
  source 1..3870: mol_type = other DNA
atgaagggcggtgatcgggcctatacacgggggccatccttggggtggctgttcgccaaatgctgttgttgtttcccatgtcgtgacgcctactcccacagctcctctgagaatgggggcaaatccgaaagtgtagcgaatttgcaagcccagccatccttgaacagcattcactcctctcccgggccgaagagatctaccaataccctgaagaagtggctaacttctcccgtgaggagactgaattctggcaaggcagatggaaacattaagaaacaaaaaaaggtgcgtgacgggagaaaatcattcgacctcggatctccaaaacctggtgacgaaaccactccccagggggactctgctgatgagaagtctaagaaggggtggggggaggacgagccagatgaggagtctcacacaccattaccgcctccaatgaagatctttgacaacgatcccacccaggatgagatgagctcatccctcctagccgcccgtcaggcttccaccgaggtgcccacggctgcagacctggttaatgccatcgaaaaactggtgaaaaataagctctccctggagggcagttcctaccggggctctctaaaggaccccgccggctgtctgaacgaaggcatggcgccacccacgccccctaagaatcccgaagaggagcaaaaagctaaagccctccgtggaaggatgttcgtgctcaacgagctggtccagaccgagaaagactatgtgaaggacctcggcattgttgttgaagggtttatgaaacgcatagaggagaaaggtgtgcccgaagacatgcggggcaaagataagattgtgttcggtaatattcaccagatatacgactggcataaagatttttttctcgctgagctggaaaagtgcattcaggagcaggatcgtcttgctcaactattcatcaagcacgaacggaagctccacatttacgtgtggtattgccagaacaaaccgagatcagaatatatcgttgcagaatacgacgcttatttcgaagaagtgaaacaagagattaatcagcgccttactctctcggatttcttaatcaagcctattcagcgcataaccaagtatcaattactgctcaaagatttcctcaggtactccgaaaaggcaggactcgaatgttcagatatcgaaaaagccgttgagctgatgtgtttggtccccaaaagatgtaacgacatgatgaatctaggccgtctccaggggttcgaaggaacactcactgctcaggggaagctattgcagcaggacacattctatgtaattgaattagatgcaggcatgcaatcccggaccaaagagagacgcgtgttcctttttgaacagattgtgatcttctcagaattactgcgcaagggcagtctaacaccaggctatatgtttaaacgatccattaagatgaactatctcgttctggaagagaatgtagacaatgacccctgcaagttcgccttgatgaacagggaaacctctgagagggtggttctgcaagcagctaatgcagatatacagcaggcttgggtgcaagacattaaccaggttctggagactcagcgcgattttctgaatgcgctgcaaagccctattgagtaccaaagaaaggaacggtcaacagccgttatgcgaagccaaccggcccggctgccacaagcctctcctcggccatattcaagtgtcccagccggatccgagaagccaccaaaagggagctcctataatcctcccttaccccctttgaagatatcaactagcaatggaagtcccggatttgaataccatcagcccggggataagttcgaggcctcaaagcaaaacgacctgggcggatgtaatggaaccagttcaatggccgtgatcaaggactattacgcgttgaaagaaaatgaaatctgtgtatctcagggcgaggtggtccaagttctcgcggtaaatcaacagaatatgtgcttggtgtaccaaccggcctcggaccatagcccagccgccgagggctgggtgcctggctcaattctggctccactaacaaaggcgacagcagccgagagcagtgatggcagcataaagaaatcttgcagctggcacacattgcgcatgcgcaagcgggccgaagtggagaacacaggaaaaaatgaagccacaggaccaaggaagcccaaggatatcttgggaaacaaagtttcagttaaggagaccaacagttccgaggagtccgagtgtgacgatctagacccaaacacaagcatggaaatacttaatcccaatttcatccaggaggtggcacccgaatttctggtgcctcttgtggatgtcacctgcctgttgggcgacacagtgatcttgcagtgcaaggtgtgtggtagaccaaaacccactatcacctggaagggccctgatcagaatatactcgataccgataacagctccgctacctacactgttagcagttgcgacagcggcgaaatcaccctgaagatttgtaacctcatgcctcaggacagcggaatctatacctgtatcgccacaaacgaccatgggacaacaagcacgagcgcaacggtcaaagtgcagggcgtacccgctgcaccaaatcggccaattgcacaggagagatcctgcaccagtgtaattcttcggtggctgccaccatcttccactggcaactgcacgatttcaggctacaccgtcgaatatcgggaggagggctcacaaatctggcagcagagtgtggcttcaaccctggacacatacttggtgatcgaggatctgagccctggctgcccctatcagtttcgggtatccgcctccaatccgtggggtatatctctgccttccgagccatcagaattcgtccggttacccgaatatgatgccgccgccgatggtgctacaatctcttggaaggagaactttgacagcgcttacacagaattgaacgaaataggcagggggaggttctcaattgtgaagaaatgcattcataaggccacgaggaaagatgttgccgttaaattcgtatcaaaaaagatgaaaaaaaaagagcaggcagcccatgaggccgccctccttcagcatctgcagcatccccaatatattacactgcatgacacatacgaaagcccaaccagttatatcttgattctggaactaatggatgatggccggttgctggactatctcatgaatcatgatgagcttatggaggagaaagtcgccttctacatcagagacattatggaggccctacagtacctacacaattgtcgggttgcacacctggacataaagccagaaaatctactcatcgacctgcgcattcctgtaccacgcgtcaaattaattgacctggaggatgccgtacaaatctctggccactttcatattcaccatcttctgggcaatcccgaatttgctgcgcccgaggtgatccaaggaatccctgtttcccttggtacagatatctggtctattggagtccttacctacgttatgctatctggcgtgtcacctttcctggacgaaagcaaagaggaaacatgtatcaacgtgtgcagagtggacttctctttcccacacgagtatttttgcggagtgagcaatgcagctagggattttattaacgttattttgcaagaagacttccgccgcagaccaactgcagcaacatgtctgcagcacccctggttgcagcctcataatggcagctattccaagatacctctggacacgagcagattagcatgtttcatcgagcggaggaaacaccaaaacgacgttcggccaattccgaatgtgaagtcatatatcgtaaaccgagttaatcagggtacttag

SEQ ID NO: 121323 - DNA, 8961 bp, synthetic construct
  misc_feature 1..8961: note = Description of Artificial Sequence: Synthetic coding sequence
  source 1..8961: mol_type = other DNA
atgaccgaccggttctgggaccagtggtacctgtggtatcttaggttgctccggctcctcgatcgcggcagtttccggaatgacgggcttaaggcctctgatgtcttacctatcttgaaagagaaagtggcattcgtatccggagggagggataagagaggcggccccatccttacctttcctgcgcgatctaaccatgaccggatccggcaagaagatctcaggaaactggtgacctacctagcctcagtgccgtccgaagacgtgtgcaagcggggcttcaccgtgatcattgacatgagggggtccaagtgggatctcatcaaaccactcttaaagacgctgcaggaggctttccctgcagagatccacgttgccctcattattaagcccgataacttctggcagaaacaaaaaaccaatttcgggagctccaagtttatattcgagacttctatggtgagtgtggagggccttactaaattagtggacccatcacaactgactgaggagttcgatgggtccttagattataaccatgaggagtggatcgaactgcgcctctctttagaggagttctttaatagcgctgtacatctgctgagtcggttggaagatctccaggaaatgttggcccgcaaggagtttcccgtggacgtcgaggggagtcggaggttgatcgatgaacatacacaactaaagaaaaaggtattgaaggcgccggtggaagagctggatcgagagggtcagcgcctgctccagtgtatcaggtgctccgacggtttctctggacgcaattgtatcccaggctctgccgacttccagagcctagtccccaagataacatcattgctggataagctgcactccacccggcagcatctccaccagatgtggcacgtacgcaagctgaaactggaccagtgcttccagctgcggctgtttgagcaggacgctgaaaagatgtttgactggataagccacaataaggagctcttcctgcaatcacataccgagatcggggtgtcctaccagtatgctcttgacctacagacacaacacaatcactttgcgatgaattccatgaacgcgtatgtgaacataaaccgaattatgtctgtagcctcccgccttagtgaagcgggccactatgcgagtcaacagataaagcaaatctccacccaactcgatcaggaatggaagagctttgccgctgccttagacgagaggagcacaatcttggcgatgagcgctgttttccaccagaaagcagaacaatttctctcaggtgtagatgcttggtgtaagatgtgttctgagggcggtctcccctccgaaatgcaggatctcgagttggctattcatcaccatcaaaccctctacgagcaagtcacccaggcctatacggaagtctcacaggacggcaaggccttgttagacgtcctccagcgccctttaagcccaggaaatagcgaatctctcacagctacagccaattactcaaaagcagtccaccaggtgctcgatgtggtgcacgaggtcctgcatcaccagaggcgcctcgaaagtatctggcagcaccggaaggtgagattacatcagagacttcaattgtgcgtcttccagcaggatgtgcaacaggtcttagactggatcgaaaatcacggcgaggcattcctttcaaaacacaccggcgttggcaagagtctgcaccgcgcgcgcgctctacagaaaagacacgacgattttgaagaggtggcccaaaacacctataccaacgcagacaaactgttggaagcagcagaacaactggcccagacaggggagtgcgatcctgaagaaatttacaaggccgcccgtcacctcgaagtgcggattcaggacttcgtgaggagggtggaacagcgcaaattgctcctcgacatgtccgtgagctttcatacacacaccaaagagctgtggacctggatggaagatctgcaaaaggagatgttggaggatgtctgcgccgatagcgtggacgcagtccaagagctcataaaacagttccaacagcaacagacggctactctcgacgcaacactgaacgtcatcaaagagggcgaggaccttatccagcaactccgctcggcaccacctagcctgggcgagcccagcgaagctagggattccgccgttagcaataacaaaactcctcattcctcttcaatcagccacatagagtccgtccttcagcagttggatgacgctcaggtccagatggaagagttgtttcatgagcgcaaaatcaaattggatatatttctgcaactgcgaatcttcgaacagtatacaatagaggtgaccgccgagttggatgcttggaacgaagatcttctgagacagatgaatgattttaataccgaggacctcacgttagccgaacaacggctccaaagacacactgaacggaaactggctatgaataacatgacttttgaagttatacagcaggggcaagacttacaccaatacatcacagaagtgcaggcatccgggattgaactgatttgcgaaaaagatatcgatctggctgcacaggttcaggagctgctggaattcctgcatgaaaagcagcacgagctggagctgaacgccgaacagacacacaagagattggaacagtgcttgcagctgcgccacttacaggccgaggtcaagcaggttctcggctggattcgtaacggggagtcgatgctcaatgcatcgctggtaaacgcctcctcattgtcagaagcagaacaattgcagcgtgaacacgagcagttccagttggccattgaaagcttgttccatgccacgtcgctccagaagacccaccagtcagctctgcaggtgcagcagaaagcggaagtcctgctccaagctggccattacgatgctgatgccattagagaatgtgctgagaaagtagcactccattggcagcagctaatgcttaaaatggaggacaggctcaagctggttaatgcatccgttgcattttataagacctccgagcaggtttgctctgtcctggagtccctggagcaagaatataggcgtgacgaggattggtgcggcggcagggataagcttggccctgcagccgagatcgatcatgtgattccactgattagcaagcacctcgaacagaaggaggcgttcctgaaagcttgcaccttggcgcggagaaatgctgaagttttcctgaaatatatccatcgcaataatgtgagtatgccctccgtcgccagtcacacccgtgggcccgaacagcaggtcaaagctatactgtcagagctgctgcagcgcgagaacagagtgctccacttttggactctgaaaaaaaggagactggaccagtgtcaacagtacgtagtgtttgagcgctccgccaagcaggccttggattggattcaggaaacaggagagttttatctgtcaacccatacttccacaggcgagaccacggaagaaacacaagagctgctgaaggagtatggcgaattcagggtgcctgccaaacagacaaaagagaaagtaaagcttctcatccaactcgccgatagcttcgtcgagaagggccacattcacgctactgagatcaggaaatgggtaacaacagtggacaaacactaccgggatttttctcttagaatgggcaagtatagatattccctggagaaagcactgggtgtaaatactgaagacaataaggatcttgagttggatataattcccgctagtctcagtgacagggaggtgaaactgagagacgccaaccacgaggtcaatgaggagaaacggaagagcgccagaaaaaaagagttcattatggccgagctgcttcaaactgagaaggcttacgtgagggacttacacgagtgcctggagacatatttgtgggagatgaccagtggagttgaggaaattcctcctggcatcctcaacaaagagcacatcatatttggaaacattcaggagatatacgattttcataacaacatcttcctgaaggagctggaaaagtacgagcagttaccggaagacgtcggccactgtttcgtcacttgggcggataagtttcagatgtatgtcacatactgtaaaaataagccagattcgaatcagctaattctcgaacatgcgggcactttcttcgatgagattcagcagcgccatggattggccaattcaatctccagttacctgataaaaccggtgcaacgaatcactaagtatcaacttcttctgaaggaactgttgacatgttgtgaagaaggtaagggggagctgaaagacgggctggaggtcatgctcagtgtacctaaaaaagcgaatgacgccatgcacgttagtatgctggaaggatttgatgagaatctcgatgtccagggggaactgattttgcaggacgcatttcaagtatgggatcccaaaagcctgatcagaaagggccgggagaggcacctttttctgttcgagatctctctggtgttcagtaaggaaattaaggactcctccggccacacaaagtacgtgtacaaaaataagctcctcacgagtgagctcggagtgacagagcatgttgaaggagacccatgtaagttcgcactttggagcggtagaacccctagctccgacaataaaactgtcctgaaggcctctaatatcgaaaccaaacaggagtggatcaaaaatatccgcgaggtcatccaggagaggataatccacctgaagggtgccctgaaggagccgctgcaactccctaaaactcctgccaagcaacggaataactctaaacgggacggggtcgaggacatagatagtcagggtgatggatccagtcagccagatacaattagcatagcttccaggacatctcaaaacacagtggacagtgataagctgtcagggggctgcgagttgaccgtcgtcctgcaggatttctccgctggacacagcagcgagctcaccatccaggtaggccaaaccgtggagctactggagagacccagcgagcgccccggctggtgcttagttagaacaactgagagaagtcctcctcttgaaggactcgttcccagttctgcattgtgcataagccactcccgaagttccgtggagatggattgcttttttcccctcgtaaaagacgcctactctcatagcagttctgaaaacggcggaaaatctgagtctgtcgccaacctccaggcacagccttcgctgaatagcattcactcatccccaggcccaaagagaagtacaaacacactcaaaaaatggctaacaagtcctgtgcggagacttaactccggtaaggctgacggtaacatcaagaagcagaagaaagttcgggacggccgcaagagctttgatctgggcagtccaaagcccggagacgagaccaccccccagggggatagcgcagacgagaagagtaaaaagggatggggggaagatgagcccgatgaggaaagtcatacccccctcccaccccctatgaagatttttgacaacgatcccacccaggatgaaatgagttccagtctgctagctgctagacaggccagtactgaggtccccacagccgctgatctcgtcaatgctatcgagaaactggtaaagaacaagctgagtctggagggctcaagctatagggggagcctgaaagaccccgcaggctgtcttaacgagggaatggccccgccaacaccgcctaagaatccagaggaggagcagaaagccaaggctttgcgagggagaatgttcgttctgaacgagctggtccagacggaaaaagattacgtgaaggatctcgggattgtagtggagggttttatgaaaagaattgaagagaaaggagttcctgaagatatgaggggaaaagacaaaatcgtgttcggtaatattcatcagatctacgactggcataaagatttcttcctcgctgaactggagaagtgcatacaggagcaggaccgcctagcacagctttttattaaacacgaacgcaaactgcacatctacgtttggtactgtcagaataaaccccgttccgagtacattgtcgcagagtacgatgcgtacttcgaagaagttaaacaggagatcaatcagaggctcacactgagtgacttcctcattaagcctatccagaggatcacgaagtaccagctgctgctgaaagactttctccgctactcagagaaggccggcctcgaatgtagcgacattgaaaaggccgtcgagttaatgtgcctggtgccaaagcgctgcaatgatatgatgaatctggggagattgcaaggtttcgagggcactctcacagctcagggcaagctgctgcagcaggatacattttacgtgatcgagcttgacgcaggtatgcaaagccggactaaagagcggcgcgtgtttttatttgagcagatcgtcatctttagcgagctgctccggaaggggtctctgactccaggctacatgttcaagagatctatcaagatgaattatctggtgctagaagaaaacgtggataacgacccatgtaagttcgctctgatgaatcgcgagacgagtgagcgtgttgtcctgcaggcagctaatgcggatatccaacaggcctgggtgcaggacataaaccaggtcttggaaacgcaacgtgacttcctgaacgcccttcagtccccaatcgagtatcagcgaaaggagcggtccaccgccgtaatgaggtcccagcctgcccgtctaccacaggcttcacctcgaccatattcctcagtgcccgccggttcggaaaaacctcccaagggcagctcgtacaacccacccctgccaccactgaagatctctactagcaatggaagccctgggtttgagtatcaccagccaggagacaaatttgaagcttccaagcagaatgatctgggtggttgtaacggcacaagttcgatggccgttatcaaagactattatgctttgaaggaaaatgagatttgcgttagtcaaggggaggtggtccaggtgctggcagttaaccagcagaatatgtgtctggtttaccaaccggcaagcgatcactcccccgccgcggagggctgggtcccaggatccatcttggcccccttgactaaggccacagcagctgagagttccgatggttcaatcaaaaaaagttgttcgtggcacacccttagaatgcgtaaaagggccgaggtggagaacacaggcaagaatgaagccacaggcccccgcaagcctaaagacattttggggaacaaagtaagtgtgaaggagactaactcatccgaggaatcagagtgcgatgatctagatcctaacactagcatggaaatccttaatcccaattttatacaagaagtagcccccgaatttctcgtgcccctagttgacgtgacctgtctgctgggagatactgtgattcttcaatgcaaagtgtgcgggcggcctaagcccacaatcacctggaaaggcccagatcagaatatcctggacactgacaatagttctgccacatatactgtgtcaagttgtgattccggagagattacactcaagatttgcaatctcatgccacaggactctgggatttacacttgtatcgctactaacgaccacggcactacctcgacatccgctactgtcaaggtccagggagttcccgccgcccccaatagacccatcgcccaggagaggtcttgtaccagcgtgatcctcagatggcttcctccgtctagcacaggtaattgcaccatcagcgggtatacggttgagtaccgggaagagggctcccagatctggcaacagtcggtggcttcaactttggacacctatttggtgatcgaagatctttcaccgggttgcccataccagttccgcgtttcagcctcaaacccctggggaatctcactcccatcagagcctagcgagttcgtgaggctgcccgagtatgatgctgcagcagacggagctactatctcatggaaagagaattttgacagtgcttacaccgagctgaacgaaattgggcgcgggcgcttcagtattgttaagaaatgcatacataaagctacgagaaaggatgtagcagtgaaattcgtgtccaaaaagatgaagaaaaaagagcaggccgcccacgaagcagcactgttgcagcatttgcagcatccccaatacatcaccctgcacgacacttacgaatccccgacctcatacattctcatactggaacttatggatgatgggagactccttgactatcttatgaaccacgatgagctgatggaagagaaggtggccttttatatacgcgacatcatggaggcgctgcaatatctccacaactgcagagtcgcccacctcgacattaagcctgagaatctgctgatagacctccgcatccctgtgccacgggtcaaacttatcgatctcgaggacgccgtgcaaatcagtggtcattttcacatacaccacttgcttgggaatcccgagtttgcagcccccgaagtgatccaggggattccagtgtccctgggcaccgatatatggtcaatcggcgtgttgacatacgtgatgctctcaggcgtgtcacccttcttggatgagagtaaagaagagacatgcataaacgtttgtagggtggactttagtttccctcacgaatatttttgcggtgtgtcaaacgctgcccgggactttatcaacgtgattctgcaggaggactttagaaggaggcctaccgctgctacctgcctgcaacacccttggctgcagccgcacaatggatcctacagcaagatccccctggatactagccgcctggcctgtttcatcgagcgacgaaaacaccagaacgacgttcgtccaatccccaatgtaaagagttatattgtgaaccgggtaaaccaagggacctag

SEQ ID NO: 121324 - DNA, 3774 bp, synthetic construct
  misc_feature 1..3774: note = Description of Artificial Sequence: Synthetic coding sequence
  source 1..3774: mol_type = other DNA
atgaagggtggagatcgtgcttacaccagaggaccttcccttggttggttgttcgctaagtgttgttgctgtttcccctgtcgcgatgcctactcacacagcagttctgagaacggggggaagtccgagagcgtggccaacttacaggcccagccttcactgaatagcatccatagctctcctggacctaaaaggtccactaatactctcaaaaaatggctaaccagccctgttaggagactaaactcaggaaaggcagacggtaacattaagaaacagaagaaggtccgtgacggccggaaaagcttcgacctgggctccccaaaaccaggggacgagacaaccccacaaggggactcagcggatgagaaatccaaaaagggctggggagaagacgagccggacgaggaaagccacacacctctgccacctcctatgaagattttcgacaacgatcctacacaagatgaaatgtccctggagggatcctcctatagggggagcctcaaagacccagctggatgtctgaatgagggcatggcacctcctactccacccaagaatcctgaagaggaacaaaaagcaaaggccttaagggggcgcatgttcgtattgaacgaattggtacaaaccgagaaagattatgttaaagatctgggcatcgtcgtggagggctttatgaaacgcatcgaggaaaagggggtgcctgaggatatgcgcggaaaagacaaaatagtcttcggtaacattcaccagatctatgattggcataaggatttttttttagctgaactggaaaagtgcatccaggagcaagaccgtcttgcccagttattcattaagcatgagaggaaactccatatatacgtttggtactgtcaaaataaaccccggagcgaatacatagtggctgagtatgatgcatattttgaggaagtgaaacaggaaatcaatcagagacttaccctgtctgatttcctgatcaagccgatccagagaattactaaatatcagttgctcctgaaagattttctgagatacagcgagaaggccgggcttgaatgttcagacatcgagaaggcggtcgagctaatgtgcctcgtgccaaaaagatgtaatgacatgatgaatctcggaaggctgcagggattcgagggtaccctcaccgcacaagggaagttgctgcagcaggatacgttctacgtgatagaattggatgcaggcatgcaatctcgcacaaaagaaaggcgggttttccttttcgagcagattgttatttttagcgagctgctaaggaaggggtcattgaccccgggatacatgttcaagaggtccataaaaatgaattacttagtgttggaagagaatgtcgataatgatccgtgcaagtttgctctgatgaaccgcgaaacatcggaacgggtcgttttacaagctgcaaacgccgatatccagcaagcctgggtgcaggatataaatcaggtgctggagacacagagggattttctcaatgccctacaaagccctatagaataccagcggaaggaacggtcaacagccgtgatgagaagccagcctgcacgactacctcaggcctctccacggccctacagctctgtccccgcaggttctgaaaagcctccgaaagggtcctcctacaatcctcccctgccccccctgaagatcagcacctccaacggaagccccgggtttgagtatcaccagcctggcgataagttcgaggcctcaaaacagaacgatctgggcgggtgcaatggaacatcctctatggcagtaataaaggactattatgctttgaaggaaaatgaaatatgtgtctcccagggtgaagtggtgcaagttctggccgtgaaccaacagaatatgtgccttgtgtaccagcctgcctctgatcattccccagcagcggaagggtgggtccccgggtccatattagcgcctttaacgaaagcaactgcagccgaatcgtctgacggttctatcaagaaaagctgtagttggcataccctcaggatgaggaagcgggccgaggttgagaacaccgggaagaatgaggccaccggaccgcggaagcctaaggatatcctgggcaataaagtcagtgtgaaagagactaactcatctgaagagtcagaatgcgacgatttggatcctaacacgagcatggagattctgaacccaaactttatccaggaagtggctcctgaatttttggtgccactagtggacgtgacctgtttgttaggtgacacagtgattcttcagtgtaaagtgtgcggcaggccaaaacctacaattacttggaagggtccggatcagaacatcctggacaccgacaactcgagcgccacctacaccgtgtccagttgtgatagcggtgaaattacactgaaaatctgcaatcttatgccgcaggacagtggtatttatacttgcatagctaccaacgaccatggcacaaccagtacctcggccactgtgaaggtgcagggggtgccggctgcgccaaaccgccccatcgcccaagaacgttcatgtacttccgtcatcctccgctggctgccgcctagctctaccggaaactgtaccatctccggctacactgtcgagtacagggaggagggctcacaaatatggcagcagtctgtggcctcaactttagatacctatctcgtgatcgaagatttaagtcctggttgtccttaccagtttagggtgtccgcctcaaatccttgggggatctcactcccttctgaacctagtgagtttgtgagactgcccgaatacgacgcagccgctgatggggcgaccatttcctggaaggagaacttcgatagtgcctacaccgaacttaacgagatcggccgcggccgcttcagcattgtgaaaaagtgcattcataaggcaacccggaaagacgtggctgtgaaattcgtttctaagaagatgaaaaaaaaggagcaggcggcgcacgaagcagctctactgcagcatctacagcatccccagtacatcaccctccacgacacctacgagagcccaacttcttatattctgattttagagttgatggatgacggacggctgctggattaccttatgaatcacgatgaactcatggaggaaaaagtcgcgttctacatccgggacataatggaggcactccagtacctgcacaactgccgcgtcgcccatctggacatcaaaccagaaaatctgcttatagatctcagaatacctgtgcctcgagtgaaactgatcgatttggaagatgctgtgcaaatatccggccatttccacattcaccaccttctgggcaacccagagttcgcagcacccgaggtaattcaaggtattcctgtgagcctaggcacagacatttggagtattggggtgctgacgtatgtgatgcttagtggggtgagtccttttctggacgagtccaaggaagaaacttgtattaacgtgtgtagggttgatttcagctttccccatgagtatttttgcggtgtgagcaatgctgcccgggactttattaatgtgatcctgcaggaagatttccgccggaggcccactgcagcaacttgtctacaacatccatggttacagcctcacaacgggagctactctaagatacctctagatacatccaggctggcctgctttattgagcggaggaaacaccagaacgatgtacggccaatccccaacgtgaaaagttacattgtaaatcgggtcaatcaaggcacctag

SEQ ID NO: 121325 - DNA, 4965 bp, synthetic construct
  misc_feature 1..4965: note = Description of Artificial Sequence: Synthetic coding sequence
  source 1..4965: mol_type = other DNA
atgaccgaccgtttttgggaccagtggtatctctggtacctgcgcttactgcgactgctggatcgcgggagttttaggaacgacggcctgaaggccagtgacgtgctgccaattctcaaggagaaggtggcctttgtctcaggcgggcgggacaaacggggtggacctattcttacgtttcctgcccgaagcaaccacgataggatcagacaggaagatctcagaaagctggtgacttacctggctagtgtcccatccgaggacgtgtgtaaacgggggttcacagtgattatcgacatgcgcggctctaagtgggatctcataaaacctcttcttaaaacacttcaggaagcgtttcccgccgagattcatgttgcactgattatcaaaccagacaatttttggcaaaagcaaaaaacaaatttcggtagttccaaattcatcttcgaaacgtctatggtgtcagtggaaggattgaccaaactggtggatccttcccaactcaccgaagagtttgacgggagcctggattataaccacgaagagtggatcgaactgcggcttagcctggaagagttctttaacagcgcagttcacctgctctctaggcttgaagatctacaagagatgctggcaagaaaggaattcccagttgacgtagagggctctcggaggctgattgacgagcacacacagctcaaaaagaaggttttgaaggctcctgtggaagaattagatagagaaggccaacggcttctacaatgcatacgctgcagcgatggattcagcggtcgaaactgtatacctggatccgctgatttccagtctctggtgcccaaaattacctccttactggataaactgcattctacccgccaacacctccatcagatgtggcacgtccgaaagctgaagctggaccagtgttttcagctgcgactgttcgagcaggatgccgagaaaatgtttgattggattagccacaataaggagttgttcctgcagtcacacactgagattggggttagctatcagtacgccctcgacctgcagacccagcataatcatttcgccatgaactcaatgaacgcttatgttaatattaaccgcattatgagcgtggcctctcggttgagcgaggccggccactacgcatcccaacaaatcaagcaaatcagcacccagctggaccaagagtggaagagttttgccgcggccctagatgagcgctcaactattcttgccatgtccgcagtttttcatcagaaagctgaacagttcctgagcggcgtggacgcctggtgcaaaatgtgctctgagggcggcctccccagcgaaatgcaggaccttgaactggctatccaccaccaccagaccctctatgagcaggttacccaggcttataccgaggtgtctcaagacggcaaagcgctgttggacgtcctacagcggccactgtccccgggtaattcagaaagcctgaccgccactgccaactacagtaaagcagtgcatcaagtcctggacgtagtacacgaagtgctgcaccatcagagacggctagagagtatctggcagcacaggaaggtacgactgcaccagcggctccagctgtgtgttttccagcaggatgttcagcaggttctggattggattgagaaccatggagaagcatttctcagtaagcataccggggtcggaaaatcattgcatagagccagggccctccaaaaaagacatgatgattttgaggaggtagcacagaatacgtatacaaacgctgataagctcctagaagcggcagaacagctcgctcagacgggcgagtgtgatccagaagagatctataaggccgctcggcatctcgaagtgcgcatccaagacttcgtacgaagggtggagcagaggaaattattactggatatgagcgtttcatttcatacgcacacgaaagagctctggacctggatggaggatctgcaaaaggagatgctcgaggacgtctgtgcggatagcgtcgatgcagtgcaggaacttattaaacagttccagcaacagcagaccgccacactggacgccactcttaatgtcattaaggaaggcgaggatctcatccagcaattacgctccgctcctccatcactgggagaaccctcggaggctcgggacagcgctgtctccaacaacaagacgccccatagctcaagtatttcccatatagaatccgttttgcagcaattggacgatgcccaggtccaaatggaagagctcttccacgaaagaaagatcaaactggatatcttcctgcagctgcgcatttttgagcagtacacgattgaggtaactgcagagcttgatgcttggaatgaagacctgcttcgacagatgaatgacttcaacactgaggatctaactcttgccgagcagaggctgcagagacacaccgagcgcaagcttgccatgaacaacatgacatttgaggtgatccagcaggggcaggacctccatcagtatatcaccgaagtgcaggcttcgggtatagaacttatttgtgaaaaagacattgatttggcggctcaggtgcaggagctcctggagttccttcatgaaaagcagcacgagctagaactgaatgcagagcaaactcacaagcgtctggagcagtgcctccagctgcggcatcttcaagctgaagtcaaacaagtcctgggttggattcgcaatggggaatcaatgctcaatgccagcctggtgaatgcctctagtctgagtgaagctgagcagctgcagcgggaacacgaacagtttcagcttgctatcgagaagactcatcagtctgctctccaagtccagcagaaggcagaagtgctgctgcaggcgggccattacgacgctgatgcaattcgggagtgcgccgagaaagttgctttacactggcaacagctcatgctgaaaatggaggataggctcaaactggtaaatgcttctgttgcattttataagacttctgagcaggtgtgtagtgtgttggaatcactggaacaggagtatagacgtgacgaagactggtgcggcggccgcgacaagctggggcctgctgcggagattgatcacgtcataccactaataagcaaacaccttgaacaaaaggaagccttcctgaaagcctgtacactggcaaggcgtaacgcagaggtctttctgaaatacatccacaggaacaatgtgtccatgccaagcgtggcatcccacacacgcggaccggaacaacaggtaaaagccatcctgagtgagctgctccaaagagaaaatagggtactgcacttttggacgctgaaaaaacgaaggttagatcagtgccagcaatacgtggtgtttgagcgctccgccaaacaggctctcgactggattcaggaaactggggagttttacctcagcacacacacttctaccggagagactacagaagaaactcaagagctcctcaaggagtacggagagtttcgcgtgcctgccaagcagactaaagaaaaagttaagttgctgatccagctggcagattcatttgtcgagaagggtcatatccatgctacagaaatcaggaaatgggtgacgaccgttgataagcattacagagatttttctctcagaatgggaaaatacagatactcattggagaaagctcttggagtgaacactgaagacaacaaggacttggagctggatatcattcccgcctccctgtctgaccgtgaggtaaagcttagggatgctaatcatgaagtcaatgaagagaaacggaagagcgcaagaaagaaagagtttatcatggctgagctgctgcagactgagaaagcctacgttcgagatttacatgaatgccttgagacttatctttgggagatgaccagcggcgtcgaggagatacccccggggatcctcaataaagagcatattatctttggaaacatccaggaaatatatgatttccacaacaatatcttcctgaaggaactggaaaagtatgagcagctgcccgaggacgtgggacattgttttgtgacatgggccgacaagtttcagatgtacgtcacatactgcaagaacaagccggattcaaaccaattaatccttgagcatgcaggcacattttttgatgaaatccagcagcggcatgggctggctaacagcatcagctcctatctcataaagccagttcagagaataaccaaatatcaactcctgttgaaagaacttctgacatgttgtgaagagggtaagggcgagctgaaagacgggctggaggtgatgctcagcgttccgaagaaagccaatgatgctatgcacgtgtccatgttagaggggtttgacgagaatctggatgtgcagggggaactcatcctccaggacgcatttcaagtatgggatccgaaaagcctcattcggaagggccgggagcggcacctgttcctcttcgaaatctcacttgtgttttccaaggagataaaggactcctccgggcataccaagtacgtgtataaaaacaaattactaacttccgaactcggagtgacggaacacgtcgaaggggacccgtgtaaatttgctctctggagcggaaggactccttcgtcggacaataaaacagtattgaaagccagtaacatcgaaactaaacaggaatggattaagaacatcagagaggtgatacaggaaagaattattcacttgaaaggggcgttgaaagagcccctgcaactgcctaaaaccccagccaagcagaggaataattctaaacgcgacggagtagaggatattgattcccagggtgatggttcatcccagccagataccatttccatcgcgtcgcggacaagccagaataccgtcgatagcgacaaagacggaaacctggtacccaggtggcatctggggcccggcgacccgttctcaacttacgtttag

SEQ ID NO: 121326 - DNA, 789 bp, synthetic construct
  misc_feature 1..789: note = Description of Artificial Sequence: Synthetic coding sequence
  source 1..789: mol_type = other DNA
atgtggtttctcgtgctctgtctcgccctgagtctggggggcacaggagcagccccccctattcagtccagaatagtaggtggatgggaatgcgagcagcactcacagccatggcaggcagctctgtatcacttctccacctttcaatgcgggggaattttagtacaccgccaatgggttctcactgccgctcactgtatcagtgataactaccaattgtggctcggccgtcacaatctttttgatgatgaaaatactgcgcagttcgtccacgtatctgaatcttttccccacccaggctttaacatgagcctgttagagaatcatacccggcaggccgatgaagactatagccatgatcttatgctgctgaggctcacagagccggccgatacaatcaccgatgccgtcaaggtggtggagctgcccaccgaggagccggaagtgggcagcacctgcttggcctccggttggggatccattgagcccgagaattttagttttcctgacgatctacagtgcgtggatttgaaaattttaccgaacgatgagtgcaaaaaagcccatgttcagaaagttactgacttcatgctctgcgtgggccacctggaaggaggtaaagatacctgtgtaggggatagcggcggtcctctgatgtgcgatggcgtcctccaaggggtaacatcttggggttacgtgccctgcggaaccccaaataagccctctgttgccgtgcgggtcttgtcctacgtaaaatggattgaagatacaattgccgagaacagttag

SEQ ID NO: 121327 - DNA, 483 bp, synthetic construct
  misc_feature 1..483: note = Description of Artificial Sequence: Synthetic coding sequence
  source 1..483: mol_type = other DNA
atgagcctccttgaaaaccatacaaggcaggctgatgaggactattcccacgacctcatgctgcttaggctgaccgagcctgccgacaccatcaccgacgccgtgaaggtcgtggagcttcccacagaggaacccgaggtgggctccacctgcttggcatcggggtggggctctatcgagcctgaaaacttttcgttccccgacgatcttcagtgcgtggacctcaaaattctgccgaatgatgagtgtaaaaaagcccatgtgcagaaggtgactgattttatgctgtgtgtgggtcatctggagggcggaaaggacacctgtgtgggggactctgggggccccctgatgtgtgatggggtcctgcaaggtgtgacaagttggggatacgtcccctgcggaactcctaataagccctccgtggccgtgcgggtgctgagctacgtgaaatggatagaggatacaattgctgaaaactcctag

SEQ ID NO: 121328 - DNA, 1917 bp, synthetic construct
  misc_feature 1..1917: note = Description of Artificial Sequence: Synthetic coding sequence
  source 1..1917: mol_type = other DNA
atgattctgtttaaacaagccacttactttatatcattgttcgctactgtctcctgcgggtgcctgacgcaattgtacgagaacgcctttttcagggggggggatgtggcgtctatgtatacgcctaatgcccagtactgtcagatgagatgcacgtttcaccctaggtgtctccttttttctttcttacctgcttcaagtatcaacgacatggagaagcgcttcggatgttttcttaaggatagcgtaacagggacccttccaaaggtgcatcgaaccggtgccgtgtcaggccattccctcaagcaatgcggccaccaaatttcagcctgtcacagggatatatataagggagtcgacatgcgcggcgtgaattttaacgtgtctaaggtgagctctgttgaagaatgccagaaacgctgcacctccaacatcagatgccagttttttagctacgccacacagacattccacaaggcagaataccggaataattgtctcttgaaatattcaccaggggggactcccactgccattaaggtcttgagtaacgtcgagtcagggttttcccttaaaccatgtgccctgtctgagataggatgtcatatgaacatctttcagcaccttgccttctcagacgtcgatgttgccagagtgcttacacccgatgccttcgtgtgccgcacaatttgtacttaccaccctaattgtctgttcttcacattctataccaatgtctggaaaatagagtcccagagaaatgtgtgcctgctaaaaacaagtgagtctggcacaccatcttccagtacccctcaagagaatacgataagtggctactcactcttaacttgtaagcggactctgccagagccctgccacagtaaaatctaccccggagtggacttcggtggggaggaacttaatgtcacattcgtcaagggagtcaacgtgtgtcaggaaacctgcacaaagatgattcggtgccaatttttcacctattccctgttacctgaagactgtaaggaggaaaagtgtaagtgttttttgcgcctctctatggacggctcacccacccgtattgcctacgggacgcaagggagctcagggtactctctgcgcctgtgcaacacaggggataatagcgtgtgtacaactaaaacttctactcggatcgtcggcggcacgaactcttcatggggcgagtggccatggcaggtttccctgcaggtgaagttgacggctcagagacatttgtgcggaggatctttgattggacatcagtgggtgctcactgctgcgcattgttttgatggattgccccttcaggatgtgtggcgaatttactcaggcatactgaacctctccgatattacgaaagatactccgttttcacagattaaggagattatcatccaccaaaattacaaagtgtccgagggcaaccacgacattgctctaattaagctgcaggccccgctgaactacacagaatttcagaaacccatctgcctcccaagcaagggtgacacctctactatttataccaattgttgggtgacaggctggggcttttccaaagagaagggggagatacagaatatcctgcaaaaagttaacatcccactcgttactaacgaggagtgccagaaaaggtatcaggactacaagattacccagaggatggtctgcgcgggctataaagagggtgggaaagacgcgtgtaaaggtgattccggcggtccactggtctgcaaacacaacggcatgtggcggctggtcggaatcaccagttggggcgagggctgcgccagaagggagcagcctggcgtgtacaccaaagtggcagaatacatggactggatcttggagaagacccagtcctcagatggaaaagcccagatgcagtccccggcctag

SEQ ID NO: 121329 - DNA, 1545 bp, synthetic construct
  misc_feature 1..1545: note = Description of Artificial Sequence: Synthetic coding sequence
  source 1..1545: mol_type = other DNA
atgtacacccccaatgcccagtattgccagatgcgctgtacgtttcatcctcgctgtcttttgtttagctttctgccagccagtagtatcaatgacatggaaaaacgattcggatgttttctgaaggatagcgtaaccgggaccttgcccaaagtgcacagaactggcgccgtgtccggccattctcttaagcagtgtggacatcagattagtgcctgccatcgcgatatctataagggcgtagacatgagaggtgtgaacttcaacgtgtccaaagtttctagcgtcgaagaatgtcagaagcggtgtacgtcaaacatccgctgccagtttttctcttacgcaactcagaccttccacaaggcagagtatcgcaataactgcctgctgaagtattctcccggtggcactccaaccgcaatcaaggttctgagcaatgttgaatcagggttcagcctgaagccttgcgctcttagcgagatcgggtgtcacatgaacattttccagcacctggctttctccgacgtcgacgtcgccagagtgttaacacccgacgctttcgtctgccgcaccatttgcacttaccaccccaattgcctgtttttcaccttctacactaacgtctggaaaattgagtcccagaggaacgtgtgcctgctgaagacgtccgaaagcgggacaccttcctcctccaccccgcaggagaacaccatttctggttattcattactgacgtgcaagcgcactttgccagaaccctgccacagtaaaatctacccaggggtagactttggaggagaagaattaaatgtaaccttcgtgaagggggtcaatgtatgccaagaaacatgcactaagatgattcggtgtcagttctttacttactctcttttacccgaggactgcaaggaggaaaaatgtaagtgtttcctccggctttctatggacggttctcctacgcgcatcgcttatggcacccagggctcgagtggctatagtttgaggctctgtaacactggtgacaactccgtctgcaccacaaaaacgtccactaggatcgtcggggggacaaacagcagctggggagagtggccctggcaggtgtccctacaggtaaagctcacagctcagagacatctgtgtggaggctcactgatcggtcaccaatgggtgctgaccgccgctcattgctttgatggcctccccctacaggacgtttggagaatttactccggcatactcaacctgtctgacattaccaaagacactcctttttcacaaataaaggagattatcatacaccagaattacaaagtgtcggaagggaaccatgacattgcgcttatcaaactccaggcaccgctaaactataccgaatttcaaaagcctatctgtctccccagcaaaggagacacttcaaccatctataccaattgctgggttacagggtgggggttttcaaaggagaaaggacgcttcagatggtccctcagcctgcagacacagtggaatgtggcctttgggggccaccaccagctgggctag

SEQ ID NO: 121330 - DNA, 447 bp, synthetic construct
  misc_feature 1..447: note = Description of Artificial Sequence: Synthetic coding sequence
  source 1..447: mol_type = other DNA
atgatattgtttaaacaagctacatactttatctccttatttgcaactgtgagctgcgggtgccttacacagctgtatgaaaacgcattctttcgaggaggtgatgtggcttctatgtacacccctaatgctcaatactgtcagatgcgctgcacttttcacccacgctgtctgcttttttcctttctgcctgcctcatctatcaatgacatggagaagaggttcggctgctttcttaaggacagcgtgaccggaactctgcctaaagttcaccgcactggcgccgtttctgggcacagtctcaagcaatgtgggcaccagattagcgcctgccacagagacatctataaaggagtagacatgagaggagtgaacttcaacgtcagcaaagtgtctagtgtcgaagaatgccagaagaggtgtacgtccaatattaggtgtcagtag

SEQ ID NO: 121331 - DNA, 753 bp, synthetic construct
  misc_feature 1..753: note = Description of Artificial Sequence: Synthetic coding sequence
  source 1..753: mol_type = other DNA
atgcggatcctacagctaatactgctcgctcttgccacaggccttgtaggtggagagactagaattataaaaggctttgaatgtaagcctcacagccagccatggcaagccgccctcttcgagaagaccagactgttgtgcggagcaacacttatcgccccacggtggctgttgacagcagcacattgtctgaaaccccggtacatcgtgcatttaggccaacacaacctgcaaaaagaagaggggtgcgagcagacaagaacagcaaccgagtcattcccgcatccgggcttcaacaactccctccccaataaagaccatagaaatgacattatgctggttaagatggcgtcacctgtgagcatcacctgggccgtacgtcctctgacccttagcagcaggtgcgtcacggcaggcaccagctgcttgatctcaggatgggggagcacctcatctccgcaattaagactgccccacacactccgttgtgccaacataaccattattgagcaccagaagtgtgagaatgcctatcccgggaacattaccgacacaatggtgtgcgcctctgtgcaagaggggggaaaggactcatgtcagggggacagcggtggccccctcgtgtgcaaccagtcccttcagggcattattagctgggggcaggacccatgcgcaatcacacggaaacctggcgtctacacaaaagtgtgtaaatacgttgactggattcaagaaaccatgaagaacaactag

SEQ ID NO: 121332 - DNA, 849 bp, synthetic construct
  misc_feature 1..849: note = Description of Artificial Sequence: Synthetic coding sequence
  source 1..849: mol_type = other DNA
atgcagcggctaaggtggctgcgggactggaaaagctccggtagaggacttaccgcggccaaggaaccaggggcaagaagtagtcctctgcaggccatgcggatccttcagttgattctcctcgcattggctacgggcctcgtgggaggcgaaaccagaatcatcaaggggtttgagtgtaagccccacagccagccttggcaggccgccctttttgagaaaacccgacttctctgtggggcaacactaatagcacccagatggctcctgacggccgcccattgtctgaagccccgatacattgtgcatcttggacagcacaatttacaaaaggaggaaggatgcgagcaaacccgcaccgccaccgagagctttcctcatccaggctttaataattcgttgccgaacaaggatcaccggaatgacatcatgctcgttaagatggcctcccccgtaagcatcacgtgggccgttcgtccactgaccctgtcctcgcgatgcgtgaccgccggcacatcgtgtctgatttcaggctgggggtccacatcgtcaccacagctaaggttaccacataccctgagatgcgcaaatatcacaattatagaacaccagaagtgcgaaaacgcgtacccgggtaatattacagacacaatggtgtgtgcctcagtacaggaaggcggcaaggactcctgccagggggactctggagggcctcttgtctgtaatcagtccttgcaaggcattatcagctggggccaagatccttgcgcgatcacccggaagccaggggtttacacaaaagtatgcaagtatgtcgactggattcaggagacaatgaagaataactag

SEQ ID NO: 121333 - DNA, 828 bp, synthetic construct
  misc_feature 1..828: note = Description of Artificial Sequence: Synthetic coding sequence
  source 1..828: mol_type = other DNA
atgcggattctccagctgattcttttagcattggccactggcttagtgggtggcgaaactaggataatcaaagggttcgagtgcaaaccccactctcagccctggcaagctgcgctgttcgagaaaaccaggctcctgtgcggagcgactctgattgcccccagatggcttctcacagctgctcactgtctgaaaccatgggtcagtttaacctcgcccacccatgtcagtcctgaccttagttcctctaactactgtctgtcccacctgagtcgctatatcgtgcatctcggacagcacaatttgcagaaggaggaaggatgtgagcagactagaacagccacagaaagcttcccacatccaggcttcaacaattccctgcccaataaagatcatcgaaatgatatcatgcttgtgaagatggccagcccagtgtccataacctgggctgttaggcctcttactctttctagccgctgtgtgactgcaggtacgtcctgtctcatttctggctggggaagcacgagttccccacagctgcgcctgccacacaccctgagatgcgctaacataacaattatagaacaccagaaatgtgagaacgcctaccccggcaatatcacagacactatggtgtgcgcgagcgttcaggagggaggtaaggattcatgtcagggtgattcagggggccctctggtttgtaatcagtctctgcaaggaatcatttcttggggtcaagacccctgtgccataacaagaaagccaggagtttacacaaaggtgtgcaaatacgtggactggattcaggaaacgatgaagaacaactag

SEQ ID NO: 121334 - DNA, 753 bp, synthetic construct
  misc_feature 1..753: note = Description of Artificial Sequence: Synthetic coding sequence
  source 1..753: mol_type = other DNA
atgaggattctccagctcatcttgctcgctctcgccacaggcttggtgggcggtgaaacgcgtatcatcaagggtttcgagtgcaagccacacagccagccctggcaggcagccctattcgagaaaactcgactgttgtgtggtgccacccttattgcgcctagatggctgctgaccgcagcccactgcctgaagccgcgatatattgtgcacctgggccagcacaacctccaaaaggaagaaggttgtgaacagactaggaccgccacagaatccttcccacatccagggttcaataattcactgcctaacaaggatcacaggaacgatatcatgttggtgaaaatggcaagtccggtgtccatcacttgggcagttcgaccacttacactgtcgagcaggtgcgtcaccgctggaacttcgtgtctgatttctggatggggcagtacaagctcaccacaactccgcctgccacacactctgaggtgcgctaatatcacaattattgaacaccagaaatgcgaaaacgcataccctggaaatataacagacaccatggtgtgtgcttccgtgcaagagggggggaaggatagctgccagggggacagtgggggacctttagtctgtaatcagagcctccaggggatcatcagctggggccaggatccctgcgctatcacgcggaagcccggcgtgtataccaaagtgtgtaagtacgtcgactggatccaagagaccatgaaaaacaattag

SEQ ID NO: 121335 - DNA, 849 bp, synthetic construct
  misc_feature 1..849: note = Description of Artificial Sequence: Synthetic coding sequence
  source 1..849: mol_type = other DNA
atgcagaggctccgctggctgcgggactggaagagctccggtcggggtctgacagctgctaaagagcctggggcccgtagcagtcctctccaggcaatgaggatcctacagctgatcctactcgcactcgccaccggcctggtgggtggtgagactcgaattattaaaggctttgaatgcaagccccatagccagccatggcaggccgcactgtttgagaagactagactactctgcggagccacacttattgctcccagatggctgcttactgccgcgcactgtctgaagcctcgctacattgtgcaccttggccagcacaacctgcagaaggaggagggatgtgaacaaactcgcacagctactgagtcttttccccatcccgggtttaacaacagtcttccgaacaaagatcataggaatgacatcatgcttgtcaaaatggcttcacctgtatcgatcacatgggccgtgcggccacttactctgagttccagatgtgtaaccgcaggcacatcctgtctgatcagtggctgggggagcacctcttccccgcagttgcgactgccccatacgctgcgatgcgcaaacataacgatcatcgagcatcagaagtgtgaaaacgcgtaccctggcaatatcacagataccatggtgtgcgccagcgttcaggaggggggtaaagatagctgtcagggagacagcggcgggcctttggtctgcaatcaaagcttacaaggtatcatttcctggggtcaggatccatgtgccatcacaaggaagcccggcgtgtataccaaagtgtgtaaatatgttgactggatccaggaaaccatgaagaataactag

SEQ ID NO: 121336 - DNA, 765 bp, synthetic construct
  misc_feature 1..765: note = Description of Artificial Sequence: Synthetic coding sequence
  source 1..765: mol_type = other DNA
atgggactgtcaatattcctgttgctgtgtgtcttggggctgtcccaagccgccacacctaagattttcaatggtactgagtgcggtcggaattcccagccttggcaggttggcctctttgaaggcacatcgctacgctgtggcggtgtactgattgatcatcgctgggtccttactgctgctcactgcagtggttctcgatattgggtcagacttggggaacactccctatcccagctggactggaccgaacagattcgtcatagcggattctccgtgacgcatccgggctacttgggcgctagcacttcccatgagcatgatttgaggctgttgcggctgagactccctgtccgagtaacatccagcgtccagccactgcctcttccaaatgactgcgcgactgccggcaccgaatgccatgtgtctggatggggaatcactaaccaccctagaaatccattccccgacctcctgcagtgtctcaacctttccattgtcagccatgctacatgccacggagtgtaccccggacgtatcacctccaacatggtgtgcgccggaggcgtgcctgggcaagacgcgtgtcagggggactccggcgggcccttagtgtgcggtggggtgctccaggggctagtttcctggggaagcgtcggaccatgcggccaagacgggattcctggtgtttatacatacatctgcaattcaacgttggtgggattgggaacatcttggaattttaattcatgtcagccgttttag

SEQ ID NO: 121337 - DNA, 435 bp, synthetic construct
  misc_feature 1..435: note = Description of Artificial Sequence: Synthetic coding sequence
  source 1..435: mol_type = other DNA
atggcactctcggtgggagttactcactcacggggaagatgggggtgcctgcgggcccccgcttgtgccgcaggtgtctctttactgaccaccggtgggagcagccaacgtcttaccgccgccgctgatccttttcctgatctgttgcagtgcctgaacctgagcatcgtgtcacatgctacatgccatggtgtctatcccggtcgaatcacttccaatatggtgtgcgcaggcggcgtgcccggccaggatgcctgccagggtgacagtggaggccctctcgtgtgtgggggagtccttcaaggattagtgtcctggggaagcgtgggcccttgtggacaggatggaatccccggcgtctatacctatatttgtaactcaaccctggtcggtttgggcacatcatggaacttcaactcctgccagccattctag

SEQ ID NO: 121338 - DNA, 747 bp, synthetic construct
  misc_feature 1..747: note = Description of Artificial Sequence: Synthetic coding sequence
  source 1..747: mol_type = other DNA
atgggcctttcaatctttctgctcctctgtgtactcggcctgtctcaggcagctactcctaagatatttaatggtaccgagtgtggacgcaattctcagccttggcaagtggggttgttcgagggtacttccctgagatgtggaggagtgcttattgatcacagatgggtgctgacggccgcccactgtagcggtagtcggtattgggtgagacttggcgagcacagcctgtcccagcttgattggactgaacaaatccggcactccgggttttccgtgacccaccccggctacctgggggccagcacttcccacgagcacgatctaaggctgcttcgacttcgccttcctgtcagagtgacatcaagtgtgcaacctctccccctacctaacgattgtgccactgccgggacggaatgccatgtgtctggatggggtattacgaaccaccctaggaacccctttcctgatctcctgcagtgtctgaacctgtctatcgtttcccatgctacttgtcatggcgtgtatcccggtaggatcactagtaacatggtgtgcgctggcggcgtcccgggacaggatgcttgtcagggagatagcggcggaccactggtttgtggaggagtcctccaagggctggtgtcctggggaagcgttgggccttgcggacaagacggaatccccggtgtgtacacctacatatgtaagtacgtcgactggattcggatgatcatgcggaataattag

SEQ ID NO: 121339 - DNA, 747 bp, synthetic construct
  misc_feature 1..747: note = Description of Artificial Sequence: Synthetic coding sequence
  source 1..747: mol_type = other DNA
atgggactgtctatcttcctactactgtgcgtgcttggactgtcacaggccgcaacacccaagatattcaacggcactgagtgcggaagaaacagtcagccttggcaggtgggtctcttcgaaggcacttcactccgatgcggtggcgttttgatcgatcatcgatgggtattaacagctgcacattgcagtggctcgagatattgggtgcggctaggtgagcactcactgtcacagcttgactggactgaacagattcgccattctgggttctccgtgactcaccctggttatctgggtgccagcactagtcacgaacacgacttaaggctgctccgcctaaggctgcctgttagagtaacttcatctgttcagcccctccctctccctaatgattgtgcaaccgccggtaccgagtgtcacgtctcaggctggggtatcaccaatcaccctcgtaacccgttcccagatcttttgcagtgcctgaacttgagcatcgtgtcccacgccacctgtcacggcgtttatcccgggaggattacatcaaacatggtgtgcgctggcggtgttcccggccaggatgcctgccaaggggattctggtgggcccctcgtctgcggaggagtgctgcagggactcgtttcgtggggatccgttggaccttgtggacaggatggcatccccggagtgtatacgtacatctgtaaatacgtcgattggatacggatgattatgcggaacaattag

SEQ ID NO: 121340 - DNA, 336 bp, synthetic construct
  misc_feature 1..336: note = Description of Artificial Sequence: Synthetic coding sequence
  source 1..336: mol_type = other DNA
atgggattgtcaatctttcttcttctgtgtgtcctcggtctcagtcaggcggcaacgccaaaaattttcaacggaaccgaatgtggtagaaacagccagccctggcaagttggtctgttcgaaggcaccagtttacgctgcggaggggtgctgatagatcaccggtgggttcttacggcagcccattgtagcggaagacccattcctgggagtgctcccgtgccccaacccctgcatcggcttccttgtcacctgccctggtgcgtctccagagagaatcatgaacagcacggcgtgtgccggcgaaggcctggcgcaggctgcctccctggctag

SEQ ID NO: 121341 - DNA, 834 bp, synthetic construct
  misc_feature 1..834: note = Description of Artificial Sequence: Synthetic coding sequence
  source 1..834: mol_type = other DNA
atgtggcccctggcactagtgatcgcaagcctgactctcgctctaagtggcggggtgtcacaagagtcctcgaaggttctcaacacgaatggcaccagcggattccttcccggcggctatacctgtttcccacatagccagccttggcaagcagccctcctggtacaggggcgattactctgcggtggcgtgcttgtgcaccccaaatgggtacttacagctgcccactgcttgaaggagggccttaaagtttatttgggtaaacatgctctgggaagagtcgaggccggggaacaggttcgcgaggtagtgcacagtatcccccatcctgagtatagacggtccccgacacacttaaatcatgatcacgatataatgctgctcgaactacagtctcctgttcagctcacggggtacatacagactctgccgctctcccataataacagattgaccccaggaacgacatgcagggtttcagggtggggcacgactacatccccacaggtgaattatcccaaaacattacagtgcgccaacattcagcttcgaagcgacgaagagtgtagacaagtgtatccaggcaagattaccgataacatgctgtgcgctgggactaaagagggtggcaaggactcatgtgagggggactccggggggccactcgtatgtaatcggaccttgtacgggattgtgtcttggggtgattttccctgtggccagcccgatcgcccaggtgtttacactcgtgtaagtagatacgtgctttggatccgtgagactatccgaaaatacgagacacaacaacagaaatggctgaagggacctcagtag

SEQ ID NO: 121342 - DNA, 378 bp, synthetic construct
  misc_feature 1..378: note = Description of Artificial Sequence: Synthetic coding sequence
  source 1..378: mol_type = other DNA
atgtggcccttagctctagtcatcgcctctttaacattagccctgtctggagtcaattacccgaaaacgctccagtgtgccaacatccagttgagaagtgacgaagaatgccgacaggtgtacccaggaaaaatcacagacaacatgctttgcgctggcactaaggagggcggcaaggacagctgtgagggagactctgggggcccattggtgtgcaatagaacattgtacggaatcgtctcctggggcgactttccatgcgggcagcctgatagacccggggtctacactcgggttagccgctatgtactttggatccgggaaaccattaggaagtacgagacacaacagcagaagtggttgaaaggacctcagtag

SEQ ID NO: 121343 - DNA, 297 bp, synthetic construct
  misc_feature 1..297: note = Description of Artificial Sequence: Synthetic coding sequence
  source 1..297: mol_type = other DNA
atgggcttgatttacaaatgccttcccgagaaagtgactgttaatatcgagaccaggtgtctgcctggtgtgtttcagggcagccagcatcagtgggaccaatgggtgtcccctcggtggctgcatctgctcccacctctaagtgcccttgctggttgccccacaagcgcacgggctgccaccttgtgggggtcccccggcccaccccagatggggccccattgtcggaccctgtcaaaagggggggcccaatctctgccccgtcaggctaggccaagagcttgcggctcttggtag

SEQ ID NO: 121344 - DNA, 282 bp, synthetic construct
  misc_feature 1..282: note = Description of Artificial Sequence: Synthetic coding sequence
  source 1..282: mol_type = other DNA
atgtggcccctggccctggtcattgcaagcttgactctcgccctgtccggtggtgaagatttcaaggaaccatcccaaggtcctagggacgtgatggcggcatctcggcctgaggctttcccaaagggcctgacactagagccacgcccagaaaaagggggtatctgcggatgcctcgcacctgggaccatcctcggcctgaaagtaggatggcttttttcatccggcgatacaccctggattcatgccagagccacccctgaatgccacactctgggctag

SEQ ID NO: 121345 - DNA, 834 bp, synthetic construct
  misc_feature 1..834: note = Description of Artificial Sequence: Synthetic coding sequence
  source 1..834: mol_type = other DNA
atgtggcccctcgccctagtcattgcaagcctcaccttagcattgtctggcggggtatcccaggaaagctctaaggtgcttaatactaacggcacctcagggtttctgcctggagggtatacttgcttccctcactctcaaccctggcaagccgcccttctggtccagggacgtttactgtgcggtggcgtgcttgttcaccccaagtgggtgctcactgcagcccactgcttgaaagaagggctcaaagtatacctgggcaaacacgctcttggtagagtcgaggcgggagagcaagtgagagaggtagtgcatagcatccctcaccctgagtacaggcgatcacccacccatctgaatcacgaccacgacatcatgctgctggagctgcagagtccagtgcagttgactgggtatatccagaccctgccgctctctcacaacaatcgactaacaccaggcacaacctgccgcgtttcaggctggggcaccacgacatctccccaagtcaattacccaaaaaccctacagtgcgcaaatatccagctcagaagcgacgaggagtgtcggcaggtctatccgggcaagattacagacaacatgctgtgcgcaggaacaaaagaaggaggcaaggattcatgcgaaggtgatagtggcggtccactcgtatgcaatcgtacactatatggtattgtttcatggggcgactttccttgcggccagcccgatcgcccaggggtgtatactcgtgtgtcccgttacgttctctggatcagagagaccatcaggaagtacgaaacccagcagcagaaatggctcaagggaccgcaatag

SEQ ID NO: 121346 - DNA, 804 bp, synthetic construct
  misc_feature 1..804: note = Description of Artificial Sequence: Synthetic coding sequence
  source 1..804: mol_type = other DNA
atgtccttaagggtgctgggatcaggaacatggccctccgcccccaagatgtttctgttgctgaccgcactgcaggtcctagcaattgccatgacacagtcacaggaagatgagaataaaataatcggcggccacacatgtacccggtcgagccagccttggcaggctgccctgcttgcaggacctagacgccggttcctctgtggcggagctctgctctccggtcagtgggtaatcactgcggcccactgtgggcggcctatactgcaagttgcgctgggaaagcataatttgcgcaggtgggaagcaacccaacaagtgctgcgtgtggttcgtcaggtcactcaccccaattataatagccgaacacatgataatgatctgatgctcttacagttgcagcagcccgccagaattggcagggcagtgcgccccatcgaggttacccaggcttgtgcatcaccaggaacctcatgccgggtcagtggttggggcaccatttctagcccgatcgcccggtaccccgcatctttacagtgtgtcaatatcaacatatctcctgacgaagtgtgtcagaaggcttatccccgtaccatcacgcctggaatggtgtgtgctggggtgccgcagggcggaaaggactcttgccagggcgattccggcggaccactcgtgtgtcggggccagctgcaaggcctcgtgagttggggcatggagcggtgtgctctgccaggttacccaggagtgtatacaaatttgtgtaagtatagaagctggatagaggaaacgatgcgagataagtag

SEQ ID NO: 121347 - DNA, 804 bp, synthetic construct
  misc_feature 1..804: note = Description of Artificial Sequence: Synthetic coding sequence
  source 1..804: mol_type = other DNA
atgtccctgagagtactggggagcggaacatggcctagcgctcccaaaatgtttctcctgctgaccgcactgcaggtgctcgcaattgccatgacacagtcacaggaggacgaaaacaagattataggcggccacacctgtactcgctcctcgcaaccttggcaggccgctctactcgcgggccccagaaggagatttctctgtggcggggcactactttcaggacagtgggtgatcactgcggcccattgcggccggccaatcctgcaggtggccctgggcaaacataacctccggagatgggaggccacccagcaagtgctgagggtagtgagacaggtcacacatcccaattacaacagccgcacccacgataacgacctgatgctgctacaattgcagcagccagcgaggatcggaagagctgttagacctattgaggtgactcaggcctgcgccagcccgggcacaagctgcagagtgagtggttgggggactatatctagtccaatcgcacggtacccagccagtctgcagtgtgtgaatatcaatattagcccagacgaggtctgccagaaagcttatccgcgcactattacgccaggaatggtgtgtgcgggcgtgcctcaaggaggcaaggactcttgccaaggggactctggcggacctctcgtttgccgcggacagctgcagggcttagtttcttggggcatggagcgctgtgccctgccaggttaccctggcgtgtatacaaacctttgtaaataccgaagttggattgaggagacaatgagagacaaatag

SEQ ID NO: 121348 - DNA, 804 bp, synthetic construct
  misc_feature 1..804: note = Description of Artificial Sequence: Synthetic coding sequence
  source 1..804: mol_type = other DNA
atgagcctgagagttctgggcagtggaacttggccttctgcccctaaaatgttcctcctgctgaccgctctgcaggtgctggctatagcaatgacccagagccaggaagacgaaaacaagatcatcggaggacatacatgtacccgatcctcccagccatggcaggccgccctcctggctgggcctagaagaagatttctgtgtgggggagcactgctaagcgggcagtgggtgattacagccgctcactgtggcaggcctatccttcaggtagcactgggaaagcacaaccttcggcgttgggaagccacccaacaagtgctgcgcgtcgtacggcaggtaacccacccgaactataatagtagaacacatgataatgacttgatgctgctccagctgcagcagccggcccggatagggagggccgtgaggcccatcgaggttacacaggcgtgcgccagtccgggaactagctgccgcgtttcaggctgggggacaatatcttcccccatcgctagataccctgccagcttgcagtgtgtgaatatcaatatctctcctgatgaggtgtgtcagaaagcctacccccggaccatcaccccaggcatggtatgtgctggggtgccacaaggaggcaaagattcttgtcaaggtgattctggcggtccgctagtctgcaggggtcaactccaggggctggtctcgtggggtatggaacgctgcgccctccctgggtatcccggcgtgtacacaaatctgtgtaagtatcgatcctggattgaggagacaatgcgtgataagtag

SEQ ID NO: 121349 - DNA, 486 bp, synthetic construct
  misc_feature 1..486: note = Description of Artificial Sequence: Synthetic coding sequence
  source 1..486: mol_type = other DNA
atgtggctcctgctcacactaagcttcctgctggcctccaccgctgcccaggacggagataaactcctcgaaggtgacgaatgtgctcctcacagccagccgtggcaggtggccctgtatgaacgcggaaggttcaactgtggagcttcattaatcagcccccattgggttctgtcagccgctcattgccaaagcagattcatgcgcgttcggttgggggagcacaacctgcggaaacgcgatggccccgaacaactccggacgacctcccgcgtgattccgcaccctcggtacgaggcccgcagccaccgcaatgatatcatgttactgagactggtgcagccagctaggctgaacccccaggttagaccagctgtattaccaaccagatgccctcatcccggagaagcttgcgtggtcagcggctgggggctggtgtcccataacgagcccggcaccgccggctcaccgcgctcccagggatag

SEQ ID NO: 121350 - DNA, 771 bp, synthetic construct
  misc_feature 1..771: note = Description of Artificial Sequence: Synthetic coding sequence
  source 1..771: mol_type = other DNA
atgtggttactgcttaccctgagctttctgctggcatccacggcagcacaggatggcgataagctcctcgagggtgatgagtgcgccccgcactcacagccctggcaggtggcgctgtatgaaagagggagattcaattgtggtgcatccctcatatcaccccactgggttttaagcgccgcgcattgccagtccaggttcatgcgggttcgtttaggggagcacaatctcagaaagagagatggacccgagcagctcaggacaaccagccgggtcattcctcaccctaggtatgaagcaaggtctcataggaatgacattatgctgttacggctggttcagccggcaaggctgaatccccaggtgcggccagctgtgctccctacacggtgccctcacccaggcgaagcctgtgtggttagtggatggggtctcgtatctcataatgagcccgggaccgccgggagccccaggtcacaggtaagtctccctgacactctgcattgtgctaacatctccatcatctccgacacatcatgcgacaagagctaccccggccggctgaccaatacgatggtctgcgccggcgcggaaggccggggtgccgagtcttgcgaaggggactctggcggtcctctcgtgtgcggtggtattttgcagggaatcgtgtcatggggagacgttccttgcgataacaccacaaaacccggagtgtacaccaaagtctgccattatttagaatggattagggagactatgaaaaggaattag

SEQ ID NO: 121351 - DNA, 516 bp, synthetic construct
  misc_feature 1..516: note = Description of Artificial Sequence: Synthetic coding sequence
  source 1..516: mol_type = other DNA
atgtggctgttgctgactttatctttcctgttagcatcgacagcggcccaggacggtgacaaactgctggagggtgatgaatgcgccccccatagccaaccttggcaggtcgctctgtatgagcgaggccggttcaattgcggcgccagcctgatcagccctcattgggtgttgagcgccgcacattgtcaatcccgattcatgcgcgttcggctcggcgagcacaatttgcggaaacgcgacggtcctgagcaactcaggaccacatcacgagtcattccacatcccaggtatgaagcccgatcccaccgaaatgacataatgcttctacgcctggtgcagcctgctcgcctcaatccgcaaggggattccggcgggcccctcgtgtgtgggggcattttacaggggatcgtaagttggggcgacgtgccttgcgataataccaccaaacctggggtgtacaccaaggtgtgtcattaccttgagtggatacgcgagacgatgaaacggaattag

SEQ ID NO: 121352 - DNA, 489 bp, synthetic construct
  misc_feature 1..489: note = Description of Artificial Sequence: Synthetic coding sequence
  source 1..489: mol_type = other DNA
atgtggctgctgctaactctgagctttctacttgcttccaccgccgcccaggacggcgacaagctgctggaaggtgatgaatgtgcgccacattcccagccctggcaggtcgcactgtacgaaagagggagatttaattgcggagcttctctcatttctcctcattgggtcctgagcgcagcacactgccaatcaagattcatgcgagtaagactgggggaacacaacctacgcaagcgcgacggccccgaacagctgaggacaacttcaagagtgatccctcaccctcgatacgaggctcgctcacataggaacgatatcatgttactgcgcctggtacagcccgctcgactaaatccccaggtgcgcccagccgtactgcccactaggtgccctcatcccggcgaggcttgtgttgtctctggctggggccttgtgagccacaacgaacctgggacagcggggtccccacgctcccagggggcctag

SEQ ID NO: 121353 - DNA, 771 bp, synthetic construct
  misc_feature 1..771: note = Description of Artificial Sequence: Synthetic coding sequence
  source 1..771: mol_type = other DNA
atgtggctcctcctgacattgtccttcctgttagcctccaccgccgcccaagacggtgataagctccttgaaggtgacgaatgcgcaccccattcacagccctggcaggttgccctttacgagagggggagattcaactgcggagcaagtctgatctcgccccactgggtcctgagcgcagcacattgtcagagtaggtttatgagggttcggctgggagagcacaacctcaggaaaagagatggacctgagcaactccgcaccacctcaagagttattcctcacccaaggtacgaagcacggtctcaccgcaatgatatcatgcttctccggttggtacagcctgcaaggctgaatccccaggtgagaccagcagttctgcctacccggtgtccccaccccggagaagcttgtgtggtgagcgggtggggattggtaagccataatgaacccggaaccgccggcagcccaagatcgcaggtatcccttccagataccctacactgcgccaacatctcaattatcagtgacacatcctgcgacaagtcttaccctggaaggctgaccaatactatggtctgtgccggcgccgagggaagaggagccgagagctgtgaaggcgactcagggggaccactggtgtgcggggggatcctgcagggaattgtatcttggggcgacgtaccatgtgacaatacaaccaagcctggagtgtacacaaaggtgtgccactatcttgagtggattcgcgagactatgaaaaggaattag

SEQ ID NO: 121354 - DNA, 786 bp, synthetic construct
  misc_feature 1..786: note = Description of Artificial Sequence: Synthetic coding sequence
  source 1..786: mol_type = other DNA
atgtgggatctcgtcttgtctatcgctttgtcagtgggttgcacaggtgcagttccactgatccaaagcagaatcgtgggcgggtgggaatgcgaaaagcactcacagccttggcaggtagcagtgtacagccacggatgggctcattgcggtggcgtcctggtgcacccccagtgggtgctcaccgccgctcactgcctcaagaagaacagccaggtgtggctgggccggcacaatctattcgagccagaagatacgggccaacgggttcccgtcagccacagctttccccaccccctctacaacatgagcttgcttaagcatcagtctctccgcccagacgaggacagctcacatgatctgatgctgctcagactgtccgaacctgcaaagattaccgacgtggtgaaggtcctgggcctccccacccaggaaccagccctgggtacgacatgctatgcgagcgggtggggctcaatcgaacccgaggaattcctgcgacctaggtctcttcaatgcgtgtccttacatctgctgagcaacgacatgtgcgcacgcgcatactccgagaaagtgaccgaatttatgctgtgcgccggcctgtggacgggcggcaaagatacctgtgggggcgacagtggcggcccactggtatgtaacggtgtacttcagggaatcacctcctggggtccggaaccatgcgccctgccagagaagccagctgtatacacaaaggtcgtgcattacagaaagtggattaaagataccattgccgcaaacccttag

SEQ ID NO: 121355 - DNA, 672 bp, synthetic construct
  misc_feature 1..672: note = Description of Artificial Sequence: Synthetic coding sequence
  source 1..672: mol_type = other DNA
atgtgggacttagttctcagtattgccttgagcgttggctgcactggcgctgtccctctgatccagagtcgcatcgtgggggggtgggagtgcgagaagcactcacagccgtggcaggtggccgtgtattcgcatgggtgggctcactgtggcggagtacttgtacaccctcagtgggtgttgaccgccgcccactgtctcaagaagaattctcaagtatggctgggccgccataatctcttcgagccggaagacacaggccagcgggtgccggtctcacactcatttcctcatcctctctacaatatgagccttctgaaacaccagtctctgcgaccagatgaggatagctcgcatgaccttatgctcctgcggctgagtgagccggccaagatcaccgacgtcgtgaaagtactgggtctgcccactcaggaaccagccttggggactacctgctacgctagtggctggggatcaattgaacccgaagaatttttgcgccctcggagcttgcagtgtgtgtctttacatcttctgagtaacgatatgtgcgcgcgggcctactccgagaaggtgaccgaattcatgctgtgcgcaggactatggactggaggcaaggacacgtgcggcgtgtctcatccttacagccagcatctcgaggggaagggatag

SEQ ID NO: 121356 - DNA, 480 bp, synthetic construct
  misc_feature 1..480: note = Description of Artificial Sequence: Synthetic coding sequence
  source 1..480: mol_type = other DNA
atgagcctgttaaaacatcagagccttcgaccggacgaagatagctctcacgatctgatgctattacgtctgtccgagcctgctaagatcactgatgtagtcaaagtccttggactgcctacacaagaaccagccctcgggactacctgttacgcttccggctgggggagcattgagcctgaggaatttctgaggcccaggagcctgcagtgcgtctctctgcatctgctcagcaacgacatgtgcgctcgtgcctactctgaaaaagtgactgaattcatgctttgcgccgggctatggacaggtgggaaagacacctgcggcggggattccggaggaccactggtgtgcaatggcgttctgcaagggattacaagttgggggcctgagccctgcgccctgccagagaagccagcagtttacaccaaagtcgtgcattatagaaagtggattaaggatacaatcgcagcaaacccctag

SEQ ID NO: 121357 - DNA, 786 bp, synthetic construct
  misc_feature 1..786: note = Description of Artificial Sequence: Synthetic coding sequence
  source 1..786: mol_type = other DNA
atgtgggtccccgtcgtgttccttacactgtcagtgacttggataggtgccgcccccctgatactatcaagaattgtcggaggctgggagtgtgagaaacattcacagccctggcaggtgctggtagcatcaagaggtagagctgtttgtggcggagtgcttgtgcacccccagtgggtacttaccgcagctcactgcattagaaacaaaagtgtgatactgctggggaggcatagcctcttccaccccgaagacactggacaggtgtttcaagtgtcccattcgttcccccatcccttatatgatatgagcctgctgaagaatcgctttctgcgacctggagacgatagctcacacgatctgatgctactccgcctctcagagcccgccgagctaacagatgccgtgaaagtcatggacctacctacccaagagcctgccctaggcacaacctgctatgcctccggctggggcagtatcgagccggaggagtttctgacccctaagaagttacagtgtgttgaccttcacgtgatcagtaacgacgtgtgtgctcaggtacatcctcagaaggtgaccaaattcatgctgtgtgccgggcgctggaccggcggcaagtccacatgcagtggggacagcggcggccccctcgtgtgcaatggagttctgcagggtatcacgagttggggctctgaaccttgtgccctgcctgaacgcccatcactctacacaaaagtggtgcattaccggaaatggatcaaggataccatcgtggcgaacccctag

SEQ ID NO: 121358 - DNA, 663 bp, synthetic construct
  misc_feature 1..663: note = Description of Artificial Sequence: Synthetic coding sequence
  source 1..663: mol_type = other DNA
atgtgggtccccgtggtatttctgaccctctccgtgacatggattggcgcagctcccttgatcctatctcgcatcgtgggtgggtgggaatgcgagaaacactctcaaccatggcaggttctggtggcctctcggggacgggcagtctgcgggggcgtgctcgtgcatccacaatgggtgttgaccgctgcccattgtatcagaaacaaatccgtgattctgctgggaaggcatagcttgttccatccagaggatacgggacaggtgttccaggtgtcccatagctttcctcatccattgtacgacatgtcccttttgaagaacaggttccttcggccaggtgacgatagctctattgaaccagaggaatttttgactccaaaaaaattgcagtgcgtggatttgcatgtcatcagtaatgatgtgtgtgcgcaggtgcacccacagaaagtgaccaagtttatgctgtgtgccggacgctggaccggaggaaaaagtacttgctcgggggattctggcggcccattagtctgcaatggcgtcctccagggcatcacatcttggggctctgaaccctgtgccctgccggagagaccgtctttatacacaaaggtggtacattacaggaagtggattaaggacactattgttgccaacccctag

SEQ ID NO: 121359 - DNA, 717 bp, synthetic construct
  misc_feature 1..717: note = Description of Artificial Sequence: Synthetic coding sequence
  source 1..717: mol_type = other DNA
atgtgggttcctgtggttttcctcacactgtctgtcacctggataggggctgctcccctcatactctcccggatcgttggcggatgggagtgtgaaaagcactcgcagccttggcaggtccttgttgcctcaagaggcagagcagtgtgtggcggggtcctggtccatccgcaatgggtgctgacggctgctcactgcatccgaaataaatccgtcattctgctcggacgacacagtctatttcaccccgaagacacaggtcaggtgtttcaagttagccattcattccctcatccgctttacgacatgagtctactgaagaatcggttcttgcgcccgggagacgacagtagtcatgacctcatgcttctccggttgagcgaaccagccgagttaaccgatgccgtgaaggtcatggacctgcctacacaggagccggcccttggtactacctgctatgcaagtggatggggctcgatagaacctgaagaattcctaacaccgaagaagctgcagtgcgttgatctgcacgtcatctctaatgacgtctgcgcccaggtccatcctcaaaaggtcactaaattcatgctctgtgccggacgatggacagggggtaaaagcacatgttcttgggtaattctgatcacggagctgactatgccagccctgcctatggttctgcatggcagcctggtgccatggcgtggcggagtctag

SEQ ID NO: 121360 - DNA, 657 bp, synthetic construct
  misc_feature 1..657: note = Description of Artificial Sequence: Synthetic coding sequence
  source 1..657: mol_type = other DNA
atgtgggtgccagtggtgtttctgaccctgtccgttacctggataggagccgctccactcattctgtcacgcatcgtgggcggctgggaatgtgaaaaacattcacaaccttggcaggttctggttgctagcagggggcgggccgtatgcggaggtgtattggtgcatccccagtgggtcctcactgctgcccactgcattaggaagccaggcgacgactcttcacacgacctcatgctcctgagactgtccgagccagccgaactgacagacgctgtaaaagtaatggatctcccaacccaggaaccagccttgggaacaacatgttacgcgtccggttgggggagcatcgagcccgaggaattcctgacccctaagaagctgcagtgtgtggatctgcacgtgatcagtaacgatgtatgtgcccaggtacatccacagaaagtgactaaatttatgctttgcgctggccgttggactggtgggaagagtacctgttctggagactctggtggtcccctggtgtgtaacggtgtgctccagggcataacttcctgggggagcgagccatgcgcgcttcctgaacgcccttccctgtacaccaaggtcgtgcactaccgcaagtggatcaaggatactatcgtggccaacccttag

SEQ ID NO: 121361 - DNA, 210 bp, synthetic construct
  misc_feature 1..210: note = Description of Artificial Sequence: Synthetic coding sequence
  source 1..210: mol_type = other DNA
atgtgggtgccggtggtattcttaacactgtcagttacttggatcggagccgcgcctctcatacttagcagaattgtgggcggatgggagtgtgaaaagcactcccaaccttggcaggtgctcgtagcaagtcggggtcgagctgtatgcggcggagtgctggtccacccccagtgggtgctcaccgctgcccattgcataaggaaatag

SEQ ID NO: 121362 - DNA, 765 bp, synthetic construct
  misc_feature 1..765: note = Description of Artificial Sequence: Synthetic coding sequence
  source 1..765: mol_type = other DNA
atggccacagcggggaatccatggggatggttcctgggatacctgatcctgggggtggcagggagcctcgtctctggtagttgtagccagattataaatggggaagactgctccccccactctcagccctggcaggccgcgttggtcatggagaacgaactgttttgttctggtgtattggtgcatcctcagtgggtgttgagcgcagcccactgctttcagaatagctacaccataggtctcggactccactctctggaagcagatcaggaacctggatctcagatggtcgaggctagcttgtcagtccggcatcccgagtacaatagacccctgctggcgaatgacctgatgctgattaagctggatgaatctgtgagcgaatctgacacaattagaagtattagtatcgcaagccagtgccccactgctggaaactcctgcctcgttagcggatggggccttctggctaatgggcgcatgccgactgttctacagtgtgtaaatgtcagtgttgtgtccgaggaagtctgcagcaaattgtacgacccactctaccacccttctatgttctgtgccggtggtgggcacgaccagaaggattcctgtaacggcgattccggggggccgctgatttgtaacgggtatctccaggggcttgtctcttttggtaaggctccttgcggccaggtcggtgtgcccggcgtatacaccaacctttgtaaattcactgagtggatcgaaaaaaccgttcaggcatcctag

SEQ ID NO: 121363 - DNA, 333 bp, synthetic construct
  misc_feature 1..333: note = Description of Artificial Sequence: Synthetic coding sequence
  source 1..333: mol_type = other DNA
atggaaaacgaactattttgctctggagtcctggtgcacccgcagtgggtgctttccgcggcccattgtttccagaacagctacaccataggcctcggactccacagcctggaagcagaccaggaacctgggtcccagatggtggaagccagccttagtgtcagacacccagaatataaccgccccttgctggccaatgacctgatgctaatcaagctggacgagtccgtcagcgagagcgatacaatccgcagtatctcaatcgcctcgcagtgccctacagccggcaatagctgtttagtgagcggatgggggctgctggctaatggatag

SEQ ID NO: 121364 - DNA, 735 bp, synthetic construct
  misc_feature 1..735: note = Description of Artificial Sequence: Synthetic coding sequence
  source 1..735: mol_type = other DNA
atgaagaagctcatggtggttctgtcactgattgcagcagcttgggccgaggaacagaataaactcgtgcacgggggcccttgcgacaagacctcccacccatatcaagccgcactgtacacgtccgggcacctcctttgcggtggcgtgctgatccatccactatgggtcctcaccgccgcgcactgcaaaaagcctaatctccaggtctttctaggaaagcataaccttaggcagagggaatctagccaggagcaatcttctgtggtccgtgccgtgatccatcccgactacgatgcagcttctcatgatcaggacattatgctgcttcgactggcaaggccagccaagctttccgagttaatccagccactgccattggaaagggattgttccgccaatacaacctcttgccacatcctcgggtggggaaaaacagccgatggcgacttccctgacactatccagtgcgcttatattcacctcgtatctagggaagagtgcgagcacgcctaccctggacaaatcactcagaatatgctgtgtgccggagacgagaaatatggtaaggactcctgtcagggagattcaggaggaccacttgtctgtggggatcacctgcggggattagtatcgtggggaaatattccatgtggaagcaaggagaaaccgggggtctacaccaacgtatgtagatataccaactggatccagaaaacaatccaggcaaagtag

SEQ ID NO: 121365 - DNA, 735 bp, synthetic construct
  misc_feature 1..735: note = Description of Artificial Sequence: Synthetic coding sequence
  source 1..735: mol_type = other DNA
atgaaaaagctgatggtggtgctttcgctcatcgccgcagcatgggccgaggaacagaacaaactggtgcacggggggccatgcgacaaaaccagccacccttatcaggctgccctgtatacctctggacatcttctttgcgggggcgtacttatccatcctctttgggtattaactgctgcgcactgcaagaagccaaacctgcaggtcttcttggggaaacataatctccggcagcgagaaagctctcaggaacagtcctctgttgtccgagcagtcatacatccagattacgatgcggcctcccacgatcaagatataatgttactgcgcctggctaggccagctaagttgtcagaactgattcagccactgcccctcgaacgtgactgtagtgccaatacgacttcatgtcacattctggggtgggggaaaacagctgatggcgactttcctgatacaatccagtgtgcttacatccaccttgtctctcgcgaagagtgtgagcacgcctacccaggacaaattactcagaatatgctttgtgccggcgacgaaaaatatggcaaagactcctgccagggggatagcggtgggccacttgtatgcggggatcacttgcgaggattggtgagttggggaaatatcccgtgtggctctaaggaaaagcccggtgtctacacgaatgtctgccgctacaccaactggatccagaaaacaatccaagccaaatag

SEQ ID NO: 121366 - DNA, 363 bp, synthetic construct
  misc_feature 1..363: note = Description of Artificial Sequence: Synthetic coding sequence
  source 1..363: mol_type = other DNA
atgaaaaagttaatggtggtgctgagtctgattgccgctgcttgggctgaagagcagaacaaactggtgcacggcggtccgtgcgataaaacctctcacccataccaggcagcactttatacaagcggccatctgctgtgtgggggcgttctgattcatcctctgtgggtcctaaccgctgcacattgcaaaaagcctgttatcctgggcgtacgctggtacgtagaaactacgagtgaggccttgtgtcatggcgttacgagtccagtagaccaacgccgctcacaggaatctacccccacctcggcagacacccgcaccggaagcaagaaacccttcagaccttctgacccagacatgtag

SEQ ID NO: 121367 - DNA, 414 bp, synthetic construct
  misc_feature 1..414: note = Description of Artificial Sequence: Synthetic coding sequence
  source 1..414: mol_type = other DNA
atgctgctaaggctcgctcgccccgccaaactgtctgagctgatccagcctctgcccctcgagcgagattgcagtgcaaacacaaccagctgtcatattcttgggtggggcaagaccgctgacggagactttcccgacactatccagtgcgcctatatacatttagtgagccgtgaagagtgcgagcacgcttacccaggccaaattacccagaacatgctgtgcgcgggagacgaaaagtatggcaaagattcctgtcaaggagacagtggaggcccgctcgtatgcggagatcatttgcgcggcctggtgagttggggcaatattccatgtggctctaaagagaagcccggggtatacacaaacgtgtgcaggtacaccaattggatacagaagacaattcaggccaaatag

SEQ ID NO: 121368 - DNA, 123 bp, synthetic construct
  misc_feature 1..123: note = Description of Artificial Sequence: Synthetic coding sequence
  source 1..123: mol_type = other DNA
atgaaaaagctgatggtcgtactaagcttaatcgccgccggtatttttagatccagctgggggtccataacctttggcaagggacgcgtcccacgctccagggtcttgctgtccggcttgtag

SEQ ID NO: 121369 - DNA, 414 bp, synthetic construct
  misc_feature 1..414: note = Description of Artificial Sequence: Synthetic coding sequence
  source 1..414: mol_type = other DNA
atgctcctgagactggcacggcccgccaagctgtcggaactcattcagccactgccgttagagcgtgactgttccgcgaatactaccagctgccacattctgggatgggggaaaacagcggacggtgacttcccagacacaatacagtgcgcatacatccacctggtgtctagggaagaatgcgagcacgcatatcccggtcaaatcactcagaatatgctttgcgctggcgacgaaaaatacggaaaggattcctgtcaaggcgactctgggggacccctggtctgcggagaccatctgcgggggctggtgtcctggggaaacattccatgtggtagcaaagagaagccaggagtctatactaacgtatgtagatacacaaattggatccagaagactatccaggccaaatag

SEQ ID NO: 121370 - DNA, 783 bp, synthetic construct
  misc_feature 1..783: note = Description of Artificial Sequence: Synthetic coding sequence
  source 1..783: mol_type = other DNA
atgggccgacccaggcctcgcgccgcaaaaacctggatgttcctgctcctgctgggcggcgcctgggctgggcactcccgcgcgcaagaggacaaagtcttgggaggtcacgagtgccagccgcactcacagccatggcaggccgctctgtttcagggccagcagctgttatgtgggggagtcttggtcggaggcaactgggtgttgaccgccgcccattgcaagaagcccaagtacacagtgaggctaggagaccacagcctccagaacaaggacggtccggagcaggagattcctgtcgttcagagcataccccatccctgctacaactccagtgatgttgaggaccacaaccacgatttgatgctgttacagttacgggatcaagcctccctgggctctaaggtgaagccgatctccctggccgaccactgcactcagcctggacaaaaatgcacagtcagtgggtgggggactgtgacctctcctcgggagaattttcccgatacactgaactgtgccgaggtcaagatttttccgcagaaaaagtgtgaagacgcctatcccgggcaaataaccgatgggatggtgtgcgctggcagttctaagggcgctgacacatgtcagggcgacagtggcggtccccttgtttgcgacggtgccctccaagggatcacgagctggggatccgatccctgtggacgatccgacaaacctggggtctataccaacatctgcagataccttgattggatcaagaagatcatcggttcaaagggctag

SEQ ID NO: 121371 - DNA, 99 bp, synthetic construct
  misc_feature 1..99: note = Description of Artificial Sequence: Synthetic coding sequence
  source 1..99: mol_type = other DNA
atggggcggcctaggccgcgcgccgccaagacctggatgttcctcctcctgctcggcggcgcgtgggccgggagattctggaggcctcccggagtctag

SEQ ID NO: 121372 - DNA, 360 bp, synthetic construct
  misc_feature 1..360: note = Description of Artificial Sequence: Synthetic coding sequence
  source 1..360: mol_type = other DNA
atggggaggccaagaccacgggccgctaagacatggatgttccttctgctgctcggcggcgcgtgggcagagaacttcccggacaccttgaattgcgctgaggtgaagatcttccctcagaaaaagtgtgaggatgcctaccccgggcaaataacagacggtatggtgtgcgcgggtagctccaaaggggctgacacttgtcaaggggatagcggcgggcccctcgtttgtgatggtgccctgcaggggatcacatcttgggggtcagatccatgtggccgaagtgacaaacctggcgtgtatactaacatctgtcggtatctcgactggatcaaaaagatcattgggtcaaaggggtag

SEQ ID NO: 121373 - DNA, 918 bp, synthetic construct
  misc_feature 1..918: note = Description of Artificial Sequence: Synthetic coding sequence
  source 1..918: mol_type = other DNA
atgggcagacctcggcccagggctgcaaaaacctggatgttcctgctactcctaggaggggcgtgggccgcatgtggcagtcttgacctcctcacaaagctttacgccgaaaacctcccctgcgtccatctgaacccccagtggcctagtcagccatctcattgccctcgtgggtggagaagtaatccactacctcctgctgccggccatagcagggcccaagaggacaaagtcctaggtggccacgagtgccaaccacactcacagccttggcaggcagccctgtttcagggacagcagctgctgtgtggaggcgttctggtgggtggcaactgggtgttgacagcagcgcactgtaagaaacctaaatataccgtgaggctgggcgaccactctctgcagaataaggacggacccgagcaggaaattccggtcgtgcagagcatcccccacccatgttacaactccagcgacgtagaggaccacaaccatgatttgatgctactccaactaagagaccaggcttccctcggatcgaaagttaagcccatttcactggccgatcattgcactcagcctgggcagaagtgtaccgtgtccggctgggggaccgtaacctccccacgagagaattttcctgatacactgaactgtgcagaggtaaaaatctttccccagaagaagtgtgaggacgcgtaccccggccagataacagatggaatggtctgcgcgggatcgtctaagggcgctgacacttgccaaggggacagcgggggaccactcgtgtgtgacggcgccctgcagggaattactagttgggggtcagacccttgcggcagaagcgacaaacctggcgtgtacacaaacatatgccgttacctcgactggattaaaaaaatcataggtagtaaagggtag

SEQ ID NO: 121374 - DNA, 783 bp, synthetic construct
  misc_feature 1..783: note = Description of Artificial Sequence: Synthetic coding sequence
  source 1..783: mol_type = other DNA
atgggtagaccaaggccccgagcggccaaaacatggatgttccttctgttgctcggcggcgcttgggctggtcactctcgggcacaggaggacaaggttctgggcggccacgagtgtcagccccactcccagccttggcaggctgcactctttcagggacagcaactgctgtgtggcggggttctggtcggaggcaattgggtcttaacagctgcccattgtaaaaagcctaaatatacagtgagactcggagaccattcccttcaaaataaggacggaccagagcaggaaattcccgttgttcagtctataccccacccatgttacaacagtagtgacgtggaggatcacaatcatgacttgatgcttctgcagctgcgggaccaagctagcctaggctctaaggtcaagcctatcagcttggctgatcactgtacacagcccggacagaagtgtactgtgtccggctggggaaccgtcacctcccctcgcgagaatttcccagacactctcaactgtgctgaagttaaaatcttcccccagaagaagtgcgaggacgcctaccccggtcagatcactgatggaatggtgtgcgccgggagctccaaaggcgctgatacctgtcagggcgactcgggtgggccactggtgtgtgatggcgctctacagggcatcacttcttggggaagcgatccttgcgggagatctgataagcctggagtgtacacgaatatatgcaggtacttggactggattaagaaaatcataggatctaaagggtag

SEQ ID NO: 121375 - DNA, 753 bp, synthetic construct
  misc_feature 1..753: note = Description of Artificial Sequence: Synthetic coding sequence
  source 1..753: mol_type = other DNA
atgaagctaggactactgtgtgctcttttatctctactggccggacacggatgggctgacaccagggcaattggtgccgaggagtgcaggccgaattctcagccctggcaagcaggtttgttccatctaacacggctattctgtggcgctacacttatctctgatcggtggctgttgactgctgcccactgtcgcaaaccttacttgtgggtgcgcctaggcgagcatcatttatggaagtgggaaggacccgaacagctcttcagggttaccgacttttttccccacccagggttcaacaaagacctgtccgctaatgatcataacgatgacatcatgctgattagattgccccgtcaagcacggcttagtcctgctgtccagccactcaatctttcacaaacctgtgtgtcacccggcatgcaatgcctgatctcaggatggggggccgtgtcgagccctaaagccctgttcccagtcaccctccaatgcgcaaacatcagtattctggaaaacaagctctgccactgggcctatcccggacatatcagtgattccatgctctgcgccgggctctgggaaggcggtaggggatcttgtcaaggagattcaggaggaccgctagtctgtaatggcaccctggccggcgttgtaagcggaggcgcagaaccgtgttctaggccaagaaggcccgccgtctatacttccgtctgccattatctggactggatccaggaaatcatggaaaattag

SEQ ID NO: 121376 - DNA, 753 bp, synthetic construct
  misc_feature 1..753: note = Description of Artificial Sequence: Synthetic coding sequence
  source 1..753: mol_type = other DNA
atgaagttgggccttctctgtgctctgctcagccttttggctggccacgggtgggctgacacccgggctatcggggccgaggagtgcaggccaaattcccagccgtggcaggccggcctcttccatctgactagactattctgcggcgctacccttatttccgaccggtggctgctgaccgccgcacactgtcgtaaaccctatctctgggtcaggttgggcgaacatcacctgtggaaatgggaaggacccgaacaactcttcagagtaacagacttcttcccccatcctggctttaataaagacctcagcgccaatgaccacaacgacgacatcatgttgatccgactccctaggcaggcccgattgagccccgccgtgcagcccttaaatctgagccagacctgtgtctcacccggcatgcagtgtctaatctccggatggggtgccgtgtcctcgcctaaggctttgtttccggtgaccctgcagtgtgctaatatcagtatcctcgagaacaaactgtgccactgggcctatcccggccacattagtgactcaatgttgtgtgcagggctatgggaaggggggagaggtagctgccagggggattctggagggccacttgtgtgtaacgggacactagctggagtggtgtctggcggagccgagccctgctccagaccacgcagaccagctgtgtataccagcgtgtgccattacctggactggatccaggagatcatggaaaactag

SEQ ID NO: 121377 - DNA, 186 bp, synthetic construct
  misc_feature 1..186: note = Description of Artificial Sequence: Synthetic coding sequence
  source 1..186: mol_type = other DNA
atgaagctcgggctgctctgtgccctgctcagcctgctcgccggcatatgtggaagtgccctcgagtctacgaccagtgggaacggtagggtgagatcatcgtgctctgggttgcggacatcaagccctacccttgcttccacacgaacctctgctccgatgaccaccatgatgacatcctgctag

SEQ ID NO: 121378 - DNA, 2043 bp, synthetic construct
  misc_feature 1..2043: note = Description of Artificial Sequence: Synthetic coding sequence
  source 1..2043: mol_type = other DNA
atggtacccggggtccctggcgccgtattgacactgtgcctatggcttgctgcatcatcagggtgtctggcagctggccctggggcggccgccgctcgccgtctggacgagagtctctccgcagggtcggttcaaagggccaggtgcgcctcccggtgtcttagtctgcaaattacaaggatcagcgcattctttcaacacttccagaacaacggctcactggtatggtgccagaatcataagcagtgttcgaaatgcttagagccgtgcaaggagtccggcgatttgcgcaaacaccagtgtcagtctttttgtgaacctctcttcccgaagaagagctatgaatgtttgacctcgtgtgaatttctgaagtatattttgctggttaaacagggtgactgcccagcaccagagaaggcaagcggctttgcagccgcctgcgtggaaagttgtgaggtcgacaacgagtgctcaggagtcaagaaatgctgtagtaacggctgtggtcatacctgccaggtgccaaaaacattatacaaaggggtgcctcttaagccccgcaaagaactgcggttcaccgaacttcagagcggccaattggaagttaaatggtcctcaaagtttaacattagtatcgagcccgttatttacgttgtacagagaaggtggaattatggcattcaccccagcgaggacgatgcaacccactggcagacggtcgctcagacaaccgatgagcgtgtgcaactgaccgacatcagacctagccgctggtatcaatttcgggtggcagccgtcaatgtgcacggcacacgcggctttaccgccccatccaaacactttcgatcttcaaaggatccttcagcccctccagctcccgccaatctgcgcctggcgaatagcaccgtgaattcagacggaagcgtgacagtgaccattgtgtgggacctgcccgaagaacctgatatccccgtgcaccactacaaggtgttctggtcatggatggtcagttccaaatctttggtgcctacaaagaaaaagaggcggaagacaaccgacgggttccaaaatagcgttattctcgagaagttacagcctgattgtgactacgttgttgaactacaggcaatcacctactggggacaaacaagactgaaaagcgcgaaggtatccttgcacttcacaagcacacatgccaccaataacaaagagcagttggtgaaaactcgaaaagggggaatccagactcaactaccctttcagcgcaggaggcccactcgccccttggaggttggcgccccattctaccaggacggccagctgcaggtcaaggtgtactggaaaaagacagaggatcctaccgtgaacagataccatgtcaggtggtttcccgaggcttgtgcacataatcgcaccaccgggagcgaggcctcttctggcatgacgcatgagaattacataattctgcaagatctctccttttcgtgtaagtataaagtcactgtgcagccaataaggcccaaatctcattcaaaagctgaggccgtgtttttcactacgcccccatgctctgccctgaagggcaagagccataaaccagtgggctgcctgggggaggccggacatgttctgtcaaaagtactggccaaaccagagaacctgtcagcctccttcatagtccaggacgtgaacatcacagggcatttttcttggaagatggcaaaggcaaacttgtatcaacccatgactggctttcaggtgacttgggccgaagtgacaacagaatctagacagaatagcctgcccaattctataattagccaaagccagattctgccttccgatcactacgtgctcacagtccctaacctgagaccatcgaccctgtacaggcttgaagtgcaagtgctgactcctggtggagagggcccagcaacaattaagacctttaggactcctgagctgcctcctagcagtgcacacagatcgcatttgaagcaccgccatccacatcattacaagccttcacccgaacgttactag

SEQ ID NO: 121379 - DNA, 2631 bp, synthetic construct
  misc_feature 1..2631: note = Description of Artificial Sequence: Synthetic coding sequence
  source 1..2631: mol_type = other DNA
atggagttgatcacgatcttggagaaaaccgtgtctcctgatagactggagctagaagctgcacaaaagttcttagagcgggctgcagtggaaaatttaccgacgtttctggtggaactcagcagagtgctggccaaccccggaaactcccaggttgccagggtggcagccggcctgcagattaaaaacagtctcacgtccaaagatcccgatataaaggctcagtatcaacagaggtggctggccattgacgcaaatgcccggcgggaggtgaagaactacgtgctgcagactctgggaaccgaaacatacaggccttccagcgcttcccagtgtgtggctgggatcgcctgcgcagagatccctgtaaaccagtggccagaactgattccacaactggtggctaatgttaccaatcctaactcgaccgagcatatgaaagaaagcacccttgaggctatcggctatatttgccaggacatagacccagaacaactgcaagacaaatcgaacgagatactgaccgccatcattcaggggatgcgcaaggaagaacctagcaataacgtgaagctagcagctaccaacgccctccttaactctctagaattcaccaaggctaacttcgacaaggaaagtgagagacacttcataatgcaggttgtctgcgaggctacgcagtgcccagacactagggtaagagtggcggccctccagaatctggtgaaaatcatgtcgttatactatcagtacatggaaacatatatgggaccagccctttttgctatcacgatcgaggcaatgaagtcagatatagacgaagtggcgttacaagggatagagttctggagtaatgtgtgcgacgaggagatggatttggccatcgaggcatccgaggccgcagagcaaggccggcccccggagcacaccagtaagttttacgccaagggcgccctacagtacctggttccgatcctgacccagacactcaccaagcaggacgagaatgacgatgacgacgattggaacccttgcaaggctgccggggtctgcctgatgcttctggctacgtgctgtgaggacgacatcgttccgcacgtgttaccattcattaaggagcacatcaaaaatccggactggcgataccgcgacgcagccgtcatggcgtttgggtgtattttagaaggccccgagccctcgcagttaaagcctcttgtgatacaggcgatgccaaccctgatcgaattgatgaaggatccctcggtggtagtgcgggataccgcggcctggaccgtgggccgcatttgtgaacttctccccgaagctgctataaatgatgtgtacctggcccccttgttacagtgccttatagaaggcttgagtgctgaacccagggtggccagcaatgtttgttgggcatttagcagtctggccgaggccgcgtatgaggccgccgatgtggccgatgatcaggaagagccagccacatattgtctgtcttccagttttgagctgattgtccagaagctattggagactactgaccgtccagacggccaccagaataacctcaggagcagcgcatacgagtctctgatggagatcgtaaaaaactccgccaaggactgctacccggctgtccagaaaacgaccctcgtcatcatggaacgcctgcagcaagtactccagatggagtctcacattcaatcaacctctgatcggattcaattcaatgatcttcagtctctgctctgtgctacactgcagaatgtgctcagaaaagtgcagcaccaggatgcccttcagatctccgacgtcgtgatggcctcccttctccggatgttccaaagcactgccggctccggtggggtgcaagaggatgctctcatggccgtctccactctggtcgaagtcctggggggcgagtttctgaaatatatggaggcatttaagccctttctcggcattggactgaagaactatgcagagtatcaggtatgtctagcggccgtgggtctggtcggggatctatgccgtgcccttcagagtaatattatccccttttgcgatgaggtgatgcagctcctgttagagaatctcggcaacgagaatgtccatcgcagtgttaagccccagatccttagcgtgttcggcgatatcgcactggctatcggcggggagtttaagaagtatctcgaggtcgtacttaataccttgcaacaggcctcacaggctcaagtcgacaagtctgactatgatatggtagactacttaaatgagttaagggagagttgtcttgaagcttatacaggcatagtgcagggattaaagggtgaccaggagaacgttcatccggatgtcatgcttgtgcaacccagagtggagtttatcttgtccttcatcgatcatatcgccggcgacgaagaccacactgatggtgtggtggcctgcgctgccggcctgattggggatctgtgtacagcctttggcaaggacgtgctgaaactcgtggaggctagacccatgattcatgagctcctcactgaaggcagaaggtctaagactaacaaagccaagaccttggctacttgggccacaaaagagctgcgaaaattgaagaaccaggcctag

SEQ ID NO: 121380 - DNA, 2196 bp, synthetic construct
  misc_feature 1..2196: note = Description of Artificial Sequence: Synthetic coding sequence
  source 1..2196: mol_type = other DNA
atgaaggaatctactctggaggcaataggttatatctgtcaagacatcgaccccgagcaactccaggataagtctaacgaaatcctgactgccatcatccaaggcatgaggaaggaggaaccatccaacaacgttaaacttgctgccaccaacgctttacttaactcattagaatttactaaagcaaatttcgacaaagaaagcgaaaggcactttataatgcaagtcgtatgtgaagcgactcaatgccccgatactagagtgagggttgccgccttacagaatctagtaaagattatgtccttatactaccagtatatggagacctacatggggcctgccctgttcgcgatcacaattgaggctatgaaatccgatatcgacgaggtggcgctgcagggtattgagttctggagcaatgtgtgtgatgaagagatggatctcgcaattgaagcatctgaagccgcggagcaaggacgtccccccgaacacacttctaagttttatgcgaagggtgcactgcagtatctggtcccaatcctaacccagacgttgaccaaacaggacgaaaacgacgatgacgacgactggaatccatgcaaggccgccggcgtgtgtctaatgctactggccacgtgctgtgaggacgacattgtgccccatgttcttccattcatcaaggaacacatcaaaaacccagactggcggtacagagacgcagctgtaatggccttcggctgtatactggaggggccagagcctagccagctgaagcccctcgtcattcaagccatgccgacgctcatcgaactgatgaaagacccatcagtggtagtgagagataccgctgcctggaccgttggccgcatttgtgaacttctccctgaagccgccatcaatgatgtatatctggctccactgcttcagtgtttgattgagggtctcagtgccgagccgcgtgtggctagtaacgtgtgctgggccttcagctccttagccgaggcagcatatgaagctgccgatgttgccgacgatcaggaggagcctgctacatactgcctgtcaagcagttttgaactgattgtgcagaagctcctcgagaccaccgaccgtcctgatggacaccagaacaacctgcggtcctccgcttacgagtccctgatggagattgtcaagaattctgctaaagactgttaccctgccgttcagaagactactctggtgatcatggaacgcctacagcaggttctgcagatggaaagccatatccagagtacctccgatagaatccagtttaatgacctacagtcactgctatgcgccacattgcagaacgtgctccgcaaggtgcagcaccaggacgccttgcagatcagcgacgtcgtgatggcgtccctgcttcgcatgttccagagcaccgcgggctccggcggtgtgcaggaagacgccctgatggccgtgtcgactttagtcgaggtcctcggcggtgaattcttgaagtatatggaagctttcaaaccatttcttggcatcggtttgaagaattacgctgaatatcaggtatgcttggccgccgtggggctggtgggcgatctctgcagagccctgcaatccaatatcatccctttctgtgacgaagtaatgcagctgcttttggagaatctagggaatgagaatgtgcaccggtccgttaagccacagatactttccgtgttcggtgacatagctctggccatcggaggggagttcaaaaagtatctcgaggtcgtcctgaatacactccagcaagccagtcaggctcaggtggataaatccgattacgatatggtagattatctgaacgagctcagagagtcctgtctggaggcgtacaccggcatcgtacagggtcttaaaggtgaccaggagaacgtccatcctgacgttatgctagtgcagccccgtgtagagtttatactgagcttcattgatcacattgctggcgacgaagatcacacagacggcgtggtggcctgtgccgcaggattgattggtgacctgtgcaccgcttttggcaaagacgtgctgaaattagtggaagctcggcccatgatccatgagctgcttacagagggccgtcgcagcaagaccaataaagctaaaaccctggccacttgggcaaccaaggaactgcgcaagctgaagaaccaagcttag

SEQ ID NO: 121381 - DNA, 1983 bp, synthetic construct
  misc_feature 1..1983: note = Description of Artificial Sequence: Synthetic coding sequence
  source 1..1983: mol_type = other DNA
atgaaggaaagcactctggaggctatcggctatatctgccaagacattgaccctgaacagcttcaggataaatctaacgagattctgactgccattatacaaggtatgagaaaggaggaaccttctaacaatgttaaactggctgctaccaatgcgcttctcaactctctggagtttaccaaggctaatttcgataaggagagcgagaggcacttcattatgcaggtggtgtgcgaagctactcagtgtccggacaccagagtgcgtgttgccgcactccagaaccttgttaaaattatgtccctgtattatcaatacatggagacctacatgggaccagcgctgtttgcagatgagaacgatgacgacgacgactggaatccttgcaaggccgctggcgtgtgtctgatgttgctcgccacatgctgtgaagacgacattgtgccacatgtgcttccatttattaaagagcatattaaaaacccggactggcggtacagggatgctgcagttatggcttttggatgtatactcgagggccctgagccgagtcaactgaagcctctggttattcaagccatgcctacgctcatcgaactcatgaaggatccttctgtggtagtacgcgacactgccgcctggactgttggtagaatttgcgaattgctcccggaagccgcgatcaacgacgtgtatttggccccactcttgcagtgcctgatcgagggactctccgccgagccacgcgtggccagcaacgtctgttgggcgttcagctcccttgccgaagcggcgtacgaggccgccgatgttgctgacgaccaagaagagcctgccacttattgtttatcgagtagcttcgagctgatcgtgcagaaactgctggaaactactgacagacccgatggacaccaaaacaatttaagatctagcgcttacgaatccctcatggaaattgtgaaaaactcagcgaaggactgttatcctgctgtccagaagacgacgctggttattatggagcgtttgcagcaggtgctgcagatggagagccacatccagtcaacctctgacaggattcagttcaatgatttgcagagtctcttgtgtgcaacgctacaaaatgttctccggaaggtgcagcaccaggacgcccttcagatctccgacgtggtcatggcatcactacttcgtatgttccagtctactgccggatccgggggcgttcaggaggacgcacttatggctgtgagcacattggttgaggttctgggaggggaatttctcaagtacatggaggcgttcaagcctttcctggggatcggcctgaaaaactacgcagaatatcaggtctgcctcgctgctgtaggtctggtgggagacctctgccgggctctccagagtaatattatacctttctgtgacgaggtgatgcaattgcttctcgagaatctgggtaacgaaaatgtccacagatcagttaaaccccagatattaagcgtgttcggggatattgccttggctattgggggagagttcaaaaagtacctggaggtggtgttgaacactctccagcaggcgtcacaggcccaggtagataagtcagattatgatatggtggactatttaaatgaattgcgcgagtcttgtcttgaagcgtataccgggatcgttcaaggtctcaagggagaccaggagaatgtacaccccgatgtgatgctcgtgcagccccgcgtggaatttatcctgtcatttatcgaccatattgccggggacgaggaccatacggacggcgtggtggcttgtgccgctggactaatcggggatctgtgtacggcctttggaaaggatgtgctcaagctggtcgaggcgaggcctatgatccatgaactcctcacagaggggcgccggtccaagactaacaaagcgaagactctggccacctgggcgacgaaggaactgagaaagctgaagaaccaagcctag

SEQ ID NO: 121382 - DNA, 2196 bp, synthetic construct
  misc_feature 1..2196: note = Description of Artificial Sequence: Synthetic coding sequence
  source 1..2196: mol_type = other DNA
atgaaagagtccacccttgaggctattggctacatctgtcaggacattgatcctgaacaactgcaggataagtcaaatgaaattctcacagctatcatacaggggatgaggaaggaagaaccaagcaataatgtgaaactcgccgcgacgaacgccctgctcaattcattggagttcacaaaggcgaactttgataaggaatctgagaggcacttcatcatgcaggtcgtttgcgaagccacacagtgcccggacacacgcgttagagtagctgcccttcagaacctcgttaagatcatgtctctctattatcagtacatggaaacctacatggggccagctttatttgccataactatcgaggcaatgaagagcgatattgatgaggtggccctccaggggatcgaattctggtcaaatgtgtgtgatgaggaaatggacctcgctatcgaagcctcagaagccgctgaacagggccgaccccccgagcacacttctaaattttatgctaaaggcgctctacaatatctggtccctattttaacgcagacccttacaaagcaggacgaaaacgatgatgatgatgactggaacccctgtaaggccgcaggcgtttgtctcatgctgctggctacatgttgcgaggacgatatcgtaccccatgtgttaccgtttattaaggaacacatcaagaacccagactggaggtatagggatgccgcagtgatggcgttcgggtgtatcttagagggacctgagccatcccagctgaagccattggtgattcaggctatgcctactctgattgagctgatgaaagatcctagcgtggtagttcgtgacacggccgcttggaccgttggtcgaatctgcgagctcctccccgaagcagcgatcaatgacgtgtatctcgcccccttgcttcaatgcctcatcgaagggttaagcgcagaacccagagtggcgagcaatgtttgctgggctttcagcagcctggccgaagccgcgtacgaggccgccgatgtggccgatgatcaagaggaaccagctacttactgtctcagctctagctttgaactcatagtgcagaagctgctggaaaccactgatagaccggacggccaccagaacaacttgagatctagcgcatacgagtcgctgatggagatcgtgaaaaattcagcgaaggactgctatcccgccgtgcagaaaacaaccctggtgatcatggaacgtctccagcaggtattacagatggaatcccacattcagtccacatcagatagaatccaatttaatgatctgcaatccctgctttgcgctacgctacagaatgtgttacgaaaagttcagcaccaggatgcactgcaaatctctgacgtagtgatggcatcactcctccggatgttccagtctacagccggcagcggcggcgtccaagaggatgctcttatggccgtgtctaccctcgtcgaagtgctggggggagagtttttgaaatacatggaggcatttaagcccttcttgggaatcgggctgaagaactatgccgaataccaggtctgcctcgccgctgtgggtctggtgggcgacctatgcagggctctccagtccaatataattccattttgtgacgaagtgatgcaattgttgctggagaatctggggaacgagaatgtccataggtctgtgaagccacagatcttaagtgtgttcggggacatcgccctggcaatcggcggcgagttcaaaaagtacctggaagtggtgctgaatacgttacaacaggcttcgcaggcgcaagtggataagagtgactacgatatggtggactacctaaatgagctccgagaatcctgccttgaggcctacactggcattgtgcagggattaaaaggcgaccaggaaaatgtgcatcctgacgtgatgctcgtgcagccccgcgttgagttcattctgtcgtttatcgaccatatcgcaggtgacgaggatcataccgacggggtggtcgcatgtgctgccggcctcataggtgacttgtgcactgcttttggcaaagatgtccttaagctggtggaagccagaccaatgatccacgagctgttgacagagggacgaaggagcaagacaaacaaggccaagactctggccacttgggcaactaaagaactgcggaagctgaaaaatcaggcctag

SEQ ID NO: 121383 - DNA, 1617 bp, synthetic construct
  misc_feature 1..1617: note = Description of Artificial Sequence: Synthetic coding sequence
  source 1..1617: mol_type = other DNA
atgactactcctggtaaggagaatttcaggctgaaaagttataagaataagagcttaaatccagacgagatgcgaaggcggagggaggaagaaggcctgcagcttagaaaacagaaaagggaagaacagctgtttaagagacgcaacgtagcgacagccgaggaagaaacggaagaagaggttatgagcgacggggggtttcacgaagcccagatcagcaatatggaaatggcacccggcggagtgattacttccgatatgatagagatgatcttctccaaaagccccgagcagcagctaagcgccacacagaaatttcgtaagctactgagtaaagagccaaaccccccaatcgatgaggtgattagcactccaggcgtggttgctcgattcgtggagttcctgaagagaaaggagaactgtaccctacaattcgagtccgcctgggtcctgacaaacatcgctagtggcaattccttacaaactagaatcgttattcaagctggtgccgtgcctattttcattgagctgttgtcctctgagttcgaggatgtgcaggagcaagccgtgtgggccctggggaatatcgcgggggattccacgatgtgtagagattacgtgcttgattgtaatatcctgcctccactgctccagttattctccaaacagaataggctgacgatgacaaggaacgcggtctgggctttgtctaacctgtgccgggggaagagccctccgcctgaattcgctaaagtctccccatgcctgaatgtgctcagctggctgctgtttgtgagcgacactgacgtgctggctgatgcctgctgggctttatcttacctgtccgacggtcctaatgataagatccaggccgtgatcgacgcaggggtatgccggcgtttagtggagttgctcatgcacaacgactataaagtcgttagccccgccctgcgcgctgtcggtaacatcgttaccggcgacgatattcagactcaagtgatcctgaattgcagtgcactgcagagcttgctgcatcttctttctagccccaaggaatccatcaaaaaggaagcatgctggaccatctccaatattacagccgggaatcgcgcccagattcaaacagtcattgatgcgaacattttcccggccttgatctctatcctgcagactgcggaattcagaacaaggaaggaggccgcgtgggctataaccaatgctacatccggcggctctgcggaacaaattaagtacctcgtggagctggggtgtatcaaacctttgtgtgatctgctcactgtcatggactccaaaattgtccaggtggcactgaatgggctggaaaatatcctcagactcggagaacaagaggctaagaggaacggcacaggaattaatccctattgtgccctgattgaggaggcctatggactggacaaaatagaattcctgcagagccacgaaaaccaggagatctaccaaaaggcattcgatttgatcgagcattatttcggcactgaggatgaggacagtagcatcgctccccaggtggatctgaaccagcagcaatatatttttcagcagtgcgaagctcccatggaaggttttcaactttag

SEQ ID NO: 121384 - DNA, 987 bp, synthetic construct
  misc_feature 1..987: note = Description of Artificial Sequence: Synthetic coding sequence
  source 1..987: mol_type = other DNA
atgacaaccccaggcaaagagaacttccgtctgaagtcttataagaataagagcctgaaccccgatgaaatgcgcaggcggcgggaggaggagggtttacaactgaggaagcagaagcgtgaagagcagctcttcaaacgacgcaatgtcgcaactgccgaggaggagactgaggaggaggtcatgtctgacgggggattccacgaggcccagatctctaacatggagatggccccaggaggagtgatcacgtctgacatgatagagatgatcttcagcaaaagcccggagcagcagttgtctgcaacgcaaaagtttagaaaactgttgtcaaaggagcctaacccccctattgacgaggtaattagcacaccaggcgtagtagctaggttcgtggagttcttaaaacgcaaggagaactgcacactacaatttgaaagcgcgtgggtgctcacaaatattgcctctgggaatagcctccagaccaggatagttattcaagctggcgctgtcccaatcttcattgaactgctttcctccgaatttgaggatgtgcaagagcaagccgtgtgggcactaggaaatatcgcaggagactccacaatgtgccgggattacgtgttggactgcaatattttgcctccgcttttacagttgttctccaagcagaatcggctgaccatgactcgcaacgcggtgtgggccctctcgaacttgtgcaggggtaagtcacctccccctgagttcgcaaaggtttccccttgcctgaacgttctctcttggttattgtttgtgtccgatacagacgtcctcgctgacgcctgttgggccttgtcttacttgtcagacggccccaacgacaaaatacaagctgtgatagatgcaggagtgtgtcgccgattggtagaactgctgatgcataacgattacaaggtcgtctctcccgcactcagggccgtgggcaacatcgttaccggagacgattag

SEQ ID NO: 121385 - DNA, 648 bp, synthetic construct
  misc_feature 1..648: note = Description of Artificial Sequence: Synthetic coding sequence
  source 1..648: mol_type = other DNA
atgactactcccggtaaggaaaattttaggttgaaatcctataagaataaaagccttaaccctgatgagatgcgccgaaggagggaagaggagggattgcagctgcgaaaacaaaagcgtgaagaacagctcttcaagcgaaggaacgtagcaacggcggaggaggaaactgaggaggaggttatgtccgacggcgggtttcacgaggcacaaatttctaacatggaaatggccccaggcggtgtgatcacaagcgacatgattgagatgattttctctaagtcgcctgaacagcagctcagtgctacacagaaatttcggaagctgctcagcaaagaaccgaatcccccaatcgacgaagtaatttcaacaccaggcgtggtagcacgattcgtggagttcctgaagagaaaggagaattgtacgctgcaatttgagagcgcctgggtgctgacaaacattgccagcggtaactcccttcaaactcgcatcgtcattcaggctggtgcggtacccatcttcatcgaactgctgtcaagcgaatttgaggacgttcaggagcaagcggtctgggcactggggaacatagcaggtgactctactatgtgccgagattatgtgctggattgtaacatcctgcccccatag

SEQ ID NO: 121386 - DNA, 525 bp, synthetic construct
  misc_feature 1..525: note = Description of Artificial Sequence: Synthetic coding sequence
  source 1..525: mol_type = other DNA
atgaccacacccgggaaggaaaacttcaggctcaaaagctataaaaataagtctttgaatccagatgagatgagacggcgaagggaggaggaaggtctgcaactgcggaagcagaagcgtgaggaacagctgtttaagagacggaatgtggccaccgcggaagaggagacagaagaggaggtcatgtcggatggtgggttccacgaggctcagattagtaatatggagatggctccgggcggagtgattaccagcgacatgatcgaaatgatcttctctaaatcacccgagcagcagttaagtgcgacccaaaagtttcgcaagcttctcagtaaagaaccaaacccgccaatcgatgaagtaatatctacaccaggggttgttgcacggtttgtggaattcctgaagcggaaggaaaattgcacgctgcagtttgagagcgcatgggtgttaaccaatattgcttccggcaattctctgcagactcgtatcgtgattcaggctggagctgttccaatcttttag

SEQ ID NO: 121387 - DNA, 1566 bp, synthetic construct
  misc_feature 1..1566: note = Description of Artificial Sequence: Synthetic coding sequence
  source 1..1566: mol_type = other DNA
atggcagagaacccttctctagagaatcaccgaatcaagtcatttaagaacaaaggcagggatgtcgagacaatgagacgtcaccggaacgaggtgaccgttgagctgcgaaagaacaagagggatgagcatctgttgaagaagcgaaatgtgcctcaggaggagtctctggaggactcagacgtggacgctgactttaaagcccaaaatgttactttggaagcgatccttcagaatgccacaagtgacaaccctgtggtgcaactcagtgcagtgcaggctgccagaaagctgctgtcgagtgatcggaacccccccattgatgacctgatcaagtctggaattctcccaatcttagtcaaatgcctcgaaagggatgacaacccctcattgcaatttgaggccgcgtgggctttgaccaatattgcctccggtacctctgcccagacgcaggccgtggtacaatctaacgcagtaccgctgttcttacgcctcctaaggagcccccaccagaatgtctgcgagcaggccgtatgggctctgggcaacatcatcggtgacggaccccagtgtcgagattacgtgatttctctgggggtcgtcaagccgctcctctcttttatatccccttctatcccaattaccttcttgaggaatgtgacatgggtcatcgtgaacctatgtagaaacaaggacccccccccgcctatggaaactgtgcaggaaatactccccgcactttgcgtgcttatttatcatacagatatcaacattttagtggatacagtgtgggcccttagttatctaacggatggggggaatgagcagatacagatggtcatcgattcgggcgtggtgccgtttctagtgccgctgttgagccaccaggaggtcaaggtgcaaacagcggcacttagagccgtcggaaacattgttaccggcacagatgagcagacccaggttgtgctcaactgtgacgtgctctctcactttcccaatctactgagccatcccaaggagaaaataaacaaggaggccgtgtggttccttagcaatatcaccgccggtaaccagcagcaggttcaggctgtgattgatgccggactgattcccatgatcattcaccaactagcaaagggggacttcggcactcagaaggaagctgcatgggctatatcaaacctgaccatctcaggtcggaaagaccaggtggagtatcttgtccaacaaaacgtcatccctccgttctgtaatttactgtccgttaaggactcacaggttgtccaggttgtgctcgatgggttgaaaaatatcctaataatggctggtgatgaggcctctacaattgctgagataatcgaggagtgcggcggcctcgagaagattgaggtgctacaacagcacgagaatgaggatatctacaagcttgcttttgaaatcattgaccaatacttctctggcgacgacatcgatgaggatccatgtctcattcctgaggcgacacagggcggcacatacaactttgatcctacagccaacttgcagaccaaggagttcaatttttag

SEQ ID NO: 121388 - DNA, 1566 bp, synthetic construct
  misc_feature 1..1566: note = Description of Artificial Sequence: Synthetic coding sequence
  source 1..1566: mol_type = other DNA
atggcagataatgagaaactggataaccagcgcttgaagaatttcaagaataaaggaagggatttagagacgatgagacgccagcgaaacgaggtcgtggtggagttgcgaaagaacaagagagacgagcatctcttaaaaaggcggaacgttcctcacgaggatatttgtgaagacagcgacatcgacggggactatagagtccagaacacctccctcgaagctatcgtccagaatgctagtagtgacaaccaggggattcagctgtctgctgtgcaagccgcaagaaagttgctgtcctctgaccggaatccacctatcgatgatctcataaagagcggtatcctgcccatcctggttcactgtctggaaagagatgataaccccagcctgcagttcgaagcagcgtgggcattgacgaatattgctagcggcacaagtgagcagacccaagccgtagttcagtctaatgctgtgcctctttttttgcggctgctgcacagtcctcatcaaaacgtctgcgagcaggctgtgtgggccctgggcaacatcattggagatggtccccaatgcagagattatgttatatccctcggcgtagttaagccactgctgagctttatcagcccttctataccaattacgtttctgaggaacgtaacctgggtcatggtgaatctgtgccgccacaaagaccccccccctccaatggaaaccatccaggagattttgccggccctctgcgtcctcatccaccacacagacgtgaacatattagttgacacggtttgggccctgagctatcttactgacgcagggaatgagcagatccagatggtgatcgattcaggcatagtgcctcatctggtgcccctgcttagccatcaggaggtgaaggtgcagacagcagccctgagggccgtagggaacattgtgactgggaccgatgaacagacacaggtggttcttaattgtgatgccctttcacactttcccgcattactgacacaccctaaggaaaaaattaacaaggaagcagtgtggttcctgagcaacatcactgccggaaaccagcagcaagtccaggcagtaattgatgctaacttggtccctatgataatccatctcctggacaaaggagactttggtacccagaaggaagccgcatgggccatttcgaacctgacaataagcggcaggaaggatcaagtggcctacctgatccagcaaaacgtcatccccccattttgcaatctgttaacagtcaaagacgctcaggtggtacaagttgtcctggatggcctgagcaacatcctgaaaatggccgaagacgaagcagagaccatcggtaatctcatcgaggagtgtgggggcctggagaaaattgaacagctccagaatcacgaaaatgaagacatctataaattggcctacgagattattgaccagttttttagttctgatgatatcgatgaggaccctagcctcgtacccgaggccatccagggaggaacctttggctttaattcatcagctaacgttccaactgagggtttccagttctag

SEQ ID NO: 121389 - DNA, 1551 bp, synthetic construct
  misc_feature 1..1551: note = Description of Artificial Sequence: Synthetic coding sequence
  source 1..1551: mol_type = other DNA
atgcctacgctagacgcccctgaggagcggaggagaaagtttaaatatagaggtaaggatgtgtctcttcggcggcagcagcgaatggcggtgtccttagaactccggaaagcaaaaaaagatgaacagacactcaagcggagaaatattaccagtttctgtcctgacactcctagtgaaaagacagcaaaaggtgtggcagtttcactgacacttggtgaaataattaaaggagttaattcatcagatcctgtgctgtgtttccaggccacacagactgcacgcaaaatgttatcccaggagaaaaaccccccactgaaattggtcatcgaagccggcctgatcccccgaatggtggagtttctgaaatcgagcctctacccttgtttacagtttgaggcagcatgggccctcacaaacatcgcaagtggcaccagtgagcagaccagggccgtggtggagggtggcgccatccagcctctcatcgagttgctgagctcaagtaatgttgccgtgtgcgagcaggccgtctgggctctcgggaatatcgccggagatgggcccgaatttcgggacaacgtcattacatcaaatgccatacctcacctcctggcactcatttcccccacactgccgataacgttcctccgaaatatcacatggactcttagtaacctgtgccggaataaaaacccttatccttgtgataccgcggttaagcagattctgcctgccttgttgcatttactacaacaccaggattctgaagtactcagcgacgcctgctgggcccttagctatctgactgacggctcaaacaagcgtatcggacaggttgtcaatacgggagtgctgccccggctggttgtgttgatgacttcaagcgaactcaatgtactaactcccagtctgaggacagtcggaaacattgtgactgggacagatgaacagactcagatggctattgatgccggaatgctgaatgtgcttcctcaactacttcagcataacaagccctccattcaaaaagaggccgcatgggcactatctaacgttgcggccggtccctgccaccatatccaacagttactggcttatgatgttctacccccactcgtggccctattgaaaaatggtgagttcaaagtgcagaaggaagccgtttggatggtggccaattttgccactggcgcaaccatggatcagctgatccagctcgtgcatagcggagtgctcgagcccctcgtcaacctactgaccgctcccgatgtgaagattgtgctgattatactcgatgtgatttcttgtatcctgcaggccgccgagaagagatctgagaaagaaaatttgtgtctgctgattgaagaattgggcggcatagataggattgaagctcttcagttgcacgagaaccggcagattggacagtccgcccttaacatcattgagaagcattttggtgaggaggaagatgagagccagacactactgtcgcaggtgatcgatcaggattatgaatttatcgattacgagtgcttagcaaaaaagtag

SEQ ID NO: 121390 - DNA, 3318 bp, synthetic construct
  misc_feature 1..3318: note = Description of Artificial Sequence: Synthetic coding sequence
  source 1..3318: mol_type = other DNA
atggccgccatggccccagctctgactgacgctgcggcggaggcacaccacattcgtttcaagttagcccctccatcctcaaccttatcgccgggaagcgctgagaataatggaaatgccaacatactgattgccgccaatggcacgaaacgaaaggccatcgcagcagaggatccgtctctggacttccgcaacaatcccacaaaggaggaccttggcaaactgcaaccgctggtggcctcatatctgtgctctgatgtaacgagtgtgccttcaaaagagagtctgaaactccagggggtcttcagtaaacagaccgttctgaagtcacaccctctgctgtcccagtcatatgaactgcgcgcagaactgctgggaagacagccggtccttgagtttagcctcgagaatctccggaccatgaacacctccggccagacagcactcccccaagcccctgtgaatgggttggctaagaaactgacgaagtcatctacacacagcgaccacgataatagcacgagcctcaacggcggaaagagggctctgacttcctccgccttgcacggcggagagatgggcggcagcgagtcgggagacctgaaagggggtatgaccaactgtacgctcccccacagaagtcttgacgtcgaacacaccactttgtatagcaacaacagtaccgcgaacaagtcttcagtgaattcaatggagcagcctgcattacagggtagctcacgactatcacccggcacagactcgagcagcaatctgggaggcgtcaagctggagggcaagaaatcaccgctcagctcgattctgttttcggccctcgatagtgacacgcggatcaccgccttacttcggcggcaagctgacatagagagccgcgccagaaggcttcagaagaggttgcaggtagtgcaggctaaacaggtggaaagacacatccagcaccagcttggtgggtttctggaaaagaccctatcaaaacttcccaatctcgaatccctgcgaccaagatcccaattgatgcttacccggaaggcagaggccgccctgaggaaagccgcttccgagaccaccacgtctgagggcctgagtaacttcctgaagtcaaacagcatcagcgaagaactcgagcgcttcacggcctccggtatcgcaaacttgcgctgtagtgaacaggcgttcgatagtgacgtgactgattccagctccggtggtgaatccgatatagaagaagaggaactgacccgggccgatcctgagcagcgccacgtgcctttacgtagacgaagcgagtggaaatgggcagcagatagagcagcaatcgtgtcacgctggaattggctccaggcacacgtgtccgatttggaatataggatcaggcaacagaccgacatctacaaacaaattcgtgccaacaaaggattgattgtgctgggagaggtgccaccacctgaacacaccacggatctgtttctacccctgagcagtgaggtgaaaacggaccacggaactgataagctcatcgaatcagtcagccagccactggagaatcacggcgcccgtattatcgggcacatatctgagtccttaagcaccaagtcttgcggagcgctgaggcccgttaacggggttattaacaccctccagccagtgctagcagatcacatacctggcgactcttccgatgccgaggagcagctgcacaaaaaacagaggctgaaccttgtttcttcctcttctgacggcacgtgcgttgctgcacgaacacggcctgtgctgtcttgtaagaaacggcgccttgtccgtccaaacagtattgtacctctctccaagaaagtacatcgcaatagcacgataaggcctggatgcgacgtaaacccatcatgtgccctctgtggttctggctccattaatacaatgccacctgaaattcactacgaagcaccccttctggagaggttatcccagctcgatagttgtgttcatccagtactggcctttccagatgacgtgcccacttctctccattttcagagcatgctcaagtcccagtggcagaataagcctttcgataaaatcaagcccccaaagaagctctctttgaagcacagggctcccatgcccggaagcctgcctgatagcgcaagaaaagacaggcacaagcttgtttcatcctttctgacaacagcaaaactcagtcaccatcaaacccgtccggatcggacgcacaggcagcacttagacgacgtgggcgcggtgccaatggtggagagagtcactgcgcctaaggccgagcgactgttaaatcctcccccccctgtgcacgatcctaatcactcaaaaatgaggctgagagaccactccagtgagcgtagcgaagtgttgaagcatcacaccgacatgtcatcatcttcttatcttgcggccacacatcatccaccccattctcccttagtcagacagctgtccaccagctctgacagccccgcacctgcatcctcctctagtcaggtcacggcaagtactagtcagcagccggtcaggaggagaaggggcgagtcaagcttcgatattaataacattgtgatcccaatgagcgttgccgccactacacgggttgaaaaactgcagtataaggagatcctgacacctagctggagagaagtggacctgcagtcgctgaaaggttcgccagatgaagaaaacgaggagatcgaggacctgtcagatgccgcttttgcggcgctgcacgccaaatgcgaggagatggaacgagcaagatggctgtggactaccagcgtcccccctcagcggcggggaagtcgttcatacaggagcagcgacggcagaacaaccccgcagctgggcagtgcaaatccttccactcctcaaccggcatctcccgatgtgtcctcctcacacagcttgtcagaatacagccatggacaatcccctagaagcccaatctcacctgagttgcactccgccccccttacgccagttgcgagagatactcccaggcacctcgctagtgaggacacgcgctgctctaccccagaactcgggctggacgagcagagtgtccaaccttgggagcgtagaacctttcctctggcccattctccacaagccgagtgcgaggaccagctggacgctcaggagcgagctgcccgttgcacaagacgcacctctggttccaaaaccgggagagagactgaagccgccccaacatcccctccaattgtgcccttgaaatcacggcatctggtggctgccgcaacagcccaacggcccacccataggtag

SEQ ID NO: 121391 - DNA, 1200 bp, synthetic construct
  misc_feature 1..1200: note = Description of Artificial Sequence: Synthetic coding sequence
  source 1..1200: mol_type = other DNA
atgccacctgagatccactacgaggcgccactcttggagaggttatcacagctggattcctgtgttcaccctgtgcttgccttcccagacgacgtccccacctccctgcatttccagagcatgttgaagtcacagtggcagaataagcccttcgacaagattaaaccgccaaagaagctaagcttgaagcatagggcgcccatgcctggctcccttcctgacagcgccagaaaagaccgccacaagctggtctcaagttttctgactacagcaatgctgaagcaccatacagacatgagcagcagctcatatctggccgctacccatcacccacctcactcccccctcgtgaggcaactgagcacttcatcggacagtcccgctccggccagctcatcttcgcaggttactgccagcacgagccagcagcccgtgcgccgccgcaggggcgagagcagctttgacatcaacaatatagttatccccatgagtgtggccgctactacacgggtggagaaacttcagtacaaagaaatcctaacaccctcctggcgtgaggtggatctgcagtccctgaagggaagccctgatgaagagaacgaggagatagaggacctgtccgatgccgctttcgcagccctgcatgccaaatgcgaggagatggagagagcccgctggctgtggactacttctgtccctccccagcggagggggagccgatcctatagaagttcagatggacggacaacacctcagctgggatccgccaatccctctactccgcagcccgcaagcccagatgtcagctcgtcccattcactgtcagaatattcccacggccagagtccacgtagcccgatcagcccagaacttcattccgctcctttgacccctgtggctcgtgacaccccccggcatctggccagcgaggatacacggtgtagcacccctgaactggggttggacgagcagagcgtccagccatgggaaaggaggacttttcctcttgcccattcgccccaggctgagtgtgaggatcagctggacgcccaggaaagagcggctcgctgcacgcggaggacatcaggatccaaaacaggacgagaaaccgaggcagcgcccaccagcccacctatcgtgcccttgaagagcagacacctcgtcgcggccgccacagcccagcggccaacacaccggtag

SEQ ID NO: 121392 - DNA, 3318 bp, synthetic construct
  misc_feature 1..3318: note = Description of Artificial Sequence: Synthetic coding sequence
  source 1..3318: mol_type = other DNA
atggcagccatggctccagcactgactgacgcagccgcggaggcccaccatatcaggttcaagctcgctcctccttccagcacactgagtcctgggtccgccgagaataatggcaacgctaacatactcatcgccgccaacggtaccaaaagaaaagcgatagccgcagaagatcccagtttggactttaggaataatcccaccaaggaggaccttggaaagctgcagccactggttgcaagttacctttgttccgacgtgacgagcgtgcctagcaaagagtcattgaaactccagggcgttttcagcaagcagacagtgttgaagtcccaccccctcttatctcagtcttacgaattacgcgccgaactgttgggacgacaacctgtcctagaattctccttggagaacctccgaaccatgaacacatctggccagactgcgctaccccaggcgcccgttaatgggctggccaagaagctcacaaagtcttctacccactcagaccatgacaactccacaagtctgaacggggggaagagagctttgactagctctgctctccacggaggtgaaatggggggcagcgagtctggggacttgaaggggggaatgacgaactgtacactaccacaccggtcgctagacgtcgagcacaccaccctgtacagcaataacagtactgccaataaatcatctgtgaactcgatggaacaacccgctttgcaggggtcttccaggctcagccctggcaccgattccagttccaacttaggaggggtaaagctggaaggaaagaagtctccactgtcctcgatcttattctcggccttggattccgacacaaggatcacagccctcctgcgccgccaggccgatatagaaagccgagctcgccgactccagaagagattgcaggtggtccaggcaaaacaagtagaaaggcacatacaacaccagcttggaggattccttgaaaaaactctatctaagctccctaaccttgaatctttacgacctcgctcgcagctcatgctgactagaaaagccgaagcagccctgaggaaggcagcctctgaaactacgacctctgaaggacttagtaactttctcaaatcaaactcaattagcgaggaactggagagattcaccgcatcagggatagccaacttgcgctgttccgagcaggcttttgattccgacgtgactgatagctcatccggcggagaaagcgacatcgaagaagaggaactgacaagggctgaccctgagcagcgtcatgtccctttacgacggcgatctgagtggaaatgggccgcggatcgagccgcaattgtgtcacggtggaattggctgcaagcccacgtgtctgatctcgaatacagaattaggcaacaaacagatatatacaagcagatccgcgcaaataaaggtttgatcgtgttaggggaggttcctccgccagagcatacgacggatttgtttctgccactgagtagcgaggtgaagactgatcacggcactgacaaactcatcgaatcagtcagccaaccgctcgagaatcacggcgctcgcattatcggccacatctctgagagcttgtccaccaaaagctgcggagctctgagacccgtcaatggcgtgattaacactcttcagcccgtcttagcagaccatattccaggggatagctcagacgccgaagagcagctgcataaaaagcagcgactgaatctggtgagctctagtagcgacggaacttgtgtggcagccaggactcgccccgtactatcttgcaagaaaagacggttggtaaggcctaactcaattgtaccactgtctaaaaaagttcaccggaacagtacaatacgcccagggtgcgacgtaaatccatcatgtgcgctttgcggtagtggcagtattaataccatgccaccggagatccattacgaggcccctctgctcgaacggctgtcccaactcgattcctgtgtgcatcctgtcctggcattcccagacgacgtgccgacatcattgcacttccagtctatgctgaaaagccagtggcaaaacaaaccgtttgacaagatcaaaccacccaagaaattgtccctgaagcacagagcgccaatgccagggtccctgcctgactccgcgcgtaaggacaggcataaactagtttcttcatttttgacaaccgcaaaactgtcgcaccatcagacacggccggatagaacccacaggcagcacctcgatgatgtgggagctgtcccaatggtagagagggtgaccgcccccaaagccgagcggttgctcaatcctcctccacccgttcacgatcctaatcacagcaaaatgagactgcgagatcatagctcagagaggagcgaagtgctgaaacaccatacagacatgagcagtagcagctacctcgccgcgacgcaccaccccccgcattcccccttggttcgccaactcagtacctcatcagatagccccgcacctgcatcttcttcatctcaggttacagcctctaccagtcagcaaccagtgcgtaggcgcaggggagagagttcttttgacatcaacaatatcgtgataccgatgagcgtcgctgctacaacacgagtggagaaactacaatacaaagaaatactgactccttcctggcgcgaagtcgatctccagtcactgaaaggtagccccgacgaggagaatgaggagatcgaagacttgagcgacgctgccttcgcagcactacatgctaaatgtgaggagatggaacgggccaggtggctctggactacatcggtgccaccgcagaggagagggagcagatcctaccgctcctccgatggacgaactaccccacagttgggctctgccaatccgtcgacccctcaacctgcgtccccagacgttagcagcagtcatagcctgtccgagtattcccatggtcagtcccctcgatctccgataagccccgagcttcattcagccccccttacacccgtggcgcgggacacgccccgccaccttgccagcgaagacactcgttgttccacacctgagctgggcttggatgagcaatctgtgcagccctgggagagacgcacctttcccttagctcacagtccccaggcagagtgcgaagatcagttagacgctcaggagagagccgcgcgctgtacgagaagaacatcagggtcgaagactggaagggagacggaggcagccccaacgagcccccccatcgtgccattaaagagtagacatttagttgctgcagcgaccgcacagcgccctacccacagatag

SEQ ID NO: 121393 - DNA, 3318 bp, synthetic construct
  misc_feature 1..3318: note = Description of Artificial Sequence: Synthetic coding sequence
  source 1..3318: mol_type = other DNA
atggccgccatggcccccgccctaacagacgctgccgcagaggctcaccacatccgctttaagctggctcctcccagcagcacactgagccctggcagcgctgagaacaatggtaatgctaatattctaatcgccgcaaacggaactaaacgaaaggcaatcgccgcagaggacccatctttggacttccggaacaaccctacaaaggaagatttggggaaactacagccactggtcgcttcttacctctgctcagatgttacttccgtcccatctaaagagagcctgaaactacagggggttttctctaagcagaccgttctgaagagccaccctctcctgtcccagagctacgagcttagagcagagttgctggggcgccagcccgtgttggaattctccctcgaaaacctgaggactatgaacacatcaggacagaccgcgctgcctcaggctcccgtgaatggactggctaaaaagctgacaaagagctcaactcacagtgatcatgacaacagtacctctctcaacggaggaaaacgcgctttgaccagtagtgctttacatgggggagagatgggggggtccgaaagtggggacttgaaggggggaatgactaattgcacactccctcacaggagtttggacgtcgagcacacaaccctgtactctaataattccaccgcaaataagtcctctgtgaatagcatggaacagcccgccctccaggggagctcaaggctctctcctggcaccgattcgagtagcaatctgggaggggtcaaattggagggaaaaaaatcaccgctatctagtatactattcagtgctctcgattcagacacccggatcaccgcactgctgaggagacaggcagatattgaatctagagcccgccgattgcagaagagactgcaggtggttcaagctaagcaggtagagcggcatatccagcaccagcttggaggatttcttgagaagactctctccaaactaccaaatctagagtcgctcaggcctcgatcccaactcatgttgacccggaaagctgaagcagctctgcggaaagctgccagcgaaacgactacatctgaagggttgtcaaactttcttaaatcaaactctattagcgaggaattagagcgtttcaccgcctcaggaatagccaacctgcgatgttcagagcaagcatttgattctgatgttacagactcctcctcaggtggcgaatccgacatagaggaggaggagttgactcgtgcagacccagaacagagacacgttccccttagaaggcggtcagaatggaaatgggccgcagatcgcgctgctattgtgtccaggtggaattggcttcaggcccatgtgtcggacctggagtaccgcatccgccagcagactgatatttacaagcagattagagctaataaagggctgattgtgctgggggaagtccccccacctgagcataccaccgatctctttctgcctctgagttcagaggttaaaaccgatcacggcactgacaagttgatcgaaagtgtgagtcaaccgctcgaaaaccacggcgcacggatcatagggcatataagcgaaagcctatctactaaaagctgcggggctctgcggcctgtgaatggcgttattaataccctgcagcctgtcctcgccgatcatatcccaggagatagcagcgacgctgaggagcagctgcacaagaagcaacgactgaaccttgtgagctcgagctctgatggtacctgcgtagcagcccgtactcggcctgtgctgtcttgcaagaagagaagactcgtgcggcctaattcaatcgtccccctctccaagaaggtacaccgtaacagtacaattcgccctggatgcgatgtgaatccgtcttgcgccctgtgcggtagcggtagtatcaacacaatgcctccggaaattcattacgaggcaccacttctcgaaagactaagccaactcgactcttgcgtgcatcctgtgctggcattccctgatgacgttcctacttcattacacttccagagcatgcttaagagccagtggcaaaataagccattcgataagatcaagccgccaaagaagctctcccttaaacacagggccccaatgccaggttcgctgcctgatagtgccagaaaggatcgtcacaaactggtgagcagttttctgactacagccaaactcagccaccatcaaacgcgtccagatcgcacgcatagacagcatctggatgatgttggggccgtcccgatggtggagcgcgtcactgccccgaaagccgaacgcttattaaaccctccgcctccagtgcacgatcccaaccactcaaaaatgcgccttcgagaccatagctcagaacggtctgaagtgttgaaacaccacactgacatgagttcttcctcttacttggccgccactcatcacccaccacattcaccacttgtaagacagttaagtactagtagcgacagtccagcgccggctagcagctccagccaggtaacggcgagcacctcccaacaaccagttagaagacgaaggggagagtctagttttgatataaataacatagttatccctatgagcgtcgccgcaactactcgcgtggaaaagctgcagtataaagaaatcctgacacccagctggcgggaagtggaccttcagagcctgaagggcagcccagacgaagagaatgaagaaattgaggacctctccgatgcggcttttgccgccttgcacgcaaagtgtgaagagatggagcgggctagatggctctggaccacgtcagtgccccctcagcgccggggctctcgcagctatagaagttctgacggccgcactacgcctcagctggggtccgctaacccctctactccacagccagcctcacctgatgtcagttcctcccactcactgtcagagtatagccatggccaaagtcctcgatcccctatatccccagagctgcactccgctccactcactcccgtcgccagagacacgcctcgtcatctcgcctccgaggatacgcgttgctccacacccgaactcggtctggacgagcagtctgtgcagccatgggaacgccgaacctttcctttggcccatagccctcaggccgagtgtgaagaccaactcgatgcacaggagcgcgctgcaagatgtacaaggaggacaagtggaagtaagactggcagggaaacagaagcagcacctacaagccctcccatcgtaccccttaagagtcggcacctagtggccgcagcaaccgcacagcgtccaacacatcgctag

SEQ ID NO: 121394 - DNA, 3318 bp, synthetic construct
  misc_feature 1..3318: note = Description of Artificial Sequence: Synthetic coding sequence
  source 1..3318: mol_type = other DNA
atggcggcaatggctcccgcgttgacagatgccgctgccgaggctcaccatatcaggtttaaactggcacccccctcgtccactctatccccaggcagcgctgaaaacaatggcaacgccaacattcttattgccgccaatggcaccaaacgcaaagcaattgctgccgaggacccatcacttgattttaggaataatcccactaaggaggacctggggaagctgcagcctctcgtcgcgtcttacctgtgttcggatgtcactagcgttccatctaaagagagcctgaaactccagggagtatttagtaaacagactgttttgaagtcacaccccttacttagtcaatcctacgaactgagggccgaattactcgggcgtcagcctgtactggaatttagtttggagaacctcagaacaatgaacacatccggccagaccgccctgcctcaggctcctgtcaatgggctggcaaagaagctcaccaaaagcagtacccatagcgatcatgataattctacatcactcaatggcggcaagagggcccttacatcaagtgcacttcacgggggagaaatgggcggtagtgagtccggagacctgaaaggcggcatgacaaactgcactctgcctcacaggtccctcgacgtggagcatacaacactgtactccaataatagtactgcgaacaaatcctcagtcaattctatggagcaaccagctttgcaaggttcatccaggctcagtcctggtaccgactcgtctagcaatctcggcggggtgaagctcgaagggaaaaaatctccactgagcagcattctgttttcagcactggattctgacacccgcataaccgcccttctgagaaggcaggctgacatcgaatctcgtgcaagaaggctgcagaaacgattgcaggttgtacaagctaaacaggtggagcggcacattcagcatcagctcggcgggttcctcgagaagaccctgtcaaagttacctaaccttgagagcctacggcctcgctcccagctgatgctgaccagaaaagcagaggcagctttgcgcaaggctgctagtgagacaacaacatccgaggggctgagcaactttctgaaatctaacagtatatcggaggagctagagaggttcacggccagtggcatagctaacttgcggtgtagtgaacaagcgttcgattccgatgtgaccgatagtagcagcggcggggaatcagacatagaagaggaggagttgacaagagcggaccctgagcaacgccacgtgcctcttaggcgcaggagtgaatggaagtgggccgccgaccgagctgccatcgtctctcggtggaactggcttcaggcgcatgtgtccgaccttgagtaccgtattcggcagcagacagacatctataagcagatcagagctaacaaggggctgatagtgctgggggaggttccgccacccgagcatacaaccgacttgttccttccactgagctctgaagtcaaaacagaccatgggacagataaactgatcgaatctgtatctcaaccccttgaaaaccacggcgcccggattatcggccatatatctgagtccttgagcaccaagagttgtggagccttaaggcctgtgaacggagtcatcaacacactccaacccgttctcgccgaccacatccccggagatagtagtgacgccgaggaacaactacataagaagcagaggctgaacctggtttcctcctcttctgacggaacttgcgtagccgccaggactaggcctgtactcagctgcaagaaaaggcgactcgtgcgacccaatagcattgtccctctcagtaaaaaggtacaccgtaactctacaattagaccgggttgcgacgtaaatccttcctgcgctctctgcgggtcaggaagtatcaatactatgcctcctgagattcattatgaagcccccttgctcgagcggttgtcccagcttgacagttgtgtgcatcccgtcttggcgtttcctgacgatgtacccacatctctgcatttccaaagcatgttaaagtcacaatggcagaataaaccctttgataaaatcaaaccgccgaaaaagctctcattaaagcacagggccccaatgcctggttcactgcctgactccgctcggaaggatagacacaagctggtctctagctttttaacaacagcaaagttgtcgcaccaccaaacacgtcccgatcgaactcaccggcaacatctggatgacgttggcgccgttcccatggtggaaagggtaaccgcccccaaggcagagagactcctaaaccccccaccgcctgtacacgatcccaatcactcaaaaatgaggttacgcgaccactctagtgagagatccgaagtactaaagcaccatacagatatgtcttctagttcatacttggccgcaacccatcaccctccgcactcgccgctagtcaggcagctctccactagctcggattcacctgcacctgcctcttcgagctcccaggtgactgcaagcacaagccagcaaccggtccgccgtagacgtggtgaatccagttttgacatcaacaatatagttattccaatgagtgtcgcagccactactcgtgtggagaagctgcaatacaaggagatcttgaccccgagctggcgggaagtagatctgcagtctttaaaggggagtccagatgaggagaatgaggagatcgaggacctgagcgacgccgcatttgcggccctgcatgcaaagtgcgaggaaatggagagagctagatggctatggactacatcggtaccgccgcagcggagaggctctcgcagttaccggtcaagtgacggcagaaccactccccagctgggctcagcgaatccttccaccccccagccagctagccccgacgtttcatcatctcactccctctccgaatacagtcatggacaatcgccgcgtagcccgatctccccggagctccattcggcccccttgaccccggtcgccagggacacacctagacacttggcttctgaagatactagatgcagtacccctgagctgggacttgacgaacaatcagtgcaaccgtgggagaggcgcacctttcccctcgcccactccccacaagctgaatgcgaggaccagctggacgctcaagaaagggccgctaggtgcacaagacggacatccgggagtaagaccgggagagagaccgaggctgctccgacgtccccaccaatcgttcccctgaagtccagacacctggtcgcagccgccacagctcagagacctacccaccgttag

SEQ ID NO: 121395 - DNA, 936 bp, synthetic construct
  misc_feature 1..936: note = Description of Artificial Sequence: Synthetic coding sequence
  source 1..936: mol_type = other DNA
atgagtttgttgatgatcagcgaaaatgttaaactggcccgggaatatgcgctgcttggcaattacgatagtgccatggtttactaccagggcgtgttagaccagatgaataagtacctttatagcgtgaaggatacctatcttcaacaaaaatggcagcaagtctggcaagaaatcaacgtcgaagccaagcacgtgaaagatattatgaagacgttggaatctttcaagttagattctacccctctcaaagccgctcagcatgacctgcccgcatccgagggagaagtgtggtccatgccagtgcccgttgaaagacggcccagcccaggtcctcgcaagagacaatcatcccagtatagtgatccgaaaagccacggcaatcggccttccacaacggtccgggtacataggtcttcagctcaaaatgtacacaacgaccgcggcaaggccgttcgctgtagagagaagaaggaacagaataagggtcgagaggaaaagggcgtgctcatggtgggcccacctgggactggtaaaactttgttggcgaaagctgttgcaaccgagtgtaagacaacttttttcaatgtcagctcctcaacattgacgagcaagtaccgtggggaaagcgagaagctggtgaggctgctgttcgagatggcccgcttttacagcccagccactatatttattgatgagattgactccatatgcagtaggaggggaacctccgaagaacacgaggccagcaggagagtgaaagccgagcttctggttcaaatggatggcgttggcggcacaagcgagaacgatgacccctccaagatggtaatggtgttggcggccacaaattttccctgggatatcgatgaggctctcaggcggcgacttgagaagaggatatatatccccctgccatcaggcatgcggccctag

SEQ ID NO: 121396 - DNA, 1476 bp, synthetic construct
  misc_feature 1..1476: note = Description of Artificial Sequence: Synthetic coding sequence
  source 1..1476: mol_type = other DNA
atgagtctgcttatgattagcgagaatgttaaacttgctagagagtatgctcttttgggcaattatgacagtgctatggtgtactaccagggagtcctggatcagatgaacaagtacctctatagcgtgaaggacacctaccttcagcaaaaatggcagcaagtgtggcaggagatcaacgtggaagccaaacatgttaaagacatcatgaagaccttggagagctttaagctggattctactcctctgaaggcggcccagcacgatctgccagcatcagagggcgaagtgtggagcatgccagtgcccgtcgaacgcaggccctccccgggtccaagaaaacgtcagtccagccagtattctgaccccaaaagccatggcaatagaccatccacaactgtgcgcgtacataggagcagcgcccagaatgtgcacaatgacaggggcaaggccgtgcggtgcagagagaagaaagaacaaaacaaggggagagaggaaaagaacaaaagccccgccgccgtcacagaacccgagaccaacaagtttgactcgacaggctatgataaggatctggttgaggccctcgagcgagacatcatatcacagaaccccaatgttcgatgggacgacattgccgatctcgtggaggcaaagaagctgctgaaagaagcagtggtgttgcccatgtggatgcccgagttctttaaaggtatccgaaggccttggaagggtgtcctcatggtgggcccacccggaactggtaagaccctgctagctaaggccgtggccaccgagtgtaagacaacattcttcaacgtgagcagttctacactcacttccaagtataggggagagtctgagaagctggtccgattgctgtttgagatggcaagattttattccccggccactatctttattgatgagatcgactctatttgctcacggcgaggaactagcgaagagcacgaagctagcaggcgggtcaaggctgagctgctggttcagatggatggggtgggaggcacctcggaaaacgatgatccaagcaagatggtgatggtccttgccgcgaccaattttccttgggacattgatgaagcgttaagaagaagactggagaagcgcatctacatccctctgccctctgcaaagggcagagaggaactgctgcgaatttcccttagggaactggaacttgccgacgatgttgacttggccagcattgccgaaaatatggaggggtattcaggggccgatatcaccaatgtttgcagggacgctagcttaatggcaatgcgccggagaattgaaggtctgacccctgaggagatacgaaatctgagcaaagaggaaatgcacatgccaacgacaatggaggacttcgaaatggccctaaaaaaagtgtccaagagtgtgtctgccgccgacatcgagaggtatgagaaatggatctttgagtttgggagctgctag

SEQ ID NO: 121397 - DNA, 1476 bp, synthetic construct
  misc_feature 1..1476: note = Description of Artificial Sequence: Synthetic coding sequence
  source 1..1476: mol_type = other DNA
atgtccctgctaatgattagcgaaaacgtcaagctcgccagagaatacgccctgttaggcaactatgattctgccatggtgtattaccaaggggtgctggatcagatgaacaagtacctgtattcagtaaaggacacttacctccagcagaaatggcaacaggtctggcaggagatcaacgtggaggcaaagcacgtgaaggatatcatgaagacacttgaatcgttcaagttggattccactccactgaaggctgctcaacatgatttacccgccagcgagggtgaagtttggagcatgccggtcccggttgaacgccggcccagccctggacctaggaagagacagtcttcacaatatagtgacccgaagtctcatggaaataggccgagcacaactgttagagtgcaccgaagctcagctcagaacgttcataacgaccgcggaaaagccgtccgatgccgcgagaaaaaagaacagaacaagggtcgggaagagaagaataaatccccagccgcagtgactgaacctgaaaccaacaaattcgactcaaccggctatgacaaggacctcgtcgaagctctcgagagggatatcattagtcagaatcccaatgtgcgatgggatgacattgctgacctcgtggaggctaagaagttgctcaaagaagcagtcgttctgcctatgtggatgcccgagtttttcaaagggatacggaggccctggaaaggggtactgatggtgggccctcctggaacggggaagacgctgcttgctaaggctgtagccaccgagtgtaagactacattcttcaatgttagttcatccaccctaacctcaaagtatcgcggcgagagcgaaaaacttgtgagacttttattcgaaatggccagattctacagccctgctaccattttcatagatgagattgacagtatatgctcgaggaggggcacatctgaagaacacgaggcttcacgaagggtgaaagccgagcttctcgtccagatggacggagtgggcgggacaagtgaaaatgacgatccgtccaaaatggtcatggtgctggctgccactaactttccttgggatatagatgaagccctgcggaggcgattggaaaaacgcatttacatcccactgccctccgccaaaggcagggaggaacttttacgtatttccctcagagagctggagctggccgacgatgtcgacttggccagcatcgcggagaatatggaagggtactccggagctgatatcacaaacgtgtgccgcgatgcgtccctgatggctatgaggagacgcatcgaaggcctcacccccgaagaaattagaaacctgtccaaggaagagatgcacatgcctacaactatggaggatttcgagatggcacttaaaaaagtctctaaatctgtgtctgcagctgatatcgaacgttatgagaagtggatatttgaatttggctcctgctag

SEQ ID NO: 121398 - DNA, 636 bp, synthetic construct
  misc_feature 1..636: note = Description of Artificial Sequence: Synthetic coding sequence
  source 1..636: mol_type = other DNA
atgtccctcctaatgattagtgaaaacgttaaactggctcgcgaatacgccctactcggaaactacgatagcgccatggtgtattaccagggggtcctggaccagatgaacaagtacctttattcagtgaaggacacgtacttgcaacaaaagtggcaacaagtgtggcaggagataaacgtagaggccaagcacgtcaaagacattatgaaaacactggaatcctttaagctggacagcacaccccttaaagcggctcagcatgacctcccagcatccgagggcgaggtttggtccatgccagtgcccgtggaacggagacccagtcctggtccaagaaagcggcagagctctcagtatagcgatcccaagagccacggcaaccggccaagcactaccgtgagggtacacagaagcagcgcgcagaatgtccataatgatcggggaaaagccgtgcggtgtcgcgagaagaaggaacagaacaaggggagggaagaaaaaaacaaatcacccgctgccgtcaccgaacctgagacaaacaagttcgacagcacagggtacgacaaggaccttgtggaagccctggaaagagacattatcagtcagaaccctaacgttcgttgggatgatatctag

SEQ ID NO: 121399 - DNA, 843 bp, synthetic construct
  misc_feature 1..843: note = Description of Artificial Sequence: Synthetic coding sequence
  source 1..843: mol_type = other DNA
atgtccttgctgatgatatcagagaacgttaaattggccagagagtatgctttgctggggaactatgacagtgccatggtgtattatcagggcgtgctggatcaaatgaataaatatctgtattccgtgaaagatacctatctgcagcaaaaatggcagcaggtctggcaggagattaatgtcgaggccaagcacgttaaagatatcatgaagactcttgaatctttcaagcttgactcaacaccacttaaagcggcccagcacgacctccccgccagcgaaggtgaagtgtggagcatgcccgtgcccgtagaacgacgcccgtctcccggacctagaaaacgacaaagctcccagtactccgaccccaagtctcacggtaaccgccccagtacgacagtgagggtacaccgctcatccgcccaaaacgtgcacaacgatagagggaaagctgtgcggtgcagggagaagaaagagcagaataaaggcagagaagagaagaataagtcgcctgcagccgtcacggagcctgaaactaacaaatttgacagcaccggttatgacaaggacctcgtggaggccctcgaacgagatatcatcagccagaaccctaatgtcagatgggacgatatcgcagatttggtggaggctaagaagttattaaaagaggcggtggtgctccctatgtggatgcctgaattttttaaagggattaggcgaccctggaagggcgtacttatggttggcccccctggaacgggcaaaactctcctggcgaaagcagtcgcaacagaatgcaagaccaccttcttcaatgtgagctcctccacgcttacatcgtag

SEQ ID NO: 121400 - DNA, 429 bp, synthetic construct
  misc_feature 1..429: note = Description of Artificial Sequence: Synthetic coding sequence
  source 1..429: mol_type = other DNA
atgaattgtagcgagagccaaaggctgcggaccctacttagcaggctgctgcttgaattacaccaccgcggcaacgcaagcggcttaggagccggccctcgcccaagcatggggatgggcgttgtgcccgatcctttcgtgggtagagaggtaacatccgctaagggcgatgacgcttatctgtacattctgttaatcatgattttctatgcttgccttgctggcgggctaattctggcctataccagatcccgcaaactagttgaggcgaaggacgaacctagccaggcctgcgccgaacacgaatgggcaccgggaggtgcattgaccgccgacgctgaggctgctgccgggtcacaggcagagggcagacgccagttggcctcagaggggctgccagcccttgcccagggcgccgagcgcgtatag

SEQ ID NO: 121401 - DNA, 1509 bp, synthetic construct
  misc_feature 1..1509: note = Description of Artificial Sequence: Synthetic coding sequence
  source 1..1509: mol_type = other DNA
atgttcggcactctcctgttgtactgtttcttcctcgctacggtcccagcactcgctgagaccgggggtgaaagacagctgagtcccgaaaagtcagagatctgggggccagggctgaaggcggacgtggtcctgcctgccagatatttttacatccaggcggttgatacctctgggaacaagtttacctcttccccaggggaaaaggtgttccaggtcaaagtgagcgcacctgaagaacaatttacgcgggtgggcgtgcaggtcctggaccgcaaagacggcagtttcatagttagataccgcatgtacgcctcctacaagaacttaaaagtagagatcaagtttcaggggcaacatgtcgctaaatcaccttatattttaaagggaccggtgtaccacgagaattgcgattgcccactgcaagactcagcagcctggctgagagagatgaattgtcctgaaacaatcgcccagatccaaagggaccttgcacatttcccagcggttgaccccgaaaagatagccgtggagattccgaaaagattcggacaacgccagtccctgtgccactataccctaaaagataataaagtgtatattaaaactcatggcgagcatgttgggtttcgcatctttatggacgctatcctcctctctctcacgcgtaaagtcaaaatgcctgatgtcgaactttttgttaatctgggcgactggcccctagagaaaaagaaaagcaacagtaacattcacccaatcttctcctggtgtggatctaccgatagtaaggatatcgttatgccaacttacgacctgacagatagcgtcctggagaccatgggaagagtttcattagatatgatgagcgtccaggcaaatacaggacccccctgggagtctaaaaatagtacagccgtttggcggggtagagactccagaaaggaacggctggagctggtcaagctctctcgcaaacaccctgaactgattgatgctgcatttaccaacttcttcttcttcaaacacgatgagaacctatatgggccaatcgtgaaacatattagctttttcgacttttttaagcacaaataccagatcaacatagatggcactgtcgccgcctacagactgccatacttgttggtcggggacagcgtcgtgctgaagcaggacagcatctattatgaacatttttataacgaactccaaccttggaaacactacattccagtcaaaagcaatctgagcgatctgctagaaaagctcaaatgggctaaggatcacgacgaggaagctaaaaaaatcgctaaggctggacaagaatttgcgcgcaacaacctgatgggtgacgatatattttgctattattttaagctgtttcaggagtacgccaacttgcaggtcagcgagccacagatcagggaaggcatgaaaagagtggagccccagacagaagacgacctgtttccctgcacctgtcaccgcaaaaaaactaaggacgaattgtag

SEQ ID NO: 121402 - DNA, 1065 bp, synthetic construct
  misc_feature 1..1065: note = Description of Artificial Sequence: Synthetic coding sequence
  source 1..1065: mol_type = other DNA
atgtcagccggcggaggacgagctttcgcctggcaagtgttccctccaatgccgacctgtagagtttacggcacagtggcacatcaggatggccatcttctggtgcttggcggttgcggtagagccggactccccctggacactgccgagactctcgatatggcatctcacacatggctggctctggcaccactgcccaccgcgagggcaggggccgccgccgtcgtcctaggcaagcaggtactggtggtgggaggagtcgatgaggttcagagtcccgtggcggctgtagaagcctttctaatggatgaggggagatgggagagaagagctactctgcctcaggccgccatgggcgtagcaactgtggagcgtgatgggatggtgtacgcacttggaggtatgggcccagacacggctccccaggcgcaggtccgagtgtatgagccccgtcgcgattgctggctgtctttgccaagtatgcccactccatgttatggcgcaagcacctttcttcatgggaataaaatttacgtattaggcggccgccagggcaaactacctgtgaccgcctttgaggccttcgatctcgaggccaggacttggactaggcatccatccctcccctcacgccgcgcttttgcgggttgtgccatggctgaaggttccgtattcagcctcggtgggctgcagcaacccggcccacacaacttttactcacgtccccactttgtgaacactgttgaaatgtttgatctcgagcacggttcatggactaagctgccaaggagtctgaggatgagggataagcgagcagactttgttgtcggtagtctgggcggccacatcgtggccatcggtgggctcggtaatcaaccatgcccgctgggttctgtggaatcgtttagcctggcaagacgccggtgggaggctctcccagcgatgcctacagcaagatgcagctgctcttctctgcaggctggtccgcgactgtttgtcatcgggggggtcgctcaaggaccttcgcaggccgtcgaggcgctgtgtttgagggacggcgtttag

SEQ ID NO: 121403 - DNA, 417 bp, synthetic construct
  misc_feature 1..417: note = Description of Artificial Sequence: Synthetic coding sequence
  source 1..417: mol_type = other DNA
atgttcgatttggagcacggttcttggacaaagctgccacgctccctgcggatgagggacaagcgggctgactttgtggtgggatcgttggggggccatatcgttgctatcggagggcttggcaatcagccatgtcccctcggcagcgtggaaagcttcagtctcgccaggagaagatgggaagctctccctgctatgcccacagcgcgatgtagctgcagcagtctgcaagcaggccctcgtttatttgtgatcggtggcgtcgcccagggccccagccaagcagttgaggcgctgtgcctgagggatggcgagggtctggtcggagcagtccactggagtagctccctgccggaggcagctatctctatggccccctttgccgctgaggacacccattgcggctccgtggggtag

SEQ ID NO: 121404 - DNA, 1821 bp, synthetic construct
  misc_feature 1..1821: note = Description of Artificial Sequence: Synthetic coding sequence
  source 1..1821: mol_type = other DNA
atggattcccagagggaattggcggaggagttgcgcctttatcagtctaccttgcttcaggacggattgaaagacctgctcgacgagaagaagtttattgattgcacactgaaggcaggagataaaagccttccatgtcaccggctcattctaagcgcatgctctccatacttccgagagtacttcctgagcgaaatcgatgaggccaagaaaaaagaagttgtgttagacaacgtggatcctgccatcctggatttgataataaaatacctgtatagcgcttcgatcgacctaaatgacggcaacgttcaggacatttttgccctcgcttcaaggttccagattccttctgttttcactgtatgtgtgagctacctgcagaagcgactggcccccggcaattgtctggctatacttcgcctggggttactactcgattgcccccgactcgctatctccgcaagggagttcgtcagtgatcgattcgttcaaatttgcaaagaagaagactttatgcagctgagtccacaggagctcatcagtgtaatcagtaacgactcgctcaacgttgaaaaagaggaggcagttttcgaagccgttatgaagtgggtccgaaccgacaaagaaaacagagtcaagaacctgagtgaagtgtttgactgtatccggttccgcctgatgactgaaaaatacttcaaggatcacgtggagaaggacgacatcataaagagtaatcctgatctgcagaaaaagatcaaagtccttaaggacgccttcgcggggaagctgccggagccgtccaaaaacgctgccaagaccggggccggcgaagtcaatggagatgtgggggacgaggacttgctgcccggatatctgaatgacattcccagacatggaatgttcgtaaaagatctgatcttactcgtgaatgacacggctgctgtggcctacgatccaaccgaaaatgagtgttatcttacagcccttgctgaacagatccctcgaaatcattcctctatagtgacacagcagaatcagatctatgtggtgggcggtctatacgtggacgaagagaataaagatcaaccactccagagctacttcttccagttggattccattgcatccgagtgggtgggactgcccccactgccttccgctcggtgtctctttggtctgggggaggtcgatgataagatatatgttgtcgccggaaaggacttgcagactgaagcctccctggatagcgtgttgtgttatgacccagttgccgccaaatggaatgaggtgaaaaagcttccaatcaaggtgtatggccacaatgttatcagtcataaaggaatgatttattgccttggagggaaaacagacgacaagaagtgcaccaatcgagttttcatcttcaaccctaagaaaggggactggaaggatctcgccccaatgaagatcccacgcagcatgtttggcgtggctgttcacaagggaaagatcgtcatagcaggcggcgtgacagaagatggcctgtccgcgtctgtcgaggcattcgatctcacaactaacaagtgggacgtgatgactgaatttccccaggagcggtcatctattagtctggtaagtctcgctggatctttgtacgctatcggcggattcgcaatgatacagctcgaaagtaaggagtttgctccaacagaagtcaacgatatctggaagtatgaggatgacaagaaggagtgggccggtatgctcaaggagatccgatatgcatccggtgcttcatgtcttgcaacccgactcaacttattcaagctctcaaagctgtag

SEQ ID NO: 121405 - DNA, 1377 bp, synthetic construct
  misc_feature 1..1377: note = Description of Artificial Sequence: Synthetic coding sequence
  source 1..1377: mol_type = other DNA
atggcccgagggccccagacactggtgcaggtgtgggtgggggggcagctttttcaggccgatcgcgcattgctggtggagcactgcgggttcttccggggtctcttcaggagcggcatgagggagaccagagcagccgaggtccgcctgggggtcctgtctgccggaggcttcagggccacacttcaagtactcaggggcgacaggccggcgcttgcagccgaagacgagctcctccaggcagtggagtgcgcggcttttctgcaagcaccggcccttgcgaggtttctggagcataatctcacctctgacaattgcgccctgctgtgtgacgctgcagccgcatttggcctaagagatgttttccactctgccgcactgtttatctgcgacggggagcgagaactcgcagccgagctggctctgcccgaagctcgcgcctatgttgccgctttgcggccaagctcttacgcggcagtcagcacccacacccctgcacctggttttctagaggacgcaagtcggacactgtgctacctggacgaggaggaagatgcatggcggacactggcagccctgcccctcgaagcctcaacattactcgcaggcgtggcaaccctgggcaacaaattgtacattgtcggaggcgttagaggggcgagcaaagaagtagtggagctcggattttgctatgacccagacgggggcacctggcacgagttcccatctccacaccagcctaggtatgacacggcactggccgggtttgatgggagactgtacgcaataggaggcgagtttcagagaactcccatttcgtccgttgaacgctatgaccctgccgccggttgttggtcatttgtggctgaccttccccagcctgcagccggggtgccttgtgcacaggcatgcggacgccttttcgtctgtctgtggcgcccagccgacacaactgctgttgtcgagtatgccgtgagaaccgatgcctggctgccagtggccgaactacggcgcccccaaagttatggacactgtatggtagctcaccgcgatagcctatatgtcgtacgcaacggtccttcagacgactttctgcactgcgcgattgattgcctcaacttagccaccggacagtggacggcgctcccaggccagttcgtgaactctaaaggcgcactcttcaccgccgttgttaggggtgataccgtctacaccgtaaaccgaatgttcactctgctctatgcaatcgaagggggcacctggcggctgctacgagagaaggcggggtttcccagacccggttctctccagactttcctcctgagactgccccctggtgcaccagggcccgtgacctctaccacagcggaactttag

SEQ ID NO: 121406 - DNA, 2247 bp, synthetic construct
  misc_feature 1..2247: note = Description of Artificial Sequence: Synthetic coding sequence
  source 1..2247: mol_type = other DNA
atgtctggatctgggaggaaagacttcgacgtgaaacatatcctgcgtctccggtggaagctctttagccaccctagtccaagtacgggcgggcctgccggaggcggctgcttacaacaagacggcagcggatcatttgagcactggggtccttctcagagccgacttctcaaatcacaggaacgctccggggtcagcaccttctggaagaagccttccagttcctccagttcatcatcatcaccttcctctagctcctcttcattcaaccccctcaatggaactttattgcctgtggcgactcggctgcagcagggcgctccagggcaagggacccagcagccagcgcggaccctcttttatgtcgagagcctcgaggaggaggtggtacccgggatggattttcccggaccacacgaaaaaggccttgtgcttcaggagcttaaggtggaacctgacaactccagccaggcaactggggaaggctgtggccataggctgtctagcacaggacatagcatgaccccccagagcgacctggactccagctcctctgaggaattttatcaggcagtacatcacgccgagcagacctttaggaaaatggaatcttacctcaagcagcagcaactatgtgacgtgatcctgatcgtgggcaatcgcaagattcccgctcaccggttggtcctatccagcgtgagcgactatttcgctgcgatgttcactagcgatgtctgcgaggcaaagcaggaggagattaagatggaaggcatcgaccccaatgctctgtgggatctggtgcaatttgcctacacgggctgccttgagctcaaggaggacacaatcgagaatcttttagctgctgcttgtttactccagttgccccaggtggtcgaagtatgttgtcactttctgatgaagctgttacatccatcaaactgtctgggcatccgggccttcgccgacgcacaaggatgcatcgaactaatgaaagtcgcccactcttatacaatggaaaatattatggaagtaattaggaatcaggaatttctactcctgccggccgaagaactgcacaagctgcttgccagcgatgatgtgaatgtccctgatgaggaaacaatcttccacgcccttatgatgtgggtgaagtatgatatgcagtctaggtgtaatgacctcagtatgctcctagccttcattcgtctgcctctgcttcccccccagatactcgctgacctcgagaatcacgccctcttcaaaaatgacctcgagtgtcagaagttgattctcgaggcaatgaagtaccatctgttaccagagcgaagaaccttgatgcagtcgcctcgcactaagccacggaagtctaccgtcggaacgctgtatgccgtcggcggtatggataacaacaagggagccaccaccatcgagaagtacgacttgcggaccaacctgtggatccaggccggaatgatgaacggtcgcagactacagttcggggtggctgtaatcgacgacaaactgtttgtcatcggcggcagagatgggctgaaaaccctcaatactgtagaatgctacaatcccaaaaccaagacatggaccgtgctgcccccgatgtccactcaccggcacgggttaggggtgactgtgctcgagggccccatctacgccgtggggggccatgacggctggtcatacctcaacactgttgaacggtgggatccccagagtcagcagtggacgtttgtcgcttcgatgagcattgcacggagtactgttggagtcgctgcgcttaacggaaaactctattctgttggcgggcgggatggatcaagctgcctcagcagcatggagtattatgatcctcacaccaataagtggaatatgtgtgcccccatgtgtaagcgcagaggcggagtgggggtggccacctgcgacggcttcctgtatgccgtgggcggccatgatgcccccgccagtaatcactgtagccggctgttggactacgtggagcgctatgaccctaagaccgacacctggactatggtggctccactgagtatgccccgggacgctgttggagtgtgtctcctgggcgatagactgtacgccgtaggtggttatgatggccagacatatttgaataccatggaatcctacgacccacaaacgaacgaatggacccaaatggcctctctgaatatcggacgcgctggcgcatgcgttgttgttatcaagcagccctag

SEQ ID NO: 121407 - DNA, 1668 bp, synthetic construct
  misc_feature 1..1668: note = Description of Artificial Sequence: Synthetic coding sequence
  source 1..1668: mol_type = other DNA
atggatttccctggacctcacgaaaagggattggtcctgcaggaactgaaggtagagcctgataactcctcccaggctactggcgaggggtgcggccatcggttagtgctctcctccgttagcgactacttcgctgctatgttcacatcagacgtgtgtgaggcaaaacaagaggaaattaagatggaagggatcgatcccaatgctctttgggacctggtgcagttcgcctacactggatgcttagaactgaaggaggacacaatcgaaaacctgctggcagcggcttgcctgctgcaactacctcaagtagttgaggtatgttgccacttcctcatgaaactcttgcatccttctaattgtctgggcattcgggctttcgccgacgcacagggttgtatagagctaatgaaagtcgcccacagttatactatggaaaacattatggaggtgattcgtaatcaggaatttctgctccttcccgcagaggagctgcacaaactgctcgcatccgatgacgttaatgtgcccgatgaagaaactatttttcatgccctcatgatgtgggtcaaatatgatatgcagtctcggtgtaacgacctgtccatgctgttggcgttcattcgacttcccctgctaccacctcaaatcctggccgatctcgaaaatcatgcattgttcaagaatgacctggagtgccaaaaattgatcctcgaggccatgaagtaccacctcctgccggagcggcgtaccctgatgcagtccccacggactaagcctcggaagagtaccgtgggcaccctgtacgccgttgggggcatggacaataataaaggggcgacaaccattgagaagtatgacctgcgtacgaacctgtggattcaggcaggaatgatgaatggcaggaggctccagttcggggtcgcagttatcgacgacaagctctttgtcatcggcggtcgagatggacttaaaaccttgaatactgtcgagtgctacaatccaaagaccaaaacctggacggtgcttcctccaatgtctactcaccgacacggactgggcgtcacagtactcgagggccccatttacgccgttggtggacatgatggatggtcgtacctgaataccgtggagcgctgggatccccagagccagcagtggactttcgtcgcatctatgtcaatcgccaggagcaccgttggcgtggccgcactgaacggaaagttgtactctgtggggggaagggacgggtcctcttgtctctccagcatggagtactatgacccccataccaataagtggaacatgtgtgcacccatgtgcaaaagacgtggcggtgtcggcgtggctacttgcgatggcttcctctatgcagttgggggccatgacgcgcccgcctccaaccactgcagtaggttactagattacgtggaaagatatgacccgaagacagacacgtggacaatggtggcccctctgagtatgcctcgagacgccgtgggagtttgccttctgggggaccgactgtacgccgtcggcggctatgatggacagacctatttgaataccatggagagctatgaccctcagactaacgagtggacacagatggcctccctcaatatcgggagagccggagcctgcgtggtcgtcatcaagcaaccctag

SEQ ID NO: 121408 - DNA, 1167 bp, synthetic construct
  misc_feature 1..1167: note = Description of Artificial Sequence: Synthetic coding sequence
  source 1..1167: mol_type = other DNA
atgagcagaagcggagatcgcacttctacatttgacccaagccacagtgacaacctgttgcatgggctgaatctgctgtggaggaaacagctcttctgcgatgtcaccctgacagctcaagggcaacagttccactgtcacaaggctgtgctagccagttgcagccaatacttccgatcgctgttttcctctcatccgccactgggggggggagttggagggcaggatggactgggagcgcccaaggatcagcagcagccaccgcaacaacagcctagtcagcaacagcagccccccccccaggaagaaccaggcacaccgagttctagccccgacgacaaactgctcacatctccgagagccataaataacctcgtgttacagggctgctcgtcgatcgggctgagattagtgttagaatatttatacacagctaacgtcactctctcgctggatacagtcgaggaagtcctctccgttagcaagatactgcacataccccaggtgaccaaactatgtgtgcagtttctcaacgatcagatctcagtacagaactacaaacaggtatgtaagatcgccgccctccacggtttggaggagactaaaaagttggcaaacaaatacctggtggaagacgtcctcctcttgaattttgaagagatgcgggcgctgttagatagcctgccacccccggtagaaagtgagctcgcactttttcagatgtcagtgttgtggctggagcatgatagggagacgcgcatgcagtatgcaccagacctgatgaaacgtctgaggttcgctctaattccagctcccgagctcgttgagcgcgttcagtccgtggactttatgcgcacggatcccgtttgccagaaattgctgctggatgctatgaattatcatctgatgcccttccgtcagcattgtcgacagtcgttggcttcaagaatccgcagcaataagaaaatgttactgctggttggcgggctgccccctggccccgataggctgccttcgaacctcgttcagtattacgacgacgaaaaaaaaacgtggaaaatcttaacaattactggcccacacccaatctccgggaagcaggagtcagcgagtagcccagaatttcgcagacggaagactagggaatttagcaataatacaatgtag

SEQ ID NO: 121409 - DNA, 1887 bp, synthetic construct
  misc_feature 1..1887: note = Description of Artificial Sequence: Synthetic coding sequence
  source 1..1887: mol_type = other DNA
atgtctagaagcggggatcgaacctccacctttgacccatcccattccgataacctactgcatgggcttaaccttctctggagaaaacaactgttttgtgatgtgactcttacggctcagggtcaacagtttcattgtcataaggcagtcttggcatcatgttcccagtacttccgctccttgttcagctcccaccctccacttggcggcggggtcggcgggcaggatggtttaggcgctcctaaggatcagcaacagccacctcaacagcagccatcgcaacaacaacaacctcctccgcaagaagaaccgggtacaccgagtagcagcccagacgacaagttgctgacctccccgcgggcgataaataatcttgtgttgcagggctgttcatccattggactgaggcttgtcctggaatatctgtacaccgcgaatgtcaccctttccttggacaccgtggaggaagttttgagtgtctcaaagatcctgcacataccgcaggtaaccaaactgtgtgtgcagttccttaacgatcagatttcagttcagaattacaagcaggtgtgcaagatcgctgcgctccacggcctcgaggaaaccaaaaagctggctaataagtatcttgtggaagatgtcttgctcctgaacttcgaagagatgcgcgctttactcgacagcctgccaccccctgtagaatcagagctcgccctattccagatgagcgtcctctggctggagcatgacagagagactcgaatgcagtacgccccagatctcatgaaacgcctgagattcgccttaatccctgctcccgaactggtggaaagagtacagagcgtggatttcatgcggactgatccagtatgccagaaacttcttttagacgccatgaattatcacctcatgccatttcggcagcattgcagacagagtcttgcctcgcggatccggagcaacaaaaagatgctgctcctggtgggggggttgccccccggacctgacaggttgcccagcaaccttgtccagtattatgacgacgagaaaaagacatggaagatcctcactataatgccatataacagtgcccatcactgtgttgtggaggtagagaatttcttatttgtcctgggaggcgaagatcagtggaacccgaatgggaagcattcgaccaacttcgtgtctcgttacgatccaagattcaatagttggatccagctcccacctatgcaagagagacgcgcgtccttttatgcttgcagactggataaacacctatacgtcattggtggtaggaatgaaacaggatatttatcaagcgtggagtgttacaatttggaaacaaatgaatggcggtatgtatctagtttgccacaaccccttgccgcacacgctggcgcagtacacaatggtaagatctacatctccggcggagtgcacaatggtgagtacgttccctggttgtattgctacgatccagtgatggatgtgtgggcccgcaagcaagatatgaatactaaacgcgccatccacactctcgcagtcatgaatgaccgcttgtacgctattgggggaaaccatctgaaagggttctcacatcttgacgtgatgttggtcgaatgttatgatcccaaaggggatcagtggaacatccttcagacgccaatcctggaaggccggtctggacccggatgtgcagtgctcgacgatagtatctatctggtgggaggatattcgtggtccatgggcgcgtacaagtcttctaccatttgctattgtcctgagaaagggacgtggacagagctggagggggacgtggctgaaccgctggccggtcctgcatgcgtcaccgtgatacttcctagctgcgttccctacaacaaatag

SEQ ID NO: 121410 - DNA, 1794 bp, synthetic construct
  misc_feature 1..1794: note = Description of Artificial Sequence: Synthetic coding sequence
  source 1..1794: mol_type = other DNA
atggtttggctcgaggctcgtccccagatcctgtttgtgtgtactaagcaaggccatcagaaacccctggatagcaaagatgataatactgagaagcattgcccggttactgtgaacccttggcacatgaagaaggcttttaaggtaatgaatgagcttcgaagtcagaacctcctgtgcgacgtaactatcgtcgccgaggatatggaaatcagtgcccatcgggtggtgctcgcagcttgcagtccctatttccacgccatgtttacgggcgagatgtccgaatctagggccaaaagggtgcgcatcaaggaggtcgacggctggaccctaaggatgctgatcgattacgtttacactgctgaaatacaagtgactgaggaaaacgtacaggtgttgctgcctgctgccggccttcttcaactgcaggatgtcaaaaaaacttgttgcgagttcttggagtcccagctacatcctgtgaactgcctgggcattagggcgttcgctgatatgcacgcctgtacagacctgcttaataaggcaaacacttacgcggagcagcactttgcagatgtggtgctctccgaagagtttctgaaccttggaattgagcaggtatgttctctgatctctagcgacaagttaacaatcagcagtgaagagaaagtgtttgaggccgtgatcgcatgggtgaaccacgacaaggacgtgagacaggagttcatggcaaggctcatggaacacgtgcgcttgccgcttctccctcgagaatacttagtgcagagagtagaagaggaggcactggttaaaaactcctcagcctgtaaagactatcttattgaagcgatgaagtaccaccttctgcccaccgagcagcggatcctaatgaaatccgtgcgtacaaggcttagaaccccaatgaacctgccaaaactgatggtcgtggtgggcggccaggcaccgaaggctatacgtagtgtggagtgctatgatttcaaggaagagcgctggcaccaggtggctgagcttccaagtcgccgctgcagagctggcatggtgtacatggcgggtctcgtgttcgcagtgggaggtttcaacggatccctgcgggtgcggaccgtggatagttacgaccctgtgaaggaccagtggacttcagtggcaaatatgagggaccgacgctccacactgggtgcggctgtcctaaacgggctcctgtacgccgtggggggttttgatggcagtactgggcttagcagcgtagaggcatataacataaagtcaaacgaatggttccacgtggctcctatgaataccaggcgctcttccgtcggggtgggagtggtgggtggacttctgtacgctgtaggcggatatgatggcgctagcagacaatgtctttccactgttgaatgctataacgccaccacgaacgagtggacttacatcgccgagatgagcacacgtaggtccggtgctggcgtgggggtgctcaacaatctgttatacgctgtagggggccatgacggccccctcgtcagaaaatcagtagaagtgtatgatcctacaactaacgcatggagacaggtggctgacatgaatatgtgtcgccgaaatgcaggcgtctgcgcagtcaatggattgctctacgttgtcggcggcgatgacgggtcctgcaacctggcctccgtggagtactataatcccacaacagataagtggaccgtggtcagctcctgtatgagcaccggaagaagctacgccggggtaactgtcatcgacaaaccattatag

SEQ ID NO: 121411 - DNA, 2640 bp, synthetic construct
  misc_feature 1..2640: note = Description of Artificial Sequence: Synthetic coding sequence
  source 1..2640: mol_type = other DNA
atgcgcttgcacctgctgctgctccttgcattgtgtggggcaggcactaccgccgctgaactcagttatagtctacgagggaactggagcatttgcaatgggaacggcagcctggagctgccaggtgctgtaccaggttgcgtccactctgccctctttcaacagggcttaatccaggacagctattaccgtttcaacgaccttaattatcggtgggtcagtcttgacaattggacctactccaaagaattcaaaatcccatttgagattagcaaatggcaaaaagttaatctgattctcgagggtgtggacaccgtgtcgaaaatcttgtttaacgaggtgaccataggtgaaactgataacatgttcaaccggtactccttcgatattaccaatgttgtcagagacgtaaactcaatcgagctgaggttccagtccgcagtgctctacgccgctcagcaatcaaaggctcatacccggtaccaagtgccgccagactgcccccctttagtccagaaaggcgagtgccatgtgaacttcgtgcggaaagaacagtgtagcttttcatgggactggggtccctctttccccacgcaaggtatctggaaggacgtgcggattgaagcttacaacatctgccacctgaactacttcactttctcacccatttatgataagagtgcgcaggaatggaacctagagattgaatccaccttcgatgtggtttcctccaagccagtggggggacaagtgattgtggcaattcctaagctccagacacagcagacttactcaattgagctccagcccggtaagagaatagttgaactgtttgtaaacatcagcaagaacataactgtggagacttggtggccacatggccatgggaatcaaaccggctacaacatgaccgttctgttcgagctggacgggggcctgaacatcgaaaagtccgccaaggtgtatttcaggacggtggaactcattgaagaacctattaaggggtctcccgggctgagcttctatttcaagattaacggcttcccgatttttctcaaaggaagtaattggatcccagctgactctttccaggatagggtgacgagcgagctgttacgccttctgctgcagtccgtggtggacgctaacatgaacacactgagagtgtggggcggggggatctatgagcaggatgaattctacgaactgtgtgacgagctcggaatcatggtatggcaggatttcatgtttgcttgcgcattatacccgacagatcagggctttctggactcggtgaccgcagaggtggcgtatcagatcaaaaggttgaagtcgcatcccagcataattatctggtccgggaataacgagaacgaagaggcactgatgatgaactggtatcacataagctttacagacaggcccatatatataaaggattacgttactctctacgtgaaaaacattcgggagttggtattagccggggacaaatcacggccattcatcacctcttccccaacaaatggcgcagaaaccgtggcagaagcctgggtgagtcagaatccgaattccaattattttggggacgtgcacttctacgattatatctccgactgctggaactggaaggtttttccaaaagccaggtttgcttctgaatacggctatcagtcctggccaagtttctctactttggagaaggtgtcatccactgaggactggagttttaactcaaaattttcactccacaggcagcaccatgagggcggcaacaagcaaatgctgtatcaggctggactccactttaagctgccccagagcaccgatccgctgcggacattcaaggacacaatctacctgactcaagtgatgcaagcacaatgcgttaagaccgagacagagttttaccgcaggtctcggagcgagatcgtggaccagcaaggtcacacgatgggagctctttactggcaactgaacgacatctggcaggccccctcatgggccagcctggagtatgggggtaaatggaagatgctgcattattttgcccagaatttttttgccccactgttgcccgttggtttcgagaacgagaacacattttacatctacggcgtgagcgatctgcactcagactatagcatgacactctcagttagagtgcacacctggagctccctcgagccggtctgttctcgggtaaccgaacgtttcgtgatgaaaggcggcgaggctgtgtgcctatacgaagaacctgtgagtgaactgcttcggcggtgcggcaactgcacccgggaaagctgtgtagtatctttttacctgagcgccgaccacgaattgctgtctcccaccaattaccacttcctgtccagccccaaggaggccgtgggcctgtgcaaagctcagatcacagcaattatttcccagcagggcgacatctttgtgttcgacctggaaacatctgcggtggctccattcgtatggcttgacgtcggctccatccccggaagattcagtgataatggattcctgatgaccgaaaagacacgaaccatactcttctacccttgggagccgactagcaagaacgagcttgaacagtctttccacgtgacttctttgacagacatctactag

SEQ ID NO: 121412 - DNA, 1518 bp, synthetic construct
  misc_feature 1..1518: note = Description of Artificial Sequence: Synthetic coding sequence
  source 1..1518: mol_type = other DNA
atgagcgagtcaagagcaaagcgggtacggatcaaggaggtagacggctggacactgcggatgttaatcgactacgtgtacactgcagagatacaggtgacagaggaaaacgtccaggtgctccttccagccgctggcctgctgcagttacaggatgtgaagaagacttgttgtgaatttctggagtcacagttgcatcccgtcaattgtctgggcattcgggcatttgctgacatgcatgcatgtaccgacctgctgaacaaggccaatacatatgctgagcagcactttgcggatgtagtgctctcagaagagtttctgaatcttggaatcgaacaggtctgttccctgatttcaagcgataagctgactatctcatccgaagaaaaagtgttcgaggccgtgatagcatgggttaatcacgataaggacgtacgacaggagttcatggcaaggctgatggaacatgtgcggctccctcttctacctagagagtacctggtgcagcgcgtggaagaagaggctctggtgaaaaactcttccgcctgcaaggactacctcattgaggctatgaaatatcacttactgcccaccgaacagagaattctgatgaaaagcgtgagaacaagactgcggactccaatgaatctaccaaagctgatggtagtcgtcggcggccaggcgcctaaagccatcagaagcgtcgagtgctacgactttaaggaggagaggtggcatcaggtggccgaactgccctcacggagatgccgggcaggcatggtgtacatggctgggctggtttttgccgtgggcggattcaatgggtcactgcgcgtgcgtactgtcgactcctatgaccctgttaaggaccagtggacctctgtggctaatatgagggaccgccggagcactcttggtgccgccgtgctgaacgggctgctctacgctgtaggagggttcgacgggtctactggattgagctctgtggaagcatacaacattaagtctaatgagtggttccatgtagctcctatgaacacgcggagatcctcagtgggagtaggcgtcgtgggcggtctcctgtacgctgtcggaggctatgatggggcgtctcgtcaatgcctctctactgtggaatgctacaatgcaactacaaacgaatggacctacatcgccgagatgtccactcgacgttcaggtgccggagtcggcgtcctcaacaacctactgtatgctgtgggcggccatgatggccccctggtgaggaaaagcgtggaagtgtatgatcctactactaacgcctggaggcaagtggccgacatgaacatgtgtaggaggaatgcaggcgtgtgtgcagtgaatggactgctctatgttgttgggggtgacgacggatcttgcaatttggcatccgtcgagtattacaaccccactactgataaatggacagtcgtgtcatcttgtatgtctaccggtcgatcctatgctggcgttactgtcatcgataagccgctgtag

SEQ ID NO: 121413 - DNA, 1764 bp, synthetic construct
  misc_feature 1..1764: note = Description of Artificial Sequence: Synthetic coding sequence
  source 1..1764: mol_type = other DNA
atggagggcgaatctgtgaaactgagtagccagacactgattcaggcaggcgacgacgaaaaaaaccagcgaaccattaccgtcaacccggcacacatgggtaaagcattcaaggtcatgaatgagcttcggtcaaagcaactgctgtgcgatgtgatgatcgttgctgaggatgtggagatcgaggctcacagagtggtgttggcagcttgttccccctacttctgtgccatgttcacaggcgatatgagtgagagtaaggccaagaagattgaaattaaggacgtcgacggccagacacttagtaaattgatcgattacatctataccgccgagattgaggttacagaggagaacgtacaggtcctcctgcctgcagcgtcattgctgcaactcatggacgtgaggcaaaattgctgcgattttttacaatctcagttgcatcccaccaattgcctcggaattcgcgcttttgcagacgtgcacacctgtaccgacctattacagcaagcaaacgcttacgctgagcaacacttcccagaggtcatgctgggggaagagttcctcagtttgagcctggaccaggtttgcagtctcatttcctccgacaaactgacagttagcagcgaggagaaagtcttcgaagctgtgatttcttggattaattatgaaaaggagacgcggctagaacacatggctaagttaatggaacacgtacgcctgccgctgttgccccgggactatctggtgcagactgtggaggaggaggcccttatcaagaataacaatacgtgtaaggatttcttaattgaggccatgaaatatcatttgctacctctggatcagaggctccttatcaaaaaccctcggaccaaacctcgcacccctgtatctcttcctaaagttatgatcgttgtgggaggtcaggcgcctaaggctatccgtagcgtggaatgctacgattttgaggaagacagatgggaccaaattgcagaattgccttcccgaaggtgtcgagcgggagtcgtatttatggccggacacgtatacgcagtaggcggctttaatggctcattacgcgtgaggactgttgacgtgtatgacggggtgaaggaccagtggacatccattgcatccatgcaagagcgccgcagcaccctcggggcagctgttctcaatgacctgctgtacgccgtaggcggtttcgacggttccacggggctcgcctcagtggaagcctactcttataagaccaacgaatggttttttgtggcgcctatgaacaccagaagaagctcagtgggcgtcggtgtcgtggagggaaaactgtacgcagttgggggttacgacggtgcctcgcggcagtgcctgtccactgtggaacagtacaatccagctactaatgagtggatatacgtggccgacatgtctacacgcagatcaggggctggtgtgggtgtcctctcagggcagctgtatgccaccggggggcacgatggacctctcgtcaggaagtccgtggaagtatacgaccccggcaccaatacttggaagcaggttgctgacatgaacatgtgtcgccgtaacgccggcgtctgtgctgtgaatggcctgttgtacgtggtcgggggagacgatggctcttgtaacttggcctcagttgagtactataatcccgtgaccgacaagtggactctcctgcctaccaatatgagcactggcagaagctacgccggagttgcagtcatccacaagagcctgtag

SEQ ID NO: 121414 - DNA, 906 bp, synthetic construct
  misc_feature 1..906: note = Description of Artificial Sequence: Synthetic coding sequence
  source 1..906: mol_type = other DNA
atggagggagaatcagttaagttatcatcccagacactcattcaggccggagatgatgaaaagaatcagaggaccattaccgtaaaccctgcccacatgggtaaagccttcaaagtaatgaacgaattgaggtcgaagcaactgctgtgcgacgtaatgattgtggccgaggatgtggagatcgaggcccaccgggtggttctagccgcttgctccccctatttttgtgccatgttcaccggggatatgtccgagagcaaggcaaagaagattgagataaaggatgtagacggtcagaccttatctaagctgattgattacatttacactgccgaaattgaagttacggaagaaaacgtgcaggtcctcctgccagcagcttcattgcttcagctgatggacgttaggcagaattgctgcgacttccttcaatctcagctgcacccaactaactgccttggtattcgtgcatttgcagatgtccacacatgtaccgatttgttacaacaagctaacgcatatgccgaacagcacttccctgaagtgatgttaggcgaagagttcctgagtctgagtttagaccaggtgtgctccctgatctcatcggacaagctgaccgtttcttctgaggagaaggtttttgaagccgtgatttcttggatcaactacgagaaagagactaggcttgagcatatggccaagctgatggaacatgtacggttaccactgctgcctcgggactatctcgtgcaaactgtcgaggaggaggcattgataaaaaataataacacctgcaaggacttccttattgaagcaatgaagtaccaccttctgcccctggaccagagactgctgatcaagaacccaagaaccaaaccacgcactccagtctctctacctaaatag

SEQ ID NO: 121415 - DNA, 1518 bp, synthetic construct
  misc_feature 1..1518: note = Description of Artificial Sequence: Synthetic coding sequence
  source 1..1518: mol_type = other DNA
atgtccgaatctaaagccaagaaaatcgaaattaaagacgtggatgggcagactctgagcaagctcatcgactatatctatactgccgagattgaagttaccgaagaaaatgtgcaggttttgctgccagcagcatctctccttcagttgatggatgtgcgacagaactgttgcgatttcctgcagtcacaactgcaccctaccaattgcctcggaataagggcatttgccgacgtgcatacatgcacagacctcctgcagcaagcgaacgcatacgctgagcagcatttccccgaggttatgctcggagaagagttcctgtcccttagcctcgaccaggtgtgctctctgattagcagtgataaattaaccgtgtcttcagaggagaaagtctttgaggcggttatctcatggataaattacgagaaagaaaccagactggagcatatggccaagctgatggagcacgtgaggcttcctctgttgccccgcgactaccttgttcagaccgtcgaggaagaggctctcattaagaacaacaatacttgtaaagacttcctgatcgaagcaatgaaataccacctgctgcctcttgatcagcgactcctcatcaagaatccaagaactaagcctagaacaccagtatccttgccgaaagttatgatcgtggtgggtggacaggccccaaaagctattcgttcagttgagtgttatgatttcgaggaagaccggtgggatcagatagccgaattaccctcccgccgatgccgcgccggggtggtgtttatggctggtcacgtgtatgcagtgggtggatttaatgggagcctgagggttcgcaccgtggatgtctatgacggcgtcaaggaccaatggaccagcattgcatccatgcaggagcgtcggagtaccctgggggccgccgtattaaacgatcttttatacgctgtgggtggcttcgacgggagcaccgggcttgcatctgtcgaagcttactcatataagaccaacgaatggttcttcgtggcgcctatgaacactcgtcggagtagcgtcggtgttggagtcgtggagggcaaactctacgctgtgggcgggtatgacggcgccagcaggcaatgcctcagcactgtagagcaatacaaccctgcaacaaacgagtggatctacgtagctgacatgtcaactcggcgttctggcgctggagtgggggtactgagcggccagctgtatgcaactggaggtcatgacgggccgctggtgagaaagtccgtcgaagtctacgatccgggcacaaacacctggaaacaagttgctgacatgaacatgtgccgaagaaatgccggggtttgtgcagtcaatggcctcttatacgtcgttgggggtgatgatggttcatgtaacctggcctctgtggagtattacaatcccgtgacagacaagtggactctgctacccactaacatgtcgaccggcaggtcatatgccggggtagccgttattcacaagtcactgtag

SEQ ID NO: 121416 - DNA, 603 bp, synthetic construct
  misc_feature 1..603: note = Description of Artificial Sequence: Synthetic coding sequence
  source 1..603: mol_type = other DNA
atgtcccggtgctgtagtagacagccggcttgttgttctagttggatgttcggacgcactgctgtcacctcctgcagtctgagttgtataccacctattgcgtgggcctcggttcatctacaaatgtacacccctgcactcacattttgctcacggccaatgccaactcagcatttccctgaagtcatgctcggagaggagttcctgtccctgagtctagaccaggtatgtagtttgatcagtagcgataagttgacggtgagtagcgaagagaaagtttttgaagcagtcatttcctggattaattatgagaaagaaacaagacttgagcatatggccaagctcatggagcacgtgcgtctacctttgctccccagggactatttagtacagactgtggaggaagaagctctgatcaaaaataacaatacctgtaaggacttcctcatcgaagctatgaaataccacctcttgcccttagatcagcgcctcctaatcaaaaacccaaggacaaagcccagaaccccagtgagcctgccaaaagggcttgagtgtctggctgacagctgtactccgcaggtgggaatgatgggattatggtag

SEQ ID NO: 121417 - DNA, 1668 bp, synthetic construct
  misc_feature 1..1668: note = Description of Artificial Sequence: Synthetic coding sequence
  source 1..1668: mol_type = other DNA
atgggaaaagcctttaaggtaatgaacgagctccggtctaaacaacttctctgtgatgtcatgattgtcgcagaggacgtggaaatcgaggcccaccgggtggttttagctgcctgtagcccttacttctgtgccatgtttactggcgacatgtccgaaagcaaggcaaagaagatcgagatcaaggacgtggacgggcagacactctctaaactgattgactacatttatacggccgaaatcgaggtgactgaggagaacgttcaggtgttgttgccggctgcttctctgttgcagctaatggatgtccgtcagaattgctgcgattttctccagagccagctccacccaacaaactgtctcggcatccgggcttttgccgatgtgcacacttgcaccgatttgttgcagcaagctaatgcctatgcagagcagcacttccccgaagtaatgctcggtgaagagttcctcagcctgtcactcgatcaagtttgtagtctgatttcgagtgataaactcactgtgtccagcgaggagaaagtattcgaggccgtaatcagctggataaactacgagaaagagacacggctggagcatatggctaaattgatggagcatgtacgcctcccacttttaccccgcgattaccttgttcaaactgtggaggaggaagctctgatcaaaaataacaatacctgcaaggattttctcatcgaggcgatgaaatatcacttgttacctttggaccagcgattgctcatcaaaaatcccaggaccaaaccacgcacacccgtttccctcccaaaagttatgattgtcgtaggaggacaggccccgaaggccatccggtctgtcgagtgttacgattttgaggaggacagatgggaccaaatcgctgaactgccctctcgaagatgcagagccggcgttgtgttcatggcgggacatgtgtacgctgtaggaggcttcaatggcagcttgcgggtaagaacagtcgatgtctatgacggagtgaaggaccagtggacatccattgcctccatgcaggaaagaaggtcaaccctgggagcggctgtgctcaacgatctcttatatgccgtgggtggattcgatgggagtaccggtctggccagtgtggaagcatatagctataaaaccaatgaatggttctttgtcgctccaatgaacacccgcagatccagtgtgggcgtcggcgtggttgagggtaaactgtatgcagtgggcggctatgatggggcctcccgtcagtgtctgagcacagtcgaacaatacaatcctgctaccaatgagtggatctacgtggcagacatgtccactaggagaagtggcgctggcgtcggtgtgctgtcaggccagctctacgccaccggcggtcacgacggccccttagttaggaagtccgtagaggtatacgacccaggaaccaatacgtggaagcaggtcgctgacatgaatatgtgcagacgcaacgccggggtatgcgccgtgaacggcctgctgtacgtggttggcggagacgatggctcttgcaatttggcctctgtcgaatattacaatcccgttacagataagtggaccctcctgccaaccaacatgagcacaggtcgctcctacgcgggcgttgccgtgatccacaagtccctgtag

SEQ ID NO: 121418 - DNA, 1905 bp, synthetic construct
  misc_feature 1..1905: note = Description of Artificial Sequence: Synthetic coding sequence
  source 1..1905: mol_type = other DNA
atggctccaaagaaaaagattgtgaaaaaaaataagggagatataaatgaaatgactattatcgtagaagacagccccctgaacaaactgaacgcactgaacggacttttggaaggcgggaacggcctcagttgcatcagctcagagctgactgatgctagctacgggccgaacctgctagagggtctgtctaagatgcgacaggagaatttcctctgcgacctcgtgattggcaccaagactaaaagcttcgatgtgcacaagagtgtgatggcatcctgttccgagtacttctacaatatcttgaagaaggacccttccattcagagagtggacctgaatgacatatctccactgggactggccactgttattgcctacgcctatacgggaaagctcacactttcactctacacaatcggatccattatctcagccgccgtgtacctgcagatacacacacttgtcaagatgtgctcggacttcctcattcgggagatgagcgtggaaaactgcatgtacgtcgtgaacatcgctgaaacctacagcctgaaaaatgccaaggcggctgcccaaaaatttatcagggataactttctggaattcgcagagagtgaccaattcatgaaactgaccttcgaacagattaatgaattgcttattgatgatgatttacagctcccctcagaaattgtggccttccaaattgcaatgaaatggttagagttcgaccaaaagcgcgtgaaatacgccgccgacctactcagcaatatccggttcggcacgatctccgcgcaggatcttgtaaattatgtacagtccgtcccgagaatgatgcaagatgcagactgtcatagactgctggtcgatgcgatgaattatcatctgctaccttaccatcagaatacactgcaatctaggcggactaggatacgtggcggctgtcgtgtgttagtgaccgtggggggaagacccgggcttactgaaaagtcactttcccgtgatatactgtacagggacccagagaatggctggagcaaattgaccgagatgcccgccaaatcttttaatcagtgcgtggcagtaatggatggttttttatatgtggctgggggagaagaccagaacgatgctcgcaaccaggccaagcacgcagtgtccaacttctgtcgctacgaccctcggtttaacacgtggatacatcttgcctcaatgaaccagaaacggacacatttttcactatcagtttttaatgggttagtctatgctgcagggggacgtaatgccgagggctccctggcctcattagagtgctatgtgcccagcactaaccaatggcagcccaagacaccactagaggtagctcgctgctgccacgcctcggcagttgctgatggaagggtcttagtcactggggggtatatcgctaacgcctatagccggagcgtttgcgcgtatgaccccgctagtgattcctggcaggagctgcccaacctgtctactcctagaggttggcactgcgctgtgaccttgagtgacagagtctacgttatgggcggaagtcagctgggaccaagaggcgagagagtagatgtgctgactgtggagtgctactcccctgccacgggtcagtggtcctacgccgcccccctgcaagtgggggtgagcaccgctggagtctccgcccttcatggacgcgcctacctggtcggaggatggaacgaaggcgagaagaaatacaaaaagtgcattcagtgtttctcccctgagcttaacgagtggaccgaggacgatgagctcccagaagccacggtcggagtttcctgctgtaccctgtcaatgccaaacaatgtaaccagggaatctcgcgccagtagtgtgagctctgttccagtgtccatctag

SEQ ID NO: 121419 - DNA, 1905 bp, synthetic construct
  misc_feature 1..1905: note = Description of Artificial Sequence: Synthetic coding sequence
  source 1..1905: mol_type = other DNA
atggcccctaagaagaaaattgtcaagaaaaacaagggggacatcaacgagatgactatcatagtcgaagacagccctctgaataaactcaacgcactgaatggcttactggaaggtgggaacggtctcagttgtatttcaagcgagctaactgacgcgtcttatggccctaatctgctagaaggcctgtccaaaatgaggcaagagaacttcctgtgtgaccttgtgatcggtacaaagacaaagtcattcgacgtacataaatccgtgatggcatcttgttcggaatacttctataacatcctaaagaaagatcctagtatacagagagtggacttgaacgatattagtcctttgggcctcgctacggtgattgcctatgcgtataccggaaaactgaccctctcactttacacaatcggcagcattattagtgctgccgtctacttacagatccacaccctcgtgaaaatgtgctcagattttcttatcagagagatgtctgtcgagaattgtatgtacgtggttaacattgccgaaacctattctctcaagaatgccaaggccgctgcccagaaatttatcagggacaactttctcgagtttgctgagtccgatcaattcatgaagctgacattcgaacaaattaacgaactactaattgacgatgatcttcagttgccttcagaaatcgtcgcttttcaaatcgcaatgaagtggctggaatttgaccaaaaaagagtgaaatacgcggccgatctcttgagtaacatcagatttggaacaatcagtgcccaagatctggtcaactacgtacagtccgtgcctcgaatgatgcaagacgcggactgccatagacttcttgttgacgcaatgaattaccacctcctgccctaccaccaaaacactcttcagtcgcgccggacccgcatccgtggaggttgccgcgtactggttactgttggcggccgacctggcttgacggagaaatccctgtcccgggacatcctctatcgcgatcccgaaaatggctggtctaagttgacagaaatgcccgctaaaagcttcaaccagtgtgtggcggttatggatggcttcctgtacgttgcgggaggcgaagaccagaatgatgcgcgcaatcaggctaagcatgcggtatcaaatttctgccgttacgaccctcgatttaacacttggatacacttggcatcaatgaaccagaagcgcacacacttctccctcagcgtcttcaacgggctggtgtacgccgccggtggccgaaatgctgaaggatccctcgcatcacttgagtgttacgtcccttcaaccaatcaatggcaacccaagacacccctagaggtggcgcgctgttgtcacgcctccgcagtagccgatggaagggtcctcgttactggtggatacattgccaatgcgtattcaagatccgtgtgtgcctacgatcctgccagcgacagttggcaggaactgccgaacctgagcactccaagaggctggcattgtgctgtgaccttgtccgatagagtgtatgtgatggggggctcccagctggggcccagaggcgaaagagtggatgtattaaccgtcgagtgctatagtcccgctactggccagtggtcgtatgctgcaccactccaagtgggagtttccacggcaggtgtatctgccctgcacggaagagcgtacttggtcggtggctggaacgagggggaaaaaaagtataagaaatgtattcagtgtttctcccctgaattgaatgagtggaccgaggatgatgaactgccagaggccaccgtgggcgtgtcatgctgtaccctctctatgccaaataatgtgactagggaatcccgcgcaagctcggtatcaagtgtgccagtcagcatttag

SEQ ID NO: 121420 - DNA, 2313 bp, synthetic construct
  misc_feature 1..2313: note = Description of Artificial Sequence: Synthetic coding sequence
  source 1..2313: mol_type = other DNA
atgaacgttatttactttccacttcatatctttgttgtgtatagtcgggcctacacctccctggttcttgtggggtgcactaacctgtgcgctgtcttatttgccagatgtctggatgatcacttggtgtctctgagaatgtccggtagccgcaaagaatttgatgtgaaacagattctgaaaatccgctggcgctggttcggtcatcaggccagtagtcctaactcgactgtggatagtcagcagggcgagttctggaatagaggtcagactggagctaacggcggaaggaagttcctcgacccgtgcagcctgcagctgcctcttgcgtccattggataccgcaggtcatctcagctggactttcagaattcgccctcctggcctatggcctccacttcagaggtgccagcgtttgagttcacagcggaagactgtgggggcgctcattggctggatcgtcccgaagtcgatgacgggacctccgaggaagagaatgagtccgatagctcttcctgcagaacaagcaacagtagtcaaacactgagcagctgccacacaatggaaccttgcacctccgacgagtttttccaggccctcaaccacgccgagcagaccttcaaaaagatggagaattaccttagacataagcagctttgcgatgtgatcctggtggcaggtgaccgccggattccagcccaccgcctcgtgctgtcctcagtcagtgattattttgcagcgatgtttactaacgacgtacgggaggcgcgtcaggaagaaatcaaaatggaaggagtggaacccaactccctgtggtcgctaatccagtacgcctataccgggaggttggagttgaaggaggacaatattgagtgtttactaagcactgcctgtttgctgcaactttctcaagtggttgaggcctgttgtaaatttctcatgaaacaattacacccttcaaactgtcttggtatccgatccttcgcggatgcgcaggggtgtacagacctgcacaaggtggcacataattacactatggaacactttatggaggttattagaaaccaggaattcgttctgttacctgcctccgagatcgcaaagctactggcatccgacgacatgaatatccccaacgaagagacaattttgaatgcgctgttgacatgggtgagacacgatttggagcagcgaaggaaggacctgtccaaactgctggcatacatcaggctgcccctcctggctccccaatttctggccgacatggagaacaacgttctgttccgcgatgacatcgagtgtcaaaaactgattatggaagccatgaagtaccatctgctaccagagcgaagacctatgttgcagtctccaaggacaaagcccagaaagtcaacagtcggcacactttttgctgtgggaggcatggacagcacgaaaggcgcaaccagtattgaaaaatacgatcttagaaccaacatgtggacccctgtggccaacatgaacggccggcggctccagtttggtgtggccgtgttggatgacaagctgtatgtcgtgggtggacgggacggcctcaaaactttaaacaccgtcgagtgctacaaccccaaaacgaaaacatggtctgtgatgccccctatgtctactcaccgacatggccttggagttgccgtcctcgaaggaccgatgtatgctgtgggtggccatgatggatggtcatacttgaataccgtggaaaggtgggatccccaggcccggcagtggaactttgttgcgaccatgtcaacacctagaagtactgtgggggtggcggttctctctggaaagttgtatgccgtgggggggcgcgatggcagttcttgtctaaaatccgttgagtgtttcgatccgcatacgaacaagtggacactttgcgcacagatgtccaagcgaaggggcggggtgggcgtgacaacgtggaatggcctgctgtatgcaatcggagggcacgacgctcctgcctcaaacttaacctcacgactgtctgattgtgtggagcgctatgaccctaagacagacatgtggacagccgttgcgagtatgtcaatttcacgcgatgcggtgggcgtgtgcttgctcggtgataaactatatgccgtcgggggatatgatgggcaggcttacctgaacactgttgaggcatacgatccccagaccaacgaatggactcaggtgttctcccataccttcgaggacagcaaagatcatctcgtggcaatcaagcaaacaatttggagacagaactccctgtcggaagaatttcgctcccattag

SEQ ID NO: 121421 - DNA, 2274 bp, synthetic construct
  misc_feature 1..2274: note = Description of Artificial Sequence: Synthetic coding sequence
  source 1..2274: mol_type = other DNA
atgaacgtgatctattttccgctgcacattttcgtggtgtactctcgagcgtatacgagtctggtgctcgtgggctgtactaacctttgcgccgtactgttcgctagatgcctggacgatcatttagttagtctccgtatgagcggtagccgcaaggaattcgatgtaaaacagattctgaaaatcagatggcgttggttcggacaccaggccagttcaccaaattctaccgtggattctcagcaaggggagttctggaacaggggacagaccggggccaacggaggacgtaaattcctagacccctgctccttgcagctgccgctggcctcgatagggtatcggaggtcttctcaactggattttcaaaacagtccttcatggccaatggcgagcacgagtgaagttccagcctttgagttcactgccgaggactgtggcggagcgcactggctggaccggcccgaggtggatgacggtacaagcgaggaggaaaacgaatccgactctagttcctgtcgaacctcaaactcctcgcagacacttagctcatgtcataccatggagccatgcacttcagatgagttcttccaagctctcaaccacgccgagcagactttcaagaagatggaaaattatttgagacataagcaactttgtgatgtaatcctcgtcgccggagacagacgcatcccagctcaccggttggtgctctcaagtgtctccgactacttcgctgccatgtttactaacgacgttcgcgaagcgagacaggaggaaattaaaatggagggcgtcgagcccaacagtttgtggtccctgattcagtatgcctacacaggccgtctcgagctgaaggaggacaatattgagtgtctgctgtccacagcctgtctgctccagctatcacaggttgtcgaggcttgttgcaagttccttatgaaacagctgcatcctagcaactgcttaggcattcggtctttcgctgacgcccagggatgcaccgacctgcacaaggttgcacacaactacacaatggagcattttatggaggtaattaggaatcaggaatttgtgctgcttccggcttccgaaattgcaaagctcctcgcctcagacgatatgaatattccaaacgaagaaacgatcttgaatgcactcctcacctgggtaagacatgacctggaacagcgtcgtaaagacctcagcaaactactggcctacatccggcttcccttactggcaccacaattcctggccgacatggagaataacgtactgttccgcgatgatatcgaatgccagaagctaattatggaggctatgaagtatcatctgctccccgagcgcagacctatgctgcaatcccctcggaccaaacccagaaagtctaccgtgggaaccctcttcgccgttggaggcatggacagcactaaaggcgccacaagtattgagaaatacgatctgaggaccaacatgtggacacccgttgcgaacatgaatgggcgtcggctgcagttcggtgtggcagtattggacgacaaactgtatgttgtaggaggccgtgatggcctgaagactttaaacacagtagagtgttataatccgaagacaaagacatggtccgtaatgcccccaatgagtactcaccgacacggtctgggagtcgccgtgctggaaggacctatgtacgcagtggggggacatgacggctggtcatacctgaataccgtcgagcgctgggacccgcaggcgagacaatggaattttgtggccacaatgagcacccctaggagcaccgtaggcgtcgccgttctctcgggaaagctgtacgccgttggaggacgggacggcagttcttgtcttaagagtgtggagtgctttgatcctcatacgaacaaatggactctgtgcgcacagatgagcaaaaggcggggcggggtcggcgtgactacatggaacggtcttttatacgcaattggggggcacgatgctcccgccagtaatttgacgtcccggttgtctgactgcgtggagaggtatgatcccaaaacagatatgtggactgctgtcgccagcatgtcgataagtcgcgatgcagtgggggtctgtctactcggagacaaactgtatgccgtgggaggctacgacggtcaggcctacctgaacactgtcgaagcttatgatccacagaccaacgaatggactcaggtctggcactcttgtttcattatcacgttgaccctgttcttgctgaagcaatttctgtggtag

SEQ ID NO: 121422 - DNA, 2268 bp, synthetic construct
  misc_feature 1..2268: note = Description of Artificial Sequence: Synthetic coding sequence
  source 1..2268: mol_type = other DNA
atgaacgtgatctacttccctttgcacatctttgtagtctattcacgggcttatacttccctggtgttggtcgggtgtaccaatttatgcgcagttctgttcgcgcgctgtcttgatgaccacctagtctcgctccgtatgagcggcagccggaaggaattcgatgtcaagcaaatcctgaagattcgatggcgttggttcggtcatcaagcaagcagccccaactctacagtcgatagccagcagggagagttctggaaccgggggcagaccggggccaacggcgggcgcaagtttctcgacccctgtagcctgcagttgcctctcgccagtatcggttatcggcggagcagtcaactggatttccagaattctcctagctggcccatggcaagcaccagtgaagttcctgcattcgaatttaccgctgaggactgcggtggagcccattggctcgaccgcccagaggtggacgatggcaccagtgaggaggaaaatgaatctgactccagtagttgccgcacttcaaattcatctcagaccctttcatcatgccacactatggaaccatgtacctcagacgaattttttcaagctttgaatcacgctgaacaaaccttcaagaaaatggaaaactacctgaggcacaaacaactgtgcgacgtcattcttgtggcgggggatagacgaatccccgcgcatcgcctggtgctcagctccgtttcggactacttcgctgccatgtttaccaacgatgtccgggaggccaggcaggaggaaatcaagatggaaggggttgaaccaaacagtctgtggtctctgattcagtacgcatatacaggccggctcgagctgaaagaggataatatcgagtgcttattgtctacagcgtgccttctccagctcagccaggtcgtggaggcttgctgtaaatttttaatgaagcagctgcatcccagcaattgcctggggatcagatcttttgcagatgcccaaggatgtactgatctccacaaggtagctcacaactacacaatggagcattttatggaagtgatcaggaaccaggagttcgttcttctccctgcttctgaaatagcaaagctgctggcttcagacgacatgaacatccctaacgaagagaccattctcaacgctctgttaacttgggtgcggcacgacctggaacagaggaggaaagatttgagcaaacttttggcctacattagactgccgctcctcgctcctcagttcctcgccgatatggagaacaatgtgctgttcagggatgatatcgaatgccagaagttgattatggaggccatgaagtatcacttactgccagagcgccgcccgatgctacagagccccaggactaagccaaggaaaagcaccgtgggcaccctgtttgcggttggcgggatggactcaaccaaaggggctaccagtatagagaaatatgatctacggactaatatgtggacgcccgtcgctaacatgaacggtaggagactgcagttcggggtcgccgtgctggatgacaaactatacgtggtgggcggacgagacgggcttaagactctgaataccgtcgaatgctacaacccgaaaacaaaaacctggtcagtgatgcctccaatgagcactcatagacacgggctaggggtggcggtgctcgagggacctatgtacgcagtcggcggtcatgacggttggtcatatctgaacaccgtggagcggtgggatccacaggctaggcagtggaactttgtggctaccatgtctacacctcgatctacagtgggagtggccgtgttgtcaggcaagctctatgctgtgggagggagagatggatcgagctgtcttaagagtgtagaatgtttcgacccccatacaaacaagtggaccctgtgtgcgcagatgtcaaagcgccgtggcggcgtgggagtcacaacttggaatggactgttgtacgctattggaggccatgacgccccagctagcaatctgaccagtaggctctctgattgtgtggaaagatatgatccaaagacagatatgtggaccgccgtggcctcgatgtcaatttctcgagatgccgtgggagtctgccttctgggtgataaactgtatgctgtcggcgggtatgatgggcaggcatatctcaataccgtggaagcatatgaccctcagactaacgaatggacacaggtggctccgttgtgcctgggtcgtgccggtgcctgtgtggtaacagtcaaactgtag

SEQ ID NO: 121423 - DNA, 849 bp, synthetic construct
  misc_feature 1..849: note = Description of Artificial Sequence: Synthetic coding sequence
  source 1..849: mol_type = other DNA
tagcggactaatatgtggacgcctgtggctaatatgaatggacgtcggctccagttcggtgtggctgttctggatgataaattgtacgtggtgggcggccgggatggcctgaaaaccttgaatactgtggaatgttataacccaaaaactaagacctggtccgtgatgcctccaatgtcgacccaccgccacggactgggtgtcgctgtgctagagggtcccatgtacgcagtgggaggccacgatggctggtcatatctgaataccgttgaacgctgggacccccaggctcggcagtggaatttcgttgcaaccatgtctacaccccggtcaaccgtgggcgtcgcggtactatcaggtaaactatatgctgtggggggaagagatggcagcagttgtctcaaaagcgtggaatgttttgacccccacaccaacaaatggaccttatgtgcacagatgagcaagaggagaggcggcgtcggggtcaccacttggaacggattactttacgcaattggtggccatgacgcccccgccagcaacctcacaagcaggttatcggactgtgtggagaggtatgaccctaagacagatatgtggactgctgttgctagcatgagtatttccagggatgctgtcggcgtttgcctgctgggtgataagctttatgccgttggcggctacgacggacaagcttatctcaatacagtcgaggcctacgacccccagacgaacgagtggacacaagttttttctcatacttttgaagacagcaaggatcacctggtggcgatcaaacagactatttggcgccaaaactcactgagtgaagaatttcgctctcactag

SEQ ID NO: 121424 - DNA, 2370 bp, synthetic construct
  misc_feature 1..2370: note = Description of Artificial Sequence: Synthetic coding sequence
  source 1..2370: mol_type = other DNA
atgcgactgcctggacagggcctgggcgctcgggagggcccgagtatccccctgagttcccccgctcctgccccggccagccctgctccaccggcgtggccgccacggccggcagttacacacggtagattgcgcagccccacaaggcgcgcctataccagtttagtgctagtgggctgcacaaacctatgtgctgtgctcttcgcacgctgtttggatgatcacctcgtcagtctgagaatgtccggaagccgcaaagagttcgacgtcaagcagatcctgaagatccgctggagatggtttggacaccaagcgtcttctccaaattcaactgttgactcacagcagggggaattttggaatagaggccagaccggtgcaaacggcggaagaaaattcttagatccttgcagcttgcagctgcctctggcttccattggataccggcgtagctctcagctcgatttccagaattccccctcttggcccatggcctccactagcgaggtccctgcttttgagttcaccgccgaggattgtggcggtgcccactggctcgaccggccagaagtggacgacggcacaagcgaggaagaaaacgaaagtgacagctcaagttgtaggaccagcaactccagccagactctctcgagttgccatactatggaaccctgtactagcgacgagttttttcaagctttgaatcacgcagagcagaccttcaaaaaaatggaaaactatctgcggcacaaacagctatgtgatgttatactcgtagccggggaccgcagaataccagcgcacaggttagtgctttcctccgtgtctgactactttgctgccatgtttacaaatgatgtccgcgaagcccggcaggaagaaataaagatggaaggggtggaacccaacagtctgtggagcctgattcagtacgcatacactggccggttggaactgaaggaagacaacattgagtgcctcttgtctaccgcatgcctccttcaactgtctcaggtcgtcgaagcgtgttgcaaattcctcatgaagcaattgcaccccagcaactgcttaggtatcagatcatttgccgacgcccaaggatgcacagacctgcataaagtggcacataattacaccatggaacacttcatggaagtcattaggaatcaggaattcgtcttactgcctgcctcagaaattgcgaaactgctggcatccgacgatatgaatattccaaatgaagaaacgatcctcaacgctctgctgacctgggtgcggcacgacctggaacagcggaggaaggatcttagcaagctccttgcttacattagactgccgttactggctccacagtttctcgctgatatggagaacaacgtgctgttccgcgacgatattgaatgtcagaaactgattatggaagctatgaaatatcatctcctgccagagcgcagacctatgttgcagtcaccccgcaccaaaccccgaaagtccacggtgggcaccctgtttgccgtgggtgggatggatagcacaaaaggagctacatctatcgagaagtacgacctgagaacgaatatgtggacgccagtggccaatatgaacgggcggcgcctgcagttcggcgtagctgttcttgatgacaaactgtatgtggtcgggggacgtgacgggctgaaaacacttaatacggtggaatgctataaccccaagaccaagacttggtccgtgatgcctccgatgtccacacaccgtcacggattaggcgttgctgttcttgaaggccctatgtatgccgtgggaggccatgatgggtggagctacctcaataccgtagaacgctgggacccccaggcccgccagtggaattttgtcgccaccatgtctactccaagatccaccgtcggcgtcgctgttctgagtggcaagctatacgccgttggaggcagggatgggagtagttgcttaaagagcgtagaatgtttcgatcctcatactaacaagtggacactttgcgcccagatgtccaagcggcgaggcggcgtgggtgtaacaacatggaacggtctcctgtacgcaatcgggggtcacgatgccccagcttccaacttgacatctagattgagtgattgtgtggagcgctatgatccaaaaactgatatgtggaccgccgttgcctcaatgagtatatcaagagacgcggtcggagtctgtctcctgggggacaagttgtacgccgtgggcgggtatgacggtcaggcgtacctaaacacagttgaagcttacgatccacagaccaatgagtggactcaagtggccccgctttgtcttggtcgggctggagcttgtgtggtaacagtaaaactttag

SEQ ID NO: 121425 - DNA, 1050 bp, synthetic construct
  misc_feature 1..1050: note = Description of Artificial Sequence: Synthetic coding sequence
  source 1..1050: mol_type = other DNA
aaaaagcacccctccacagtgatggtaccccaattcttggctgacatggagaataatgtgctttttagagatgatatcgagtgccagaaactgatcatggaggctatgaaatatcatctactgcctgagcgcagacctatgttacagagcccccggaccaaaccacggaagtccaccgtgggcaccctttttgcagtggggggaatggattcaactaagggcgctacatcgatcgagaaatacgaccttcgcactaacatgtggacacctgtagcaaatatgaatggacgccgtctgcagttcggggtggctgtgttggacgacaaactttatgtagtggggggacgcgacggcctgaagacgctaaacaccgtagaatgttataatcccaagacaaagacctggagcgtcatgccaccaatgagcacccaccgccatggtctgggcgtggccgtgctcgaagggcccatgtacgccgtgggaggtcatgacgggtggtcctatctcaatacagttgagcgatgggatccccaggcgaggcagtggaacttcgtggctaccatgtccactcctcggtctactgtcggtgtcgccgttctgtccgggaaactgtacgcggttggtggacgcgatggctcatcgtgccttaaaagcgtggaatgcttcgacccacatacgaataagtggacactgtgcgctcagatgtcaaagaggcggggcggtgtcggagtcacaacttggaatggtctcctatacgcgatcggcggccatgatgcccccgctagcaaccttacgagcagattatccgactgcgtggagcgatacgacccaaaaaccgacatgtggactgcggtggctagcatgtccatatccagagacgctgtgggcgtgtgcctattgggcgacaagctgtacgcagtaggtggatacgacggacaggcttacctgaacaccgtagaggcatatgaccctcagactaacgaatggacacaggtggctcctctatgtctaggcagagcgggcgcgtgtgtggttactgtgaagctgtag

SEQ ID NO: 121426 - DNA, 2130 bp, synthetic construct
  misc_feature 1..2130: note = Description of Artificial Sequence: Synthetic coding sequence
  source 1..2130: mol_type = other DNA
atgtctggttcacgcaaagaattcgatgtgaaacagattctgaagatccgctggcggtggtttggtcaccaagcatctagcccaaatagcacagtagattcacagcagggggaattctggaaccgaggtcagacgggggccaatggcggtaggaaattccttgatccgtgctcgctgcagctcccactggcgtccattgggtacaggcgttcttctcaacttgacttccagaattctccatcttggccaatggcgtcaactagtgaagtgcccgcttttgagttcacagccgaagattgcggaggcgcccactggctggacagacctgaagtggacgatgggacttcagaagaggagaacgagtccgacagttctagctgtcgtacttccaattctagtcagaccctgagctcctgtcatacaatggaaccctgcacaagtgacgagttttttcaggctctgaatcacgcagaacaaacctttaaaaagatggagaattatctgcgccataagcagctgtgcgacgtgattctggtcgccggggaccgtcgcatacccgctcatagactagttttgagctcagtgagcgactattttgccgccatgttcactaacgacgtcagggaagcccggcaagaagagattaaaatggaaggagtcgaacccaactccctctggagcctgatccagtacgcctatacgggtcggcttgagctgaaagaggacaatatagagtgcttgttatccacagcatgcctgctgcagctttctcaggtcgttgaggcctgttgcaagttccttatgaaacagcttcatcccagcaactgcttgggtatccgctctttcgctgatgcccagggctgcactgaccttcacaaggtcgcccacaactacactatggaacacttcatggaggtgatacgcaatcaggagtttgtgcttctgcccgcgagcgaaatagctaaactcctggcatccgacgatatgaacattcccaacgaagagactattctcaatgctctgttgacatgggtgaggcacgacctggagcagcgccgcaaggacttaagcaagctgctggcctatattcgtttgccccttctagccccccagttccttgcggacatggaaaacaatgtcttgttccgtgatgatattgaatgccagaaactcatcatggaggccatgaagtatcacctcctccccgagagacggcccatgctgcaatcccctcgcacaaaacctagaaagagtacagtgggcaccctcttcgcggtgggcggaatggattccactaagggcgctacttccattgagaagtatgacctgcggaccaacatgtggacgcctgtcgccaacatgaacggacggcgtctccagttcggcgtcgctgtgttggatgacaagctttacgtggtgggcggaagagacggtctcaaaacgctcaatactgtcgagtgctataatcccaaaactaagacctggtctgtgatgccacctatgtccactcatcgccacggccttggcgtggcagtgctggaagggcctatgtacgccgtcggcgggcatgacggctggtcctacttaaacaccgtagaacgttgggaccctcaggcaagacagtggaattttgtcgccacaatgtcaacacctaggagcacggttggcgtggcagtgctatccggtaaactctacgcagtaggaggccgcgatggaagtagttgtctaaagagcgttgaatgttttgaccctcacactaacaaatggacactgtgtgcacagatgtcaaagagacgaggaggagtgggcgtgacgacatggaacggtttgctgtatgcaatcggagggcatgatgcccctgcatctaaccttacctcccggttgtccgactgcgtggagcgatacgacccgaagaccgatatgtggacagccgtggcttccatgagtatctctcgagacgctgtcggtgtgtgcctgttaggagacaaattatacgctgtcggaggttacgacgggcaagcctacttgaataccgtcgaagcctatgatccacagacgaacgaatggacacaagtggctccactgtgcctgggccgtgcgggcgcatgcgtggtcactgttaaactgtag

SEQ ID NO: 121427 - DNA, 2085 bp, synthetic construct
  misc_feature 1..2085: note = Description of Artificial Sequence: Synthetic coding sequence
  source 1..2085: mol_type = other DNA
atgaatgtcatttatttccccttgcatatctttgtggtatactcccgtgcctacacatcactcgtcctagttggctgtaccaacttgtgcgctgttttgtttgcccgctgcctggatgaccatctcgtgtcactgaggatgagcggctcccgaaaggagtttgatgtcaaacagattttgaaaattcgctggagatggtttggacaccaagcatcttccccgaattccaccgtggattctcaacaaggcgaattttggaatagaggtcagaccggagctaacggggggcgaaagtttcttgatccttgctctttacaactgcctctcgcctcgatcggctacaggagatctagtcaactggactttcagaactcccctagttggccaatggcctctacgagcgaggtaccagctttcgaattcaccgccgaggactgcgggggcgcccattggcttgataggccggaagtcgacgacggcacatccgaagaggaaaacgagagcgattcctctagctgtcgactggtcctgagctccgtgtccgattatttcgctgccatgttcaccaacgacgtcagggaagcacggcaggaggaaattaagatggagggggttgaacctaacagcctctggagcctcattcagtatgcatatacagggcgactcgaattgaaggaggataacatcgaatgtttgctatctaccgcatgcctccttcagctatcccaagtcgttgaagcttgctgtaaattcttaatgaagcaactgcatccctctaattgccttggaatcaggtccttcgccgacgctcaaggctgcacagacctccacaaggtggctcacaattatacgatggaacatttcatggaggtaatccggaatcaggagtttgtgcttttgcccgcgagcgagattgccaagctgctggcctccgatgatatgaacatccctaacgaggagacaatcttgaatgctttacttacatgggtaagacatgacttagaacagaggcgcaaggatctctcaaagctgttggcgtatattcgcctgccactgttggccccccaatttctggccgacatggagaacaacgtgctgttcagggacgacatagagtgccagaagctcataatggaggcaatgaagtaccacctattacctgaacggcgccccatgttgcaaagccctcgcacaaaacctcgtaaatccacggttggtaccttgtttgccgtgggcggcatggacagtactaagggagcgacttctatcgaaaaatatgatctgagaaccaacatgtggacccccgtggccaacatgaacggcaggcggctccaatttggagtggccgtcttagatgataaactttacgtggtcggcggccgggatggcctgaagactctgaataccgtcgaatgctataacccaaagacgaagacatggtctgtcatgccaccaatgagcacacaccgccacgggctgggcgtggcagtgctggaggggcctatgtatgcagtgggtggacacgatggttggagctatttaaatacggtggagcgctgggatccacaggcccggcagtggaacttcgtcgcaaccatgtctaccccacgatcaacggtcggagtagccgtgctctccgggaagctctatgctgttggcggcagggatggaagtagttgcctgaaatccgttgagtgcttcgacccccataccaacaaatggacgctatgtgcacagatgagtaagagaaggggtggggttggtgtgaccacgtggaacggcctgctatacgccattggggggcacgatgcgcctgctagtaacctgaccagcagactttccgactgtgtggagagatacgatccaaaaactgacatgtggaccgcggtggccagtatgagtatcagcagggacgctgtcggggtttgcctgttgggcgataagttgtacgcggtaggcggctacgacggtcaagcctacctcaataccgtggaagcctacgacccacagaccaacgagtggacccaggtcgcaccactgtgtctggggcgggcaggtgcctgtgttgttacagtgaaactgtag

SEQ ID NO: 121428 - DNA, 1707 bp, synthetic construct
  misc_feature 1..1707: note = Description of Artificial Sequence: Synthetic coding sequence
  source 1..1707: mol_type = other DNA
atggaaccgtgtacctccgatgaattcttccaggcccttaaccatgctgagcagacgttcaaaaagatggagaactacctacgtcacaagcagctgtgcgatgtaatcctggtggctggggaccgaaggattcccgcccaccggctcgtgctctcatctgttagcgattatttcgccgccatgttcacaaatgatgtgcgagaagccaggcaggaggagattaagatggagggagtcgagccaaactctttgtggtctctgatacagtacgcatatacaggacggctcgagctgaaagaagataatattgagtgtctgctgtcaacggcttgcctgctccagctgtcgcaggtcgtggaggcttgctgcaaattcctgatgaagcaactgcacccgagcaattgtctcggaattcgcagcttcgccgatgctcagggctgtacagaccttcataaggtggctcacaattacactatggaacacttcatggaagtgatcagaaaccaggagttcgtgttactgcctgcgtctgaaatcgccaagctgctagcgagtgatgacatgaatattcctaacgaagagactatcttgaacgccctgctcacctgggtgagacacgatctggagcagcgcaggaaagatctgtccaagctgctggcctatatccggctgcccctgttagccccgcaattcctggcagatatggagaataatgttcttttcagagatgatatcgaatgccagaagttaatcatggaagctatgaagtaccaccttcttcccgagcggaggcctatgctgcagtccccgcgcactaagccacgtaagagtaccgtggggacactttttgctgtgggagggatggattcaaccaagggggccactagtatcgaaaagtacgacctccggaccaatatgtggactccagtggccaacatgaacggccgaaggctacagttcggagtcgcagtactcgacgacaagctgtatgtcgtgggcgggagagatggactgaaaacactgaacactgtcgagtgctacaatcctaagaccaagacatggtccgttatgccgcctatgtccacacaccgccacggtcttggagtcgcagtgctagagggccctatgtacgcagtgggtggacatgatgggtggtcctacctgaacaccgtggaacggtgggatccacaggccagacaatggaacttcgtagctactatgtctacacctagaagcacggtaggtgtcgccgtcctgagcggtaagctctacgcggtcggcggccgggacgggtctagctgcctgaaatccgtggagtgcttcgatccacataccaataagtggaccctgtgtgcccagatgagcaagagaaggggtggcgttggcgtcaccacttggaacgggttactgtacgcaatcggggggcacgatgccccggcaagcaaccttacctcacgcctgagtgactgtgtcgaaaggtacgaccctaagacggatatgtggacagccgtcgcatcaatgtctatctcccgggatgccgtaggtgtttgtctcctcggcgataagctctatgctgtgggtggatacgatggccaggcttacctgaatacagtcgaagcttatgatccacagactaacgagtggactcaggtggcaccactgtgcttaggcagagccggcgcctgcgtagtgactgtgaaactgtag

SEQ ID NO: 121429 - DNA, 1866 bp, synthetic construct
  misc_feature 1..1866: note = Description of Artificial Sequence: Synthetic coding sequence
  source 1..1866: mol_type = other DNA
atgttgatggcggggcagcggggagcttggaccatgggggacgtcgtggagaagtccctggaggggcccctggcaccctctactgacgagcccagtcagaaaaccggagatctggttgagatacttaacggagaaaaagtgaaatttgacgacgcaggcctgtctttgattttgcagaacgggctcgaaacgctacgcatggagaacgccctcacagatgtaatcctttgcgttgacatccaggagttctcttgtcatcgcgtggtgcttgccgccgcatccaactactttcgggctatgttctgcaacgatctgaaggagaaatatgaaaagcgtatcattattaaaggagtggatgctgaaacaatgcacacactgctcgactacacatacacttccaaggcgctcatcaccaagcagaacgttcagagggttctggaagcggctaaccttttccagttcctgcgaatggtggatgcctgtgctagctttctaactgaggcccttaaccccgaaaactgtgtgggaattctgcggttggccgacacacatagcttggattcccttaaaaagcaagtgcagagctatatcattcagaattttgtgcagattctgaactcagaggaattcctcgatctgcctgtggatacccttcaccatatcctgaagtccgacgatttgtacgtgaccgaagaggcacaggtatttgaaactgtgatgtcctgggtgcggcacaagccttccgagagactgtgtcttttgccttacgtgctagagaatgtgaggctcccgttgctcgatccctggtattttgtggagacagttgaggctgaccccctgatccgacaatgtcctgaggtgtttcccctgcttcaggaggcgcgcatgtatcacctgagcggaaatgagattatctccgaacgtaccaaaccccgcatgcatgagtttcaaagtgaagtctttatgatcatcggcggctgcaccaaggacgagcggttcgtcgcggaagtgacttgcctggaccccctgagacggtcgaggttagaggtggcaaagctccccctgacagagcacgaactggagtccgaaaacaagaagtgggtggagtttgcatgcgtgacgcttaagaatgaggtgtacattagcgggggaaaggagacacaacacgacgtttggaaatataattcttccattaataagtggatccagattgaatatctcaacatcggtagatggagacacaagatggtggtccttggggggaaggtatatgtgataggtgggtttgacggtctgcagagaataaataatgtggaaacatacgatcccttccacaactgctggtcagaggccgcccccctgctagtgcatgtgtctagttttgctgccacctcccataagaagaaactgtacgtgatcggcggcggtcctaacggaaagctggctacagacaaaacacagtgttacgatccatctaccaacaaatggtccttaaaggctgctatgcctgtcgaggctaagtgtattaatgcagtgtccttcagagatagaatatacgtggttggtggcgcaatgcgcgccctgtacgcttattctcccctggaggacagctggtgtctggtgacccagctctctcacgagagggctagctgtggcatagccccatgtaataaccgcttgtacattaccggcggccgtgacgagaaaaacgaagtgatcgctaccgtgttatgttgggatccggaggcacagaaactgaccgaagagtgcgtgctgcctcgcggcgttagccaccatggcagcgttaccatacggaaatcctacacacacatccgccgcatcgtgcctggggcggtcagtgtttag

SEQ ID NO: 121430 - DNA, 1695 bp, synthetic construct
  misc_feature 1..1695: note = Description of Artificial Sequence: Synthetic coding sequence
  source 1..1695: mol_type = other DNA
atgctgggcggaacggattgcaggacatttctcacctcccatatcaacttgaaaaaaacattgtgcgatgtgatcttgatggttcaggagcgcaagattccggctcaccgagtggtgctggccgcagcgagccatttctttaacctgatgtttactacaaacatgctggagagcaagtcgtttgaagtggagctcaaggatgcagaaccagacatcatcgagcagttggtggagttcgcctacacggcgcgaatatccgtgaacagtaataacgtccagtccctgctcgatgctgccaatcaatatcaaatcgaacctgtgaagaagatgtgcgtggactttctgaaagagcaagtggacgcctcgaactgtctgggtattagcgtcttggcagagtgtttggactgccccgaattgaaggctacagccgacgacttcatccaccaacattttaccgaagtgtacaagaccgatgagttcctacagctggacgtgaagcgggttacacacctgttaaatcaagacacacttaccgttcgcgcagaagaccaggtctatgacgcagcagttagatggctgaagtacgatgaacctaaccgtcagcccttcatggtcgacattcttgcaaaggttcgcttcccgctgatttccaagaattttttgtcaaaaaccgtgcaagctgagcccttgatccaggataacccggaatgcctaaagatggttatctcagggatgaggtaccatttgctgagtcctgaggatcgggaggaattggttgatggaacccgccctcggcgcaagaagcacgactaccgcatagcgctctttggcggcagtcaaccccagtcgtgccgttacttcaaccctaaggattacagctggactgatattcggtgccccttcgaaaaaaggagagacgctgcgtgtgtgttttgggacaatgttgtgtatatattgggtggaagccagctctttcccatcaagaggatggattgttataacgtggtgaaagacagttggtattctaagctgggccctcccacacctcgcgactctctcgccgcttgtgctgccgagggaaagatatacacgagcggcggtagcgaggtcggcaacagcgctttatacctattcgagtgttatgacactcgaactgaatcctggcatactaaaccttccatgctcacacaacggtgtagtcacgggatggtggaagccaacggactcatttacgtgtgcgggggatccttaggtaacaatgtgtctggtcgggtgctgaactcctgtgaggtgtacgatcccgccaccgaaacttggaccgagctgtgcccaatgatagaggcacgaaaaaaccatggacttgtcttcgtaaaagacaaaatattcgcagtgggtgggcagaatggtctgggcggattggataacgtagaatactatgacattaagctaaacgaatggaagatggtgagtcctatgccatggaaaggtgtgactgtgaaatgtgcagctgtggggagcatagtctatgtcctcgccggcttccagggcgtcgggcgcctaggccacatactggaatacaatacagaaactgataagtgggttgcaaacagtaaggtacgggccttccctgtgacctcttgcctcatatgtgtggtggacacttgtggcgcgaatgaagaaacactggaaacgtag

SEQ ID NO: 121431 - DNA, 1761 bp, synthetic construct
  misc_feature 1..1761: note = Description of Artificial Sequence: Synthetic coding sequence
  source 1..1761: mol_type = other DNA
atggctgccagtggagtcgaaaagagtagtaagaaaaagacggagaaaaaattagccgctcgagaggaggccaagctgctggccggctttatgggcgtgatgaacaatatgcgtaagcagaagacactctgcgatgtaatcctgatggtgcaggaacggaagatcccagcgcaccgcgtggttctggccgctgccagtcacttctttaatctgatgtttaccaccaatatgctggaatcgaaatcattcgaggtggagctcaaggatgcggaaccggatattatcgagcaactcgtcgagttcgcttacactgctcggataagcgtgaactccaataatgtacagagtctgctcgacgctgcgaatcaataccagattgagcctgtgaagaagatgtgcgttgactttctgaaagaacaggtcgacgcatccaactgcctgggcatttcggtcctcgccgagtgcctcgactgtcctgagctcaaagcaactgccgatgactttattcaccagcatttcacggaagtttacaagacagacgaatttttgcaacttgacgtgaaaagagtgactcatcttctgaaccaagatacactgaccgttagggcagaagaccaggtatacgatgcagccgttcgatggttgaagtacgacgagcccaatcgccagccattcatggttgatatcctggctaaggtccgatttccgctgatctcaaaaaatttcctgagtaagaccgtgcaggccgagcctttgattcaagacaatccagaatgtttaaaaatggttatcagtggtatgcgataccacctgctgtctcctgaggaccgagaagagctcgtggatggtactcgtccaagacggaaaaagcacgactacaggattgccttgttcggaggaagccagccacagtcttgccgttatttcaatccaaaggattattcttggaccgacattaggtgcccctttgaaaaacgccgggacgctgcctgtgtattttgggataatgtggtctatatactgggcggaagccaactgttccccattaaacgaatggactgttacaacgttgtcaaagacagttggtattcaaagcttggaccacctactcccagggattccctcgccgcctgtgccgcagagggcaaaatctacacatccgggggaagcgaggttggcaactccgctctctacctctttgaatgctacgatactaggacagaatcttggcacacgaaaccttctatgctaacccagaggtgttctcacgggatggtggaggccaacggcttgatttacgtgtgtggggggtcactggggaataacgtgtctggtagggtcttgaactcttgcgaggtttacgaccccgcaacggaaacttggacagagttgtgtccgatgatagaagcccgcaagaaccatggcctcgtgttcgtgaaggacaaaatctttgctgttgggggccagaatggcttgggagggctcgacaatgttgaatattacgacattaaattgaacgaatggaagatggtctcccccatgccctggaaaggtgttacagtgaaatgcgcggccgtcggaagtatagtttatgtgttggctgggtttcagggggtcgggaggctgggccacattttagagtacaacacagagacagataaatgggtcgccaattcaaaggtacgcgcgtttcccgttaccagttgcctgatatgtgttgtggacacttgcggggctaacgaggagacgcttgaaacatag

SEQ ID NO: 121432 - DNA, 1617 bp, synthetic construct
  misc_feature 1..1617: note = Description of Artificial Sequence: Synthetic coding sequence
  source 1..1617: mol_type = other DNA
atggtacaggagcggaaaatccccgcacatcgagtagtgctggctgccgcatcccactttttcaacttaatgtttaccaccaacatgctggagtctaaaagcttcgaggtggaactgaaagatgccgagcccgatatcatcgaacagttagttgagttcgcatacacggcaaggatctcagtgaatagcaacaatgtgcagtctttattggatgctgcgaaccagtaccaaattgaacctgtaaaaaagatgtgcgtggattttctgaaggagcaggtggatgctagtaactgcttgggcatttctgtgctggccgagtgtctggattgcccagaactgaaagctaccgctgatgattttatacatcagcacttcactgaagtgtacaaaactgacgaattccttcagctcgatgtaaagcgggtgacccacctcctcaaccaagacaccctaacagtacgcgccgaggaccaagtgtatgacgcagcagtgcggtggctgaagtacgatgagcctaacaggcaacctttcatggtagatatcctcgcgaaagttagattcccccttatttcgaaaaacttcctgtcaaaaacagtgcaggctgagcccctgatccaggacaaccccgaatgcctgaaaatggtcatcagcggcatgcggtatcatttactaagtcccgaggaccgtgaggagcttgtcgatggcacccggccgagaagaaagaagcacgactacagaatagcgcttttcggcgggtcccagccacagtcctgccgttatttcaatcctaaggactattcctggactgacataagatgccccttcgaaaaaagacgcgatgcggcttgtgtcttttgggacaacgtggtttatatactcggcggctcccagctgttccccattaagagaatggactgctataatgtcgtgaaagacagctggtacagcaagctgggcccgccaactcccagagattctctggctgcttgcgccgcagaaggaaagatctacacaagcggggggagcgaggtggggaacagcgcactttacctgttcgagtgttacgatacaagaactgagtcatggcacacaaagccatctatgttgactcagagatgcagtcacggtatggtcgaagccaacggcctgatctatgtatgcggtggttccctcgggaataacgtctcaggcagagtactgaattcctgcgaggtctacgatccagccacagaaacatggaccgaactgtgtcccatgattgaagctagaaaaaaccacggtttagtattcgtcaaggataagatctttgctgtcggggggcagaacggtttgggaggcttagacaatgtggaatattatgacattaagctcaacgagtggaagatggtcagccccatgccctggaagggggtgacagttaagtgcgctgcagtgggctcaattgtctacgtactagcaggcttccagggcgtcgggcggctcgggcatatcctggaatataacaccgagacagacaagtgggtcgccaattcaaaggttagagcttttcccgtcacgagctgtctgatctgtgtggtcgacacgtgtggagcaaacgaggagacgttagagacatag

SEQ ID NO: 121433 - DNA, 1161 bp, synthetic construct
  misc_feature 1..1161: note = Description of Artificial Sequence: Synthetic coding sequence
  source 1..1161: mol_type = other DNA
atggctgcctccggagtagagaagagcagcaagaaaaagactgagaagaagctggcagcgagagaggaggccaagcttctggccggatttatgggggtgatgaacaacatgaggaagcagaaaacgctgtgtgacgtcattctcatggtgcaggagcgaaagattccggctcatcgagtcgtgttggcagctgccagccactttttcaacttgatgttcacaacaaatatgctcgaatcgaaatctttcgaggtggagctcaaagatgccgagcccgacattattgaacagctattacactacaaatttttcaagatgaagaaccgcaaagacgggcgtgtgtctgttagctatgctatcctcatccagggtctcaaaatctacgagatctacagtacaaattttcccgaacacttcacggaggtgtacaaaacagacgaattcttgcaactggacgtaaagcgagtgacacatctgcttaaccaggacactctcaccgttcgcgcagaggatcaggtctatgatgccgccgtccgatggctgaagtacgatgagcctaacaggcaaccatttatggtagacatacttgcgaaagtccgcttccctctcatctctaagaacttcctgtcaaagactgtgcaggccgagccactcattcaagacaatccggagtgcctgaagatggtgatcagcggcatgcggtaccacctcctcagccccgaggatcgggaggagctcgtggacgggacgcgcccaaggcgcaaaaaacatgattacaggattgccctgttcggtggctctcagccccagtcttgtcgatacttcaacccaaaggattattcatggactgacatccgttgcccattcgaaaagcgacgcgacgccgcctgcgtgttttgggacaatgtagtgtatatcctcggaggatcccagctgttccccatcaagagaatggactgttataatgttgtgaaagacagttggtattctaaactgggaccacctactccacgggatagcctcgccgcctgcgccgcagaggggaaaatctatacctctggtggaagcgaagtgggtaacagcgccttgtatttattctgcctgatcccggtgaagtttatgatcctcccccaaaaacacggactgtcttgcgtgcaatag

SEQ ID NO: 121434 - DNA, 1284 bp, synthetic construct
  misc_feature 1..1284: note = Description of Artificial Sequence: Synthetic coding sequence
  source 1..1284: mol_type = other DNA
atggccgccagcggcgtggaaaagtcttccaagaagaagacggaaaagaagctggccgctcgcgaggaggcaaagcttctggccggattcatgggcgtgatgaataacatgagaaagcagaagactctgtgtgatgtgattctcatggtgcaagagcggaaaatccctgcccacagggtcgtcttagctgccgctagccacttttttaacctcatgtttacaacgaacatgctggaatccaagaattttttgagcaagactgttcaggcagagccgttgatacaggacaaccccgagtgcctgaagatggtgatctccggcatgcgttatcatttactctccccagaagatagagaggagctcgtggacggtactaggccgcggcgaaagaagcacgactaccggattgctctgtttggcgggagccaacctcagagctgccggtacttcaaccccaaggattacagttggactgatataagatgtccattcgaaaaaagaagggacgccgcttgtgtattttgggacaatgtcgtgtacatcttgggcggcagtcagttattccccattaaacgtatggattgctataatgtggtcaaagattcttggtactctaagttgggccctccaacgccacgcgatagcttggccgcgtgtgctgcggagggtaagatttacacgtccggcggatcagaggtcgggaattccgctctttatctgttcgaatgctacgacacccggacagagagttggcatacaaagccatcaatgctcacccagcgttgctcccatggaatggttgaagctaatggtctgatttacgtctgtggcggcagtctcgggaataatgtgagcggcagggtcctgaacagttgtgaagtgtacgatcctgctactgagacttggaccgagctgtgtcctatgatagaagcacgaaaaaaccacggacttgtcttcgttaaggataaaattttcgctgtggggggtcaaaacggactagggggactagataatgtcgaatactacgacattaagctaaacgaatggaagatggtaagccccatgccctggaaaggcgtgaccgttaagtgtgcagctgtgggctctattgtctatgtacttgctgggttccagggggtgggacggttgggccacattctggagtataataccgagaccgataagtgggtagccaatagcaaggtacgggcattccccgtcacaagctgcctgatctgcgttgtggacacatgtggcgccaatgaggaaacccttgagacatag

SEQ ID NO: 121435 - DNA, 1533 bp, synthetic construct
  misc_feature 1..1533: note = Description of Artificial Sequence: Synthetic coding sequence
  source 1..1533: mol_type = other DNA
atgttggagtctaaaagcttcgaagtcgaacttaaggatgcagagccggatatcattgaacagctcgttgaattcgcttataccgccaggatcagtgttaacagcaacaatgtgcagtcactgctggacgccgccaatcagtatcagattgaacctgttaaaaagatgtgtgtggacttcctgaaagagcaggttgatgctagcaactgccttggcatctctgttctggcggaatgcctcgattgtccagaactcaaggctactgctgatgatttcatccaccagcacttcactgaggtgtacaaaacagacgagttcttgcagttggatgtcaaaagggttacacatctgctgaaccaagataccctcactgtacgtgctgaggaccaagtttatgacgcggccgtaagatggctcaaatacgacgaacccaaccgccaaccatttatggttgatattcttgcaaaggttaggtttcctctaatctccaaaaattttctgagcaagaccgtacaggcagagccactgatacaggataatcctgagtgtctcaagatggtcatcagcggtatgagataccatctgctttctcccgaagaccgggaggaacttgtcgatggcacacgtccgcgtaggaaaaaacatgattatcggatcgccctgttcggtggaagtcagccgcagagctgtcgttacttcaacccaaaagattactcttggacagatatacgatgcccctttgagaaacgaagagacgccgcatgcgtgttctgggataacgtggtgtatatccttggaggtagccagctgtttccaatcaagcggatggattgttacaatgtcgtgaaagacagctggtacagcaaactaggacctcccacgccccgcgacagcttggccgcgtgtgccgctgaggggaagatttacacatccggggggagtgaggtgggcaactcggctctgtatctgtttgagtgttatgatacccggactgagtcctggcatactaagccaagtatgctgactcaaaggtgcagtcacggcatggtggaagctaatgggctcatctacgtttgcgggggttctctggggaacaatgtgagcggacgggtcttaaacagttgcgaagtgtacgatccagcaaccgagacctggacggagctttgcccgatgatcgaagcgcggaaaaatcatggtttagtctttgtgaaggacaaaatatttgccgtgggaggccaaaacgggttgggaggactggacaatgttgagtattacgatatcaagctgaacgaatggaagatggtttctcctatgccatggaaaggcgtgactgtcaaatgcgccgccgtgggtagtatcgtttatgtgctagccggctttcaaggcgttggcagattaggacatatcttagaatacaataccgaaaccgataaatgggttgcaaatagcaaagtgcgggcctttcctgtcactagctgtttgatctgcgtagtagacacgtgcggggcaaacgaagagacgctggaaacttag

SEQ ID NO: 121436 - DNA, 1086 bp, synthetic construct
  misc_feature 1..1086: note = Description of Artificial Sequence: Synthetic coding sequence
  source 1..1086: mol_type = other DNA
atggtggatattttggcaaaagtccgattccctctgatatccaagaatttcctgtctaagactgtccaggccgagcccctcattcaggacaatcccgagtgcttaaagatggtcatcagcgggatgcgttaccacctgctctcacctgaagaccgagaagagctagtggatggtacccggccccgcagaaagaagcatgactaccgcattgccctctttggtggctctcagcctcagtcatgccggtacttcaatcctaaagactacagttggactgacattaggtgtccctttgagaaaaggagagatgcagcatgcgtcttctgggacaatgttgtatatatcctagggggcagccagttgtttccgattaagcggatggattgctacaacgtggtaaaagatagctggtactccaagctggggcctcccacacccagggactccctggctgcgtgcgccgcggaaggtaagatctatacctctggaggaagcgaggtgggaaactctgctctgtacctttttgaatgttatgataccaggaccgaaagctggcacactaaaccaagcatgctcacacagcggtgtagccacggcatggtggaagcaaatggtctcatctatgtctgtggcggctccttgggaaacaacgttagcggcagagttctcaattcgtgtgaggtgtacgacccggcgacagagacttggaccgaactttgtcctatgatagaagctaggaagaaccacggcctggtgttcgtgaaggacaaaattttcgccgttggcgggcagaacgggctgggcggccttgacaacgtagaatactatgacatcaagctgaatgagtggaagatggtgtcccccatgccctggaagggcgtgacggtgaagtgtgcagcagttggatcaatagtctatgtgttagccgggttccaaggcgtgggtaggctggggcatatactggaatacaataccgagactgataaatgggtcgctaatagcaaggtgagagccttccccgttacttcttgcctgatttgtgtcgtggacacatgcggggctaacgaggagacgctcgagacatag

SEQ ID NO: 121437 - DNA, 1695 bp, synthetic construct
  misc_feature 1..1695: note = Description of Artificial Sequence: Synthetic coding sequence
  source 1..1695: mol_type = other DNA
atgctgggtggcacagactgccgaaccttcctcacgtctcacataaatttaaagaaaaccctttgcgatgtcattctgatggttcaggagagaaagattcccgcccatcgggttgttctggccgcagctagccatttctttaatttgatgttcacaaccaatatgttggagagcaaaagcttcgaagtcgagctgaaggacgccgagcccgatattatcgaacagctggttgaatttgcctacacagccagaatcagtgtaaattctaacaacgtgcagtccctgctggacgctgccaaccaatatcagatcgagcctgtgaaaaaaatgtgtgtggacttcctgaaagagcaggttgacgctagtaattgcctgggcatcagcgttctcgcggagtgcctggactgtccagagttgaaggcgacagctgatgattttatccatcagcacttcacagaggtgtataaaacggacgagtttctccagttggatgtgaagcgcgtcacacatttgctaaaccaggatactctgactgtgagggccgaagatcaggtgtacgatgccgcggtgcgctggctcaagtatgacgaacctaaccggcagcccttcatggttgatatcctggcaaaagttcggttccctctgatatccaaaaactttttaagtaagacagttcaagccgagcccctgattcaggacaatccagaatgcctcaaaatggtgatttccggtatgcggtatcatttactaagccctgaggacagagaggagcttgtcgacggtacaaggccccggagaaaaaagcacgactatcggatcgccctgttcggaggctcacaaccacagtcctgtagatattttaacccgaaggactatagttggacagatatcagatgcccctttgagaaaagacgtgatgcggcatgcgtgttctgggacaatgtggtctacattcttggtggttcacagctctttcccataaagcgcatggactgctataatgtagtaaaagattcttggtacagcaaactcggcccccccaccccacgggattcactggccgcttgcgcagcggagggaaaaatttacacatccggaggctctgaggtagggaactcggcactctatctgtttgaatgctacgacacgcgtactgagagctggcacacaaagcccagcatgctgacgcagcgttgtagtcatggaatggtggaggcaaatggcctcatctatgtgtgtggcggatcactggggaacaacgtttctgggagggtactcaatagttgtgaagtgtatgatccggccactgagacctggacagaactgtgtcccatgattgaagcacggaagaaccacgggcttgtgttcgtgaaggataaaattttcgctgtggggggccagaacgggctagggggacttgataatgtcgagtattacgacatcaaactgaacgaatggaagatggtatctcctatgccatggaagggtgttacagtgaaatgcgccgcagtaggtagtatcgtatatgtgttggctggcttccaaggggttggacgccttggtcatatcctcgagtacaacacagaaactgataaatgggtggctaactctaaagtgcgtgcatttcctgtgacctcttgcttgatctgtgtcgttgacacatgtggagctaacgaggaaaccctagaaacctag

SEQ ID NO: 121438 - DNA, 432 bp, synthetic construct
  misc_feature 1..432: note = Description of Artificial Sequence: Synthetic coding sequence
  source 1..432: mol_type = other DNA
atgctgggaggcacagattgcaggacgttcctgacgagccatatcaatctgaaaaaaactctgtgtgacgtgatcttaatggtgcaggagcggaagattcccgcccatagggtggtgcttgccgccgcctcccacttctttaacttgatgtttaccaccaatatgttggaatctaaaagctttgaagtcgaactcaaagatgccgagccagatatcatcgagcagttagtggagttcgcgtacacagcacggatcagcgttaattctaataacgtgcagagcctcttggatgccgccaaccagtaccaaatcgagcccgtgaaaaaaatgtgtgtggactttctcaaagaacaggtggatgcgtccaactgcctgggaaaaaaataccagattcccgtggtttgcctcttctgcttcatcctttacttctag

SEQ ID NO: 121439 - DNA, 501 bp, synthetic construct
  misc_feature 1..501: note = Description of Artificial Sequence: Synthetic coding sequence
  source 1..501: mol_type = other DNA
atggctgcgtccggagtggagaagtctagtaaaaaaaagaccgaaaagaagctcgcagcaagagaagaggccaagctactggccggtttcatgggcgtgatgaacaacatgcggaagcagaaaacactctgcgatgttatcctcatggttcaggagcggaagatccccgctcatcgcgtcgttctggccgcagcttcccatttctttaatcttatgtttacaaccaacatgttagaaagcaaaagctttgaggtggagctcaaggacgctgaacctgacattatcgaacagctagtggagttcgcatacaccgcaagaatatctgttaattccaacaacgtgcagtccttgctcgatgctgccaatcagtatcagattgaacccgtgaagaaaatgtgtgtggatttcttaaaggagcaggtagacgccagtaactgtctgggtgaagctgagaaggtggatcagtcactgcctgagtgcgggatgctgttcactgtttag

SEQ ID NO: 121440 - DNA, 1863 bp, synthetic construct
  misc_feature 1..1863: note = Description of Artificial Sequence: Synthetic coding sequence
  source 1..1863: mol_type = other DNA
atggcatccgacagcatgtcatccaaacaggccaggaaccacatcacaaaggggaaacgccagcagcagcaccagcagataaaaaaccgttcaagcattagtgatggcgatggagaggactccttcatctttgaggcaaatgaggcttggaaagactttcacggatcccttttgaggttttacgaaaatggcgaattatgtgacgtgactctgaaggttgggagcaaactcatcagctgccacaagctggtgctggcttgtgtgattccctatttccgcgccatgttcctatccgagatggccgaagcaaagcagactctaatcgaaatcagggattttgacggggacgctatcgaagacctagtcaagttcgtgtatagctctcgtctgacccttactgtcgataatgtgcagccactgctttacgccgcttgcattctccaagttgaattggtcgcccgtgcgtgttgcgagtacatgaagctacattttcacccttctaattgtctggcagtgcgggccttcgctgagtcccacaatcgaattgacctgatggatatggcagatcagtacgcctgcgatcatttcaccgaggtggtcgagtgtgaggactttgtttctgtttcaccgcagcatctgcacaaactcctctcaagctccgacctgaacatagagaatgagaaacaggtgtacaatgctgccatcaagtggctgctggcgaaccctcagcaccacagtaagtggttggatgaaactctcgcgcaagtgcgtctccctctgcttccggtggatttcctaatgggggtggttgccaaagagcagatcgtgaaacagaatttgaagtgcagagatttgctcgacgaagcccgaaattatcacctgcacctctcatcaagggcggttcctgattttgaatattccattagaaccacaccaaggaagcacacagctggcgtactcttctgtgtggggggcaggggcggttccggggaccctttcaggtccatcgaatgttactccattaacaagaactcctggttttttgggcccgagatgaattcgaggaggcgccacgtaggcgtcatctcagtagagggaaaggtttatgcagtgggaggccacgacgggaacgaacacttgggcagcatggagatgtttgaccccctcacaaacaagtggatgatgaaagcctcaatgaacaccaagcgccgcgggatcgctctggcatccctgggcggacctatttacgccataggaggcctggatgataacacctgctttaacgatgtagagcggtacgatatcgaatcagatcagtggtccacggtggcccccatgaatactccacgagggggggtgggaagcgtggccttggtgaatcatgtatacgcagttggtgggaatgacggcatggcatccctgagcagcgttgaaagatacgatcctcacttggacaaatggatagaagtcaaagagatggggcagcggcgagctggtaatggggtttccaaattgcatggatgtctttatgtcgtgggaggtttcgatgacaattcccccctgtctagcgttgagcgctatgatccgcggtccaataaatgggattacgtggctgccttaacgactccacgagggggtgtgggaattgctaccgtgatgggcaaaatttttgcagtaggaggtcacaatggtaacgcctacctaaacacagtggaggctttcgatccagtgttaaacaggtgggagctcgttgggagtgttagtcactgccgagctggcgccggcgttgccgtgtgcagctgcctgacttcacagattagggacgtgggccatggaagtaacaacgttgtcgactgtatgtag

SEQ ID NO: 121441 - DNA, 1863 bp, synthetic construct
  misc_feature 1..1863: note = Description of Artificial Sequence: Synthetic coding sequence
  source 1..1863: mol_type = other DNA
atggcgtctgacagcatgtcctcaaaacaggcacgcaaccatatcacaaagggtaaacggcagcagcagcatcaacagatcaagaacagatcatctatatcagacggggatggggaggactccttcatcttcgaagcgaatgaggcatggaaggactttcacggcagcctgctgagattttacgaaaatggggagctttgcgatgttacattgaaggtgggtagcaaactgatctcttgccataagttggtcctggcctgcgtcatcccgtacttcagagcaatgtttctgtcggaaatggcagaagcaaaacagacactcattgagattcgggacttcgatggggacgctatagaggatctcgttaagttcgtgtactcctcccgattgacccttacggtggacaacgtgcaaccgctgttatatgcagcttgtattctgcaggtggaattggtggcaagggcttgctgcgaatatatgaagttgcattttcacccctccaattgcctggcggtccgtgccttcgctgagagtcacaatcgaatagacttgatggacatggctgaccagtacgcttgcgatcattttacagaagtcgtggaatgcgaggacttcgtgtctgtgtccccccagcacctccacaagcttctttcctcttctgatctgaacatcgaaaatgagaagcaagtctataacgctgccatcaaatggctgctggcgaacccccagcaccacagcaaatggcttgacgagacactggcgcaggttagactgcctctgctgcccgtggattttctgatgggggtggttgccaaagaacagatcgtcaagcaaaatctcaaatgccgggatctcttagacgaggcccggaattatcatctgcatttgagtagtagggctgtgcctgacttcgagtacagcattaggactactccgagaaaacataccgctggagtgctgttttgtgtgggtgggcgaggaggttcaggggacccgttccgcagcatcgagtgctatagtattaacaagaatagttggttctttggtcccgagatgaattctcgacggaggcatgtcggtgtcatatctgtcgagggaaaggtgtatgccgtgggcggtcatgatggcaatgagcacctgggctccatggaaatgtttgacccgcttacaaataagtggatgatgaaagcctcaatgaacacaaaaagacggggcatcgccctcgccagcctgggagggcccatttacgcaataggcggcctggatgataacacatgtttcaatgatgtggagcggtacgatatcgagtctgaccagtggtcgaccgtggctccaatgaataccccccggggaggagtaggctcggtggcactggtgaaccacgtgtatgccgtgggaggtaacgacggcatggccagtctcagcagcgtggagaggtatgatccccatctggataaatggatcgaggtcaaggagatgggacaaaggcgagctggaaatggcgtgtcaaagctgcatggatgtttatacgtcgtgggaggatttgacgataattctcccctttcgtcagttgagagatatgacccaaggtctaataagtgggattatgttgctgctctgaccacacccagggggggagtgggcattgcaacagtcatgggcaaaatcttcgcagttggaggacataatggcaacgcctaccttaacaccgtggaagccttcgatcccgtgctaaatcgctgggaactggtcggctcagtgtcccactgccgagcaggcgccggcgtcgcggtgtgcagctgcctgacaagtcagattagagatgtcggacacggttccaacaacgtggtcgattgcatgtag

SEQ ID NO: 121442 - DNA, 810 bp, synthetic construct
  misc_feature 1..810: note = Description of Artificial Sequence: Synthetic coding sequence
  source 1..810: mol_type = other DNA
atgaattctcgacggcgacatgtgggcgtcataagcgtggagggcaaggtatatgctgtgggcggacacgatggaaacgagcacctgggaagcatggaaatgtttgacccactgacaaataagtggatgatgaaggcaagtatgaacacgaagcgccgcggcatcgcactcgctagtctcggtggcccaatctatgctattggaggactcgatgataacacttgttttaacgacgtagaaaggtatgacatcgagagcgaccagtggtcaacagtggccccgatgaataccccccgcggcggggtggggtccgtggccctggtcaatcatgtgtacgcagtcgggggcaacgacggcatggctagcttgtccagtgtggagcgctatgatccacatttggataaatggatcgaagttaaagaaatggggcagcgcagagcaggtaacggtgtgtctaagctccatggttgtctgtatgtagtaggcggatttgacgacaattctcccttatcaagcgtcgagcgctatgacccacgcagcaataagtgggactatgtagctgccctcactaccccacggggcggtgtaggaatcgcaaccgtgatgggcaaaatttttgcggtggggggccataatggtaatgcctatctgaacactgtcgaggcattcgacccagtgctgaaccgttgggaattagtgggctcggtgtctcactgcagggcgggggctggcgttgctgtgtgttcctgcctcacctctcagatacgggacgtggggcacggctctaacaatgtggtagattgtatgtag

SEQ ID NO: 121443 - DNA, 1875 bp, synthetic construct
  misc_feature 1..1875: note = Description of Artificial Sequence: Synthetic coding sequence
  source 1..1875: mol_type = other DNA
atgcagccagaccctcggccctccggagccggcgcctgctgtcgatttctgcctcttcagagccagtgtcccgagggagctggcgatgcggtgatgtatgctagcacggaatgtaaagcagaggtgacaccttctcagcacggcaaccgcacattcagctacacactagaagaccacacaaaacaggcattcggcattatgaacgagctgaggctgagccagcaactgtgcgacgtaaccttgcaagtgaagtatcaggacgccccggctgcccagttcatggctcacaaagtggtgttggctagctcgtctccagtcttcaaggctatgttcaccaatggcctgcgcgagcaagggatggaagtggtatcaattgaggggatacacccaaaagtgatggagcggcttatcgagttcgcttataccgccagtatttctatgggtgagaagtgcgtgttgcacgtgatgaatggagctgtgatgtatcagattgactcagtggtgagagcctgtagcgacttcctcgtgcagcagctcgatccctctaatgccattggaatcgcgaatttcgccgagcagatcggctgcgtggagctccaccaaagagctagagaatacatttacatgcattttggtgaggttgcaaaacaggaggaattcttcaacttgagccactgtcaattggtgaccttgatttcacgtgatgatctgaatgttagatgcgagagcgaggtctttcacgcctgcattaattgggtcaagtatgactgtgaacaaaggcgtttctacgtgcaggcgctgcttagggcagtacggtgtcacagcctcactccgaattttttacagatgcagctgcagaagtgcgaaatcctacagtccgattccagatgtaaagattacctggtgaaaatctttgaagagctcaccctccacaaacccacacaggtgatgccctgtcgtgcgcccaaagtcggacgactgatctacacagccggcggctactttagacaaagcctgtcctatttggaggcctacaacccttcagatggaacctggcttcggttggcggatctccaggtacctagatcgggcctggcagggtgcgtcgttggggggttactttatgcagtgggcgggagaaacaactcacccgacggaaatactgacagctcagctctggactgctacaatcccatgacgaatcagtggtccccatgcgctcctatgagcgtgcctcgcaatcgcataggggtgggggtgatcgatggacacatctatgccgttggagggtctcacggatgtatccaccataactctgtcgagcggtacgagcctgaaagagacgagtggcatcttgtagccccaatgcttactaggcgcataggagtgggagtggcggtattgaataggctgttatacgctgtgggcggattcgatggaacaaaccgtctgaattccgcggaatgctactatcctgagcgcaacgagtggaggatgatcaccgcgatgaacaccattaggtctggggccggggtctgcgtcctacacaattgcatttatgccgccggcggttacgacgggcaagaccagctgaactctgtggaacgatacgacgtagaaactgaaacatggacgtttgtcgcgcctatgaagcaccgcagaagtgccctggggatcacagtgcatcagggcaggatttatgttctgggcgggtatgacgggcacacattccttgacagtgtggaatgctatgaccctgacaccgacacgtggagtgaggtcactcgcatgacaagcgggaggtccggagtgggcgtagctgtaactatggaaccatgtagaaaacagatcgaccagcaaaactgtacttgctag

SEQ ID NO: 121444 - DNA, 1875 bp, synthetic construct
  misc_feature 1..1875: note = Description of Artificial Sequence: Synthetic coding sequence
  source 1..1875: mol_type = other DNA
atgcagcctgacccaagaccatccggcgccggcgcctgctgccgttttctgcctctccaatcacaatgtcctgagggggctggtgatgctgtgatgtacgccagcactgagtgcaaagcggaagtaaccccgtcacagcatgggaatcgcactttttcatacactctggaggatcacacaaagcaagcattcggaattatgaatgagttgcgtctatcgcaacaactttgtgacgtgacactgcaagttaagtaccaggatgctccggccgcacaattcatggcccacaaggtcgttctcgctagttcaagcccagtctttaaagcaatgttcaccaatgggctgagagagcagggaatggaagtagtgtctatcgagggtatccatccaaaggtgatggagaggttgattgagtttgcatacacggccagcattagcatgggcgagaaatgcgtccttcacgtgatgaacggtgctgtaatgtatcagatcgattccgtcgtgagagcctgctctgacttcctcgttcagcagcttgacccttctaacgcaattgggattgcaaatttcgctgaacaaatcggttgtgttgagctccaccagagagcacgtgaatacatatatatgcattttggggaggtcgccaagcaggaggagtttttcaacctttctcactgtcagcttgtgacactgatttcacgagacgaccttaatgtgaggtgcgagtctgaggtgttccatgcctgcattaactgggtgaaatacgactgcgagcagcgtaggttctacgtccaggccttgctgcgtgctgtccggtgtcattcactaacgcccaatttcttgcaaatgcagctccagaaatgtgaaattcttcagagtgatagccgctgtaaggattatttggtgaagattttcgaggaacttacacttcataagccaacacaagtgatgccctgcagagcccctaaagtaggtcggcttatttacaccgcaggtgggtatttccgccagtccctgtcctacctggaggcttacaatccatccgacgggacctggctaaggctagctgatctgcaagttccgaggagcggtttagccggttgcgtcgtgggcggtctcctgtacgccgtcggtgggaggaacaactcacctgatggtaacaccgacagttccgcattggactgttacaatccaatgactaaccagtggtctccctgcgccccaatgagcgtacctcggaacaggatcggcgtcggagtgatcgacggacatatctatgcagtcggtgggagccacggatgtattcatcataactccgttgaacgttatgaaccagaacgggacgagtggcatctagtggcccctatgctcacacggcgcattggggtaggagtcgctgtactcaaccggttattatatgccgtgggagggtttgatggaacaaaccggctgaatagcgccgagtgctactaccccgaacgcaacgagtggcgtatgataacggcgatgaacaccatacggagtggcgctggagtttgcgttttacataactgcatctatgcagccggcggatacgatggccaggatcaactaaactccgtggaaagatatgacgtggaaaccgaaacctggacattcgtcgcgccgatgaagcaccggaggagtgctcttggtatcactgtccaccagggtagaatctacgtcctcgggggttacgatggccataccttcctggattcagttgaatgctacgacccggacaccgatacttggtccgaagtcacacgaatgacgagtggcagatcaggggttggtgtcgccgtgacaatggaaccttgccgaaagcagattgatcaacagaattgtacctgctag

SEQ ID NO: 121445 - DNA, 2199 bp, synthetic construct
  misc_feature 1..2199: note = Description of Artificial Sequence: Synthetic coding sequence
  source 1..2199: mol_type = other DNA
atggaaggaggcgaccaaagcgaagaagagccacgggagcggagtcaggcagggggcatgggcaccctgtggtcacaagaatccacccctgaagagcgcctgcctgttgagggctcacgtccttgggctgtcgctcggagggtgctgaccgccatcttaatcctgggactgctcctttgtttcagcgttttgctcttttataacttccagaactgcggcccacggccttgcgaaacatccgtatgcctggacttaagagaccactaccttgccagtggaaacaccagtgtggcaccctgcaccgatttcttcagctttgcctgtgggcgggccaaagagactaataattcattccaagaactagccacaaaaaataagaatcgactccggcgcatcttagaggttcagaactcttggcacccagggagtggggaagaaaaggcctttcagttctacaactcttgcatggataccttggccatagaagctgcagggaccggccccctgcgtcaggtgattgaggagctcggcggatggcgaattagtggcaaatggacatcccttaattttaaccggactttgcggctgctgatgagtcagtacggccacttccccttcttccgcgcctatctcggacctcacccagcttcccctcacacacccgtgatccagatcgaccagcctgaatttgacgttcccctgaagcaggaccaagaacaaaaaatttacgcacagatattccgggagtatttgacctatctgaaccaactgggtacgcttctcggcggcgatcccagcaaggtccaggaacattcatcattgtcaatctccattactagccggctgttccagtttctcaggccgctagagcaacggcgtgcccagggcaaactgtttcaaatggtgacaatcgatcagcttaaggagatggccccagctatcgactggctgtcttgtctgcaggcgacatttacacctatgtccctgtctccctcccaaagcctggtcgtccatgacgtcgagtatctgaaaaatatgtcccagctcgtcgaggaaatgctactgaagcagcgggactttctgcagtctcatatgattctgggcctggtggtcacactgtcccctgctcttgattcccagttccaagaagcccgcagaaaactcagccagaagctccgggagctgaccgaacagccaccaatgcccgcccgtccacgctggatgaagtgtgtggaggaaacaggcacttttttcgaacctaccttggctgcattgttcgtccgcgaggcatttggcccgagcaccaggagtgcggcgatgaagctctttaccgcaatccgtgacgctcttatcaccaggcttcgcaatctcccatggatgaatgaagagacacaaaatatggcacaggataaggttgctcaattgcaagtcgaaatgggagcgagcgagtgggctctgaagccagagctggctaggcaggagtacaacgatatccagcttggctcttcgtttttgcagtccgtgctgagctgcgtacggtctctccgggctcggatagtgcagtcatttctccaaccccacccccaacatagatggaaggtgtccccttgggatgtgaacgcatattatagtgtttccgaccacgtggtggtatttccagcgggactgttgcagccaccattttttcacccagggtaccctagagccgtaaacttcggagccgcgggctcgattatggctcacgagttgttgcatatcttctatcagctgcttcttcccggagggtgtctggcgtgcgataatcacgccctccaggaagctcacttatgcctcaaaaggcattatgccgcgtttccactgcctagtcgaacttcctttaatgactccctcaccttcctcgagaacgccgccgacgtggggggcctggctatagcactgcaggcctactcaaagaggcttctgaggcaccacggcgaaacagtcctaccctccctcgacctctcgccacagcagatcttttttagatcctacgcccaggtgatgtgtcgaaaaccatctcctcaggattctcacgacacccacagtcctccacacctcagagtccatggacctctgtcgtcaactccagctttcgcccggtacttccgatgcgcccggggagctcttctcaaccctagtagccgttgtcaactctggtag

SEQ ID NO: 121446 - DNA, 1935 bp, synthetic construct
  misc_feature 1..1935: note = Description of Artificial Sequence: Synthetic coding sequence
  source 1..1935: mol_type = other DNA
atgagccgccagttctctagcagaagtggctacaggagcggcggaggattttcatccggttccgccgggattatcaattatcagcggcggacgacgtcgtcctccacacggaggagcggcggcggcggaggacggttcagctcttgtggcggcgggggcggcagttttggagccggcgggggctttggatcaagaagcctggttaacctgggagggagcaaaagcatcagcatctctgtggcccgaggtggcggaagggggagcgggtttgggggagggtatggcggaggaggctttggcgggggaggatttggcggcggggggttcggcggtggcggaatcggggggggcggctttggcggctttggcagtggcgggggggggttcggcggcggtgggtttggcggaggcggctacgggggcgggtacggtccagtttgccccccaggtggcatacaagaagttactatcaaccagagcttgctgcaacctcttaatgtcgagatcgatccagagattcaaaaggttaaaagccgtgaaagagagcagatcaagtcgttaaacaaccaatttgccagctttattgataaggttcgattcctcgagcaacagaaccaggtcctacaaaccaaatgggagctccttcaacaggtggacacgagcacacgaactcataacttagagccctactttgagtcattcatcaataatttgcgcaggcgcgtcgaccaactcaagtcagaccagagtcgactagattcagaacttaaaaacatgcaggacatggtcgaggattaccgcaataagtacgaagacgagatcaacaaacgtactaatgccgagaacgagttcgtaacaatcaagaaggacgtggacggagcgtatatgactaaggtggatctccaggccaagctggacaatctgcaacaggagatcgactttctaactgctttataccaggccgaactgagccaaatgcaaacccagataagtgaaaccaacgtcatcctatctatggacaataatagaagcttagatctggacagcataatagccgaagtcaaagcccagtacgaggacatagcccaaaaatctaaggcagaagctgaaagtctctatcaatccaagtatgaagaactccagataactgctggcagacatggcgacagtgtcagaaactccaagattgagatctcggagctcaatcgcgtcatccagaggctaaggtcggaaattgacaatgtgaaaaagcagatctcaaatcttcagcagtcgatcagcgacgccgagcagcggggagaaaatgccctcaaagatgccaaaaacaaactgaatgacctcgaagatgcattgcagcaagctaaagaagacttggccagacttctcagagattaccaagaactgatgaacaccaagctggcgttggatctggaaatagcaacctacaggacactgctggagggggaggagtcacgaatgtccggcgaatgcgcaccaaacgtatctgtctccgtgtcaaccagccacacaaccatatctggcggaggctcccgcggggggggcggaggaggttatgggagcggtggttcttcatatggctccggcggtggcagttacggatccggcggaggcggaggtgggggacggggatcttacggcagcggcggctcgagttatgggagcggtggcggttcatacggctctggagggggcggagggggccatggaagctatggctccggaagttcaagcggtggctatcgcggagggtctggaggaggcggtgggggaagttcaggagggcgaggttctggtggcggctcaagtggcgggagtattgggggtaggggctcctcatcaggcggggtgaagtcatctggtggctcatcctctgtgaagttcgttagtactacgtatagcggcgtgactaggtag

SEQ ID NO: 121447 - DNA, 1755 bp, synthetic construct
  misc_feature 1..1755: note = Description of Artificial Sequence: Synthetic coding sequence
  source 1..1755: mol_type = other DNA
atgtctgtgcgttactcttcctctaagcactattcctcgtcccgttcagggggtggaggaggcggagggggctgtggaggaggtggtggggtgagctcattgcggatatctagttcaaaaggtagcctgggcggcggcttttcttccggtggattctcaggcggtagttttagccgcggaagcagcggcgggggttgcttcggcggtagttctggaggatacggtggtctggggggatttggaggagggtcattccgaggctcttatgggagttcatcattcggagggtcctacggaggtatcttcggcggaggaagctttggggggggctctttcggcggggggtcattcggagggggaggctttggcggcggaggtttcgggggcggctttggtggaggcttcgggggagacggcgggctcctcagcggcaatgagaaagtaaccatgcagaacctcaacgacaggctggcgtcctacttggacaaggtccgtgctctcgaggagagtaattacgaactcgagggcaagattaaggaatggtatgagaagcatggcaacagtcatcagggcgagccaagagattattccaaatattacaaaacaatagacgacctgaagaaccagatactcaacctgactactgataacgcaaacatattactgcagatcgataacgcgcgcctcgccgccgatgacttcagactgaagtacgaaaacgaagtagcactgcgccaaagcgttgaagcagacattaacggtctgagaagagtactggacgagctgacactgaccaaagccgaccttgagatgcagatagagtctctgacagaggagctggcctaccttaagaagaaccacgaggaggaaatgaaggacctgcgcaacgtaagcactggagatgttaatgttgagatgaacgccgcccctggagtcgacctgactcagctgctgaataatatgcgttcacagtacgagcagctcgctgaacagaaccggaaagacgcagaagcatggttcaacgagaagagcaaagagttgaccaccgaaatcgacaacaatatagagcagatatcaagctacaaatcagaaataaccgagcttcggagaaatgtgcaagccttagagatcgagctgcagagccagctggccttaaaacagtcccttgaagcgtcgctggctgaaactgagggaaggtactgtgtgcaattgtcacagatacaggctcagatctctgccctggaagaacagcttcagcagatccgggctgaaactgagtgtcagaacacagagtaccagcaactacttgacatcaaaatcaggctggagaatgaaattcaaacgtaccgatcactgctggaaggcgaggggtccagcggaggggggggcaggggaggaggcagtttcggcggcggatatggcgggggcagcagcggaggggggagctccggcggcggccatgggggaggacacggcggcagttccggagggggttatggcggcggctcttcagggggcggttcatctggaggaggctacggcggcggtagctccagtggcgggcatggaggctcgagttcaggcgggtacgggggcggttcctctggaggcggtggcgggggttatggtggaggtagttccggcgggggctccagtagcggggggggatacggaggcggctccagctctggcggacataagagctcttcctcaggctcagtcggggagagcagctctaagggtcctaggtactag

SEQ ID NO: 121448 - DNA, 1485 bp, synthetic construct
  misc_feature 1..1485: note = Description of Artificial Sequence: Synthetic coding sequence
  source 1..1485: mol_type = other DNA
atggaccttagtaacaacacaatgtccttgtccgttcggacacccggcctgagcaggagattatcctcacagtctgtcatcggtcggcctcggggaatgagtgcgtcgtcagtgggaagtgggtacggcggctccgctttcggatttggagcctcttgtggcggcggctttagcgctgcctctatgtttggctcatcttctggtttcggtggcggctcgggcagttccatggccggaggactgggtgcgggctacggacgcgcgctgggtggcggaagtttcggaggtttaggtatgggttttggcggctcaccggggggcggtagcttggggatcctgagcgggaacgatggagggcttctgagcgggtctgagaaagaaacgatgcagaacctcaacgacaggctagcgagctatcttgacaaagtgcgagccctagaagaagccaacaccgaactggaaaacaaaattcgggagtggtatgagactagaggtaccggcacagcggatgcttcacagagcgactacagcaaatactaccctcttatcgaggatctacggaataagattattagcgccagcatcggaaatgctcaattgctgctgcaaattgataatgccaggctggctgcagaagatttcaggatgaagtacgagaacgagctcgctctgaggcaaggggtcgaggctgatataaatggacttcggcgcgtcctcgacgaactgacactcacccgaaccgatctagaaatgcagatcgagtccttaaacgaagagctcgcctatatgaagaaaaatcacgaggacgaactacagagtttcagagtgggagggcctggggaggttagcgtggagatggacgctgcccctggagtggatttgacaagactgctcaatgatatgcgggcacaatatgaaacaatagctgaacagaatcggaaagatgccgaagcatggtttattgaaaagtcaggcgagctaagaaaggagatcagtactaacactgagcagctccaatcgagcaaatcagaagttacagacctccggcgcgcttttcagaacctggagatcgaacttcagagccagctggcgatgaagaagtctctggaggatagcctggcagaggcagaaggcgactactgcgctcaattgtctcaggtacagcagctgataagtaacctggaggctcagctccttcaggtgcgggccgatgcagaacggcagaacgtggaccatcagcgtctgttaaacgtgaaggctcggctggagctggagattgaaacctaccgaaggctgcttgacggggaggcccaaggtgatgggctggaagagtcactgtttgttaccgatagcaagagtcaagctcagagtactgactcctccaaggaccccacaaaaacaaggaaaatcaagaccgttgtgcaggagatggttaacggcgaggtggtttcttcacaggtccaggagattgaggaactgatgtag

SEQ ID NO: 121449 - DNA, 1068 bp, synthetic construct
  misc_feature 1..1068: note = Description of Artificial Sequence: Synthetic coding sequence
  source 1..1068: mol_type = other DNA
atgtctctccggctgcagagctcatcagcttcctacgggggcggcttcggcgggggcagctgtcagctgggcggaggacgcggggtttccacttgctcaaccagattcgttagcggcgggagcgcaggaggctacgggggcggggtgtcatgtgggtttggaggaggggctggctctggttttggagggggactgggaggtggttttggagggggttttgccggtggttttgttgactttggagcatgcgacggtggactactgacagggaacgagaagattacaatgcagaatcttaacgacagactagccagctacttggaaaaagtgagggcactggaagaagcaaatgctgatctggaagtgaaaattagggattggcacttaaaacagtccccggcctccccagagcgagactactcaccttattacaagaccattgaggagcttcgtgataagatccttaccgccaccattgagaataaccgcgttatcttggaaatcgacaatgccaggctagcggctgatgacttcaggctgaagtacgagaatgaactggcactgcgccagagtgtggaagccgacattaatggtcttagacgagtgctggatgaattgacactaagcaagaccgatctcgagatgcagatagagtccttaaacgaggaactggcctacatgaagaagaaccatgaggaagaaatgaaggaattttctaatcaagttgtggggcaagtgaatgtcgagatggacgctaccccgggtattgatctgacccgcgtccttgctgaaatgcgagaacagtacgaggccatggccgaacgcaaccggcgggacgctgaagaatggtttcatactaagtctgcagaactcaataaggaggtgagtacaaatactgctatgatccagaccagtaagacagagataaccgaactaaggcggacgctacagggcctggagatagagctgcagtcccagctgtccatgaaggccggcttagaaaatactgccgccgatcctgggacccatcagcagcaccgtgggccagctgaaagagccccacagtag

SEQ ID NO: 121450 - DNA, 1377 bp, synthetic construct
  misc_feature 1..1377: note = Description of Artificial Sequence: Synthetic coding sequence
  source 1..1377: mol_type = other DNA
atgtcgctgcggctgcaatcctctagcgcgtcttatggcgggggatttgggggggggtcatgccagctcggaggtggccgaggagtgtcaacttgtagtactaggtttgtgtctgggggatctgcaggcggatacgggggcggagtgtcgtgtggatttggtggcggcgccggatccggctttggaggcggctacggaggaggattaggaggcggttacgggggcggcctcggtgggggctttggaggagggttcgcaggtggatttgttgacttcggcgcgtgtgatggcgggttgctgacaggaaacgaaaagataactatgcagaacctgaacgaccggctagcctcctacctcgagaaagtgcgagccctggaagaagccaacgccgacctggaagttaagattcgcgactggcacctgaaacagagccccgcatcccctgagagagactacagtccctactataaaactatcgaagaactgcgagacaaaatcctcacagccacaattgaaaataatcgcgtgatccttgagatcgataacgcacgactggctgctgatgatttcaggctgaagtacgaaaacgaactggccctgcgccagtccgtagaagccgatatcaacggactacgacgagtgctggatgagctgactctttctaagaccgacttggagatgcagattgagtcgctgaacgaggaactggcttatatgaagaagaatcacgaagaggagatgaaggaattctctaatcaggtggtaggtcaggtcaatgtggagatggatgccactcccgggatcgaccttacaagagtgctcgctgagatgcgtgaacagtatgaagcaatggccgagagaaaccggagagacgcagaggaatggtttcacacaaagagtgctgagcttaacaaggaggtttccactaatacagcgatgatacagacatccaaaacggaaatcacagagctgcggaggacgctgcagggactggaaatcgagctacagtctcaactgagcatgaaggccgggctcgaaaacaccgtggcagagacagagtgtcgatatgctctccagctgcagcagatccagggtctgataagctcaatcgaggcccagctgtctgagctgagatccgagatggaatgccagaaccaggagtacaagatgctgttggacatcaagactaggctggaacaagaaattgcaacgtataggtccctcttggagggtcaggatgccaaaatgattgggttcccctcatccgctggctccgtttccccacggagtacaagcgttaccaccacgtcctccgccagtgtaaccactacgtccaacgcatctggccgtaggacaagtgacgtgagacgaccctag

SEQ ID NO: 121451 - DNA, 1263 bp, synthetic construct
  misc_feature 1..1263: note = Description of Artificial Sequence: Synthetic coding sequence
  source 1..1263: mol_type = other DNA
atgtctttgagattacagtcaagttccgcatcttatggtggaggctttggtggcggatcctgccagctcgggggtgggagaggtgtgagcacatgcagcactaggttcgtgagtggtggcagtgccggcgggtacggcggcggggtaagctgtggatttgggggtggggccggaagcgggtttggcggtggatatggcggggggctgggaggaggatatggtgggggcctaggcggaggctttgggggcggattcgcagggggcttcgttgatttcggcgcatgtgacggaggtttgttgacgggaaacgagaagattaccatgcagaacctgaatgatcgactggcatcatatctggagaaggtcagagccttggaagaggccaatgcagaccttgaagtgaaaattagagactggcatctgaagcagagcccggcatcacccgagagagactactccccatattataagactatcgaagaactgagagataaaatcttgaccgccactattgaaaacaacagagtgatccttgaaatcgacaacgcccggctggctgctgacgacttccggttgaaatacgagaacgaactcgccttgcgccagtcagtagaggcagatatcaacggactgcggcgagtgcttgacgaacttacattgtcaaaaactgatctcgagatgcaaattgaatccctgaatgaggagctggcttacatgaagaaaaatcacgaagaagagatgaaggagttctccaatcaggtggtcggacaggttaatgtcgaaatggacgcaacacccgggatcgacctgaccagggtgctcgccgaaatgcgcgaacagtatgaagcaatggcggagcgcaacagaagagacgcagaagagtggtttcatacgaaaagcgcggaactgaacaaggaggtatctacaaacacggctatgattcaaactagcaagacagaaataaccgagctgaggagaactctgcagggcctcgagatagaactccagtcccagctcagcatgaaggccgggctcgagaacacagtggcggaaacggagtgcaggtatgctctccagttacagcagatccaggggcttatcagttctatagaggctcagctgtcagagctacgcagcgaaatggagtgccaaaaccaggaatataaaatgctcctggacatcaaaacccgtctggagcaagaaatcgctacatataggtctctcctcgagggccaggacgcaaagaagaggcagccaccttag

SEQ ID NO: 121452 - DNA, 1371 bp, synthetic construct
  misc_feature 1..1371: note = Description of Artificial Sequence: Synthetic coding sequence
  source 1..1371: mol_type = other DNA
atgacgactacttttctgcaaacatcctcatccacgttcgggggcggcagcactcggggcggaagcttgctcgctgggggcggcggctttggcggcggatccctgtccggcggtggagggagtcgtagcatatcagccagctctgcccggtttgtgtcctccgggagcggaggagggtacgggggcggaatgcgcgtctgtggtttcgggggtggggccggcagcgtgttcgggggaggatttggcggcggagtgggaggcggattcggcgggggcttcggcggaggggatggagggctgctaagcgggaatgagaaaattacaatgcagaatctgaatgatcggctagcctcatacctcgataaagtgcgagcgttggaggaggctaacgccgaccttgaagtcaaaatccacgactggtaccagaaacaaacccctaccagccccgagtgcgattactcccaatattttaagaccatcgaagaactcagggacaaaatcatggccactaccatagataatagcagagtcattcttgagatagacaatgctagattagctgccgacgacttcagactgaaatacgagaacgagcttgcactaaggcaaggagttgaagctgacatcaatgggttgcgtcgagtcctggacgaacttactcttgcacggacagatctggagatgcaaatcgaagggcttaacgaggagctcgcttatctgaaaaagaaccatgaagaggaaatgaaggagttctcctcccaacttgcaggacaggttaatgtggaaatggatgcagccccgggagtcgacctgactagagtactggcggagatgagagaacaatacgaggccatggctgaaaagaatcggagagacgttgaagcatggtttttttcaaagacagaagagctgaataaagaagtggcttctaatactgagatgatacaaacttctaaaacagagatcacagatctgagaagaacaatgcaggaactggagattgagctgcaaagccagctctctatgaaggccggactggagaacagtcttgccgaaacagagtgcagatacgcaacccagctgcagcaaatccaggggcttatcggcgggctcgaggctcagttgagcgagctgagatgtgaaatggaggctcagaaccaggagtacaagatgctccttgatataaagacccggctggaacaggagatagcaacgtatagatccctcctggaaggtcaggacgctaagatggcagggatcgctatccgtgaagcctcctccgggggaggaggaagtagctcaaactttcacataaacgtggaggagagcgtagatggacaggtcgtgtcctcacacaagcgagaaatctag

SEQ ID NO: 121453 - DNA, 876 bp, synthetic construct
  misc_feature 1..876: note = Description of Artificial Sequence: Synthetic coding sequence
  source 1..876: mol_type = other DNA
atgacagggacacgctctaggcctcagcccgcccagaatgcgaccaccgccaacaccagtagaccccttaagtcttcggggacacggtacgagaacgaactagctctccggcagggcgtagaagctgacattaatggtctccggagagtcctggatgagcttacactcgcccggacggacctagagatgcaaatcgagggacttaatgaagaactggcatatcttaaaaagaaccacgaggaagaaatgaaggaattctcgtctcagctagcaggccaagtgaatgtagagatggatgccgcgcccggcgttgaccttactcgcgtgctggccgagatgcgggagcaatatgaagccatggccgagaagaaccgacgcgacgtggaggcctggtttttttccaaaaccgaggaacttaataaggaagtcgcttccaacaccgagatgattcaaacatccaagacagagattacagacctgcggcgcaccatgcaggagctagagatcgagctgcagtctcaactgtccatgaaggccggtctcgagaactctctcgcagagacagagtgcagatacgccacccaactgcagcagattcagggcttaataggcggcctggaagcacagttgagcgaactgagatgcgagatggaggctcagaaccaggagtacaagatgctcttggacattaaaaccaggctcgaacaggagattgctacttaccggtctttattggagggacaggatgccaagatggcaggaatcgccatccgggaggcaagttccggcgggggaggctccagttccaactttcatatcaatgttgaagagagcgtggacggacaggtggtgtcgtcacacaaacgggagatctag

SEQ ID NO: 121454 - DNA, 1371 bp, synthetic construct
  misc_feature 1..1371: note = Description of Artificial Sequence: Synthetic coding sequence
  source 1..1371: mol_type = other DNA
atgacgacaacatttctgcagacgagctcttcaacttttggagggggctctacgagaggagggagcctccttgcaggtggcggagggtttggaggcggaagtcttagtggtggaggagggtccagatcaattagtgcttcctcggcacgtttcgtgtcaagcggcagcggtggcggttatggtggagggatgagggtatgtggtttcggcggaggcgcaggcagcgtgttcggcggaggtttcgggggaggggttgggggtggttttggggggggcttcggaggcggagatggcggtctgctgagcggtaatgagaagattaccatgcaaaatctcaatgaccgcctggcttcgtatctggacaaggtgcgggcactagaagaggctaacgctgatttggaagtgaaaattcatgactggtatcagaagcaaacccctacgagccctgaatgcgactattcacaatattttaagaccatcgaagagctgcgtgacaagattatggctaccacaatcgacaactcacgggttatactggagatcgataacgctagactggctgccgatgatttccggcttaagtacgagaacgagctagctctccgccagggcgttgaggcagacattaatgggctacgccgggttcttgatgagctgacgctggcacgcactgatctggaaatgcagattgaagggcttaatgaggagctggcctatttaaaaaaaaaccacgaggaagagatgaaagagttttctagccagctcgcaggccaagttaacgtggaaatggacgccgccccgggcgtagacctgacccgtgtgctggcagaaatgcgcgaacaatatgaagccatggctgaaaaaaacagacgcgacgtggaagcctggtttttcagcaagaccgaagagctcaacaaagaggtggcctctaatacagagatgatccaaacttctaagaccgaaatcactgacctgagacgaacaatgcaggagttggaaattgaactacagtcccagctgtccatgaaggctggcctagagaatagcctggctgagacggaatgccgctacgccacacaattgcagcagattcagggccttatagggggactggaggctcagttgagcgaactgcgttgtgaaatggaggctcagaatcaagagtacaaaatgctactggatatcaaaaccaggctcgagcaggagattgccacataccgtagcctgttggagggccaggacgctaaaatggccggcatcgccattcgggaagcttcctcaggcggcggaggcagctccagtaatttccatattaatgtggaagaatccgtggacggtcaggtagtgtctagccacaaacgggagatctag

SEQ ID NO: 121455 - DNA, 756 bp, synthetic construct
  misc_feature 1..756: note = Description of Artificial Sequence: Synthetic coding sequence
  source 1..756: mol_type = other DNA
atgactggtacacggtccaggccccagcctgctcaaaatgcaactacagctaacactagcaggcctctgaaaagctccggcactcgctatgaaaatgagctggccctgcgccagggggtggaggccgacattaacggacttaggagagtgttggatgaacttaccttggctcggactgatctcgagatgcagattgaaggtctgaatgaggaattagcctatctgaagaaaaatcacgaagaggagatgaaggagttcagcagccaactggccggtcaggtcaacgtagagatggacgctgctcctggagtggacctcactagggtcttagcggaaatgcgcgagcaatacgaagctatggcggagaagaatcgccgcgacgtggaggcatggttcttctctaaaacggaggagctaaataaggaagtagcctcaaatacagagatgatccagacatcaaagacagagattactgatcttaggaggaccatgcaggagctggagatcgagctgcaatcccagctaagcatgaaggccggtctagaaaactccctggccgagacggaatgccgatacgcaactcaattgcagcagattcaggggctcatagggggattggaggcgcagctgtccgagctgaggtgtgagatggaagcacaaaaccaggagtacaaaatgctcctggatatcaagacacgattagagcaggaaatcgccacctatcggtcgttgctggaaggccaggatgcaaaatag

SEQ ID NO: 121456 - DNA, 663 bp, synthetic construct
  misc_feature 1..663: note = Description of Artificial Sequence: Synthetic coding sequence
  source 1..663: mol_type = other DNA
atgacgggcacgaggtcccgtccccaacccgcacagaatgcaactaccgcaaacacatctagacccttgaagagctcgggcacacgctacgaaaacgaactggctctacgtcagggagttgaggctgatatcaacggattacgacgcgtgcttgatgagctgactttagcgcgcacagacctggaaatgcagatcgaaggtctgaatgaggagcttgcatatctgaagaagaaccacgaggaagagatgaaggaattttcatcccagctcgcgggacaggtgaacgtggagatggatgctgcccccggcgtcgatctgacaagggtcctagccgagatgcgggagcagtatgaagccatggctgagaaaaaccgacgcgacgttgaagcttggtttttcagtaagacagaggaactgaacaaagaagtcgcgagtaacaccgaaatgatccagacctcaaaaaccgaaatcactgatctgagaaggaccatgcaggaactggagatcgagctccagtctcagctgagtatgaaagcaggcctcgagaacagcttagccgaaactgaatgccggtatgccacccagctgcagcagatacaagggttgatcggagggcttgaggcccagctctccgagctgcgttgcgaaatggaagcacagtag

SEQ ID NO: 121457 - DNA, 1422 bp, synthetic construct
  misc_feature 1..1422: note = Description of Artificial Sequence: Synthetic coding sequence
  source 1..1422: mol_type = other DNA
atgaccacttgtagccgccagttcaccagtagcagcagcatgaaagggagctgtggaattggtggcggtatagggggtggatcaagcaggattagttccgtcctggccggaggtagttgccgtgctcctagcacttacgggggcggcctatcagtatcaagccggttctcttctggaggagcctgcggcttaggtggtggctatggcggcgggttctcgtcatcgagttccttcggtagtggatttggtgggggctatggaggcggccttggggcaggcttcggaggaggtcttggtgccggtttcggtggcgggtttgccggcggagatggccttcttgtggggtctgaaaaggtgactatgcagaacctgaacgatcggcttgcctcatatctcgacaaagtccgcgctctcgaagaggccaacgcggacctggaggtcaagatacgggactggtatcagcgacagaggccttctgagattaaagattattctccgtactttaaaactattgaagacctgcgcaataagattatcgctgctaccatcgagaatgcccagccaatcctgcagatcgataacgcgaggttagccgctgatgatttccgcactaagtatgaacacgaactggcccttcggcagactgtggaagcagacgtgaacggcctgaggcgcgtccttgacgagctcacactcgccaggacagacctcgagatgcagatcgagggcctgaaggaggaacttgcttacctacgtaagaatcacgaggaggagatgcttgctctgcggggccaaaccggaggcgatgtcaacgtggagatggacgcggctccgggagtggatctatcccgcatcctcaacgagatgcgcgaccagtatgaacagatggctgaaaaaaatcgaagagacgctgagacttggtttctgtccaaaactgaggagctcaataaggaggtggctagcaatagtgaattagtacaatcttcccgcagcgaggtaaccgaactgcgcagagtgctacagggcctcgagatcgagctccagtcgcagttgagcatgaaggcctccctggagaattccctggaagaaaccaaggggaggtactgcatgcaattgtctcagatccagggactaatcgggtcagtcgaagaacagctcgctcagcttcggtgtgaaatggagcagcaatctcaggagtatcagattctgttggacgtcaagactcgcctggaacaggagatagctacctatcgtagactgctagaaggcgaagacgcccatctctcttcccagcaggcgtcggggcagtcatacagcagcagggaagtcttcacatcttcctcgagtagttcctcccggcagaccagacccatcttgaaggagcagtcttcaagctccttctctcagggccagagctcatag

SEQ ID NO: 121458 - DNA, 1299 bp, synthetic construct
  misc_feature 1..1299: note = Description of Artificial Sequence: Synthetic coding sequence
  source 1..1299: mol_type = other DNA
atgaccacttccatccggcagttcacctcgtcatcctccattaagggctcatctggactgggggggggctcaagccgtacctcttgcaggttatccggcgggctgggtgccggctcgtgtagacttggttcagctggcgggctcggaagtactctgggaggaagctcatattcaagctgctattcctttgggagtggtggcggctatgggtcctcattcgggggcgttgatggactgctcgccgggggagagaaagcgaccatgcagaacctgaacgacagactggcttcttatcttgataaagtcagagccctggaggaagctaacactgaactagaggtgaagattcgtgattggtatcagcggcaagctcctggccccgcccgagactactctcagtactacagaactatcgaggaactgcaaaataaaatccttaccgctaccgtggacaacgccaacatactcctgcagattgacaatgccaggctggctgctgatgattttaggaccaaattcgaaaccgagcaggcactcaggctgtctgtggaagcggatattaatggcctccgccgggtgcttgatgagctcaccctcgcgagagctgaccttgaaatgcaaatcgagaatctgaaggaggagcttgcctaccttaagaagaaccacgaagaagagatgaatgctctgagaggacaggtgggtggggaaattaacgttgagatggacgctgcccctggcgtcgacctgtcgagaattctcaacgaaatgagggatcagtacgaaaagatggctgaaaaaaatagaaaagacgccgaggactggtttttctccaaaacagaagagctgaaccgggaagtggcaacaaactcagaactagtgcagagtgggaaaagcgagatcagcgagttgcgtcgcactatgcaggcactggagatcgaactccagagccagctgtcaatgaaggcttcactggagggcaatttagctgagaccgagaaccgatactgtgtccagctgagtcagatccaaggattgatcgggagcgtagaggagcagttggctcagctgaggtgcgaaatggagcaacaaaaccaggagtacaagatcctcctggatgttaagacccggctggaacaggaaattgctacataccgccggctgctcgagggggaagacgctcatcttacacaatataagaaggaacctgtgactacgcgccaggtgagaactatcgtggaagaagtgcaggacggcaaagtgatctcaagcagagaacaagtgcaccaaacaacgcggtag

SEQ ID NO: 121459 - DNA, 1920 bp, synthetic construct
  misc_feature 1..1920: note = Description of Artificial Sequence: Synthetic coding sequence
  source 1..1920: mol_type = other DNA
atgtcatgtcagatttcttgcaaaagccgcggaaggggaggcggaggcggggggtttagagggttctccagtggttcagctgtagtgagcgggggttcacgcagatcaacttcctccttctcttgcctctctaggcacggtgggggcggcggtggctttgggggaggtgggttcggctcccgttcactagtaggtctggggggtaccaagagcatcagtatttcggtcgcggggggtgggggcggcttcggagctgctgggggctttggagggcgaggtggcgggttcggaggcggatcctcattcggcggaggtagcggctttagtggaggaggcttcggtggggggggcttcggtggcggtcgctttggcgggttcggagggcctgggggggtcgggggtctgggaggtcctggggggtttggaccagggggatatcctggcggcatccacgaagtcagcgttaatcagtctttgttacaacccctgaatgttaaggtggatcctgaaattcagaatgttaaagcacaagagagggagcaaatcaagaccctgaacaataaatttgcttcttttattgataaggttaggttcctggaacagcagaaccaggttctgcaaactaaatgggagctgctgcagcagatgaacgtgggcactcgcccaattaacctggagcccatcttccagggctacatcgacagcctaaagcgctaccttgacgggctgactgcggaaaggacctcgcagaatagtgagttgaataacatgcaggatctggtggaagactataaaaaaaaatacgaggacgagatcaacaagaggacagcagctgagaatgattttgtcacgctgaagaaggacgtggacaatgcttatatgatcaaggtggagctgcagagtaaggtggacttgctaaatcaggagattgagttcctgaaagtcttgtatgatgcagagatcagtcagattcatcagtcagtgacagacaccaatgtcattctgagtatggataacagtcgcaacttggacttagactcaatcattgctgaggtgaaggcccagtatgaagaaatagcacagcgctcaaaggaagaagcagaagcgctatatcactcgaagtatgaggagctgcaggtaacagtgggaagacacggggactctctgaaagaaattaagatcgagatctccgagctcaatcgggtgatccaacgattgcaaggcgagattgctcacgtaaagaagcagtgtaagaatgtgcaggacgccatcgccgacgccgaacagcgaggcgaacatgctctgaaggacgccaggaacaagctaaacgatctcgaggaggccctccaacaagcaaaagaagaccttgctaggctgttgagggattatcaggaactgatgaatgtcaagctggcactcgatgtggagatcgccacatacagaaaactcctagagggcgaagagtgccggatgtccggtgacctgtcttccaacgtgacagtcagtgttactagcagtacaatctcttcgaacgtcgcatcaaaggccgcattcggcggcagcggaggccggggttctagcagcggtgggggctactcctccggcagcagctcctatggaagcggaggtaggcagtcaggaagtaggggaggctctggaggcggtgggagcatcagtggtgggggttacggatcgggcggcgggagcgggggacgctacggcagcggcggcggttccaagggcggttctatcagcggtggtggttacgggtcagggggcgggaagcactcttcgggaggtgggtctcgcggtggcagctctagtggaggtggctacggatccggaggcggcggaagtagcagtgtgaagggatcttcaggtgaggccttcggtagcagcgtgaccttttcctttcgatag

SEQ ID NO: 121460 - DNA, 1275 bp, synthetic construct
  misc_feature 1..1275: note = Description of Artificial Sequence: Synthetic coding sequence
  source 1..1275: mol_type = other DNA
atggatttctctcggcgttcctttcataggtctctttcttcatctttacaggcccctgtagtatccacagttggaatgcaaagacttggtacaactccatcagtgtacggcggtgccgggggtcgcggtattaggatttccaacagcaggcacaccgtaaactatgggagcgatttaacaggcggtggtgacctgttcgttggaaatgaaaagatggctatgcagaatctgaatgacagactagcatcgtatttggagaaagtcagaaccttggaacagagcaatagcaaactagaggttcagataaagcagtggtacgagacaaacgccccaagggccggtagggattatagcgcgtactaccggcagatagaggagttgagaagccagatcaaagacgctcaactgcaaaacgctcgctgcgttctccagattgacaacgccaaactggcggccgaggattttcgactgaagtatgaaaccgagcgcgggatacgtctaacggtggaggcggatctccaaggccttaacaaagtgtttgacgatcttaccctgcataagaccgaccttgaaatccagattgaggagctgaacaaggacttggcactcctcaagaaggaacatcaggaggaagtcgatggtcttcacaaacacttgggaaacacagtgaacgtggaggttgatgcggctcccggcttgaatcttggcgtgattatgaacgaaatgcggcaaaagtatgaggttatggcccagaagaatttgcaggaggcgaaggaacagtttgagcggcagaccgcagtgctccaacaacaggtgaccgtgaatacagaggaactgaagggaactgaggtccagctaaccgaactgcggagaacttctcagagcctcgagatcgaacttcagtctcacctcagtatgaaggagtctctagagcatacgctggaggagacaaaggcccgctactcatcccaactcgcaaacctccaaagcctgctttcttccctagaagcccagctcatgcagattaggagcaatatggagcgtcagaacaacgagtatcatatattgctggacatcaagactcggttggagcaggaaattgcaacatatcgaagactgctggagggggaggatgtgaagactaccgagtatcaactgtcgaccctagaagaacgtgacattaagaagacgcgtaagataaagacagtagtccaggaagttgtagatgggaaagtcgtcagttccgaggtgaaggaggtcgaagagaacatctag

SEQ ID NO: 121461 - DNA, 1578 bp, synthetic construct
  misc_feature 1..1578: note = Description of Artificial Sequence: Synthetic coding sequence
  source 1..1578: mol_type = other DNA
atgagttgttcgagcagagcctccagctcacgcgcaggaggcagcagctccgctagagtctctgccggcgggtctagtttctcttccgggagccgctgcgggcttggcggatcaagcgcccagggcttccggggaggagcttcctcttgcagtttgagcggcggaagttctggcgccttcggagggtccttcggaggaggtttcgggtcctgctctgttggaggtggcttcggcggtgcatcaggctccggcacggggttcggtggaggtagttcatttgggggggtatctggcttcggacgcggttctggtttctgcggatcctcgaggttttcaagcggcgctaccggtggcttttatagctatggcggcggcatgggcgggggagtgggggacggtggattatttagcggcggtgaaaagcagacaatgcagaatctgaatgaccgactggctaattatctggacaaagtacgggcactcgaggaggccaatactgacttagagaataagatcaaagaatggtatgacaagtatggaccagggtcaggtgacggaggaagcgggcgcgactatagcaagtattacagtatcatagaggacttaagaaaccagatcattgctgccactgtagaaaatgccgggattatattgcacattgacaatgcgagactggcagcagatgactttaggttgaagtatgaaaatgagctctgtttgagacagagtgtggaggcagatatcaatggactgcggaaagtgcttgacgacctgacgatgacaagatccgacctcgaaatgcagattgagtcatttactgaagagttagcatacctcagaaaaaaccatgaggaggaaatgaagaacatgcaaggctccagtggaggcgaggtaacggtcgagatgaatgccgcaccaggcaccgacctgactaaactactgaatgacatgcgggcccaatatgaagaactcgccgaacagaataggcgagaggcagaagagcgctttaataaacagtctgcatcgctgcaggcacagatatcaaccgacgcaggtgccgctacaagcgccaagaacgaaattacagaactaaagcgcacactgcaggccttggagattgaactacagtcccagctggcgatgaagtcaagtctggagggcaccctagcggacacagaggccggctatgttgcccaattaagcgagattcaaacccagattagcgcactggaggaagagatctgccagatttggggggagacaaaatgccagaacgccgaatacaagcagcttctagacataaaaaccagactggaggtggaaatcgagacctacagaaggctcttagatggcgaaggaggaggctcttcatttgccgaatttggagggcggaactcgggctccgtcaacatgggatctcgcgatctggtgtcgggcgacagtcgcagtggatcatgtagcggtcagggacgcgattcttctaaaacacgtgtgactaagaccattgtagaggaactggtggatggtaaagtggtgtcttctcaagtgtctagcatcagtgaggtaaaggtaaaatag

SEQ ID NO: 121462 - DNA, 1890 bp, synthetic construct
  misc_feature 1..1890: note = Description of Artificial Sequence: Synthetic coding sequence
  source 1..1890: mol_type = other DNA
atgagccggcaagcctctaaaacctccggtggggggtcccagggatttagcggcaggtccgccgtggtgagtggcagctcacgaatgagctgcgtggcccactccggcggggctggcggtggtgcttacgggttcagatccggagctggggggtttggctcacgtagtctatataatctgggaggtaacaagtcaatcagcatctctgtcgccgccgggggatcacgagccgggggtttcggtggggggcgatcgtcctgcgccttcgcgggaggatacggcggagggtttgggagcggttacggggggggctttggcggtggattcggtggggggagaggcatgggaggtggttttggaggtgccggggggttcgggggcgccggaggcttcgggggagcgggagggttcggaggccctggagggtttggcgggagtggcggcttcggcggacctggaagcttgggctctccgggtggatttggaccaggcggattcccaggcgggattcaggaagtgactataaatcagtccctgctgcaaccactcaacgtcgagattgaccctcagatcggtcaggtgaaggcacaagaaagggagcagatcaaaactcttaataacaaattcgcaagcttcattgataaggtgcgatttctggaacaacagaataaggtactggagaccaagtggaacctgctgcaacagcaaggaacttcatccatcagcggcacaaataacctggaaccactgttcgaaaaccacatcaactatctgaggtcgtacctcgacaacatactcggggaacgggggcggctggatagcgagttaaaaaacatggaagacctggttgaggatttcaagaagaagtatgaggatgaaattaacaagcgcacggcagctgaaaacgaatttgtgactctaaaaaaggatgtagatagtgcatacatgaataaggtcgaactccaggcaaaggtggatgctttgatcgacgaaatcgatttcttgagaacactttatgatgccgaactgagtcagatgcagagtcacatctcagacaccagtgtcgtgctgtcaatggacaataacaggtctctggatctagacagcatcattgctgaagtaagggcccagtatgaggacatcgcacagcgatcgaaggctgaagcggaagccctgtatcagactaaattaggtgagctgcagacgaccgcgggtaggcatggcgatgatctgcgtaatactaagtctgagattatcgagctgaacagaatgatccagagactgcgcgccgagatcgagggcgtgaagaagcagaacgctaacctgcagacagccatcgccgaagcagagcagcatggggagatggcccttaaggatgccaatgccaaactgcaggagttgcaggccgcgttacaacaggccaaagatgacctggcccgtttgctgcgcgattatcaggaactaatgaatgtgaaactggccctggacgtcgaaatcgctacttacagaaagctgctggagggggaggaatacagccggatgagcggtgagtgtccatcagctgtctctatttctgtagttagttcttctaccacttccgcaagtgctgggggctatggcggcgggtacggcggagggatgggaggcggtctgggagggggattcagtgccgggggtggttccggctccggattcgggcggggaggcggtggaggcattggtggagggttcggcggagggagtagtggattcagcgggggcagcgggtttgggagtataagtggagcacgctacggggtcagtgggggaggattctcctcagcaagcaatcgcggcggctcgattaaattctcgcagtctagccagagcagccagcggtactcaaggtag

SEQ ID NO: 121463 - DNA, 1887 bp, synthetic construct
  misc_feature 1..1887: note = Description of Artificial Sequence: Synthetic coding sequence
  source 1..1887: mol_type = other DNA
atgtccagacaggcgtctaagacatccggcggggggtcccagggcttttcggggcgctccgctgtggtgtccgggtcctctcgaatgtcctgtgtggctcatagtggcggggctgggggcggcgcatacgggttcaggagcggagctggcggatttggtagcaggtctttatataatctggggggcaataaatccattagcatctccgttgcagcaggcggatcaagagctgggggattcggaggcggacgttcgtcctgtgcctttgcaggcggctacggtggaggcttcggttctggctatggcggcggctttggaggcggatttggcggcggacgcggaatggggggtggattcggcggtgccggtggtttcggcggcgcaggtgggttcggtggtgccggcggcttcgggggccctggcggtttcggtggctctggaggctttggcggtcctggctctcttggctcccccggtgggttcggccctgggggattcccaggaggcatccaggaagtcaccatcaaccagtccctattacagccactgaatgttgagattgacccacaaattgggcaggtgaaagcacaggagagggaacagattaaaaccctcaataacaaatttgcaagcttcattgataaagtgagattcctagagcagcagaacaaggtgctggagacgaagtggaacctgttacagcagcagggcacatcttctattagtggtacaaacaacttggaaccgctgttcgagaatcacattaactatttaagatcatacctggataacatactgggtgaaagaggtcgactggactctgaactcaaaaacatggaagacctggtcgaggattttaaaaaaaagtacgaggatgaaataaacaagagaacagctgccgagaacgaattcgtgaccctgaagaaagatgtggactccgcttacatgaacaaagtggagcttcaagccaaggtcgacgcattgattgatgaaattgatttcctacggaccctatacgacgcagagctttctcagatgcaatcccatatcagtgatacttcagttgtcttgagcatggacaataacaggtcactcgacttggacagcatcatcgccgaagtgagagctcagtacgaggacattgctcagaggagcaaggccgaagcggaggccctttaccagaccaagttaggcgagctgcaaacgaccgctggtagacacggggatgatctccgaaacaccaaatcagagatcatagagctgaatagaatgattcagcgtctcagggcagagatagaaggcgtgaagaaacagaacgcaaatttgcagacagcgatagcagaagcagaacagcacggggagatggcactcaaagacgctaatgctaagttgcaagagttacaagctgcgctccagcaggcgaaggacgacttggctaggttactgcgggactatcaggagctgatgaatgtcaagcttgctctcgatgtggagatagccacgtataggaaattgctggaaggcgaggagtatagaatgtcaggcgaatgccccagcgcggtgagcatctctgttgtttcctccagcacaacttccgcaagcgcgggggggtatggcgggggatacggcggcggaatgggagggggattgggtggcgggttctcagccggaggcgggtccggaagtgggtttgggcgagggggtggaggagggattggcggcgggttcggcggtgggtcttctggcttcagtggagggagtggattcgggagtatttcaggcgcgaggtacggagtttccggcggaggtttttcatcggcaagcaaccggggggggtccatcaaattctctcagtccagtcagagttcccaaaggtattcccgctag

SEQ ID NO: 121464 - DNA, 1251 bp, synthetic construct
  misc_feature 1..1251: note = Description of Artificial Sequence: Synthetic coding sequence
  source 1..1251: mol_type = other DNA
atgccttataacttctgtcttccctccctgagttgtcgaactagttgcagcagccggccatgtgtccctccttcatgccattcttgtactctgcctggcgcctgcaatattcccgccaatgtgtccaattgtaattggttctgtgaagggagctttaatggctccgagaaagagacaatgcagttcctgaatgataggctcgcttcttacctcgagaaagtcagacagcttgagcgcgataacgccgaattagaaaacctgattcgagaacgatcacagcagcaagagcctctgctgtgcccatcataccagagttattttaaaaccatcgaagagctccagcagaagatcctctgcaccaagtctgaaaatgcccgcctggttgtacagattgacaatgcgaagctggccgccgacgatttccgcactaagtatcagacagagctaagtctacgacagctggtggaatccgatatcaatgggctaaggagaatcctcgacgaactgacactgtgtaaatccgatctggaagcccaggtggaatccctgaaggaggagctgctttgcctaaagagcaaccatgagcaagaagtcaacaccttgcgatgccaactgggggatagactcaacgtcgaggttgatgctgcgcccactgtggatctgaacagggtcttaaacgaaacccgaagccaatatgaagctctggttgagactaaccgcagggaagtggagcagtggtttactactcagacagaagaactgaacaaacaagtggtatcctcaagcgagcagcttcagtcttaccaggccgaaattatcgaactgagacggaccgtaaacgccctggagatagagttacaggcccaacataatttgcgtgactctctggagaacacactcaccgaaagtgaagccaggtacagctctcaactgtctcaagttcagtcacttatcactaatgtagaatctcagctggctgaaatccgatccgatctggaaagacagaaccaagaatatcaagtgcttctggacgtgcgcgcccgcctagagtgcgaaatcaatacatataggagcctcttagaatcagaggattgcaatctgccgtccaatccttgcgctaccactaacgcgtgctccaagccgataggaccctgtctgagcaatccatgcaccagttgtgttcctccagccccttgtactccatgcgcgccaagacctagatgcgggccatgcaatagcttcgtgaggtag

SEQ ID NO: 121465 - DNA, 1674 bp, synthetic construct
  misc_feature 1..1674: note = Description of Artificial Sequence: Synthetic coding sequence
  source 1..1674: mol_type = other DNA
atggtgagcaagctgactagtttgcagcaggaattgctgtctgctctgctctctagtggggtgaccaaggaagttcttgtgcaagctttggaggaattgttgccaagccctaatttcggggtcaagctggagacactgccgctctcaccaggctccggcgctgagccagatactaagcccgtgttccacaccctgacgaacggtcatgccaaggggcggctctcgggagatgaagggtcggaggacggcgatgattatgatacaccaccgatcctgaaggagctgcaggcactgaatacagaggaagccgctgaacagagggccgaggtagacaggatgcttagtgaggacccctggagagccgcgaaaatgatcaagggctatatgcagcagcacaacatacctcagcgcgaggtcgtggacgttactggactcaaccaatcccacctgtctcagcatttgaacaagggcactcccatgaagacccagaagcgcgcggctttatatacgtggtatgtgcggaaacagcgcgagattctgcggcaattcaatcagaccgttcagtcttcaggcaacatgacggataagtcttctcaagaccaactcctcttcctgtttccagagttctctcagcaatcccacggtcctgggcagagcgacgacgcgtgcagtgagcctaccaacaagaagatgcgtaggaatcgcttcaagtggggacccgcttcacaacagatcctttatcaggcctacgatcgccagaaaaaccccagtaaagaagagagagaggctctcgtggaagaatgcaaccgggccgagtgtcttcagaggggtgttagcccatccaaagcgcacggactgggctcaaacctggttactgaggtcagggtttataactggtttgcaaatcgtagaaaggaggaggctttccgtcagaaactcgcaatggacgcatattccagcaaccagacccactcattgaaccctctcctgtcccatgggagtccgcaccaccagccgtcttcctcccccccgaacaagttgagcggcgttagatattcccaacaggggaataatgaaatcaccagctctagtaccatcagccaccacggaaactcggcaatggtgaccagtcagagcgtgctacaacaggtgtcacctgctagtttagacccaggccacaaccttctgagccccgatggaaaaatgatcagtgtgagcggagggggattgcctccagtgagcacactgacgaacattcactcgttgagtcatcacaatcctcagcaatcccaaaacctcattatgactcccttaagcggggtaatggcgatcgcccaaagcctaaacacgtctcaggcccagtctgtgcctgtcatcaactccgttgcgggcagcctcgccgccctccagccggtgcaattcagtcagcaactgcacagcccccatcagcagccattaatgcagcagtcaccaggatcacacatggctcagcagccattcatggccgccgtgactcaacttcagaatagtcacatgtacgcccacaagcaggaacctccccagtacagtcacacgagcaggttccctagcgcgatggtggtgacagacacaagcagtatctccactcttacaaatatgtcctcaagtaagcagtgccccctgcaggcatggtag

SEQ ID NO: 121466 - DNA, 1215 bp, synthetic construct
  misc_feature 1..1215: note = Description of Artificial Sequence: Synthetic coding sequence
  source 1..1215: mol_type = other DNA
atgtcatacagttgtgggcttccatcactctcctgtcgaacaagttgcagctccagaccctgcgtccccccctcctgtcatggctgcaccctgcccggtgcatgtaatatccctgccaatgtgtccaactgtaattggttttgtgaggggtcttttaatggatctgaaaaggagacaatgcaatttttgaacgacagactagcttcctaccttgaaaaggtccgacagctggagagagacaacgccgaactggagaacttaattagagagagatcccagcagcaggagcctctagtgtgtgcctcctaccagagctactttaagaccattgaagagctccagcagaagatcttgtgctcaaagagtgaaaatgctagattggtggtgcagatcgataacgcaaagttggcttcggatgactttaggacaaaatacgagactgaactaagtctgagacaattggtcgagtcagatatcaatggactgaggaggattctggacgaactgacactctgccgttccgacctggaggcacaagtggagagcctgaaggaagaattgctctgtttgaagcagaaccatgagcaggaagttaatacgctgcgctgtcaattaggcgataggctgaacgtggaggtcgacgccgctccgactgtggatttgaatcaagttctgaatgagacacgctctcagtacgaggcactggttgagacgaacagaagagaggtggaacaatggttcgctactcagaccgaggagttgaacaaacaggttgtgagcagctcagaacagctgcagtcctaccaggcagaaattatcgagctgcggagaaccgtgaatgcattggagatcgaactccaggctcaacacaacctgagagatagtctcgagaatactctgacagaaagtgaggcacgctattcatctcagctgtcacaggtacaacggctaattaccaatgtggaaagccagctggcagaaatacgatctgatttggaacgacagaatcaagaataccaggtcctgctcgatgtgcgtgctcgcctggaatgtgaaattaacacgtatcgaagcttgctagagtctgaggactgcaagttgccttccaacccgtgcgccaccacaaacgcctgtgacaaatcaactggaccgtgcatctcgaatccatgcggattgcgtgctaggtgcggaccctgcaatacctttggatactag

SEQ ID NO: 121467 - DNA, 1215 bp, synthetic construct
  misc_feature 1..1215: note = Description of Artificial Sequence: Synthetic coding sequence
  source 1..1215: mol_type = other DNA
atgccatacaatttctgtctgcccagtctaagctgtcggacttcatgttccagccggccgtgtgtgccgccgagctgtcatggatataccctccctggcgcttgtaacatcccagctaacgtatcgaactgcaattggttctgtgaagggagcttcaacggtagcgagaaggagacaatgcaattcttgaatgacaggctggcctcctacctcgagaaagttcgccagctagagcgcgataatgcagaattggagaacctaatcagggaacggtcccagcagcaggaacctctgttgtgtccatcatatcagtcttatttcaagacaatcgaagagctgcagcagaagatcttgtgctccaagtcagaaaacgcgagactagtagtgcagatcgacaatgctaaactcgccgccgatgactttaggacaaagtatcagacagagcagagtttgagacaactcgtggagagtgatattaatagccttaggcgcattctggatgagctcacgttgtgcaggagtgatcttgaggcacagatggagtctctgaaggaggaactcttgtccctcaaacagaaccacgaacaagaggtgaatacgcttagatgtcagcttggggatcgattgaacgtcgaggtggacgctgctccagccgtcgatcttaaccaggtgcttaacgaaacaaggaaccaatacgaagccctggtcgagacaaacaggagagaggtggagcagtggtttgcaactcagactgaagagcttaacaaacaggtggtgtcgagttctgagcagcttcaatcttaccaggccgagataatcgagctcagacggacagtgaacgcactcgagatcgaattgcaggcgcagcacaatctgaggtactccttagaaaacaccctgacagaatccgaagctcgctactcatctcagctgagtcaggtgcagagtctcataaccaacgtggaatctcagcttgccgagattcggtcagatctggagcgacagaatcaggaatatcaggttctcctcgacgttcgggcccgcttggagtgtgagattaatacttaccggagtctgttggagtccgaggattgtaagcttccatctaatccctgcgcaacgactaatgcctgcgaaaagccaattggatcctgtgtgaccaatccctgcgggccccgctctcggtgcggcccctgcaacacatttggatactag

SEQ ID NO: 121468 - DNA, 1311 bp, synthetic construct
  misc_feature 1..1311: note = Description of Artificial Sequence: Synthetic coding sequence
  source 1..1311: mol_type = other DNA
atgttgtatgccaagcctcccccaacaattaatggcattaaaggtctgcagcgaaaagagcgccttaaacctgcccatatccacctgcaacagctgacttgcttttctataacttgcagctctaccatgagctattcttgctgcctgccctctctggggtgcagaacaagttgcagtagtcgtccgtgcgtgccgccctcatgccacgggtacactcttccaggagcatgtaatatcccagcaaatgtcagtaactgcaactggttttgcgaagggtctttcaatggttcagaaaaggaaacaatgcagtttttgaacgatcgtctggcttcctacctggagaaggtgcgacagctggaaagagataatgcggagcttgaaaagctgatccaagagagatcccagcaacaggagccgctgctgtgtccctcttaccagtcctacttcaaaaccatcgaggagctgcaacagaaaattctctgtgctaaggccgagaatgcgcgactggtcgtcaatatcgacaacgctaagttagcctcagacgattttcgttccaaatatcagaccgagcagtcactcagactgctggtcgaatccgatatcaactctattcggcgaatactggatgagttgacactctgtaagtccgatctagagtcacaggtggaatcactccgggaggagctgatctgtctaaagaagaatcacgaagaggaagtcaataccctcaggtcgcagcttggagatagacttaatgtagaagtggacacagcgccaactgtggacctgaatcaagtgctcaacgagacacgcagtcaatacgaggcactggttgaaatcaaccgaagagaggtggaacaatggttcgccacacaaactgaggagctcaacaagcaagtggtttcaagctccgaacagcttcagtcctgtcaggccgagatcatcgagctgcgaaggacggtcaacgcacttgaaatcgagctacaagcccaacacaaccttagggacagtcttgagaataccctcactgagtccgaggcccactacagtagccagttgagtcaggtgcagagcctgattacgaatgtggagtcgcagttggctgagatccgctgcgatctagaacgccagaaccaggagtaccaggttttgcttgatgtacgcgcccgcctggagtgcgaaattaatacatacagatcactgttggaaagcgaagactgcaaattaccatgcaacccttgcgcgactactaatgccagcggaaactcgtgcggaccatgcgggacgagccaaaaggggtgctgcaactag

SEQ ID NO: 121469 - DNA, 1185 bp, synthetic construct
  misc_feature 1..1185: note = Description of Artificial Sequence: Synthetic coding sequence
  source 1..1185: mol_type = other DNA
atgtcctattcttgttgcctgcccagccttggctgccgaaccagctgctcctcccggccttgcgtccctccgtcctgccacggatacactctgccaggcgcttgcaacatccccgctaacgttagcaactgtaattggttttgcgagggctcttttaacggcagcgaaaaagagacaatgcaattcctgaacgacaggttagctagctatctggaaaaagtcaggcagttagagagggacaacgccgagctggagaagctcattcaggaaagatcacaacagcaggaacctctgctgtgtccttcgtaccaatcttacttcaaaacaatcgaggaactgcagcagaagatactctgcgcaaaagcggagaacgcaaggctcgtggtgaacatcgacaatgctaagctagcatctgacgacttcaggtcgaaatatcagaccgagcaaagtctacggctgcttgtggaatccgacattaacagtattcggcgtatccttgacgagctgaccctgtgtaagagtgacttggaaagccaggttgagagtctgcgcgaagagctcatctgcctgaagaagaaccatgaggaagaggtaaatacactacggtcgcagctgggagaccggctcaatgtcgaagtggatactgcacctactgtggacctgaatcaggtacttaacgagacacgatctcaatacgaagcgttggtcgagattaaccgacgggaggtggagcaatggtttgctacccagaccgaagagcttaacaaacaggttgtttcttcaagtgaacagctgcagtcctgccaggccgagattattgagttgcggagaaccgtgaacgcactggagatcgagctgcaggcccagcataatctaagagattctctagagaatactctgactgagtcggaggcccattactctagtcagcttagccaggtgcagtcattgatcacaaatgtcgagagtcagctggctgagattcggtgcgacctcgaacgacagaaccaggaataccaggtgctacttgatgtgagggctagattagaatgcgagatcaatacgtaccgcagtttattagaaagtgaggattgcaaactgccctgcaatccttgcgcgacgacaaacgctagtggcaactcctgtgggccttgtgggacatctcagaaaggatgctgcaactag

SEQ ID NO: 121470 - DNA, 1278 bp, synthetic construct
  misc_feature 1..1278: note = Description of Artificial Sequence: Synthetic coding sequence
  source 1..1278: mol_type = other DNA
atgtacagctcatctagttgtaaattaccatctctctctcctgtggcgagatctttcagcgcttgttcagtgggactggggaggtcatcttaccgagccacctcatgcctacccgcgctatgtctgcccgcgggcggttttgctacctcttatagcggggggggcggatggttcggcgagggcatcctaacaggaaacgagaaagagacaatgcaaagccttaatgaccggttagcagggtacctggaaaaagttcgacaactggagcaggagaacgcttcactcgaaagtaggataagagagtggtgcgaacaacaggtgccatatatgtgtcccgactatcagtcttacttcagaacaatagaggagctgcaaaagaagaccctgtgctccaaggcggaaaatgcgaggctcgtcgtggagatagacaatgcaaaactggccgctgatgattttagaacaaaatatgagacagaagtgtcacttagacagttagtggaaagcgacattaatggactgaggcggattttggatgatctgaccctatgtaaaagcgacttggaggcccaagtggagtcgctgaaggaggagctgctttgtttgaagaagaaccacgaagaggaggttaactctctacgctgccagctgggagaccgcctcaatgtggaggtggatgccgctccaccagtggatttgaatcgcgttttggaggaaatgagatgtcagtatgaaactctggtggagaacaaccgacgcgatgctgaggactggcttgacactcagagcgaggaactaaatcaacaggtggtgtctagctcagaacagttgcagagttgccaggccgagatcatcgagctgagacgaacagtgaacgcccttgagattgagctccaggctcaacactctatgcgggacgcccttgagtccactctagccgaaaccgaagccaggtattcaagccagctggcccagatgcaatgtatgatcaccaatgttgaggctcagctggccgaaatccgagctgatctcgagcgacagaaccaggagtatcaggtgctgctggatgtcagggcccgtctcgagtgcgaaatcaatacatatcgaggactactagaaagtgaggactcaaagttaccctgtaatccttgcgcccccgactattccccgtctaaatcatgtttgccttgcctaccagcggcgagttgcgggccgtccgcggccaggacaaactgttcgccccgacccatttgcgttccctgccccgggggccgcttttag

SEQ ID NO: 121471 - DNA, 1368 bp, synthetic construct
  misc_feature 1..1368: note = Description of Artificial Sequence: Synthetic coding sequence
  source 1..1368: mol_type = other DNA
atggcttcaaagtgcttgaaagctggattctcaagcgggagcctgaaatctccaggtggcgccagcggcggctcaacccgcgtttctgcaatgtacagtagttctagctgtaagctaccaagcttgtccccagttgctagaagtttttctgcttgcagtgtaggtctgggacggtcttcatatagggcaacctcttgccttcccgctttgtgtctccccgcaggtggatttgctaccagctacagcgggggtggaggttggtttggtgagggcatcctgacgggaaacgaaaaggagacaatgcagagcttgaacgaccgactggctggatacctcgaaaaagtgcggcagctggagcaggagaacgcttctttagagtcaaggatacgtgagtggtgcgagcaacaagtcccgtatatgtgccccgactaccagagttacttccgtactattgaggaactgcagaaaaagacactctgctctaaagctgagaacgcacgcctggtcgtcgaaatcgacaacgctaaattggcagccgacgatttccgcaccaaatatgagactgaggtctctctaaggcagttagtcgagtctgacataaacggacttcgtcggatcctggatgacctgactctgtgcaaatccgatctcgaggcacaggtggagtcgctcaaagaggagctgttgtgtttgaagaagaatcacgaagaggaggtgaattcattgagatgccagttaggcgatcgcttgaacgtcgaagtggacgcggcgcctccagtagatttgaacagggtgttggaggagatgcggtgccagtatgaaaccctcgtggagaacaatcgaagggatgccgaagactggctcgatacccaaagcgaggaactgaaccaacaggttgtctcttcctcagagcagcttcagtcttgtcaggcggagattatcgaactgcgccggaccgtcaatgccttagagattgagctgcaggctcagcattcgatgagggacgcccttgagtctacactggccgaaacagaggcacgttattcctcacagctggcccagatgcagtgcatgattaccaacgttgaggcacagttagctgaaatcagagcagacctcgagcgacagaaccaggagtatcaggtgctgctggacgtccgtgctagattggagtgtgagataaatacatacagaggcctacttgaaagtgaggatagtaagctgccgtgcaatccgtgtgcacctgactacagtccaagtaaaagttgcctcccatgtctgccagccgccagctgtggcccgagtgcagctcgcaccaactgcagccctcgtcctatctgtgttccttgtccaggagggcgtttctag

SEQ ID NO: 121472 - DNA, 1404 bp, synthetic construct
  misc_feature 1..1404: note = Description of Artificial Sequence: Synthetic coding sequence
  source 1..1404: mol_type = other DNA
atggccacacaaacctgtaccccgacattctcaacagggagcatcaagggcctctgtggcacggccggagggattagtcgcgttagctctataagaagcgtgggaagttgtagagtgccctccctggccggcgccgccgggtatattagctcagcccgcagtggcctgagcggactgggcagctgtctacccggaagttacctctcaagtgagtgccatactagtggttttgtcggatccggaggttggttctgtgaaggttcattcaatggatctgaaaaagaaaccatgcagttcttgaacgacagactggccaactacttggaaaaggtccgacagttggaaagagaaaatgccgagcttgagagcaggatccaggagtggtatgagttccaaatcccctatatatgtccggactatcagtcttacttcaagaccatcgaggattttcagcagaaaatcctgttgaccaagagcgaaaatgcacgcctcgtgctgcagatagacaatgcaaagctggccgcggacgatttccgaaccaaatatgagactgagctttctttgcggcaactggtggaggcagacatcaatggactgagaagaattctggacgaactcacactgtgcaaggcggatctggaagcccaagtagaatccctgaaagaggagttgatgtgtttgaagaaaaaccatgaggaggaggtgtccgtgctccgatgccagctgggtgaccggctgaatgtggaagtggacgctgctcctccagtcgatctcaataagatcctcgaggacatgcggtgccagtatgaagcattggtggaaaacaacaggcgcgatgtagaagcatggttcaatactcaaaccgaggaactgaatcaacaggtggtttcctcaagtgaacagctgcagtgttgccagaccgagattattgaactgaggagaacagttaatgctcttgaaattgaactacaggcgcagcatagtatgcggaacagtctcgaaagtacactggccgaaaccgaagcacgctatagctctcagcttgcacagatgcagtgtctcattagtaacgtggaggcacagttatcagaaattaggtgtgacttggaacgtcaaaaccaggaataccaggttctgcttgacgtgaaggccaggctcgagggcgagatcgccacttaccgacatctcctggagggcgaggactgcaaactgccccctcagccgtgtgccaccgcttgtaaacccgttatcagagtgcccagcgtacctcctgtcccctgtgtccctagcgtgccctgcacaccagcccctcaagtgggtacacagatcagaaccataactgaagaaattagggacgggaaagtcattagctccagggagcatgttcaatctcgccctctgtag

SEQ ID NO: 121473 - DNA, 1254 bp, synthetic construct
  misc_feature 1..1254: note = Description of Artificial Sequence: Synthetic coding sequence
  source 1..1254: mol_type = other DNA
atgttgagatcaggtctgtccggccttggatcttgtctgcctggctcctacttgagcagcgagtgccatacgtccggctttgtcgggagtgggggttggttttgcgaaggcagctttaacgggtctgaaaaggaaactatgcagtttctgaacgatcgcttggctaactatttagagaaggtgaggcagttagagcgcgaaaacgccgagttagaaagcaggatccaagagtggtacgagtttcagataccgtatatttgtcctgattaccagtcctacttcaaaactatagaggactttcagcaaaaaattctcctcaccaagtcggagaatgcacgtctggttctccagattgataatgctaagctggccgctgacgacttcagaaccaagtacgagaccgagctgagtctccggcagttagtcgaagccgatattaacgggctgcgaagaattcttgacgaactcactctctgtaaggccgacctggaagcacaggtggagtccctcaaagaggagctgatgtgcctgaagaagaatcacgaggaggaggtgagcgtgctgaggtgtcagttgggcgacagactcaacgttgaggtcgacgccgcacctcccgttgacctgaataagatactggaggacatgcggtgccaatacgaggctcttgtggaaaataaccgacgcgatgtcgaagcgtggttcaacacgcagactgaagagctaaaccagcaggtagtttcttcatccgaacagttacagtgttgtcagaccgagattatcgaactacgtaggaccgttaatgcccttgaaattgaacttcaggcgcaacattccatgcggaactcactggagagcaccctggcggagaccgaagctagatatagctctcagctggcacaaatgcagtgtcttatttcaaatgtggaggctcagctttcagagatacgatgtgacctggaacggcagaaccaggagtatcaggtgctgcttgacgtgaaagcccggctcgaaggagaaatagccacgtatcgacaccttcttgagggcgaggattgtaaactcccgcctcagccctgtgcaacggcttgtaagcctgtaattagagttccatcagttcctccagtgccgtgtgttccgtctgtgccatgtaccccagccccccaggtgggtactcagattagaacaatcaccgaagagatccgagatgggaaggtgatttccagccgcgagcatgtacagtcgaggcctctgtag

SEQ ID NO: 121474 - DNA, 1200 bp, synthetic construct
  misc_feature 1..1200: note = Description of Artificial Sequence: Synthetic coding sequence
  source 1..1200: mol_type = other DNA
atggctaggcggtttcaggaggaactggcggcctttctttttgagtatgacacgccacgaatggtcctggtccggaacaaaaaggtcggggtgatattcaggctgatccaactggtggtgctggtctatgtgattgggtgggttttcctctatgagaaagggtatcagacttctagtggacttatctcttctgttagtgttaaacttaaaggcctggccgtgacccagttgccagggcttggacctcaggtgtgggatgtagctgattacgtttttcctgcgcagggcgataactcttttgtggtgatgactaacttcatcgtcaccccaaagcagacacagggctactgcgccgaacacccagaagggggcatttgcaaagaggactccggctgcactcccgggaaggctaagaggaaggcccagggtataaggacaggaaagtgtgtggcctttaacgataccgtcaagacgtgcgaaattttcgggtggtgtccagtagaagtggacgacgatattccccgccccgctctcctgcgggaggccgaaaactttactctttttattaaaaactcaatcagttttcctaggtttaaagtgaatagacgcaacctggtggaagaggtcaacgctgctcacatgaagacctgtctgtttcacaaaaccttgcaccccttgtgcccggtgtttcagcttggttacgtcgtgcaggagtccggtcagaatttcagtacactagcggagaagggcggcgtggtcggtatcactatcgattggcactgcgatttggattggcacgtaagacattgccgtccaatctatgaatttcacggcctgtacgaggagaagaacctgtccccgggcttcaatttcaggttcgcccggcacttcgtagagaacggaaccaactaccgccacctcttcaaggtcttcgggatccgattcgacatcttggtggacggcaaggctggcaaatttgacattattccgaccatgactaccattggatccggaatcggtatatttggggtcgcaacagtgctctgtgacctcctgcttctgcatatactgcctaaaaggcactattacaagcaaaaaaaattcaagtatgccgaggacatgggacctggcgctgcagagagagatctggcagccacctcttctacactgggcttacaggagaacatgcgcacatcctag

SEQ ID NO: 121475 - DNA, 1371 bp, synthetic construct
  misc_feature 1..1371: note = Description of Artificial Sequence: Synthetic coding sequence
  source 1..1371: mol_type = other DNA
atgacaagtagttactctagctccagctgtcccttgggctgtaccatggcccctggggcacgaaacgtgagtgtctctccaatcgatattgggtgtcagcccggcgccgaagcaaatatcgctccaatgtgcctgctggccaacgtcgctcatgcaaatagagtgagagtggggtcaacgccacttggacgacccagtctgtgcttacctcccacttgccacaccgcctgtcctctccccggcacatgtcatatccctggaaacatcggcatctgcggagcatatggggagaacactctgaacgggcatgagaaagaaaccatgcagtttctgaatgatcgccttgctaactatctcgagaaagtcagacaactcgagcaggagaatgcagagcttgaggcaaccctgcttgagagatctaagtgtcacgaatcaactgtctgtcctgactatcagtcttactttcatacaatcgaagagcttcagcagaaaatactttgctccaaagccgaaaatgcccgactgatcgtgcagatcgataatgccaaacttgccgccgacgacttccggatcaaattagaatctgaaaggagcctgcgccagctggtcgaggctgacaaatgtggaactcagaaactcctcgatgacgcaaccctagccaaggcagaccttgaagcacagcaggagtcactcaaagaggagcagcttagtttaaaatcgaaccacgaacaggaagttaaaattcttaggagccagctgggcgaaaagctgcgcatagagttagatattgagcccaccatcgatcttaatcgcgtcttgggagaaatgcgagcccagtacgaagctatgttagaaacaaaccgccaggacgttgagcagtggttccaggcacagagcgagggcatctctctccaggatatgagctgtagcgaggagctccaatgctgccagtcggagatcttggagttgcgatgcacggtcaatgcgctcgaggttgaacgccaggcccaacacaccttgaaggattgtttgcaaaatagtttgtgcgaggcagaggatcgctttggaacagaactggcccagatgcagtctctgatctcaaacgtggaagaacaactgtcagagattcgggcggacttggagcgacagaatcaggagtatcaggtgctccttgatgttaaaactcgcctcgaaaatgagattgccacttaccgcaacttgctggagtcagaggattgcaaactgccatgtaacccttgctctacaagtccttcttgtgtgaccgcaccctgcgccccaagaccaagttgtggcccttgcactacatgtggccctacctgtggcgcaagtaccacaggctcccgcttttag

SEQ ID NO: 121476 - DNA, 1785 bp, synthetic construct
  misc_feature 1..1785: note = Description of Artificial Sequence: Synthetic coding sequence
  source 1..1785: mol_type = other DNA
atgacgtcagtgggagtgttttccgatatgcttaacggttgtggaaaagatgggctcgtgccacgggctaagcctcgagatgtaagcgatttcagtttgtacgcacctgccactaaaccatgctgtagcagaacctacaagcggcggcgactgcgggccccggcactgacaggactcggtcccgttacatctctgattgcaccctcgagtctgtctgccgccatgattgcccggcaacagtgtgtacgcggaggaccacgaggattcagttgcggctctgccatcgttggaggaggtaaaagaggcgcctttagctccgtctcgatgtcgggcggcgccggccgttgttccagcggcgggttcggctctcgctctctgtacaaccttcgggggaataaatccatatctatgtccgttgctgggagccgacagggcgcgtgctttgggggggctggcggcttcgggaccggcggattcggaggcggattcgggggcagttttagcggaaaaggtggccctggcttccccgtctgtccagccggcggaattcaggaggtgaccattaaccagtctttactgacgccacttcacgtggaaattgaccctgaaatccagaaggttcgcactgaagagagagagcagattaagctgcttaataataagttcgcgagctttatcgacaaagttcagtttcttgaacaacagaataaagttctggagactaagtggaatttgctccagcaacagaccactacaaccagttccaaaaacctcgagccactgttcgagacgtatctgtcggtactgagaaagcagctggatactctggggaatgacaagggtcggttgcagtcagaattgaaaacaatgcaagacagcgtggaagactttaaaactaaatatgaagaagaaattaacaaaaggaccgctgccgagaacgacttcgtggtgctgaagaaggatgtggatgctgcctacctgaacaaagttgaactggaagccaaagtggattctctaaacgatgagataaatttcctgaaggttttgtacgacgctgagctgtcacagatgcagacacacgtgagtgacacaagtgtcgttttatccatggataataaccgcaatcttgatcttgacagtatcattgcggaagtgcgcgcccaatatgaggaaatagcccagcggagtaaggctgaggccgaagcactctaccaaacaaaggtgcagcagctgcagatcagtgtggatcagcatggagacaacctcaagaatactaagtctgagattgcagagctaaacaggatgatacaaaggcttcgggccgagatagagaatatcaaaaagcaatgtcagaccctgcaggtgtctgtcgctgacgctgagcaaagaggagagaacgcgctgaaggatgcccatagcaaaagggtggagctcgaagccgcccttcagcaagcaaaagaggagttggctcgcatgttacgtgaataccaggaactgatgagtgttaagctcgctctcgacatcgaaatcgccacctaccggaagctgcttgagggagaagagtatcgaatgtccggcgagtgccagagtgctgtgtctatcagcgtggtctccggctcaaccagtacaggggggatctcaggcggacttggctccggctccggatttggcctcagctctgggttcgggtcgggctcgggctctggcttcggtttcggcggctctgtgtcggggagcagttccagcaagatcatttccacaacaacactaaacaaacgtcgttag

SEQ ID NO: 121477 - DNA, 1503 bp, synthetic construct
  misc_feature 1..1503: note = Description of Artificial Sequence: Synthetic coding sequence
  source 1..1503: mol_type = other DNA
atgatagcccggcagcaatgtgttcggggcggcccgaggggcttctcgtgtggcagcgcaatagtcggaggtggtaaacgcggtgccttcagcagtgtgtctatgagtgggggcgccgggcgctgttcctccggcggtttcggttcaaaaggagcctgctttggaggagccggagggttcggcactggcgggttcggcggaggctttggggggagcttttcaggtaaaggggggcccggattccctgtatgccccgctggcggtatacaggaagtcaccatcaaccagtcacttttgacccccttacacgtggagattgatcccgagatccagaaagtccggacagaggagcgcgagcagatcaaactgctgaacaacaaattcgcctcatttattgacaaggtacagttccttgagcagcaaaataaagtcctggagactaaatggaatctcctgcaacagcaaacaaccaccactagttctaagaatttagagcctctgttcgagacctatttgagtgttctaaggaaacagttggacactctgggtaacgataagggcagactgcagtctgagctgaagaccatgcaggacagcgtggaggatttcaagaccaaatacgaggaggagatcaacaagcggaccgccgccgagaatgactttgtcgtgcttaagaaggacgtcgacgccgcttatctgaacaaggttgagctggaggcgaaggtcgactcactcaatgatgagattaattttcttaaggtactttacgatgccgaactgagtcagatgcaaacccacgtgtctgacaccagtgtggtactttctatggacaacaatcgcaacctggacctggattcaatcattgctgaggtaagggctcagtatgaggaaattgcgcagcgatctaaggctgaggccgaggccctgtaccaaacgaaggtccaacaactgcagatctccgttgatcagcacggcgacaacctcaagaatacaaaaagcgagatcgccgaactgaaccgcatgatacagcggctacgggcggaaatagaaaacataaagaagcagtgtcagacccttcaggtgagcgtggccgacgcggagcagcgtggagagaatgcacttaaagacgcccattccaagagggtcgaactggaggccgcacttcagcaggccaaggaggaacttgcccgcatgctacgtgagtaccaggagcttatgtctgtaaaattagccttggatatcgaaatcgctacctacagaaaactcctggagggagaagagtacagaatgagcggagagtgccagtccgccgtaagcatctctgtcgtcagtgggagtacctctactggtggcatcagcggaggactgggctcaggtagtggctttggcctgtctagtggcttcggctcaggatccgggtcaggcttcgggttcggaggctcagtgtccggcagctccagttcgaaaatcataagcacaactacactaaacaagcgacgctag

SEQ ID NO: 121478 - DNA, 1563 bp, synthetic construct
  misc_feature 1..1563: note = Description of Artificial Sequence: Synthetic coding sequence
  source 1..1563: mol_type = other DNA
atgatcgcccgccagcagtgcgtacgcggtggcccccgaggcttttcttgtggatctgccatcgttggcggcggcaaaaggggcgcttttagttccgtcagtatgtccggaggcgccgggaggtgctccagcggaggattcggctcacgctccttatacaatctcagaggcaacaagtctatatccatgtccgtggctggttctcgccaaggagcgtgctttggcggagctggtggattcggcaccggaggttttgggggtggcttcgggggttcattttcaggcaaggggggtccaggttttcccgtttgtcctgccggcggcatccaggaagtgactattaatcagagcctgctgaccccactccacgtggaaattgatcccgagattcaaaaagtgcgcacggaagagcgagaacagattaaattactgaataacaagttcgccagttttatcgacaaagtccagtttctagagcagcagaataaggtgctcgagactaaatggaatctactccagcagcagacaacaaccacctcctctaaaaacctggagccactatttgaaacctacctgagtgtgctcagaaagcagctggacacactggggaatgacaaagggagactacagtccgagctgaagactatgcaggacagtgtggaagattttaaaacaaaatatgaagaggaaattaacaaaagaactgccgccgagaatgacttcgtcgttttgaaaaaggacgttgatgctgcatatctaaacaaagtggagctggaggccaaggtggattccctgaatgatgagatcaacttcctgaaggtgctgtatgatgctgaactttctcagatgcagacccatgtgagcgacacaagcgtggtcctttctatggataacaaccggaatttggatctggacagtattattgccgaggtgagggcacagtacgaagaaattgcccagcgctccaaggcagaagctgaggctctgtaccaaaccaaggtacagcagttgcagattagcgtggaccagcacggggataacttgaaaaacacaaaaagtgagatcgcagagctgaacaggatgatacaacgcttgcgcgccgagattgagaacattaagaagcagtgtcagacactgcaggtctccgtggcagatgccgagcagcgcggtgaaaatgccctgaaggatgctcattccaagcgtgtcgaacttgaagccgccctgcaacaggctaaggaggagttggccaggatgctgagggagtatcaagaactgatgtcagtcaaactggctctagatattgaaatagctacctatagaaaactcctggagggagaggagtaccggatgtctggcgagtgtcagagcgccgtgagtattagcgtcgtcagcgggtccacctctacaggcggcatttccggaggcctggggagcggatctggcttcggactgagtagcgggttcgggagtggaagcggatccggcttcggctttggagggtctgtttcagggtcttctagttcaaagatcattagcactacaacccttaataagaggagatag

SEQ ID NO: 121479 - DNA, 1695 bp, synthetic construct
  misc_feature 1..1695: note = Description of Artificial Sequence: Synthetic coding sequence
  source 1..1695: mol_type = other DNA
atggcaagcacgagcacaactatacggtctcattcctcatcccgaaggggcttttcagcaaactccgctcggttacccggggtcagtaggtctggctttagttcagtgtccgttagtcgctcacgcggctccggtggcctcgggggggcttgcggtggcgcaggattcggctcccggagcctctatgggctgggcgggtctaaacgaatctctatcggaggagggtcttgcgctatttccggaggctacggctctcgcgccggcggaagctacggttttgggggggcaggttctggatttggattcggaggcggtgccggaattggcttcggcctggggggaggggcaggacttgccggggggtttggcggcccaggctttcctgtgtgccctcctgggggtatccaagaagtgacagttaaccagtccctgctgaccccgctcaatctgcagattgacccaacgatacaacgtgtacgggcagaagagagagagcaaatcaagactctcaataacaaatttgctagcttcattgacaaggtgcggtttctcgagcaacaaaacaaggtcctggaaacaaaatggaccctgctccaggagcagggcaccaagacagtgcgacagaacttggaaccactgtttgaacagtatataaacaatttaaggcgccagctggattcaatcgtcggggaaagaggaagactggacagcgaacttagagggatgcaggatctcgtcgaggacttcaaaaacaaatacgaggacgaaatcaacaaacgaaccgccgctgagaacgaattcgtgacactcaaaaaagacgtcgacgcggcttacatgaataaagtggagctgcaggctaaggccgatactctgacagacgagattaatttcctccgggcactatacgatgcagaattgagccaaatgcagacacatatctccgacaccagcgtagtcctgtctatggataacaacagaaatctggacctcgatagcatcatcgccgaggtgaaagcccaatacgaggaaatcgcacaacgcagccgggctgaggccgaaagttggtaccaaacaaaatatgaggagctgcaggtgacggctggaagacacggagacgaccttaggaacacaaagcaggagatagcagaaatcaacagaatgatccagcggttacggagcgagattgatcacgtgaagaagcagtgcgctaatctgcaggctgcaattgctgatgcagaacagcgaggcgagatggctttgaaagacgcgaagaacaagcttgagggcctggaagatgcactccagaaagccaaacaagacctggcccggcttctgaaggagtaccaggagctgatgaacgtgaagttagctctcgatgtagaaatcgctacctatagaaaacttctggagggcgaggaatgcagactgaacggggaaggagtgggtcaagtaaacatttccgtcgtccagtctaccgtgagcagtggctacggcggagccagcggcgtgggaagcggtctcggactaggcggtgggtcaagctattcctatggatccgggctcggcgtcggtggtggattctccagctctagcgggagagctatcggcggaggcttatcgagtgttggtggtgggagtagcaccataaaatatactacaactagctcttcctcaagaaagagctacaagcactag

SEQ ID NO: 121480 - DNA, 1563 bp, synthetic construct
  misc_feature 1..1563: note = Description of Artificial Sequence: Synthetic coding sequence
  source 1..1563: mol_type = other DNA
atggcctctacatccaccaccattaggagccacagtggcagtcgttccctgtacgggttagggggaagcaagaggatatccatcggagggggcagttgcgccatatctggcggctatggcagcagagcagggggtagctatggattcgggggagccggctccgggttcgggttcgggggtggcgctggcatcggcttcggactgggcggaggtgcagggctggctggcggatttggagggcctggatttcctgtgtgtccccctggcggaattcaagaagttacagtgaatcagtccctcttaacacctctcaatctccagatcgaccctaccatccagagggttagagccgaggagagagagcagatcaaaacgctgaacaacaaattcgcatccttcatagataaagtcagatttcttgaacagcagaacaaggtgctggagacaaagtggacgctgttgcaggaacaagggacgaaaaccgtgcgacagaacctcgagccgcttttcgagcagtacattaataacctgaggagacaactcgattctattgtgggcgagagaggaaggctggacagtgagctgagaggtatgcaagatctggttgaggacttcaagaacaaatacgaggacgaaataaataagaggacagcagctgagaatgagtttgtcactttaaaaaaggacgttgacgcagcctatatgaataaagtggagctgcaggcaaaggccgacaccctaactgacgaaattaactttcttagggcgctgtatgacgcagaactgtcccaaatgcagacacacattagcgacactagcgtcgtgctctccatggataataatcggaacctcgacctcgactctatcatcgcagaggtgaaagcacagtatgaggagattgcccagcgttcccgcgcagaagccgaaagctggtatcaaaccaaatacgaggagctgcaggttacagcaggtaggcacggcgatgatctgcgcaatactaagcaggaaatcgctgaaatcaataggatgattcagagattgagaagcgaaattgaccacgtcaaaaagcagtgcgcaaacctgcaggctgcaatcgcagatgccgaacaaagaggagagatggccttgaaagacgctaaaaacaagttagagggtctcgaggacgcccttcaaaaagccaaacaggatctcgcaagactgttaaaagagtatcaggaattaatgaacgtgaagcttgctttagacgttgagatcgctacttatagaaaactattagagggcgaagaatgtcggctcaacggggagggggtgggtcaggttaatatcagcgtcgtgcagtcgactgtgtctagtggctacgggggggccagtggtgtaggctctggactggggctgggcggaggatccagttattcctacggctccggacttggcgtcggcggaggcttctccagtagcagtggtcgagctattggaggcggcctctccagcgtgggaggcggaagcagcacgattaaatataccacgacatcatccagtagccgcaagagttacaagcattag

SEQ ID NO: 121481 - DNA, 1695 bp, synthetic construct
  misc_feature 1..1695: note = Description of Artificial Sequence: Synthetic coding sequence
  source 1..1695: mol_type = other DNA
atggcatcaacttccaccaccattagaagtcactcctcctctcgccgcgggttctccgcaaatagtgcccgactgcccggagtgagcaggtctgggttcagcagtatcagcgtctctaggagccgcggctcaggcggactaggcggtgcctgcggcggagctgggtttgggagccgatccctttatgggctcgggggaagcaaaagaatttcaatcggaggaggaagttgtgccatctccgggggatacggatctcgcgccggcggaagttacggcttcggcggagcaggatctggctttggatttggaggaggagctgggattggttttggactgggaggcggcgctggccttgcaggcggttttgggggacctggatttcccgtgtgccctccaggcggaattcaggaagtgacagtaaatcaatctctccttacccctctcaacctccagatagaccccgccatacagcgggtccgcgcagaggagcgtgagcagattaagaccttgaataacaagtttgcttcctttattgacaaggttcgattcctggagcagcagaataaggtgttagacactaaatggacacttcttcaagaacaaggaaccaagactgttcggcagaatcttgaacctttatttgaacagtacattaacaacctgcgacgtcagctggacaacattgtgggtgagcggggccgtttggactctgagctgaggaatatgcaagatttggtagaggaccttaagaacaaatacgaggatgaaattaacaagagaacagctgccgaaaatgaattcgtgaccctcaagaaggatgtcgatgcagcctacatgaataaggtggagctgcaggccaaggctgacaccctgacagacgagatcaacttccttcgcgccttgtatgacgcggagctctcccagatgcagacacatataagcgacacctccgtggtgctgagtatggataataatagaaacttggacctggatagcatcatcgcggaagtgaaggctcagtatgaggaaatcgcccagaggtcccgagctgaggccgagagttggtatcaaacaaagtatgaagaactccagattaccgcggggaggcatggggacgacctccggaacacaaaacaagagatcgcagaaattaatagaatgattcagaggctccggagcgagattgatcacgttaagaaacagtgtgccaatttacaggctgcaattgcagacgccgaacagcgtggggaaatggctctcaaggacgctaaaaataaattggagggcctggaggatgcactgcagaaagctaagcaggatctggctcgtcttctaaaggaatatcaggaactcatgaatgtgaagctggcccttgacgttgaaattgccacatatcgcaagctgcttgaaggcgaagagtgcaggctgaacggggaaggtgtcggtcaggtcaatatctccgtggtacagtcgacagtttcctcagggtatggcggcgctagtggtgtgggttctggcttaggactcggcggcggaagtagttactcctacggtagcggactgggcgtgggaggaggcttctctagttcctcaggcagggcgaccggtggtgggctcagttctgtgggggggggttcctccactatcaaatatacaacgacatcctcatctagccgtaaatcttataagcattag

SEQ ID NO: 121482 - DNA, 1575 bp, synthetic construct
  misc_feature 1..1575: note = Description of Artificial Sequence: Synthetic coding sequence
  source 1..1575: mol_type = other DNA
atggccagtacctcaacaaccatccgaagtcattcatcctctcggcgcggattttcagcaaattccgcccgtttacctggggtcagcagatcaggattctcttcaatctccgtgtcgcgtagtcgggggagcggaggcctcggtggagcctgtggcggagccggcttcgggtctcggtctctgtatgggcttggcgggtccaagaggattagtatcggcggggggtcctgtgccattagcggggggtacggaagcagggcaggcggaagttatggattcgggggggcaggctccgggtttggcttcggaggtggcgccggaatcggattcggactggggggcggagcaggcctggctggcggattcgggggccctggatttccagtctgcccacctggagggattcaggaggtaacggtgaaccagtctctgttgacccccctgaacctgcaaatcgaccctgcaatccagagagtgcgggcagaggagcgggagcaaatcaaaacactgaataacaaatttgcttccttcatcgacaaggtgcgcttcctggaacaacagaacaaagtgctggacactaaatggacccttttacaagaacagggcacgaagaccgtgagacagaacctcgaacctctgtttgagcagtacatcaataacttgcgaagacagctggataacatagtgggcgaaagagggaggctggactctgagcttagaaatatgcaagatctggtcgaggatctcaagaataaagatgaaatcaactttctgcgggctctctatgatgcggaactatcccaaatgcagacgcacattagtgataccagtgtggtccttagtatggacaacaaccggaaccttgaccttgactccatcattgcggaggtgaaagctcagtacgaagagatcgcccaaagaagccgtgccgaagcagaaagttggtatcaaactaagtacgaggagctgcagattactgccgggcgtcatggggatgacctgcgcaataccaagcaggagatcgcagagatcaacagaatgattcaaagactccgaagcgagatcgatcacgttaaaaaacagtgcgctaatctgcaagccgccatagccgacgccgaacagagaggcgagatggccctgaaggatgccaagaacaaactagaagggctggaggacgccttgcagaaagccaaacaagacctggcacggcttctaaaggagtaccaagagctcatgaacgttaagctcgctcttgatgttgaaattgcaacgtatcgcaagctgttggagggtgaggaatgcagactgaatggggagggcgtaggccaggtgaacatctctgtcgtacagtctacagttagctccggttatggaggcgcctccggtgtaggaagcggccttgggctgggaggggggagcagttatagctatggctcaggactgggggttggcggtgggttctcgagtagcagcggcagagcaaccggcggcggcctatccagcgtgggcggcggctcatcaactatcaaatacaccacaacgtccagctccagtagaaagtcttataagcattag

SEQ ID NO: 121483 - DNA, 1695 bp, synthetic construct
  misc_feature 1..1695: note = Description of Artificial Sequence: Synthetic coding sequence
  source 1..1695: mol_type = other DNA
atggccagcacctctacgaccataagatcacacagctcatctaggaggggatttagtgccaattcagcccgcctccctggagtatcccgtagtgggttttcctctatttctgtgtctaggtcaaggggctctggcggtcttggtggcgcgtgcggaggtgccggcttcggctctcgcagcctgtatgggcttggcgggtcaaaacgaatatccatcggaggcggatcatgtgccattagtggtgggtacggctctagggcgggaggctcctacggcttcggcggcgccgggagcgggttcggcttcgggggcggagctggaattggattcggcctgggaggcggggctggtctggctggtggctttggcggaccaggattcccggtgtgccctccaggaggtatccaggaggtaaccgtaaaccagagtctgctcactcccctcaatctgcagatcgatcccgcaattcagagggtccgtgcagaagaaagagaacagattaagacactgaacaataagttcgcaagctttattgacaaggtcagattccttgaacaacaaaacaaggtcctcgacacgaagtggaccctcctccaggaacaaggaaccaaaactgtgcgacagaacttagagccactgtttgagcagtatatcaacaaccttagaagacagttggatagcattgtgggtgagcgaggaagactcgactccgagctccggaatatgcaggatctggtcgaggatctgaaaaacaagtacgaggatgaaatcaacaaacgaacagccgccgaaaatgaatttgtcacgcttaagaaggatgtggatgcagcatatatgaataaagtggagctacaggccaaagctgacaccctgactgacgagataaacttcctcagggctctgtacgatgctgaattgtcccaaatgcagactcacatctcagatacaagtgtggtcctctctatggataacaatcgtaacttagatctcgattcaatcattgccgaggttaaagctcagtatgaagaaattgcacaaagaagtcgagccgaagcagagagctggtatcagacaaagtacgaagagcttcaggtcacagccgggcggcatggtgacgacctgcgaaatacaaaacaggagattgccgagattaatagaatgatacaaaggttgcgatcagaaattgatcacgtgaagaagcagtgcgcatccttacaggcggcgatcgccgacgctgagcagcggggagaaatggccctgaaagacgctaaaaataagctggaggggctggaggatgctctgcagaaggccaaacaagacctcgcaagactgttaaaggagtatcaggagttgatgaatgtcaaactggccttggacgtcgagatagctacttaccgaaagcttttagaaggggaagagtgtcgactgaacggagaaggtgtgggacaggtgaatgtctctgtcgtccagtcgaccatcagttcaggatacgggggcgcatctggagtggggagcgggcttggtctgggtgggggaagtagctactcttacggctcaggtctgggtatcggtggtggtttttcgagctccagcggcagagcaatcggcggcgggctctcctcagttggcggcgggtcctccacgatcaagtatactactacttccagctcctctcgaaaatcttacaagcattag

SEQ ID NO: 121484 - DNA, 1650 bp, synthetic construct
  misc_feature 1..1650: note = Description of Artificial Sequence: Synthetic coding sequence
  source 1..1650: mol_type = other DNA
atggccagcaccagcacaaccattcgctctcacagttcgtctaggagcgggttcagtagcatctctgtgtccagatcccgcggcagcggcgggctgggcggggcatgtggcggggccggttttggctctcgcagcctctacgggctgggcggctccaagaggatctcaatcggcggcggaagctgtgccattagtgggggttatggcagccgagccggcggtagctatggtttcggaggggccgggagtggatttgggtttggagggggtgcgggaatcggatttggcctcggcggtggagccggtttagcgggtggcttcggagggcctggattcccagtgtgtccgcctgggggaatacaggaagtgactgtgaatcaaagtctcttaacgcccttgaacctgcaaatcgatcctgccattcagagagtgagagccgaagaacgcgaacagattaagacattaaataataagtttgccagcttcatcgataaagtgcgcttccttgaacagcaaaataaagtgctggatacaaagtggaccttattgcaggagcaaggaactaaaaccgtccgccagaatttagagcccctgttcgagcaatatataaataacctgaggcgccagctggatagtatcgtcggtgagcggggccgtctcgactctgagctgcgcaacatgcaagacctggtggaggacttaaaaaacaagtacgaggatgagattaataaacgaaccgccgctgagaacgaatttgtcacgctgaagaaggacgtggacgctgcttacatgaacaaggtggagctgcaagctaaggctgacacactcactgacgaaattaattttttgcgggccctctacgacgcagagcttagtcagatgcagacacatattagtgatacatctgtggtcctgagcatggataacaaccgcaaccttgatcttgactcgatcatagccgaagtcaaagcacagtacgaggaaattgctcagaggtcaagagcagaagccgaatcctggtaccagacaaagtacgaggagctccaggtgactgccggccgccatggcgacgacctcaggaatacgaaacaagaaatcgccgagattaaccgtatgatacaaagactaaggtccgagatcgaccacgtaaagaagcaatgcgcttcacttcaggccgccatcgccgatgcagagcaaaggggcgagatggcactgaaagatgccaaaaacaaattggagggcctcgaggacgcgttgcaaaaagccaagcaggacttagcaagactgctaaaagaatatcaggagctgatgaacgttaagctggccttggacgtggaaattgctacataccgaaagctattggaaggggaggagtgccgacttaacggcgaaggcgttgggcaggtgaacgtttcggttgtgcaaagtaccatctcctccggttacggcggcgcatcaggagtcggttccggactgggcttgggaggaggctccagctatagttacggctctggcctggggattggcggcggcttttccagtagctcaggaagggctattggagggggacttagctccgtcggcggaggttccagcacgattaaatataccactactagttcaagcagtcggaaatcctataaacattag

SEQ ID NO: 121485 - DNA, 1572 bp, synthetic construct
  misc_feature 1..1572: note = Description of Artificial Sequence: Synthetic coding sequence
  source 1..1572: mol_type = other DNA
atgtctcggcagttcacatgcaagagcggagccgctgcaaaaggaggattcagcgggtgctcagccgtactgtcgggcgggtcatcatcctccttcagggctggatcaaaggggcttagtgggggctttggctcaaggtcactttattcactcgggggggtccgatccctgaatgttgcgtccggcagcggtaaaagcggagggtacgggttcggcagaggcagagcctctggttttgccgggagcatgttcggtagcgtggcactaggtcccgtgtgtccaacagtttgtccacctggcgggattcaccaggtgactgtgaacgagtccctactggccccccttaatgtcgaactcgaccctgagatccaaaaggtgagagcccaggaacgagagcagataaaggctctgaataacaagttcgctagtttcatcgataaagtacgatttctagaacagcagaaccaagtgctcgagactaagtgggaactgttacagcagcttgacctgaacaattgcaagaataatcttgaacctatactggaaggatatatctcaaacctccggaagcaactggagacgctttcaggggatcgggtaaggctcgactccgaactgcggaacgtgagggatgtggttgaggactataagaaacgctacgaggaagagatcaacaagaggacggctgccgaaaatgaattcgtgctgcttaagaaagatgtcgatgcggcttacgccaataaagttgaactgcaggccaaggtggaatcaatggatcaagagatcaagttcttcaggtgtctgttcgaggctgagatcacacagatccagagccatattagcgacatgtctgtcattctgtctatggacaataaccgcaacctagatcttgattccattatagatgaagtgcgcacgcagtatgaggaaatcgcgctgaagtcaaaagccgaggctgaggcgctgtaccagactaagttccaggaactccagttggccgccgggcgtcacggcgatgacctcaagaataccaaaaatgagatatcagagctgactcggctgattcagcggatccggtctgaaattgaaaatgtaaagaagcaggcatccaacctggagacagccattgctgacgcggaacagcggggcgataacgcgctcaaggatgctagggcaaagctggacgaactggaaggcgctctgcaccaggcgaaagaagagctcgctaggatgttgagagaataccaagaacttatgtctctgaagctcgcccttgatatggagatagccacataccggaagttactcgaatcagaagaatgcagaatgagtggcgaatttcccagtcctgttagcataagcatcatctcctccacaagtggcggaagtgtctatggtttccggccttccatggtatccggcggctatgttgctaacagttccaattgtatttcaggagtgtgttcagtgcgaggcggcgagggccggtcccgcgggtcagcaaatgactacaaggatacgctcggaaagggtagctctctcagcgccccctctaaaaaaacatcgcggtag

SEQ ID NO: 121486 - DNA, 1536 bp, synthetic construct
  misc_feature 1..1536: note = Description of Artificial Sequence: Synthetic coding sequence
  source 1..1536: mol_type = other DNA
atgagtcggcagttgacccactttcctcgaggagagcgcctgggattcagcggatgtagcgctgtgctttcgggcgggattggctctagctccgccagcttccgagccagggtgaaaggttctgctagctttggttcaaagagtttgtcctgccttggggggtctagatcacttgccctgagcgctgcggccaggaggggggggggcaggcttggcggattcgttggaaccgctttcggatctgcaggcctgggacctaagtgccccagcgtgtgtccacctggtggcattccacaagttacggtgaacaagtctctgcttgcaccccttaacgtggagatggatcctgagatccagcgggtgcgggcacaggagagggaacagatcaaagctctgaacaacaagttcgcatcctttatagataaagtcaggttccttgaacaacagaatcaggtactggaaactaagtggaacctgcttcagcaactggacctcaataactgccggaagaacctggagcctatttacgagggatatatcagtaatctgcagaaacagttagagatgctgagtggagatggcgtgaggctggactctgagcttcggaatatgcaggacctggtcgaggattacaaaaaacggtatgaggtggaaataaacaggaggactgctgctgagaatgaatttgttgttcttaaaaaggacgtcgacgccgcctatatgaacaaggtggagctgcaggcaaaagtggactcactaaccgatgagatcaagttcttcaaatgcctgtatgagggtgaaattacgcaaattcagagccacatctccgatacctcaatagtgctcagtatggataacaatcgggacctggatttagacagcatcatcgcagaagtccgggcccagtatgaggaaattgctcttaaaagtaaggccgaggctgaaacactgtaccagaccaaaatacaggagctgcaggtcacggctgggcaacacggggacgacttgaagttaaccaaggccgagatctctgaactaaataggctcatacagagaatcagatcggaaatcggaaacgtgaagaaacagtgcgcggatctggaaacagcgatcgcagatgccgaacagcgaggtgactgcgcactgaaagatgctcgcgcgaagttggacgaactcgagggagctctgcaccaggccaaagaagaattggcccgtatgctgagagagtaccaggaactcgtgtccctgaagcttgcgttagacatggagattgccacttatcgtaagcttctggagtcagaggagtgtagaatgtctggggaatatccgaatagtgtttccatcagtgtcatatctagtacaaacgccggggcaggcggcgcagggtttagcatgggtttcggtgccagctcttcttactcttataaaaccgcggcagccgacgtaaaaacaaaggggtcttgcggctcggaacttaaggaccccctggccaagacttctggcagcagttgtgctaccaagaaagcatccagatag

SEQ ID NO: 121487 - DNA, 1410 bp, synthetic construct
  misc_feature 1..1410: note = Description of Artificial Sequence: Synthetic coding sequence
  source 1..1410: mol_type = other DNA
atgtcccgtcagttgacgcactttccacgcggtgagcgcctcggtttctccgggtgtagcgctgtcctgtctggaggcattggttcttccagcgcttcattcagagcacgggtcaagggctctgcgtctttcggatccaaaagtctctcatgcctcggtggcagtcggtctttggccctaagcgccgctgctcgaaggggcgggggccgccttggaggatttgtgggaaccgcatttggctctgcaggcctgggccctaaatgcccgtctgtatgcccaccgggagggattcctcaagtgactgtgaacaagtccctcctggcccccctcaacgtcgaaatggacccagagatccagagagtgcgcgcccaagagcgtgaacagattaaagcattgaacaataaatttgcctccttcatcgataaagtgcgcttcctggagcaacagaaccaagttttagaaacaaagtggaatctcctacaacagctggatctcaacaattgtcgtaagaacctggaaccaatctatgaagggtacatcagtaatcttcaaaaacagctggaaatgctgtctggtgacggtgttcggctggactctgaactcagaaacatgcaggacctggtcgaagactataaaaagaggtacgaggtggagatcaatcgacggaccgccgccgagaacgagtttgttgtgctcaagaaagacgttgacgccgcttacatgaacaaggtggagctgcaggccaaggtagactccttgaccgatgagatcaaatttttcaagtgcttgtacgagggagagattactcagatccagtctcacataagcgatacttccatcgtactttctatggacaataatagggatctagacttggatagcatcatagctgaagtcagagcacaatatgaagagatcgctttgaagagtaaggctgaagcggagaccctctatcagacaaaatgcgcagacctggaaactgctattgctgatgcggaacagcgcggcgactgtgcactcaaggacgctcgggcaaagctcgatgagctggaaggagccctgcatcaggccaaggaggagctggcaaggatgctccgggagtatcaggaattggtctctttaaaactcgcactagatatggaaatcgctacatataggaaactgttggagtccgaagaatgccgtatgtctggagagtatccaaattccgtctctatttctgttatctcatccacaaacgctggtgctggtggggcaggcttttctatgggcttcggagcttctagcagctactcctacaaaaccgccgccgcagacgtaaaaactaaagggagctgcggctccgagctgaaggatcccctcgccaaaacgtccggtagcagctgtgccacgaaaaaggcttctcgctag

SEQ ID NO: 121488 - DNA, 972 bp, synthetic construct
  misc_feature 1..972: note = Description of Artificial Sequence: Synthetic coding sequence
  source 1..972: mol_type = other DNA
atgctgtctggggacggcgtaagactggacagcgaactgagaaatatgcaggatctggtagaagattacaaaaaaagatatgaggtcgagattaacagacgcactgccgcagaaaatgagttcgtcgtccttaaaaaggacgttgacgctgcgtatatgaataaggtggagctccaggcaaaggtggatagcctgacagacgagataaagttctttaagtgtctttacgagggcgaaattacgcagattcagtcccatatcagcgacacgtccattgtgctgtccatggacaacaaccgcgacttggaccttgactcaatcatagcagaggttcgggctcagtatgaagagatcgcgcttaaatccaaagctgaggccgaaactctctaccagacgaagatacaggagcttcaagtgacagctggacaacacggggatgatttaaaactgaccaaagccgagatctcagagttaaatcgactcattcaacggattagatctgagatcggtaacgtcaagaagcagtgcgccgatctggagaccgctatcgcagacgccgagcagaggggagactgcgctctcaaggatgcacgcgctaaattggatgagctggagggggcactccaccaggccaaagaagaactggcccgtatgctccgagaataccaggaactcgtgagtcttaagctggcattagacatggaaatcgccacctaccgcaagctgcttgagagtgaagagtgcagaatgtcaggagagtaccccaactcagtctctattagcgttatatcaagtaccaacgcaggcgctggtggcgccggattctccatgggttttggcgcctcctctagttactcgtacaaaacagccgcagcagatgtgaaaaccaagggatcttgtgggagcgagctgaaagaccccttggcaaaaacaagcgggtcttcctgcgcaacaaaaaaagccagcaggtag

SEQ ID NO: 121489 - DNA, 1536 bp, synthetic construct
  misc_feature 1..1536: note = Description of Artificial Sequence: Synthetic coding sequence
  source 1..1536: mol_type = other DNA
atgtcccgtcagctgacgcacttccctaggggagaaagactgggctttagtggatgttccgccgtattatcgggaggcattggctcatcttcagctagctttcgggccagagtaaagggatcggcaagcttcgggtcaaagtccctatcctgtttaggggggagccgttctcttgctctgagcgctgcggcccgtcgtggtggagggaggctcggcggattcgtgggaaccgcattcggcagcgccggactcgggcccaagtgtccctcggtctgtccgccaggggggatcccacaggtgactgttaacaagtctctgcttgcccctttgaatgtcgagatggaccccgaaattcaaagggtaagagctcaggaacgagagcagatcaaggctctcaataataagtttgcgtccttcatcgataaagtgcggtttcttgagcagcagaatcaagtgctcgagactaaatggaacctcctccagcagctggacctgaacaactgccggaagaatttggagccaatttatgagggctatataagtaacctgcagaaacaactcgagatgttgtcgggggacggagtccgacttgactcagaactgcgcaacatgcaggatttggtggaagattacaaaaaaaggtatgaggtggagatcaacagaagaactgctgcagagaacgagtttgtggttctcaagaaagacgtggatgctgcatatatgaataaggttgagcttcaggccaaggtcgactcactgaccgacgagatcaagttttttaaatgcctttatgaaggggaaatcacgcagatacaatcccacatcagcgacacaagcatcgtgctgtctatggataacaatcgcgatctcgatcttgacagtattatcgcagaagtgcgggcacagtacgaagagattgcactgaaaagcaaagcagaagcagagactctatatcagactaagattcaggagctgcaggtgacagcaggccagcacggtgatgatcttaaactgaccaaggcagagatctctgaacttaatcggctgattcagaggattcgctcggagataggcaatgtgaaaaaacagtgtgccgacctggaaaccgcaatcgcagacgctgagcagagaggcgactgcgcactgaaagacgcccgggccaagctggatgaactcgagggcgccttgcaccaagccaaagaggaactcgccagaatgctgagagagtaccaggagctggtgagcctgaaactggccttagacatggagattgcaacttaccgaaaactgctcgagtcagaagagtgtcgcatgagcggtgaataccctaattcagtgtcaattagtgtaatctcctccaccaacgccggggccggcggggccggattttcgatgggatttggcgcctcctcctcctacagctataaaaccgcagccgcagatgtcaagactaagggaagctgcggttccgagctgaaagacccactcgccaaaactagcgggtcttcctgtgctaccaagaaggcaagccgttag

SEQ ID NO: 121490 - DNA, 1623 bp, synthetic construct
  misc_feature 1..1623: note = Description of Artificial Sequence: Synthetic coding sequence
  source 1..1623: mol_type = other DNA
atgagtcgccagtttacttataagagcggcgccgccgctaaaggagggtttagcggctgctcagccgtgttgtctggtggcagctctagttcatatcgcgctggcgggaagggactgtcagggggcttcagtagtcggagcctttatagcttgggaggagcacgatctatctcctttaacgtcgcaagcggctcaggctgggctggtggttatggcttcggaagggggagggcgtctggatttgctggttccatgttcgggtcggtcgctctgggaagtgtttgcccctcactctgccctcctggcgggatccatcaagttacaattaataagagcctgctggccccactgaatgtggaactggaccccgaaattcagaaggtacgagcccaggagcgcgagcagatcaaggtcttgaacaataagttcgcctcttttattgacaaagtgcgttttcttgaacagcaaaaccaggtcctggaaacaaagtgggagttgctgcaacaactcgatctgaataactgtaagaacaatttggagcccattctggaggggtacatctcgaatctgcgcaagcagctggagactctatccggggatagggtgagactcgactccgagctgaggtctgttcgagaagttgtagaagattacaaaaagcggtatgaagaggagattaacaagcggactacagccgaaaatgaattcgtagtacttaagaaggacgtggacgctgcttatacaagcaaggtggagttacaagctaaggttgacgctctggacggggagattaaattttttaagtgcttgtacgagggggaaacagcacagatacaatcccatatttctgacacttctataattctctcgatggacaacaaccggaatctcgacctggactcaatcatcgctgaggtccgggcccagtacgaggagatagcccgaaaaagcaaggctgaagcagaggcattgtaccagaccaagtttcaggaattgcagctggctgcggggagacatggagacgacctgaagcataccaagaatgagattagcgagctgaccaggttgatacagaggctgagaagcgaaattgagtcagtgaagaagcagtgtgccaatctggagactgccatagcagatgcggaacagcgaggggactgtgctcttaaggatgcccgtgccaaactggacgagctggaaggagcgcttcagcaagcaaaagaggagctggcacgaatgttaagagaataccaggaacttctgagcgtgaaactgagtctcgacattgagattgctacgtaccggaaattgctggaaggagaggaatgccggatgtcaggtgaatataccaacagtgtgtccatatccgtcatcaactcgtcgatggcaggcatggccgggacaggtgctggctttggcttctctaacgcagggacctatggctattggccatcttccgtgtcagggggctattctatgcttccaggcggctgcgttacagggagcgggaactgtagcccaagaggagaagccaggacacggctggggagtgcatctgagtttagggattcccaaggcaagactctggccttgagcagtccaacgaaaaagactatgcgatag

SEQ ID NO: 121491 - DNA, 1590 bp, synthetic construct
  misc_feature 1..1590: note = Description of Artificial Sequence: Synthetic coding sequence
  source 1..1590: mol_type = other DNA
atgtctaggcagttaaacattaaatcttcaggtgataaagggaattttagcgttcactctgccgtggtgccaaggaaggctgtaggctcactggcttcttattgtgccgccggtagaggagccggggcagggttcggttccagaagcctgtactccctcggcgggaatcgcagaatttcattcaacgtcgcaggtgggggagtccgagctggcgggtacgggttccgccctgggagcggatatggcggcggcagggcatccggcttcgcagggagtatgtttggatctgttgcacttggccccgcgtgtctgtctgtctgtcctcctggcggtattcaccaggtgaccgtgaacaagtctctgttagctcctttgaacgtagagctggatcctgagatccagaaggtaagagcccaggaaagggaacagatcaaggtacttaatgacaagttcgcctctttcatcgacaaggtgcgctttttagagcagcagaatcaagttctggaaactaaatgggaactgttacagcagctggacctgaacaactgcaaaaagaacttggaaccaattctcgaaggttatatctctaaccttagaaagcaactcgagacgctgtcgggagacagggttaggctagattctgaactgagatctatgagggacctggtggaagattacaagaagcgctacgaggtagagatcaatcgaaggacaaccgctgagaacgaatttgtggtgttgaagaaagatgctgacgccgcctacgccgtgaaggttgaactacaggccaaagtggatagtttagacaaagaaatcaaattcctgaaatgcctctacgacgctgagatcgctcagatccagacgcatgccagcgaaacatctgtgattctgtctatggacaacaatcgcgacttagatctggactctatcatcgcagaagtgcgcatgcactacgaggagattgctctaaagtctaaggctgaggccgaagccctctaccagaccaagatccaagaactgcagctcgcggcatcaagacacggggacgacctaaagcatacccgttcagagatggtggaattgaacaggctcattcaacgcatacgctgtgaaataggaaacgtcaagaaacagagagctagcctggagacggccatcgccgacgctgaacagaggggggacaatgcccttaaggacgcccaagctaagctggacgagctggagggggctctgcaccaggccaaagaggaactcgcccggatgctgcgggagtaccaggaactgatgtccctcaagctcgccctcgacatggaaatcgcgacttatcgaaagctgctggaaggcgaagagtgccgtatgtctggcgagaatcccagcagtgtttcaatttccgttatctccagcagcagctattcttaccatcacccttcctccgccggcgtcgacttgggggcctctgctgtggcaggatcctctggttccacacaaagcgggcagaccaagactacagaggcaaggggtggcgacctcaaggatacacagggcaagagtacaccggcttccatacccgctcgcaaggccaccaggtag

SEQ ID NO: 121492 - DNA, 1656 bp, synthetic construct
  misc_feature 1..1656: note = Description of Artificial Sequence: Synthetic coding sequence
  source 1..1656: mol_type = other DNA
atgtcccggcaaagtagtattacctttcaaagtggcagccgtaggggttttagtaccacatcagcgatcacaccagcagctggaaggtctagattctcttcggtgagcgtcgcacgtagcgctgctggctcgggaggactggggagaattagttcagccggggccagcttcgggagtcgctccttgtacaacctgggaggcgccaagcgcgtgtcaatcaatggctgtggaagttcttgtcggagcggctttggtggtagggcgtctaacagatttggggtgaattctgggttcggctacggcggcggcgtaggaggcggattctccgggcccagtttccccgtgtgtccccccgggggcatccaggaggttactgttaatcagtccttgctgacacccctgcatctgcagatcgatcccacaatccagagagtacgggcagaggaacgcgaacagattaaaacgctaaataacaaatttgcatctttcatcgataaagtgaggttcctggaacagcagaataaagtcctcgagaccaagtgggcactgcttcaggagcaggggagccggacggtcagacagaatctcgaacctttattcgattcatatacctctgagctcagacggcagctggagtccatcaccactgagcgagggcggctcgaagccgaattacgaaacatgcaagatgttgttgaggacttcaaagtccgatacgaggatgagatcaacaaacgcaccgccgccgaaaatgaattcgtcgccctcaaaaaagacgtggacgccgcatatatgaacaaggtggaacttgaagctaaggtcaaatcccttcctgaagagatcaattttatacactccgtgttcgatgctgaattgagccagctgcagacccaggtcggtgatacttctgttgtactttctatggacaataacaggaatttagatctcgacagcatcatagctgaggttaaagctcagtatgaagacatcgccaaccggtctagagcagaggccgagtcatggtatcagactaaatatgaggagctgcaggtgaccgcagggcggcatggggacgacctgcggaataccaaacaggaaatcagtgaaatgaataggatgatccagcgcctgcgtgccgagattgactctgtcaagaagcagtgtagtagcctccagactgcgatagctgacgctgagcagcggggagaactcgccttaaaagacgcgcgagccaaacttgtagacctggaagaggccctgcaaaaggccaagcaggatatggctagactgcttagggaatatcaggagctgatgaacatcaagctcgcccttgacgtagaaatcgcaacttaccgcaaactgcttgaaggtgaagaatgtaggctctctggcgaaggagtttctccagtcaacatctcagtggtaacttccacgctgagtagtggttacggttctggatccagcatcggaggaggcaacctgggtctgggagggggaagtggatactcatttacaacatccggcggccacagccttggcgccggcctgggcggctccggttttagtgccacgtctaatcgaggactgggagggtccggctcctctgtgaaattcgtgagcaccaccagcagttcacagaaatcgtacacacattag

SEQ ID NO: 121493 - DNA, 1737 bp, synthetic construct
  misc_feature 1..1737: note = Description of Artificial Sequence: Synthetic coding sequence
  source 1..1737: mol_type = other DNA
atgtctcatcagttctcttcccagtctgccttctcttccatgagccggcgggtgtactccaccagtagctccgccggctccgggggcggatctcccgcagtgggcagtgtgtgctacgctaggggaagatgcgggggcggcggctacggaatccacgggcgagggtttggcagccgaagcctttacaacctgggagggagtcgtagcatctccattaaccttatgggacggtcaacttctggattctgccaggggggaggggttgggggcttcgggggcggccgcgggtttggtgtggggtctaccggggccgggggcttcggtggaggcgggttcggtggtgccggctttggcacatccaactttggcttaggcggattcggcccctattgtcccccggggggcattcaggaggtgacaattaatcaatccctcctggagccgctgcatctggaggtggatcccgaaatccagagaataaagacacaggaacgcgaacagatcatggtgctcaacaataagttcgccagctttatcgataaggtccggttcctggagcagcagaaccaagtcctgcagaccaaatgggagctcctgcagcaagttaacactagcactggcacaaataacctggaaccgcttctcgaaaattacatcggtgacctgagacgccaggtggacctactatctgcagagcagatgaggcagaacgccgaggtgaggagcatgcaggacgtagtggaagattataaatctaaatatgaagatgagatcaataaaagaacaggcagtgagaacgattttgtcgtgctgaaaaaggatgtggatgcagcttacgtgtccaaagtggatctggaatcccgggtcgatacactgacgggggaggtgaatttcctgaagtacctattcctaaccgagctctcacaggtacagacacatatctctgatacgaatgttattctgtcaatggacaataatcggtcgctcgatttagactccataatagacgctgtgcgtactcagtacgagctcattgcccagagatccaaggatgaagctgaggccctctaccagacaaagtaccaggagctccagatcacagctgggcggcacggtgatgacctcaaaaacagcaaaatggaaattgccgaattaaaccggaccgtgcagcgcctgcaagcggaaatcagtaacgtaaagaaacagattgagcagatgcagtctctgatctcagacgccgaggagaggggcgagcaggcgctgcaggatgcttggcagaagctgcaggatttggaagaagctcttcagcagagcaaggaggagcttgcccgactgctccgcgactaccaagccatgttgggagtcaaactgagcctcgacgtggagatcgctacatacaggcagctgttggaaggcgaagagtcacgtatgagtggcgagttgcagtcccatgtcagcatctctgtccagaatagccaagtctctgtgaatggtggcgcgggcggcggaggctcatacggatctggggggtacggcggtgggtctggaggtggatacggtggtggaaggtcttacagaggtgggggcgccagaggacgaagtgggggcgggtacggtagtggatgtggcggcggcgggggttcgtatggcggcagcggccgaagtgggcggggaagtagtagagtgcagattatccagacatccactaatactagtcatcggcgcattctcgaatag

SEQ ID NO: 121494 - DNA, 1038 bp, synthetic construct
  misc_feature 1..1038: note = Description of Artificial Sequence: Synthetic coding sequence
  source 1..1038: mol_type = other DNA
atgaggcagaacgccgaggtgcgctccatgcaggacgtggtggaagattataagtctaagtacgaagatgaaatcaacaagcgaacagggagtgagaatgatttcgtggttttgaagaaggacgtcgatgctgcctacgtatccaaggtggacctagagtctcgcgtcgacacactgacaggggaggtgaactttcttaagtacctgttcttaactgaactgagtcaagtgcagactcacatctctgacaccaacgtgatcctgtccatggataacaatcgcagcttggatctggattctataatagatgccgtgcggacccagtacgagctgatcgcccagcggagtaaggacgaagcagaagccctataccagactaagtaccaggagctccaaattactgctggccgacatggcgatgaccttaagaactctaagatggagatagctgaactgaaccggactgttcagcggttgcaggctgagatcagcaacgtcaaaaaacagatagaacagatgcaatcgctgatctctgatgccgaggagcgcggcgagcaggccctacaagacgcgtggcaaaaattgcaagacctggaggaagcgctccagcagtctaaggaggaactcgcccgcttacttagagattatcaagcaatgctaggcgtcaaattgtccctcgatgtggagatcgccacataccgtcagctcctggagggagaagaatcacggatgagcggggagttacagtctcacgtatccataagtgtgcagaattcacaagtttcggtcaatggtggggccggcggaggaggatcctacgggtcagggggttatggaggcggtagcgggggcggctatggtgggggaaggtcatatagaggcggtggggcccgcggcagaagtggcggtgggtacggtagcggctgtggcggcgggggagggtcttatgggggaagcggccggtccggcagagggtctagccgtgttcagattatccagacttcaaccaacaccagccataggaggatcctcgaatag

SEQ ID NO: 121495 - DNA, 1563 bp, synthetic construct
  misc_feature 1..1563: note = Description of Artificial Sequence: Synthetic coding sequence
  source 1..1563: mol_type = other DNA
atgtctttgagtccttgtagggcccagcgggggttttccgccaggtccgcctgttctgcgcggtccaggggccgcagtagaggcggtttctcatccaggggcggcttcagttccaggtctctgaactcatttggcgggtgcctggagggctcccgcgggagtacatgggggagtggtggacggctgggggtcagattcggcgaatggtccggaggacccggcctgtctttatgtccccccgggggaattcaggaagttaccattaaccaaaacttgcttacacccctgaagattgagattgacccccaatttcaggtcgtgcggacacaggagacgcaggaaattcgcacgctgaataatcagttcgcctccttcattgataaggttagatttcttgagcagcaaaacaaggtcctggaaacaaagtggcacctgctgcagcagcagggactttctgggagccagcagggcttggagcctgtgtttgaagcctgccttgatcagctgcgcaaacaactggagcagttacaaggcgaaaggggagccttggacgcagaactgaaggcttgcagggaccaagaagaggaatataagtctaagtatgaagaagaggcacatagaagagccacactagagaacgatttcgtagtgctgaaaaaggacgtagatggggtattcctgtcaaaaatggaacttgagggcaagctggaagcacttcgggagtacttatactttctcaaacacctcaatgaggaagagctcggccagctccaaactcaagcctcagacacctcagtggtgctcagcatggacaataacagatacttggactttagctctatcatcactgaagtgcgagctaggtatgaagagatcgcgagatcatccaaggccgaggcagaggcactctaccagacaaagtaccaagagttacaggtgtccgcccaactgcatggcgacagaatgcaagaaacaaaagtacaaatcagccaactgcaccaggagatccagcggctgcaatcgcaaacagaaaatctcaagaaacaaaacgcttcgctgcaagctgcgatcaccgacgctgaacagagaggcgaactcgccctgaaggacgctcaggccaaggtcgacgagctggaggccgcactgcgcatggctaaacagaacttggctcgcttgctgtgcgagtatcaggagctgacaagcacaaaattatcattagatgttgaaatagcaacatacagaagactgttggaaggggaggaatgtaggatgagtggtgaatgcacctctcaggtgacaatttcatccgttgggggctctgccgttatgtctggcggcgtcggaggcggccttggaagcacctgtggcctaggctctgggaaaggatctcccgggagctgttgcacctcaatcgtcaccggcggcagtaatatcatcctgggttccggaaaagatccagtgcttgactcttgttccgtcagtggtagcagcgctggtagtagctgccataccatcctgaagaaaacagttgagagtagtctgaagacatcgataacctattag

SEQ ID NO: 121496 - DNA, 1233 bp, synthetic construct
  misc_feature 1..1233: note = Description of Artificial Sequence: Synthetic coding sequence
  source 1..1233: mol_type = other DNA
atggaaggccacgaggctagtcccgcacaggtcgggcagggggacaggggaaaggtccgctttttagagcagcaaaataaggtcctcgaaacaaagtggcatttactgcagcagcaggggttgagtgggtcccagcaggggctggaacctgtgtttgaggcatgtctcgatcagcttcgcaagcaacttgaacagctgcagggcgagcgaggagcccttgacgctgaactcaaggcttgcagagatcaggaagaggagtacaagtctaaatacgaagaggaggcccacaggagagccaccctggaaaatgattttgtggtccttaaaaaggatgtcgatggagtgttcctgtctaaaatggagttggaaggtaagcttgaggccctcagggagtacctgtactttttgaagcacctgaatgaagaagagttgggtcagctccagacacaagccagcgatactagcgtggtgctgagtatggataataacaggtacctggacttctctagcattattaccgaggttcgggccagatacgaggagatcgctcggagttctaaagccgaggctgaagccctttaccagaccaagtaccaagaactgcaggtgagtgcccagctacatggggacaggatgcaggaaactaaggttcagatatctcagctacatcaagagatacagcggttacaatctcagaccgaaaacctcaaaaagcaaaatgcctcactgcaagctgctatcacagacgctgaacaacggggagaactagctcttaaagacgcccaagctaaagtagacgaactcgaggccgcccttcggatggccaaacaaaacctcgctagacttttgtgcgagtatcaggaattgacgagtacaaaactgagcctggatgtggagatcgcaacatatcgccggcttctggaaggagaggaatgtcggatgagcggagagtgtaccagtcaggtgaccatttctagtgttggaggatccgcagtgatgtctggtggagtgggcggagggctcggatctacatgcggtcttggcagcggcaagggctcacccgggagctgttgcaccagtatagtcaccggaggatccaatattatcctgggaagtggaaaggaccctgtcttggatagctgttccgttagtggatcctccgccggatcttcctgtcacacaatcctcaagaaaaccgtggagtcctccctgaagacaagtatcacttattag

SEQ ID NO: 121497 - DNA, 876 bp, synthetic construct
  misc_feature 1..876: note = Description of Artificial Sequence: Synthetic coding sequence
  source 1..876: mol_type = other DNA
atggagctggagggaaaacttgaagcactgagagagtatttgtattttcttaaacatctgaacgaggaggaactgggacagttgcagacgcaggcctctgatacgtcagtagtactgtccatggacaacaatcgatatctggacttttctagcatcatcactgaggtgcgggctcgctacgaagaaattgcccgttccagtaaagctgaggctgaggcactttatcaaaccaaatatcaggagctacaggtgtctgcgcagctacacggcgacagaatgcaagagaccaaggtgcaaatatcacaactgcatcaggagatacagcggctgcaatctcagaccgaaaatctcaagaaacagaacgcatctcttcaggccgccatcactgatgccgaacagaggggagaactggcccttaaggacgcacaggccaaagtcgatgaattggaggcggcccttaggatggcaaaacagaatctggcacgcttgctgtgtgaataccaggagttgacctctaccaaactgtctcttgacgtggaaatcgctacgtacagaaggctgctggaaggtgaagaatgtagaatgtcaggcgagtgtacgagccaagtgactatcagttcagtgggtgggtctgccgtgatgtccgggggtgttggcgggggactgggctcaacttgtggcctgggctccggaaagggcagccccggctcatgttgcacctccattgtcacgggaggttccaatattattctggggagcggtaaggatcccgtccttgattcttgctctgtgtccgggtcctccgcaggctcctcatgccacacaatcctaaagaagacagtcgagagctcactaaagactagcattacatattag

SEQ ID NO: 121498 - DNA, 1608 bp, synthetic construct
  misc_feature 1..1608: note = Description of Artificial Sequence: Synthetic coding sequence
  source 1..1608: mol_type = other DNA
atgagatctagcgtcagccggcagacctacagcaccaaaggaggtttctcatccaactccgcttcaggaggtagtgggagccaggcgaggacttcgttctctagcgtaaccgtgtcgcggtcaagcggctctggcggaggagcacactgcggaccaggcacaggcggatttgggagccgaagcctgtacaacctaggcgggcataaatctatatcagtgtctgtggccggaggggctttgctgggccgggcgctgggagggtttggttttggctccagagccttcatgggccagggagcaggcaggcaaaccttcggtccagcctgtccgccaggtggcatccaagaagtcactgtcaaccaaagtttgttgaccccattacatgtagaaatagaccctgagatccaacgcgtgaggactcaggaaagagagcagatcaagacactgaacaataagtttgccagctttattgataaggtgaggtttctggagcaacagaataaggtgcttgaaaccaaatgggctcttctgcaagaacagggccaaaatttgggcgtaaccagaaacaacctggagcccttatttgaagcctatctaggatctatgcgatccacacttgaccggcttcaaagcgaacgggggaggctggattctgaacttagaaacgtgcaggatctggttgaggactttaagaacaagtacgaggacgaaattaacaagcacaccgccgctgagaatgaattcgtagttttaaagaaggatgtggatgcggcctacatgggtcggatggacctgcatggcaaagtgggaactcttacacaggaaattgatttcttgcagcagctttacgagatggaactgtcacaggtccagactcatgtcagcaataccaacgtggtcttgagcatggataacaaccgcaacctggacctggactctatcatcgctgaagttaaagcacagtacgagctgattgcgcagagaagccgagccgaggctgaggcttggtatcagacaaagtacgaggaattgcaggtgactgctgggaaacacggagacaacctgagggatacaaagaatgaaattgcagaactgactcggaccatccagcgcctacagggggaggctgatgcagccaaaaagcagtgccagcaactccagaccgctatcgccgaagccgaacagcgcggcgagctggccctgaaagatgcgcaaaaaaaattgggtgatctggacgtggccctccatcaagccaaggaggatctgacccggctgttacgcgactatcaagaactgatgaacgtcaaactggctttagatgtggaaatcgcaacatatagaaagctgctggagagcgaagaaagccggatgagcggcgagtgtccctccgctgttagtatttcggtgacaggtaatagcactaccgtctgtggagggggagcggcaagcttcggcggcggaatctcacttggaggatccggcggtgctaccaaaggaggtttcagcaccaatgtggggtacagtaccgtcaaaggaggacccgtctccgctggaacctccatactacgcaagaccacaaccgtaaaaacctcctcacagcgctactag

SEQ ID NO: 121499 - DNA, 1269 bp, synthetic construct
  misc_feature 1..1269: note = Description of Artificial Sequence: Synthetic coding sequence
  source 1..1269: mol_type = other DNA
atggcttgtcgctcttgtgtggtgggtttctcctcattgtcttcctgcgaagtcactcccgtggggagtccccgccccggaactagcggctgggacagctgtagggctccaggcccgggattttccagtcgctcgttgactggttgttggagcgccggcacgatctccaaagtcaccgtgaaccctggactgttggtgcccctcgacgtgaagctcgaccctgcggtccaacaactcaagaatcaagaaaaggaggaaatgaaggccctaaatgataagtttgcctcacttatcggcaaagttcaagcccttgagcaaagaaatcagctgttggagaccagatggtccttcctgcaaggccaagatagtgcgatcttcgaccttggacacttgtacgaagagtatcagggaagactccaggaggagctccgaaaggtgtctcaagaacgggggcaactagaggcaaatctgctgcaagtcctcgagaaagtcgaagaattcaggatccgctacgaagacgagatcagtaaacggacggatatggagtttaccttcgtgcagcttaaaaaggacttggacgctgagtgtctgcaccgcaccgagctcgagacaaaattaaagtccctggagagttttgtggagcttatgaagacaatatacgaacaggaattgaaagatttagccgcacaggtcaaggatgttagcgttacagtggggatggactcccggtgccatatagatctgagcggaatcgtggaggaggtcaaggcacaatatgatgccgttgcagcacggtcgctggaggaggccgaggcctactcacggagtcagctcgaggaacaggccgcacggtccgccgaatatggtagcagtttacagtcatccaggagcgaaattgcagatcttaacgtgcgaatccagaaactgcgcagccagatcctctcagtgaagtcgcactgtctcaaactggaggagaatatcaaaacagctgaggagcaaggcgaactagcttttcaggatgccaagacaaagctggcccagttagaagccgctttgcagcaggctaaacaggatatggctcgccagctccggaagtaccaggaactgatgaatgtaaaactggccctcgatatcgaaatagcgacttacagaaagcttgtggaaggggaggaagggcgaatggatagtccctcggctacagtggtctcggccgtgcagagccgctgcaagaccgcaccctctctgccctacccactctgttccctgtag

SEQ ID NO: 121500 - DNA, 1359 bp, synthetic construct
  misc_feature 1..1359: note = Description of Artificial Sequence: Synthetic coding sequence
  source 1..1359: mol_type = other DNA
atggcgtgtcggtcctgtgtggtgggcttttcgagtctgagttcatgcgaggtcacgcctgtcgggagccctaggcccggaacatcaggctgggactcgtgtagggcgcctggtcctggtttctcaagtcggtcattgactggctgttggtcagcagggactatcagtaaggtgaccgtgaatccaggcctcctggtaccactggatgtcaaacttgaccccgcagtgcaacaactcaaaaaccaagagaaggaggagatgaaggcactgaatgataaattcgccagcctcattggcaaggttcaggctctggaacagagaaaccagctcctggagacaagatggagtttcctgcagggccaagattccgcaatcttcgatctaggacacctgtacgaagagtaccaaggtcgtttacaggaagagctgcgcaaagtgtcccaggagaggggccagcttgaggctaatttgctacaggttctggaaaaggtggaggagttcaggatccggtacgaggatgagatctctaagcggaccgatatggagtttacgtttgtgcagctgaaaaaggacctggacgccgaatgtcttcatcgtactgaactagagacaaagcttaagagcttagaatcgtttgtggagctcatgaagactatctatgaacaggagctgaaagacctcgccgcccaagtcaaagacgtgagtgtgaccgtggggatggactcccgatgccacatcgatctctctggcatcgtggaagaggtaaaggcacagtacgatgccgtcgctgcccgctctcttgaggaggccgaagcgtacagccggagccagcttgaggagcaggccgctaggagcgccgagtacgggtcctctctacagagctctcggtccgaaatcgccgacttgaacgtgcggattcagaaactgcgctcgcagattctgagcgtgaaaagccactgtctgaagctcgaggagaacatcaaaaccgccgaggagcagggtgaattggccttccaagatgccaagactaagctggcccagttggaggccgccctacagcaagcaaagcaagatatggcacgacaactcagaaagtaccaggagctgatgaacgtgaaactggctttggatattgagattgcaacctacaggaaactggtggagggcgaggagggccgcatggatagcccgtccgccactgtagtgagtgccgtccaatctagatgtaagacagcagcctcaagatctggcctctcaaaggcgccgagcagaaaaaaaaagggttccaaggggcccgttattaaaatcacagagatgtccgaaaagtacttctcacaggagtccgaagtatccgagtag

SEQ ID NO: 121501 - DNA, 1518 bp, synthetic construct
  misc_feature 1..1518: note = Description of Artificial Sequence: Synthetic coding sequence
  source 1..1518: mol_type = other DNA
atgacatgcgggagtggctttgggggacgggcatttagctgcatctcagcatgcgggccccgccccggcagatgttgtataacggccgccccctataggggtatttcatgctacagaggcttgactggcggcttcgggtcccactcagtatgtggaggatttagagccggctcttgcggaaggtccttcggatatcggtcaggcggcgtgtgtggcccatcacccccctgcatcacgacagtatcagtaaatgagtctctgctgactcccctcaatttagaaattgatccaaatgcacagtgtgtgaagcaggaggagaaagagcagatcaaatccctaaacagcagatttgccgcatttatagacaaggtaaggttccttgaacagcagaataaactgttagaaactaagttgcagttctatcagaaccgagagtgctgccagtcaaacctggagcccttgtttgaagggtatatcgaaacactgaggagagaggcagagtgcgtggaagcggattcagggcgtctggcatccgaactcaatcacgtgcaagaggtactcgaggggtataaaaaaaagtacgaagaagaggttagtctgcgcgccactgcggagaatgagttcgtagctctcaaaaaggatgtggactgtgcttacctgaggaaaagtgaccttgaggctaatgtcgaggcgctgatccaggaaatcgacttccttagaagattatacgaagaggagatcctgatcttgcaaagccacatttccgacactagtgtcgtcgtgaaactcgacaattctcgggatttaaatatggactgtattatcgccgaaatcaaggcgcagtacgatgatatagtcacgaggtcgagagccgaagcagaaagttggtaccgtagcaaatgtgaagaaatgaaagccacggtcattcggcatggggagacgttaaggcgtactaaggaggaaatcaacgagttgaatagaatgatacaacgtctgacagcagaagtggaaaatgccaaatgtcagaacagcaagttggaagccgcagtggcacaatcagagcagcagggcgaggctgccctgtccgacgccagatgtaaactggctgagcttgagggagcattgcaaaaagccaaacaggacatggcctgccttatccgggagtatcaagaggttatgaacagcaagcttggcttggacattgagatcgcaacgtatagacgcttgctcgaaggcgaggaacaaaggctatgcgagggaatcggagccgtcaacgtgtgtgtgagctccagccgtggaggagttgtttgtggcgacctgtgtgtgagtggaagccggccggtcacagggagtgtgtgctcagctccctgtaacgggaacgtcgccgtgtcaacaggtctgtgtgcaccatgtggccagctgaatactacctgtggaggaggatcgtgtggggtcgggagttgtggtattagcagtctgggagtggggagttgtggctcttcttgcaggaaatgctag

SEQ ID NO: 121502 - DNA, 1455 bp, synthetic construct
  misc_feature 1..1455: note = Description of Artificial Sequence: Synthetic coding sequence
  source 1..1455: mol_type = other DNA
atgacctgtggaagcggttttggaggccgtgctttcagctgcatcagtgcttgtgggcctcgtccaggaaggtgttgcataaccgcagcaccctatcgcggcatttcttgctacagaggcttgaccggcgggttcggaagtcattccgtgtgcggcggattcagagcggggagctgtggcaggtcattcggttaccggtccgggggcgtgtgcgggcctagccccccatgtataacgaccgtgtcagtaaatgaatcactgctgacccccttgaatctggagatagaccccaatgcacagtgtgtcaagcaagaggagaaagaacagattaaatctttgaattcacgcttcgcggcctttatcgacaaggtccgcttcctcgagcaacagaacaagctgcttgaaactaaactgcagttttaccagaacagggaatgctgtcaatcgaatctggagcctctgttcgagggatacatcgagaccctccggagggaggctgaatgtgtcgaggcagatagtggccggctggcttcagaactgaaccacgtgcaggaggtcctcgaaggctacaaaaaaaagtacgaggaagaagtaagcctcagagcgaccgccgagaacgagttcgtcgccctaaagaaggatgtggattgcgcctacctaaggaagtcagatttggaagcgaacgtggaagcattgattcaggaaatcgattttctcaggagactgtacgaagaagagattctgatcttacagagtcatatatccgatactagtgtggttgttaagctggataactcgagggacctcaatatggactgtatcattgctgaaatcaaagctcagtatgacgatatcgtgaccaggagccgggccgaggcagaatcttggtacagaagcaagtgcgaggagatgaaagcaacagtgataagacacggcgaaacccttagacgaacaaaagaggagataaacgagctgaatcggatgattcagagacttacagcggaggtcgagaacgcaaaatgtcaaaactctaagttggaagcagccgtagcccagagtgagcagcaaggagaagctgctctttctgacgcgcgttgcaagctcgcagagcttgagggcgcgctccagaaggcaaaacaggacatggcctgcctcatcagggaatatcaagaggttatgaacagtaaattgggtttggacatcgagattgctacttacagacggcttcttgagggcgaggagcaaaggctctgcgaaggtataggtgccgtgaatgtgtgcgtcagcagtagccggggcggcgtcgtgtgcggcgacttgtgcgtgtcaggctcccggccagtgacagggagtgtgtgcagcgcgccttgtaatggcaacgtggcagtttcgaccggcctatgcgccccctgcgggcaagtaggttcttgcgggagctcatgtaggaagtgttag

SEQ ID NO: 121503 - DNA, 1482 bp, synthetic construct
  misc_feature 1..1482: note = Description of Artificial Sequence: Synthetic coding sequence
  source 1..1482: mol_type = other DNA
atgacatgtggattcaactcgatcggttgcggattccgcccaggaaatttctcctgcgttagtgcttgcggacctcgtccttcccggtgctgtatcaccgccgccccataccgcggcataagttgttaccgtggtttaaccggcggtttcggatcacatagcgtatgcggagggttccgtgctggcagttgtggacggagttttggatatcgaagtgggggggtctgcggtccgtcaccgccatgtattactaccgtatccgttaatgagtctctgttgacgcccctgaatctggaaatcgacccaaacgctcagtgcgttaagcaggaagaaaaagaacagatcaaatcactgaatagcagattcgccgccttcattgataaggtgcgattcctggaacagcagaacaaacttcttgagacaaaactccagttttaccagaacagagagtgttgtcagtcaaacctcgagcccctattcgccggctacattgagacactgcgcagggaggccgaatgcgtggaggctgactccggaaggctcgccagcgaattgaaccacgtccaggaagtactggagggttataaaaaaaaatacgaggaggaggtggcgttgagagcgaccgcagaaaacgagttcgtggcactcaagaaggacgtggattgtgcctatttaaggaaatccgatcttgaggccaatgtggaagccctcattcaggagatagattttctgaggcgcctctacgaagaggagatcaggatccttcagagtcacatcagcgacacatccgtggtggtcaagctcgataattctagggacttaaacatggattgcatcgtggctgaaattaaagcccaatacgatgacattgcaacacgctcacgtgccgaggctgagtcctggtacagatccaagtgcgaggaaatgaaggctacagtcatacgccacggggagactctgaggagaaccaaggaagaaataaacgaactaaatcgtatgatccagcgcttgacagctgaggtggagaacgccaagtgtcagaacagcaaattggaggcagctgtggcacagtcagagcagcagggagaggccgccctgtcagacgctaggtgcaaactagctgagttagagggggccctccagaaagcaaaacaggacatggcctgcctgatccgggagtatcaggaagtgatgaatagcaaactgggcctggacattgagatcgcgacctaccgtcgcctattggagggggaagaacagaggctctgcgaaggagttgaggccgtgaacgtctgcgtatcctcttcaagagggggcgttgtatgcggcgacttgtgtgtctccggcagtcgaccagtcaccgggagtgtctgttctgcaccatgcaatggtaatctcgttgtgtctactggactgtgcaagccctgtggacagctgaatactacatgtggcggggggtcatgcggtcaggggaggcactag

SEQ ID NO: 121504 - DNA, 1524 bp, synthetic construct
  misc_feature 1..1524: note = Description of Artificial Sequence: Synthetic coding sequence
  source 1..1524: mol_type = other DNA
atgagttgcaggtcctaccgcatttccagcggctgcggagtgacccggaacttttcatcttgctcagccgttgcgccaaaaactgggaacaggtgttgtatcagcgccgccccatacagaggcgtgagttgttatcgtggtctgaccggctttggttcccggtccctatgtaatctggggagctgtggtccgagaatcgcggtaggcggcttccgagcaggatcatgcgggaggagcttcggataccgttccgggggcgtctgcgggccctccccaccatgcattacgactgtgagcgtcaatgagtccctcttgacacccttgaaccttgagatcgaccccaatgcccaatgtgtgaagcaggaggagaaggagcagattaagtccttgaattcgcgcttcgcagcgttcatcgacaaagtgcgcttccttgagcagcaaaacaaactactggagacgaagtggcagttttaccagaaccagcgatgttgcgagtctaatctcgagcctctcttctcagggtacatagagacgctgcgcagggaagctgaatgtgttgaggcagatagtgggagactggcatctgagctgaaccacgtgcaggaagtgctggagggttacaaaaagaaatatgaagaggaagtcgctttgagggctaccgccgagaatgagttcgtggtgctgaaaaaagacgtagattgtgcctacctccggaaaagcgacctggaagctaatgtggaggcattagttgaggaaagctcctttttgagaagattgtacgaggaggaaattagggtgctgcaagcccatatatcagacactagcgtcattgtcaagatggacaattccagagacctgaacatggattgtatcatagccgaaataaaagcgcagtacgacgatgtcgcctcaagatcccgcgcggaagccgaatcttggtaccgatctaaatgcgaagagatgaaagccaccgtgataagacatggggaaacgcttaggaggaccaaagaggagatcaacgaattgaaccgcatgattcagcgcctgacggccgaaatcgagaacgctaaatgccagcgcgctaagctcgaggcagcagtggctgaggccgaacagcaaggagaggcggctttgtctgatgctagatgcaaactcgcggagctagaaggagcattgcagaaggctaagcaggatatggcctgcctcctgaaagagtaccaggaagtgatgaatagcaagttagggcttgatatcgagatcgctacctaccgccgcctgctggagggcgaggagcatcgactctgcgaaggcgtgggtagcgtcaatgtgtgtgtgtccagcagtcgcggcggcgtgtcatgcggcggactaagctactccacaactcccgggcggcagatcaccagcggtccctccgcgatagggggcagtataacagtggttgctccagatagctgcgcaccctgccagccaagaagcagctctttcagctgcgggtccagcaggtcggtccggttcgcgtag

SEQ ID NO: 121505 - DNA, 888 bp, synthetic construct
  misc_feature 1..888: note = Description of Artificial Sequence: Synthetic coding sequence
  source 1..888: mol_type = other DNA
atggtgttcaaggtgcaattcttaagttctcggccctcacttagtcacactcaggacgtggactgtgcctacttgcgcaaaagcgatctagaggctaacgtcgaagcccttgtcgaggagtcttcttttctgaggagattatacgaggaagagatccgcgtcctgcaagcccatattagtgatacttccgttattgtcaagatggacaatagcagagatcttaatatggattgcattatagccgagattaaagcacagtacgacgatgttgcctcacgctctagggccgaggcagagtcgtggtatcggtcaaagtgcgaggaaatgaaggccaccgtgataagacacggcgagaccctgaggcgaaccaaggaggagatcaatgagctaaatcgtatgatccagaggctcacagcggaaattgaaaacgccaagtgccagagggcaaagctcgaggctgcagttgcggaagctgagcagcaaggcgaggccgctctttctgacgctaggtgcaagcttgcagaactcgagggggcacttcagaaggcaaagcaggatatggcctgtctgctcaaagagtaccaggaagtcatgaactccaagttaggtctggacatcgagattgctacatacagacgattgcttgagggggaggaacaccgcctatgtgagggcgtggggagtgtgaatgtgtgcgttagcagttccagaggcggagtcagctgtgggggtctgtcctactcaacaaccccaggccggcagataacatcaggccctagcgccattgggggctctatcaccgtggttgcacccgactcatgtgctccctgccaaccaagatcatctagctttagctgcggatccagtagaagcgtgcggtttgcttag

SEQ ID NO: 121506 - DNA, 1461 bp, synthetic construct
  misc_feature 1..1461: note = Description of Artificial Sequence: Synthetic coding sequence
  source 1..1461: mol_type = other DNA
atgacgtgcggtagctactgtggtgggagagccttctcttgtatttcagcttgtggccccagacccggcaggtgttgcatcaccgccgccccttatagagggatttcctgttacaggggactgacaggcggctttggatcccattctgtgtgtggtggattcagggctgggtcttgtggtaggtctttcggatacagatcaggaggagtgtgcgggccctctcccccatgtatcactacagtatctgtgaatgaatcactgctgacacctctaaatctcgagattgatcccaatgcacagtgcgtgaaacaggaagagaaagagcagataaaaagccttaactctcggtttgctgcatttatcgataaggtccgctttcttgagcaacagaacaagttacttgagacaaagctgcagttctaccagaaccgggaatgctgtcagtctaacctggagcccctgtttgaggggtacatagagacccttcgtagagaagccgagtgcgtggaggctgattccggcagattagcgtcagagctaaatcacgtccaggaagtgctggagggctataagaagaaatacgaagaagaggtgtctctgagagcaacagcggaaaacgaattcgtcgcactcaaaaaggacgttgactgcgcttatctgcgtaaatccgatctcgaagctaatgtcgaggcactcatccaggaaatcgatttcctgagaagactgtacgaagaggagatcagagttctccagtcacacatctccgataccagcgtggtggtgaagctggataacagtcgggacctgaacatggattgtattatcgcagagattaaggcccagtacgacgatattgtaactcgatcgcgggccgaggcggaaagctggtatcgcagcaagtgtgaagagatgaaggctactgtgatacggcacggagaaaccttgaggcgaaccaaagaagagattaacgagttgaaccggatgatccaacgtctcacggccgaggtggagaacgctaagtgtcagaactcaaagctcgaggctgccgtagcccagtccgaacaacagggtgaggccgccctgtctgatgcccggtgtaaactggccgaactggagggcgcgctgcagaaggctaagcaggacatggcatgcctgattagagagtatcaagaggttatgaatagtaaactgggcctggatatagagatcgcaacttatagaagactacttgagggagaggaacaaaggctgtgtgagggcgtgggatccgtaaacgtgtgtgtgagtagtagtcgaggcggggtcgtgtgtggagacctgtgtgccagtactactgcccccgtggtatccacccgtgtttcgtctgtgccctccaacagtaatgtcgtggtggggacaaccaatgcctgcgcaccaagtgctagggtgggtgtgtgcggtggatcttgtaaaagatgctag

SEQ ID NO: 121507 - DNA, 1872 bp, synthetic construct
  misc_feature 1..1872: note = Description of Artificial Sequence: Synthetic coding sequence
  source 1..1872: mol_type = other DNA
atgtcatgtcgccagtttagctcttcttaccttagcagatccggcggcggggggggcggaggtctcggaagcgggggctctatcagaagtagttattctcgattcagcagttccggcggtggcgggggtggcggtcgcttctcctccagctctggatatgggggcggaagttctagggtatgtgggcggggcggcggggggtcttttggctatagttacggggggggctcagggggtggctttagtgcaagctcgcttggcgggggattcgggggaggttccagagggttcgggggggcctccggaggtggatatagtagctccggtggctttggcgggggtttcggcggtggaagcggaggagggtttggtggtgggtatggctccgggttcggcgggtttggcggcttcggtggaggagccggcggaggggatggaggcatcctgactgcaaacgaaaagtcaacaatgcaagagttaaactcgcgacttgccagttatctggataaggtgcaagccctcgaagaagcgaataacgatctcgaaaataaaattcaggactggtatgacaaaaagggccccgctgccattcagaagaactactcaccatattataataccattgacgatctgaaggatcagatcgtggacctaacagtgggcaataataagacactgcttgatatagataatactagaatgacattggacgatttccgcattaaatttgagatggagcaaaatctccggcaaggggtcgatgccgacatcaatggtctcagacaagtgctggacaacttaacaatggagaaaagtgacctggagatgcagtacgagactcttcaggaagagcttatggcattgaagaaaaaccacaaggaagagatgagtcagctcactggacagaacagcggtgatgtaaatgtggaaattaacgtcgctccgggcaaggatctaactaagacattgaatgacatgaggcaggaatatgaacaacttatcgcaaagaacagaaaggacatagagaaccagtacgaaacccagattacccagattgagcatgaggtctcctccagtgggcaggaagtgcagagcagtgcaaaagaggttacacagctgcggcacggtgtgcaagaactggaaattgagttacaatcccagttaagtaagaaggctgcccttgagaagagcttggaagacactaagaatcgctattgtggacagctccaaatgattcaggagcaaatttccaatctggaggcccaaatcacagacgtgaggcaggaaatagaatgtcaaaatcaggaatattcgctgctgttgtcaatcaaaatgcggctcgagaaagagattgagacctatcataacctgttagaaggcggacaggaagactttgagtctagcggcgccggcaagataggacttggtggacgagggggaagcggaggaagctacggtagagggtccaggggggggtctggcggcagttacggtggtggtggctctggcggcggctacggcgggggatccggcagcaggggagggagtggcggtagttacgggggaggctctgggagcggcgggggctcgggaggaggctacggaggagggtcaggtgggggacattccgggggatccggtggcggccatagtggtgggtctggcggcaattatgggggcggatcaggaagtggtggcgggtcaggcggaggatatggtggcggatcaggatcccgcggtggcagtggagggtcccatgggggaggaagcggttttgggggcgagtccggcggatcgtacgggggcggcgaggaagcaagcgggagcggggggggatacggaggcgggtctggtaaaagcagccacagttag

SEQ ID NO: 121508 - DNA, 534 bp, synthetic construct
  misc_feature 1..534: note = Description of Artificial Sequence: Synthetic coding sequence
  source 1..534: mol_type = other DNA
atggcatgttgtcaaacttcattttgcggcttcccgtcttgtagcacatctggaacttgtggatcctcatgctgtcagccatcctgttgcgagacttcttcatgccaacctcggtgctgcgagactagctgttgccagccaagttgttgtcaaacttctttctgtggattcccatccttcagtacaggcggcacttgcgattcctcttgctgtcaaccgagctgctgcgaaactagctgctgtcagccttcttgctaccagactagtagctgtggtacagggtgcggaatcgggggaggtatcgggtatggacaggagggcagttcgggggctgtgtctacaagaatccgatggtgtcggccagactgccgcgtggaaggaacttgccttccaccctgctgcgttgtgtcatgtaccccaccctcctgctgtcagctgcatcacgccgaggcaagctgttgccgcccatcttactgcggccaaagttgctgtcgccccgtttgctgctgttactgtagcgagccgacatgttag

SEQ ID NO: 121509 - DNA, 504 bp, synthetic construct
  misc_feature 1..504: note = Description of Artificial Sequence: Synthetic coding sequence
  source 1..504: mol_type = other DNA
atggcttgctgccagacttctttctgtgggttcccttcatgcagcacgtcaggaacatgcgggtcttcttgttgtcagcctaggtgttgtgaaactagctgctgccagccctcttgctgccagactagcttctgcgggtttccctctttctcgacaggaggcacttgtgattcaagctgttgtcaacctagttgttgtgaaaccagctgctgtcaaccatcgtgttatcagacctcttcctgcggtaccggctgtgggatcggaggcggcatcggttacggtcaggaggggtctagcggcgcggtttccacaagaatcaggtggtgtcggcccgactgccgcgtcgagggcacctgcctgcccccttgttgtgtggtgtcctgtacacccccctcctgttgtcagctccaccatgctgaagctagctgttgccggccttcttactgcggacaatcatgctgccgccctgtgtgttgctgttattgctctgagcccacatgttag

SEQ ID NO: 121510 - DNA, 492 bp, synthetic construct
  misc_feature 1..492: note = Description of Artificial Sequence: Synthetic coding sequence
  source 1..492: mol_type = other DNA
atgtccttcaactgctccactagaaattgcagttcccgccccattggaggacgatgcatcgtccccgtcgcacaagtcactaccacatcgacgacagacgccgattgtttaggagggatttgtcttccgtcttcttttcagactggctcatggctcctggaccattgccaggaaacatgctgcgaacctacagcctgtcagcctacatgttacagacgaacctcatgtgtcagtaatccctgtcaagtcacttgcagccgccaaactacctgtatctctaatccttgttccaccacctactctagacccctcactttcgtctcatccggttgtcagcctttggggggcatcagctcagtgtgccagcctgtgggaggcataagcactgtatgtcagccagtcggaggcgtcagcactgtgtgtcagccagcttgcggcgtgtcaagaacataccagcagagttgcgtgtcatcatgcaggaggacgtgttag

SEQ ID NO: 121511 - DNA, 504 bp, synthetic construct
  misc_feature 1..504: note = Description of Artificial Sequence: Synthetic coding sequence
  source 1..504: mol_type = other DNA
atgacctgctgccagacctccttttgtggctacccttcttgctcgacatcaggtacctgtgggtccagctgctgtcagccaagttgctgcgaaacatcatgctgccagccctcttgttgtcagaccagtttctgcggattcccaagtttcagcactagcggtacctgcagttcttcctgctgccaacccagctgctgcgaaacatcttgttgtcagccttcctgctgtcaaaccagtagctgtggcacagggtgtggtattggtggtggtattggttacgggcaggaaggaagctctggagcggtcagcacgcgtatccggtggtgtcgtccagactgtcgagtggagggcacctgcttgccgccttgttgcgtagtctcatgtacccctccaacttgttgccagcttcatcacgcagaagcctcctgttgtagaccaagctactgcgggcagagttgttgccgtccagtctgttgttgctatagctgtgagccaacctgttag

SEQ ID NO: 121512 - DNA, 366 bp, synthetic construct
  misc_feature 1..366: note = Description of Artificial Sequence: Synthetic coding sequence
  source 1..366: mol_type = other DNA
atggcttcctgttctaccagcgggacatgcggctcttcctgttgccaacccagctgttgtgaaaccagttgctgtcagcccagctgctgtcaaacatctagttgcggcaccgggtgtgggattggtggtggaattggctacggacaggagggttcaggtggaagtgtgtcaacccgtatccgctggtgtcacccggattgtcacgtggaaggcacttgcctgccgccttgctaccttgtcagttgcacccccccaagctgctgccagttacatcacgctgaggcctcctgctgccggccctcgtactgtgggcaatcttgctgcaggcccgcctgctgttgccactgttgtgagccgacgtgctag

SEQ ID NO: 121513 - DNA, 837 bp, synthetic construct
  misc_feature 1..837: note = Description of Artificial Sequence: Synthetic coding sequence
  source 1..837: mol_type = other DNA
atgggctgctgtggatgtagtgggggttgcggttccagctgcgggggttgcggctcgggatgcggcggatgtgggtctgggtgtggaggctgcgggtctggatgtggtggttccggctccagttgttgtgtcccagtctgctgttgtaagcctgtgtgttgtagagtacctacatgtagctgctcatcgtgcgggaagggcggttgcggctcatccggtggatctaaaggcggatgcgggagttgcggagggtgcaaaggcggttgcggatcttgcggtggaagcaaagggggatgcgggagctgtggcggcagtaaaggcggctgcggctcatgcgggggcagtaagggcggctgcgggtcaggttgtggcggctgcgggtcctcatgctgcgtgcctgtatgctgctgtaaacccatgtgttgctgtgtgccggcctgttcttgctcatcttgcgggaaaggaggttgcggaagttgtggctgttccaaaggagcctgcggcagctgcggcgggtccaaaggcggttgcggcagctgtggagggtgcaagggggggtgtggttcatgcggtggaagtaaaggaggttgcggatcaggctgcggaggttgtgggtccggctgcggggttccagtttgttgctgtagttgctcatcttgtggtagctgtgcaggctcaaagggcggctgcggctcttcctgctcccagtgttcttgctgcaaaccttgctgttgcagcagcggatgcgggtcatcatgctgccagagttcctgctgtaaaccgtgctgtagccaaagctcatgctgcgtacctgtttgttgccagtgcaaaatatag

SEQ ID NO: 121514 - DNA, 510 bp, synthetic construct
  misc_feature 1..510: note = Description of Artificial Sequence: Synthetic coding sequence
  source 1..510: mol_type = other DNA
atgggctgttgcggctgtagcgggggatgcggcagctcttgcgggggctgcgattcctcctgcggctcatgcggtagcggatgcaggggctgcgggccgagttgttgtgctccagtgtactgctgcaagcccgtttgctgttgcgtcccagcttgctcatgttcttcctgcggcaagcggggatgtggctcctgtggaggaagtaaaggtggttgcgggagttgcggatgttcccaatgtagctgctgtaagccctgctgctgctccagcggctgcggtagctcctgctgtcaatgttcatgttgcaagccatactgcagtcagtgctcatgttgcaaaccatgttgctctagttccgggaggggaagcagctgttgccaatcgtcctgctgcaaaccatgctgtagctcttccggctgcggctcctcctgttgtcaaagcagttgctgtaagccttgctgcagccagagccggtgttgcgtgccggtctgttatcagtgtaaaatctag

SEQ ID NO: 121515 - DNA, 1740 bp, synthetic construct
  misc_feature 1..1740: note = Description of Artificial Sequence: Synthetic coding sequence
  source 1..1740: mol_type = other DNA
atgtgcgatcagcagcagatccagtgccgattacctttgcagcagtgctgcgtcaaagggcccagcttctgctcgtcccagtccccctttgcccagtcccaggtggtggtacaggctccttgtgagatgcagatagttgactgtcccgcatcctgccctgtacaggtctgccaagtgtctgaccaagcgccctgccagagccagaccacccaggtgaaatgtcagtcaaaaacaaaacaggtaaagggtcaggcacaatgccagtccaagacaacgcaggttaagggtcaggcagcgagccagtctcagacatcgtccgtgcagtcacaggccccatgccagtctgaggtatcctacgtgcagtgcgaagccagtcaacctgtgcagacatgcttcgtggagtgcgcacccgtctgctatacagagacctgttacgtggaatgccccgtgcagaactatgtgccgtgcccggccccacagccagttcaaatgtatcgaggccgcccagcggtctgccagccacaaggcagattctctacacaatgtcagtatcaaggaagctactcatcgtgcggaccacagttccagtcaagggccacgtgcaataactacactccccagtttcagctgcgtccatcttatagcagttgcttcccccagtataggtcaaggacttcattctccccgtgtgttccacagtgtcagacacaaggatcatacggatccttcactgaacagcatcgcagtagatccacatcaagatgcctccctcccccacgtaggctgcagctgtttccccgaagttgctccccccctagaaggtttgagccatgtagttccagttacctgccgttaagaccctccgaaggctttcctaattactgcacaccacctaggcgtagcgagcccatatataatagccgctgtcctcgaagaccaatttccagttgctcccagcgtagaggaccaaagtgtcgcatagaaatcagctctccatgctgcccacgacaggtgcccccccagcgctgccctgtggaaatccctcctatcaggcggcgcagccagtcatgcggccctcaaccttcttggggcgcctcatgtcctgagcttcggccgcatgtggaaccacgacctctaccctcattctgtccacccaggaggctggatcagtgtcccgagagcccactgcaaagatgcccccctccagcaccacggccgcgattaagacccgagccatgcatatccttggaacctcgaccacgccccctgcctcgtcagctcagtgaaccctgcctctacccagaacccttgcctgcactcaggcccaccccaagacctgtgcccctgccacggccaggccagtgtgaaatccccgagccccggccctgtctgcagccttgtgagcaccccgaaccctgtcctcgcccagagcctatccccctgcccgcaccatgtcccagcccggaaccatgtcgagaaacctggcggagtcctagcccatgctggggcccaaatcctgtgccttacccgggggaccttggttgccacgagagctctcctcatagactcgatacagaagccccctactgcggcccaagtagctacaatcaagggcaggaatccggagccgggtgtggacctggcgacgtatttcccgagcggagagggcaggacggccacggcgatcaggggaatgcctttgccggggtaaaaggagaggccaagtcagcctatttctag

SEQ ID NO: 121516 - DNA, 1059 bp, synthetic construct
  misc_feature 1..1059: note = Description of Artificial Sequence: Synthetic coding sequence
  source 1..1059: mol_type = other DNA
atggctggcactatctgtttcattatgtgggtcctgttcatcacagacacagtgtggtccaggtccgtcaggcaagtgtacgaagtccatgactcggatgactggacgatccatgactttgagtgtcccatggagtgcttctgtcctccaagctttccaaccgctctttactgtgaaaaccgcggcctgaaggagatacccgccattccatctagaatatggtacctatacctgcagaataacttaatcgaaacgatcccggagaagccattcgagaacgctacacagctgcggtggatcaatctgaataagaacaagatcacaaattacggtatcgagaaaggagccctgtcccagctaaagaaactgctctttctgttcctggaggataacgaactggaggaggtgccatcccccttgcctcggtcattagaacaactacagttagctagaaacaaagtctcccgcattccacagggaacgttttcaaacttggaaaatctgacgcttctcgaccttcagaataacaagctcgtcgataacgcctttcagcgcgatactttcaaagggctcaagaacctcatgcagctgaatatggccaaaaacgcactgagaaacatgcccccgcgcctaccggctaacactatgcagctgtttctcgacaacaactccatcgaaggtattccggaaaattactttaatgtcattcctaaagtggcgtttttgcgtctgaaccacaacaaattaagcgacgagggactgccttcacggggtttcgacgtcagctccatcctcgacctccagctgagccataaccagctgaccaaggtccctcggatctccgcacatcttcaacatttgcatttggatcataataagattaagagtgttaacgtgtctgtaatttgtccgtcccccagtatgctgcccgctgaacgcgattcattctcctatgggccgcatcttcgctatctgagactcgatgggaacgagattaagcctccaatcccaatggcactgatgacctgcttcagactactgcaggcggttattatttag

SEQ ID NO: 121517 - DNA, 897 bp, synthetic construct
  misc_feature 1..897: note = Description of Artificial Sequence: Synthetic coding sequence
  source 1..897: mol_type = other DNA
atggaagagaaacagatcctctgcgtgggccttgtcgtgctcgatgtaatctctcttgtcgacaaatacccgaaggaagatagcgaaattcgctgcctgagccagcgctggcagcgcgggggcaacgccagtaatagttgcaccgtcctgagtttgctgggagcgccgtgcgctttcatgggcagcatggccccaggacacgtggcagatttcctggtggcggattttaggcggaggggagtcgacgtgagtcaggtcgcatggcagagtaagggggacacacccagctcttgttgtatcataaacaattccaacggcaacaggacgatcgtgctgcatgacacgtccctgcccgatgtgagcgcgacagactttgagaaagtggacctgacacagtttaaatggatccacattgaaggcagaaacgcgagtgaacaggtcaagatgttgcagcgcatcgatgctcacaacacacgacagccccctgaacagaaaatccgagtctcggtggaggtagaaaagcccagggaggaactctttcagctgtttggctacggggatgttgtgttcgtatcgaaagatgtcgccaagcatctgggcttccagtcagccgaagaagcactgcgtggcctgtatgggcgtgtgaggaaaggcgcggtgctcgtttgtgcttgggctgaggaaggcgccgatgcattaggtccagacggcaagctgctccacagcgatgcctttcccccccctagagtggtcgacaccctgggagctggagatacatttaacgcatcagtaattttcagcctgagccagggcagatcggtccaggaggctctgaggttcggatgtcaggtggctggaaagaaatgcgggctgcaagggttcgacggcattgtctag

SEQ ID NO: 121518 - DNA, 897 bp, synthetic construct
  misc_feature 1..897: note = Description of Artificial Sequence: Synthetic coding sequence
  source 1..897: mol_type = other DNA
atggaggaaaaacagatcttgtgtgtcggcttggtggtgctggacgtgatcagcttagtggacaaataccccaaggaagactcagaaattcggtgcctctcacagcgatggcaacgtgggggcaacgcttcgaatagctgcaccgtgctgtctctcctgggcgccccctgcgctttcatgggtagcatggcacctggtcacgtggccgattttgtcctggatgacttgcggcgatacagcgtagacctaagatacactgtattccaaactacagggagcgttccaatcgccactgtcatcatcaacgaagcatccggctcaagaaccattctctactatgaccgttcgctccccgacgtttcggccacagatttcgaaaaggtggatttgacccagtttaagtggattcacatcgaggggcgcaatgcgtcagagcaggtgaagatgctgcagagaatagacgcacacaatacgagacaacccccagagcagaaaatccgagtgtcagtggaagtggagaaacctagggaggaactgtttcagctgttcgggtacggtgacgtcgtgtttgtgagcaaagacgtagcaaaacatctgggcttccaaagcgctgaagaggccctgcgagggctgtatggccgtgtacgtaaaggtgctgtgctcgtatgtgcttgggcagaggagggtgccgacgcccttggacctgacggcaagctcctacattcggatgcgttcccgccacctagagtggttgatacgttaggtgccggagatacgttcaatgcctccgtcatattttctttatctcaaggcaggtccgttcaggaagcactcagattcggttgtcaagttgccggaaagaagtgcggcctgcagggcttcgatggcattgtttag

SEQ ID NO: 121519 - DNA, 1041 bp, synthetic construct
  misc_feature 1..1041: note = Description of Artificial Sequence: Synthetic coding sequence
  source 1..1041: mol_type = other DNA
atggaggagaaatacctgcccgagttgatggccgaaaaggattctcttgatccttcgttcacacatgctttgcgccttgtgaaccaagaaattgaaaagtttcagaaaggggaaggcaaagacgaggaaaagtacatcgatgtcgtcataaacaaaaatatgaaactgggccagaaggttctcattcccgtaaaacagttccccaagtttaattttgtgggtaagctgctgggcccccgcgggaattctctcaaaaggctgcaggaggagactctcaccaagatgtcaatcctgggaaagggcagtatgcgagacaaagctaaagaggaggagttacggaagtctggagaagcaaaatattttcatctgaatgacgaccttcacgtactcattgaggtgttcgctcccccagctgaagcatacgcacgcatgggccatgctctggaggaaatcaaaaagttcctcattccagattacaacgatgagatccgacaggctcagttacaggagttgacatacctcaacggaggctcggagaacgccgacgtcccagtggttcgcggcaaacctaccctgagaacccgcggcgtgcccgcacctgccattacacgtgggcgcggcggggtcactgcacgcccagtgggcgttgtggtcccacgaggcacccctacccctaggggcgtgctatccactcgtgggcctgtttcgcgcggtcggggactactaactccaagggccagaggagtacccccgacaggctatcgccctccccccccaccgcccactcaagaaacttacggtgaatacgattatgatgacggctatggaaccgcctacgacgagcagtcttacgatagctatgataactcgtactctaccccggctcagtccggggcggattattacgactatgggcacggcctgagcgaggagacctacgattcctacgggcaggaagaatggaccaattccaggcacaaggcaccctctgccagaacagcaaagggcgtctatcgcgaccagccgtacggcaggtactag

SEQ ID NO: 121520 - DNA, 495 bp, synthetic construct
  misc_feature 1..495: note = Description of Artificial Sequence: Synthetic coding sequence
  source 1..495: mol_type = other DNA
atggacatgggaacatcagcccttagtaagaagccctggtggacacttccccagaacttccacgcacccatggttttccatatggaggaagatcaggaggagctgatattcggtcacggagatacatacttacgatgtatcgaggttcactctcatactctaatccagctggaatcctggttcaccgccaccggtcagacccgcgtgacagtggttggaccccaccgggcgagacaatggttacttcacatgttctgctgcgtcgggtcgcaggattcttaccaccacgcccggggattggagatgctggagcgtgtgaggtctcaacctctgacgaatgacgacttggtgacttcaattagcgttccaccctacacaggcgaccttagtttggccccccggatttccgggacagtctgcctctcagtcccacagccctctccctatcaggtgatcggctgtagcggctttcacctgtcaagcttatacccatag

SEQ ID NO: 121521 - DNA, 714 bp, synthetic construct
  misc_feature 1..714: note = Description of Artificial Sequence: Synthetic coding sequence
  source 1..714: mol_type = other DNA
atgttgtctgcgtttcagcgccttttcagagtgctgtttgtcatcgagactgtgagtgaatacggggtccttatctttatatacggctggccgtttctgcaaactctcgccatgctgctcattggcaccgtctcatttcatctctggatcagacgaaaccgggaacgaaattcacgaagcggaaagacccgctgtcgaagcaagcgttcggagcagtcaatggacatgggtacaagtgcccttagcaaaaaaccatggtggacattgccacagaatttccatgctccaatggtttttcacatggaagaagatcaagaagagctgatcttcggccacggcgatacatatctacgctgtatcgaagtgcactcgcacacccttatccaactggagtcgtggtttacagcaaccggccagacacgggttaccgtggtcggaccccaccgggccaggcagtggctgctgcacatgttctgctgcgtggggtctcaagactcataccaccacgctagagggctggagatgctggagcgagtgaggtcccagccactaaccaatgacgatctagtaacctccatttctgtgcctccctacactggagatctgtcactggccccgaggatttcaggcacagtgtgcctctcagtcccacagccctccccatatcaggtcataggatgctctggctttcatctttcctctttgtacccctag

SEQ ID NO: 121522 - DNA, 297 bp, synthetic construct
  misc_feature 1..297: note = Description of Artificial Sequence: Synthetic coding sequence
  source 1..297: mol_type = other DNA
atggatatgggaaccagcgccctcagtaaaaaaccttggtggacactgccacagaattttcatgcccccatggtattccacatggaggaggatcaagaggaattgatttttgggcatggggatacgtatctccgatgcatcgaagtgcacagtcacactttaatccagctagagtcctggtttaccgccaccggccagactagagtcacagtcgtcggaccccaccgcgccaggcaatggctcctgcacatgttttgttgtgtcggctctcaggatagttaccaccatgcacgctag

SEQ ID NO: 121523 - DNA, 2133 bp, synthetic construct
  misc_feature 1..2133: note = Description of Artificial Sequence: Synthetic coding sequence
  source 1..2133: mol_type = other DNA
atgtccgattacagcacaggcggcccgccgccaggccctccaccacctgccgggggagggggaggcgctgggggcgcggggggaggacctccaccagggcccccgggggccggggatagagggggaggtggaccaggcggaggaggccctggcggcgggtccgccgggggaccttcccagccaccgggcgggggtgggccaggtatcagaaaagatgcctttgcggacgctgtgcagcgcgcacggcagattgccgctaagatcgggggtgacgccgccactaccgtgaacaacagcacaccggactttggtttcggagggcaaaagcgccaactggaggacggcgaccagcccgagagtaaaaaactggccagtcagggggactccattagctcacaactggggccaatccaccctcctccgcgcacttccatgactgaggaatatagagtgcccgatggcatggtcgggctgataatcgggcgagggggtgagcaaataaacaagattcagcaggatagtggttgtaaagttcagatcagtccagatagtggaggtttacctgaaagaagtgtgtccctgactggagctcccgagtccgtgcagaaggccaagatgatgctggatgacattgtgtcccgtggccgcgggggcccacccggccagttccacgataacgctaacggaggccaaaatggaacggttcaggaaatcatgattcctgcaggtaaggctggcctcgtcataggaaagggaggggaaacaatcaagcagctccaagaacgagctggtgtgaaaatgattctcattcaggatggatctcaaaataccaacgtcgataagcccctgcgtataatcggagatccttataaggtgcagcaggcatgtgagatggtgatggatatccttcgcgagcgagaccaaggcggctttggcgatcgaaacgaatatgggtctcgcattggcggtgggattgatgtgcccgtccctcgtcatagcgtgggagttgtgattggacggtccggagaaatgattaaaaagatacagaacgacgccggcgtgcgaatccagtttaagcaagacgacggaacgggaccagagaaaattgcacatattatgggcccaccagataggtgcgagcacgctgcgagaatcatcaatgatctattacaaagtctgcgctccgggcctccagggccgccgggaggacctgggatgccccctggcggacgtggccgggggcgcggacagggtaactgggggccacctgggggggaaatgaccttctctatccccacccacaagtgtggattggtcattggaaggggcggggaaaacgtcaaagccatcaaccagcagacaggcgcattcgtggaaattagccgccagctgccacccaacggcgaccccaactttaagttatttattatccgagggtcaccacagcagatcgaccacgctaaacaactcatcgaagagaagatcgaagggcctctttgtcccgtgggccccggacccgggggacctggcccagccggacctatgggaccgtttaatcctggaccatttaaccaggggccacctggcgccccaccccatgctggaggcccgccaccacaccagtacccgccacaaggatggggcaatacctacccacaatggcagccacccgccccgcatgatccgtccaaggccgcggctgccgcagctgaccccaacgcagcatgggcggcatattattcgcactactatcagcaacccccaggtccggtgcctggacctgcgcctgctccggccgctccccccgcccagggtgagcccccacagcctcctcccacgggccagagtgactataccaaggcctgggaggagtactacaagaaaatcggccagcagccgcagcaacctggtgccccgccacaacaggactatacgaaggcatgggaggagtactacaagaaacaggcccaagtcgctacagggggggggcccggtgctccacctggcttcctcgcgccgcccacagtttttcagcccctactctcttccgctctagcccagcttccccggccaagacctagccccctcccggggctggtgtgttgtctgttcatttgttcccgaggcgactag

SEQ ID NO: 121524 - DNA, 2136 bp, synthetic construct
  misc_feature 1..2136: note = Description of Artificial Sequence: Synthetic coding sequence
  source 1..2136: mol_type = other DNA
atgtcggactacagcaccggagggccaccacccgggcccccccctcccgccggcggcggcggcggtgccggaggtgctggtggaggtccacctcccggccctcctggtgccggtgaccgagggggtgggggaccagggggaggcggacccggggggggtagcgccgggggaccttcccagcccccagggggggggggtccaggcatcagaaaggatgccttcgccgatgcggtgcagcgggctcggcagatcgccgcaaagataggcggcgacgccgccacgacggtgaacaacagcacgcctgactttggatttggcggtcagaaacgtcagcttgaggacggcgaccaacccgagtctaaaaagttggcatctcagggggactcaatcagcagccaactggggcctatccaccctccaccacgtaccagtatgaccgaggaatacagggtgcctgatggaatggtcggcttgattatcggccgaggcggtgagcagataaataaaattcagcaggattctggttgtaaagtgcagatctcccctgattctggaggtttacccgagcggtcagtttcactgacgggagcgcccgaaagcgtgcagaaggcgaaaatgatgcttgatgacatcgtcagcagggggagaggtggtccgccagggcaatttcatgataacgccaacggcggccagaatggcacagtccaggagattatgatcccggccgggaaggccggtttggtgattggtaaaggcggggaaactatcaagcagctgcaggaacgtgctggggtcaagatgatcctgatccaagacggttcccagaatacaaacgtggataagccactgagaatcatcggggatccgtacaaggtgcagcaggcctgtgaaatggtgatggacatcctgcgcgagcgggatcagggtggtttcggggaccggaacgagtacggttctagaattgggggcggaattgacgtgcctgtcccgagacactccgtgggcgtggtcattgggcgaagcggcgagatgattaagaagatacaaaatgacgcaggtgttcgcatccagttcaagcaggatgacggcactggcccggaaaaaatcgcccacataatggggccaccagaccggtgcgaacatgcggcccgcatcatcaatgatcttctgcaaagcctccggtccggaccacccggtcccccgggcggaccagggatgccccccggtggccgcgggaggggacgcggtcagggtaactggggacctcctggcggagaaatgacattttctattccaactcataagtgtggcctcgtgataggacgcggaggagaaaacgtgaaagctattaatcagcagaccggagcattcgttgagataagccggcagttgcccccaaacggtgatcctaacttcaagctcttcataatcaggggaagtcctcagcagatagaccacgctaaacagcttattgaggagaaaattgaaggacctctgtgtcccgtgggcccaggaccaggcggaccaggccccgcagggcctatggggccttttaaccccggaccgtttaatcagggccctccaggcgccccgccccacgcaggaggacctccaccccatcagtatccccctcaggggtggggaaacacctatccgcagtggcaaccacccgccccacacgatccgagtaaggcagctgctgccgctgctgaccctaatgccgcttgggctgcctactatagtcattactatcagcagcccccaggccccgtgccgggacctgcccccgcacctgccgctcccccagcccagggagagcccccccaacctccaccgaccggacaatcggattacacaaaggcgtgggaagaatactacaagaagatcggacagcaacctcagcagcctggagcacccccacaacaggactacaccaaagcctgggaagagtactacaagaaacaggcgcaggtcgcaacaggtggaggacccggtgctccaccaggtagccagcccgactacagtgccgcttgggccgaatattaccggcaacaagcagcgtattatggacagacccccggccccggaggtccacagcccccgcccacccagcaaggtcagcagcaggcccagtag

SEQ ID NO: 121525 - DNA, 1095 bp, synthetic construct
  misc_feature 1..1095: note = Description of Artificial Sequence: Synthetic coding sequence
  source 1..1095: mol_type = other DNA
atgtctgattacagtcccgggggtggtagcgcaggaggaccttctcagccacctggggggggcggaccaggcatacggaaagacgctttcgctgacgccgtccagagagcccgacagattgccgcgaagattggcggtgatgctgctactacggtcaacaatagtacacctgactttggattcggtgggcaaaaacgccaattggaggatggagaccaaccagaatccaaaaagctggcttcgcagggagatagcatctcttctcaactgggaccaattcaccctcccccacgcacctctatgacggaggagtacagagttccagacggcatggtcggactgatcatcgggcgcggcggcgagcagatcaataaaatacagcaggattctggatgcaaagtgcagatatctcccgactccggaggactgccggaaaggtcggtgtcactgacgggcgcacccgaaagcgtccagaaggcaaagatgatgctcgatgatattgtctctaggggacgaggcggtcctcccggccaattccatgacaatgcaaacggaggacaaaatggcacggtgcaggaaatcatgatccccgctgggaaagcagggctggtgatcggaaaaggtggcgaaactatcaaacagctgcaggagagagctggcgtcaagatgatcttgatacaggatggcagccaaaatactaacgttgataaaccattgagaattataggtgacccttataaagtacagcaggcatgcgaaatggttatggatattcttcgcgaacgggaccaaggggggttcggtgataggaatgagtatggcagccgtatcggcggaggcatagatgtgccagtaccacgccacagcgtgggcgtggtcattggtcgtagtggagaaatgattaagaagatccagaacgatgctggtgtccgcatccagtttaagcaagacgacggcacaggccccgagaaaattgcccacattatgggtccaccagatcggtgcgaacacgctgcccgcatcatcaatgatcctagtagctccagctttctactgcccacacctggccacaggcccagttgtctctccgggtag

SEQ ID NO: 121526 - DNA, 255 bp, synthetic construct
  misc_feature 1..255: note = Description of Artificial Sequence: Synthetic coding sequence
  source 1..255: mol_type = other DNA
atggatgatgatgcggcgccacgcgtggaaggcgttcctgtggcggtgcacaagcacgctctccatgacgggctgcgtcaagtggcaggacctggagccgcagccgctcacctgccaagatggccaccgcctcaacttgccgcttcccgtcgggaggcacccccgctgtctcaaagaccccatcgaacccagggcgcagggagccctcccgagactaacgaaaagctgaccaatcctcaggtaaaggaaaaatag

SEQ ID NO: 121527 - DNA, 822 bp, synthetic construct
  misc_feature 1..822: note = Description of Artificial Sequence: Synthetic coding sequence
  source 1..822: mol_type = other DNA
atgtctatgtctccaaccgtcattattctagcctgccttggctttttcctcgatcagtcagtgtgggcccacgtgggcgggcaggataagcccttttgttctgcctggcctagtgctgtcgttccccaaggcggccatgtaacactgcgctgtcattaccgtcgggggttcaatatctttacgttgtacaaaaaagatggggtccctgtcccggaactgtacaacaggattttctggaattcctttcttattagccctgtgacccccgcgcacgccggtacctacaggtgccgcggcttccatccgcactcacctaccgaatggagtgctcctagcaaccctttagtcataatggtaacgggcctctacgaaaagccttcgttgacagcccgtccaggccctaccgtgagagccggggagaatgtgaccctctcatgctcatcccagtccagcttcgacatttatcatctgtctagggaaggcgaggcccacgaacttcgtcttccagcagttccttcaataaacggcacatttcaagcagacttcccccttggtccagccactcacggtgagacgtacagatgtttcggatcattccatggctcgccttatgagtggagtgatcctagtgaccccctgcccgtgtctgtgactgggaacccaagctcaagctggcctagtccaactgaaccctcttttaagacaggcatcgctcgtcaccttcatgccgtgattcgatactcggtggccatcatcctgttcacgatcctacctttttttttacttcaccggtggtgttcgaaaaagaagatgctgctatag

SEQ ID NO: 121528 - DNA, 1269 bp, synthetic construct
  misc_feature 1..1269: note = Description of Artificial Sequence: Synthetic coding sequence
  source 1..1269: mol_type = other DNA
atgggaggccaagataagcctttcctgtctgcctggccatccgcagttgttccaagaggcggccacgtcacattgagatgccactaccggcaccggttcaacaattttatgctgtataaggaggaccggatccatattccaatctttcatgggcgaatcttccaggaatccttcaacatgtctccagtgaccaccgcccatgctgggaattatacttgccgtggatctcacccccactcacccacgggctggtcagcacctagcaatcctgtcgttatcatggtgaccgggaatcatcggaagccgtctttgctagctcatcctggccccctcgtgaaaagcggagaacgcgtgatccttcaatgttggtctgatataatgttcgagcatttctttctgcacaaggagggtatcagtaaggatccaagtcgcttggtggggcagattcacgatggagtcagcaaggcaaattttagcattggacccatgatgttggcactggctggtacgtaccggtgctacggctctgtgacacacaccccctatcagttgagcgccccatctgacccgctggatattgttgtgaccggcccctatgagaagccatctctctccgcccaacccggacccaaggtgcaagcaggagagtcagtcactctcagctgtagttcgcgatccagctatgacatgtaccacctgagccgtgagggcggagcccacgagaggcgtcttcccgcagtcagaaaggtaaaccggacgttccaggcagactttccattaggacctgcaacccatgggggcacatataggtgttttggcagttttcggcactccccctatgagtggtccgatccctctgatccgctgttggtctctgtgaccggcaatccctccagttcttggcccagcccaacagagccatcgtccaaaagtgggaatccacgtcacctacatattctcataggaacctccgtagtcattatattattcatcctgctcttattcttcctgcttcacctctggtgctctaataaaaagaatgctgcagtgatggaccaagagccggcgggtaaccggactgccaatagtgaagattccgatgagcaggatcctgaggaggttacgtacgctcagctcgaccattgtgtatttactcagcgcaagatcactcggccgagtcagagacccaaaacccctcccaccgataccattttgtacacagaactgcctaacgcaaagccacggagcaaggtcgtgtcgtgtccttag

SEQ ID NO: 121529 - DNA, 1050 bp, synthetic construct
  misc_feature 1..1050: note = Description of Artificial Sequence: Synthetic coding sequence
  source 1..1050: mol_type = other DNA
atgtctttaatggtcgtgtctatggcctgcgttggactgttccttgtgcaacgtgccggccctcacatgggcaaccacagaaagccatcgttgttggcccatcccgggcccctggtgaagtcaggcgaacgagtgatcttgcagtgttggtccgatatcatgtttgagcacttttttctgcacaaagaaggcatcagcaaagatcccagtaggctggttggtcaaatccatgatggtgtgagcaaggcaaacttctctattggcccgatgatgcttgccttagctggaacgtaccgctgttatggcagtgtgactcacactccctatcagttgagtgctccatctgatcccctcgacatcgtggtaaccggcccctacgaaaaacctagcctctcagcgcagcctggaccaaaggtgcaggctggtgagtccgtgacactgagctgctcctcccgaagtagctatgatatgtaccacctttcacgcgaagggggggcacacgaacgtagactgcctgccgtgcggaaggtgaaccggacattccaggccgatttccccctgggccccgccactcatgggggtacctaccgatgcttcggatcattccgacatagtccctacgagtggtctgacccatcagaccccctattggtgagtgtgacaggaaaccccagcagttcttggccctctccaaccgaaccctcttctaagtccggtaaccctaggcacctgcacattctgattggcacttccgtcgtcatcatcctgtttatcctgctcttgttctttcttctgcatttatggtgtagcaataagaaaaacgccgcagttatggatcaggagccagccggaaatcgaaccgctaattcagaggactccgacgaacaagatcccgaggaggtaacctacgctcagttagatcattgtgtcttcacccagaggaaaatcacacgcccttcacaacggccaaaaaccccacctactgatacaattctttatacagagctgccgaacgccaagccaaggtctaaggtggtgagctgtccatag

SEQ ID NO: 121530 - DNA, 1335 bp, synthetic construct
  misc_feature 1..1335: note = Description of Artificial Sequence: Synthetic coding sequence
  source 1..1335: mol_type = other DNA
atgagcctaatggtggtgagcatggcttgtgtcggtctgtttttggtgcaacgggctggcccacacatgggtgggcaagataagccttttctgtcagcgtggcccagcgctgtggtaccaagggggggccacgtgactctacggtgtcactatagacatcgctttaataatttcatgctctacaaagaggaccgtatccacattcccatattccatggccggatctttcaagagagttttaacatgtccccagtaaccacggcgcacgcaggtaactatacatgtaggggatctcacccacacagcccgactggttggtctgctccgagcaaccccgtcgtgatcatggtgaccggaaatcatcgaaagccatctctcttggcgcaccccggccccttggtgaagtctggcgagcgggtgatcctccagtgttggtccgacattatgtttgagcacttttttctgcataaagaaggcatctccaaggatccgagtaggcttgtcggacaaatccacgacggggtctctaaggccaatttttctataggcccaatgatgctcgccctggcaggcacctacaggtgctacggttctgtgacacacaccccttatcagctgagcgcacccagcgaccccttggacatcgtcgttaccgggccttacgagaaaccctctttaagcgcccagccagggcctaaggtccaggcgggagaatctgtcacactgtcctgtagctcacggtcctcttatgacatgtaccaccttagcagggaaggcggagcacacgagcgacgactgcccgccgtgcgtaaagtcaacaggacttttcaggccgacttccctcttggtcccgctacccacggcggcacttatagatgctttggctcatttcgccattctccctacgagtggtccgaccccagcgaccccttgctggtcagtgttacggggaacccaagcagcagctggccatcccctacagaaccaagctcaaagtccggcaatccaaggcacctgcacattcttattggcactagcgttgttataatcctctttatcttactcctgtttttcctgttacatctgtggtgtagcaacaagaaaaatgctgccgttatggatcaggaacctgcgggaaatagaaccgctaactccgaggactctgacgaacaagaccctgaggaggtcacttatgcacagctggaccattgtgtattcacacagagaaaaataactagaccctcccaaaggccaaaaacccctccaacggacaccatcctctataccgagcttcccaatgccaagcccaggtccaaggtcgtgagctgcccctag

SEQ ID NO: 121531 - DNA, 1368 bp, synthetic construct
  misc_feature 1..1368: note = Description of Artificial Sequence: Synthetic coding sequence
  source 1..1368: mol_type = other DNA
atgagcctgatggttgtgtcaatggcctgtgtcggactgtttctcgttcagcgcgccgggccccacatgggcggtcaagacaagccttttctttcggcatggcctagtgctgtggtgccgcgggggggccacgtgacgctgagatgccattatagacacaggtttaataatttcatgctctacaaagaggacaggatccatatcccaatcttccacgggagaatctttcaggaaagctttaacatgagccctgttactaccgcccacgctgggaactacacctgcagagggtctcatccacactcaccaaccggctggtcagcaccatccaatcccgtggttataatggtaactggcaaccataggaagccttctcttctcgcccaccctggacccttggtaaagtcaggcgagcgagtcattctgcagtgttggtccgatataatgtttgaacattttttcttacacaaagaaggaatatctaaggacccctctcgtctggtgggccaaatccatgatggggtcagcaaggccaacttcagtattggacctatgatgttggctctcgcagggacatatcgatgttacgggtctgtaacacacacaccatatcagctgagcgccccttcggatcctttagatatcgtcgtcaccggcccttacgagaagcccagcctaagtgcccaacctggtcccaaggttcaggccggtgagtccgttaccctctcgtgctcctcaaggtcatcatacgatatgtatcatttaagtagggaagggggcgcccatgaacggagactaccagccgttcggaaagtgaaccgcacctttcaggctgattttcccctgggacctgctacccacggcggaacataccgatgttttggcagctttcggcattctccctacgaatggagcgacccttctgaccccctgctagtgtctgtgaccggcaacccaagctcctcttggccctctcctactgaaccctcctccaagtccggcatttgccgacatctacacgtcctcattgggacatccgtcgttattttcttgttcatcctgttactgttctttttactctaccggtggtgtagtaataagaaaaatgccgccgtgatggaccaagaaccagccggggaccgaacagtgaataggcaggacagcgacgagcaggacccccaggaagtgacctatgcccagctggaccactgtgtgttcatccagcggaagattagccgtccgagtcaacgacccaagacgccccttaccgacacttctgtgtacacagagttgcccaatgcagagccccgatctaaggtggtgagttgtccacgggcaccgcaatccggtctcgaaggcgtgttctag

SEQ ID NO: 121532 - DNA, 1335 bp, synthetic construct
  misc_feature 1..1335: note = Description of Artificial Sequence: Synthetic coding sequence
  source 1..1335: mol_type = other DNA
atgagtctgatggtggtcagcatggcctgcgttgggttgtttctggtccagcgcgcagggccgcatatgggcggacaggacaagccttttctgagcgcctggccgtcagcagtcgtgccaaggggaggccatgtgacccttaggtgtcactacagacatcgcttcaataacttcatgctgtataaggaggaccggatccacatcccaatattccatgggcgcatttttcaggagagcttcaatatgagcccggtcacgactgctcatgctgggaactacacttgccgagggtctcatccgcacagtcctactggatggtccgctccaagcaatccagttgtgattatggtgacaggaaatcacagaaagccaagtctgttagcccaccccggccccctggtaaaaagcggtgagcgcgttattctccagtgctggtcagatatcatgttcgagcactttttcttgcataaggaaggtatttcgaaggatccctcccggctagtcggacagatacatgacggagtcagcaaggcaaacttctcaatcggccctatgatgctggctcttgccggcacctatcggtgttatggctctgtgacccatactccataccagctctctgcgccgtcggacccccttgatatcgtggttacaggtccgtatgagaaaccatctctgagcgctcaacccgggcccaaagtgcaggccggcgagtccgtgacactgtcatgctcttcacgtagctcttatgacatgtatcacctatcaagagagggcggagctcatgaacggaggctgcctgccgtacgtaaggtaaaccggacattccaagcggatttcccactgggccctgcgacccatggaggcacctatagatgctttggtagtttcagacactccccctatgagtggtctgatccgtctgatcctctgcttgtaagtgtgacaggtaacccatcatcatcttggccctccccgacagagcccagctctaagagtggcaacccacgccatctccacatccttatcgggactagcgtggtgattatcctgttcatcttattactctttttcctgttgcatctgtggtgttcaaataaaaagaatgcggcggtgatggatcaggagccagctggcaatagaacggcaaacagtgaggactctgatgaacaggatccagaagaggtgacttacgcacagcttgaccattgcgtgtttacccaacgtaagatcacccggcctagccagagaccaaaaacccctccgactgatacaatcctgtacaccgagcttccaaacgccaagcctcgaagcaaagttgtgtcctgcccgtag

SEQ ID NO: 121533 - DNA, 1284 bp, synthetic construct
  misc_feature 1..1284: note = Description of Artificial Sequence: Synthetic coding sequence
  source 1..1284: mol_type = other DNA
atgtctttgatggtcgtctcaatggcctgcgtcggtctgttcctggtgcaacgcgctggcccccatatgggaggtcaggacaaaccctttctgtccgcctggccatcagccgtggtgccccgcggcggacacgtcacgctgcggtgtcattaccgacaccgctttaacaatttcatgctgtacaaggaagataggatacatatccctatcttccacggtcgtatcttccaggaatctttcaacatgtcccccgtcaccacagctcacgcgggaaattacacgtgtagggggtcacatcctcattctcccaccgggtggagtgcccctagtaaccctgtcgtgattatggtaaccggcaaccatcggaagccatcattgctggcgcatccagggccactggtcaaaagtggggaacgtgtcattctccagtgttggtcagatataatgtttgagcattttttcttacacaaggaaggaatttcgaaagacccatccagactggtgggacagatacacgacggggtcagtaaagctaatttttctattggtccgatgatgctggcactggcgggaacgtaccgctgttacggaagtgtgacccacacaccctatcagctttcagccccaagcgaccccctggatatagtggtaaccggtccatatgagaagccgagcctatcagcacaacctggtccgaaggtgcaggctggcgagtctgtcaccctctcctgcagttccaggtctagctacgatatgtaccatttgagccgcgagggtggcgcccacgaacggagactgccggccgtaaggaaggtcaaccggactttccaggccgatttcccgcttggtcccgcgacacatggcgggacttatcggtgcttcggctcctttcgccactcaccttatgaatggagtgacccaagcgacccccttctcgtttccgtgaccggtaatcccaggcacctccacattctgataggcacttctgtagtgattattctgttcattctgcttctttttttcctgctgcatttatggtgtagtaacaagaaaaacgccgctgtgatggaccaggaaccagctggcaacagaacagcaaactcagaggactcagatgagcaggaccctgaagaggtcacctatgctcagttggaccactgtgttttcactcagaggaaaattacacgcccttcccagcgccctaaaactccaccaaccgacacaattctgtacactgagttgccgaacgcgaaaccacgctcaaaagtcgtgtcttgtccatag

SEQ ID NO: 121534 - DNA, 1368 bp, synthetic construct
  misc_feature 1..1368: note = Description of Artificial Sequence: Synthetic coding sequence
  source 1..1368: mol_type = other DNA
atgtctctgactgtggtcagcatggcttgtgtgggcttcttcctccttcaaggtgcctggcctctgatggggggccaagacaaacctttcttatcagctcgcccatctacggtcgtgccgagagggggacatgtcgctctccagtgccattaccgcagaggctttaataatttcatgctgtacaaggaggataggtcccacgtgcctattttccacgggaggatcttccaggaatccttcatcatgggacccgtcaccccagcccatgcagggacgtatcggtgtcgggggtccagacctcattcccttactggctggagcgccccctccaatccccttgtgattatggtaacggggaaccaccgaaagccatccctcctggcccacccaggccccctgcttaaatctggtgagacggtgatactgcagtgctggagtgacgtaatgttcgagcacttctttcttcaccgcgaaggcatctcagaagacccttcccgtttggtggggcagattcacgacggcgtgtccaaagccaatttctctatcggacccctcatgcccgtgctagcaggcacttaccggtgctacggatctgtgcctcattccccctatcagttgtccgctccctccgatccacttgatatcgtgatcactgggctctacgagaaaccatcgctgagcgcccagcccgggccaacagtgcaagctggggaaaacgtaacactatcatgctctagctggagttcgtatgatatctaccacctgtccagagagggagaggcgcacgagcgacggctgcgcgctgtgccaaaagtgaacagaaccttccaggccgatttccctctcgggccggccactcatgggggcacataccggtgtttcggttcatttcgggcgcttccttgtgtgtggagtaattcaagcgatcctctgctggttagtgtgactggcaaccccagctcctcctggccctcacctacagagccgtcctccaaatcgggaatttgccggcacctccacgttctgattggtacctccgtagtcatctttctgtttattctgctgctcttcttcctgctgtaccggtggtgttccaataaaaagaacgccgcagtcatggatcaagagcctgctggcgaccgcacagtgaatcgccaggattctgacgagcaagacccacaggaggttacatatgcacagctggaccattgcgtgttcattcaacgtaaaatctcccgcccctctcagcgacctaagacacccctaaccgacacttccgtttataccgaactgccgaacgccgagcctcgaagcaaggtggtctcctgcccgagagccccacagtctggacttgaaggtgttttttag

SEQ ID NO: 121535 - DNA, 1047 bp, synthetic construct
  misc_feature 1..1047: note = Description of Artificial Sequence: Synthetic coding sequence
  source 1..1047: mol_type = other DNA
atgagcctgatggtagtgtccatggcctgcgtggggttttttcttctgcagggggcgtggcctcacgagggagtacataggaagccttcactcctcgcccaccccggccgcttggtaaagtcagaagagactgtgatattacagtgttggtcggacgtccggttcgagcacttcctgttacacagggaagggaagtttaaggatactctgcacctgattggtgagcaccatgatggggtgtcaaaagccaatttctctattggccccatgatgcaggatttggccggtacatatcgctgctatggcagtgtgacccacagcccataccagctatctgcgcccagtgatcccctggatattgtaatcactggcttgtatgagaagcctagtctttccgcacagccaggcccgaccgtgcttgctggggaaagcgttaccctgtcctgttcgtctcgcagcagctatgatatgtatcatttgagtcgcgaaggtgaggcccatgaatgtcggttctcggccggcccaaaagtgaatggtacattccaggcggatttccctttggggcctgccactcatggtggaacctatagatgcttcgggtcttttagggatagcccctatgaatggagcaactctagcgatccactgcttgtgtccgtgacaggaaacccatccaacagttggccatctccaacagaacccagctctaaaactggcaaccctcggcatctccatatactcattggcacttccgtggtcataatcttgttcatcttgctgttcttcctattgcaccgatggtgttcgaacaaaaagaacgcagctgtgatggaccaggaaagtgccggcaatcgtaccgctaattcagaggactcagacgagcaggatccacaggaagtaacatacacccagcttaaccactgtgtgttcacacagaggaaaatcacccgccctagtcagcggccaaagactccccccacagatattatagtgtatacagaattgcccaacgccgagtccagatccaaagtggtctcatgcccatag

SEQ ID NO: 121536 - DNA, 1128 bp, synthetic construct
  misc_feature 1..1128: note = Description of Artificial Sequence: Synthetic coding sequence
  source 1..1128: mol_type = other DNA
atgtccctcatggtggtatccatggcttgcgtgggttttttcttgctccaaggcgcttggccgcatgaagggggccaggacaaacccctcttaagcgcgtggccaagcgctgttgtgcccagggggggacatgtaacccttctatgcaggtctcgactgggcttcactattttcagcctctacaaagaagatggtgtgccagtgccggagctctataataaaatcttctggaaaagcattttgatgggcccggttacacctgcgcatgcgggaacataccgctgtcgcgggtcccacccgcgcagtcctatcgagtggagtgcccctagtaaccccctcgtgattgtggttaccgggttgtttggcaaaccaagcttgtcagcgcaaccgggccccacagttcgaactggagaaaatgtcacgctgtcatgcagcagcagaagctccttcgatatgtatcatctgagtcgtgagggccgtgcgcacgaaccaagactgcctgcagttccatcagtcaacgggaccttccaggccgattttcctctggggcctgcaacgcacggtggaacctacacctgcttcggatcccttcacgatagtccctatgaatggtccgacccgagcgacccccttctcgttagcgtcacaggtaactcctcctccagttcttcatctcctactgaacccagctccaaaaccggcatacggagacaccttcacattctgatcggtaccagcgttgccatcatcttgttcatcatcttgttttttttcctcctccattgttgctgcagcaacaagaaaaatgcagctgtgatggatcaagagcctgcaggagatcggaccgtcaacagggaagattctgatgaccaggacccccaggaagtgacctacgcccagttggaccactgcgttttcactcaaaccaaaattaccagcccaagccagcgccccaaaactccacctactgacacaaccatgtatatggagctacctaatgctaagccaagatcattaagccccgcccacaagcatcatagccaggccctgaggggaagctcgcgagagaccaccgcactgtctcagaatcgcgtcgccagttcccacgtgccagccgcaggaatttag

SEQ ID NO: 121537 - DNA, 1128 bp, synthetic construct
  misc_feature 1..1128: note = Description of Artificial Sequence: Synthetic coding sequence
  source 1..1128: mol_type = other DNA
atgtctctgatggtgatcagtatggcctgcgtcggtttctttctgctgcagggcgcatggactcacgagggcgggcaagataagcctttactgtcggcttggccctctgctgtcgttccccgtggcggacacgtgaccttattgtgccgcagtagactgggcttcactatttttagcctctataaggaggacggcgtccccgtgcccgagctgtataataagatattctggaagagtatcctgatgggccctgtgacacccgctcacgcaggcacataccgatgtcgcggatctcacccacgctctcccattgagtggagtgcgccttccaacccactggtcatagttgtaacgggcctttttggaaaaccctctctctcagctcaaccaggacctacagtcagaacaggcgaaaatgtgaccctcagttgctcgagtcgttctagcttcgatatgtaccacctgtcgagagaaggccgggcacacgagcctcgtctcccagccgtacccagcgtgaatggcacttttcaagccgattttcctctcggccccgctacacatgggggaacgtacacatgctttggctccctccatgatagcccgtatgagtggtccgatccttcggacccccttctggtctcggtgaccggaaattcctcatcgagtagcagttcgccgacagagccaagtagtaaaaccggaatcagacggcacctacacattttgataggtactagtgtagcaatcatcctgtttataatcctgtttttctttcttttgcactgttgttgctcaaataaaaaaaatgccgctgtaatggaccaagagcctgctggcgaccgcacggtgaacagggaagattcagacgatcaggaccctcaggaagtgacatacgcccagcttgaccattgtgtgttcacccaaaccaaaattacttctccgtctcagaggccaaaaacccctcctacagataccactatgtatatggaactcccgaatgccaagccccgtagtctctcaccagcacacaaacatcattctcaagccctgcgcggctcgtctcgtgagactacagcgctcagtcagaatagggtcgccagttctcatgtgccagccgccggtatctag

SEQ ID NO: 121538 - DNA, 1164 bp, synthetic construct
  misc_feature 1..1164: note = Description of Artificial Sequence: Synthetic coding sequence
  source 1..1164: mol_type = other DNA
atgtctttaatggtcgtctcaatggcatgtgtgggcttattcctggtgcagagggcaggacctcatatgggcggccaggacaagccgtttttgtcggcatggccaagtgctgtagtcccccggggtggacacgtgaccttgaggtgtcattaccgccataggttcaataatttcatgctgtacaaagaagacagaatccacgtgcctatttttcacgggaggatttttcaagagggatttaacatgagtcctgtcaccacagcccacgcagggaactatacatgtcgggggtcacacccccacagtccgacgggctggtccgccccttccaatccgatggtgatcatggtcacggggaatcaccgtaaacccagtctgctcgcccaccctggtccactggtcaaaagtggagaacgcgtcatccttcagtgctggagcgacatcatgttcgagcacttcttcttgcataaggagtggatcagtaaggacccgtcccgcctcgtcggtcaaattcatgatggcgtgtcgaaagcaaactttagcatcgggtctatgatgagagctctggcgggcacctatcgatgctacggttctgtcactcacaccccttaccagctcagtgcaccctcagacccacttgacattgtggttacaggtctttatgagaaaccaagcctctccgctcaaccagggccaaaggttcaggccggcgagtccgtcacactcagttgttcaagccgttcctcatatgatatgtaccacctgtcccgcgaggggggagcacatgagagaaggttaccggctgttcggaaggtcaacaggaccttccaagctgatttccctctgggaccggccacccatggcgggacctataggtgcttcggtagttttcgccactccccttacgagtggagcgaccccagtgatccgctgctggtctccgttactggcaacccttcaagctcatggccgagccccaccgagccttcttccaagtcgggaaacctgcggcacctgcatattctgatcggcacctctgtggtgaaaattcccttcacgatcctcctcttctttctgttgcaccggtggtgcagcaacaagaagaacgccgctgttatggaccaagagcctgcagggaatcggtcagaacagcgcggcttctag

SEQ ID NO: 121539 - DNA, 1149 bp, synthetic construct
  misc_feature 1..1149: note = Description of Artificial Sequence: Synthetic coding sequence
  source 1..1149: mol_type = other DNA
atgctgctcatggtcgtgtcaatggcctgtgtcgggctatttctagtccagcgcgcagggccgcatatgggaggccaagacaaaccttttctgagcgcttggccgagcgcagtggtccccagaggcggtcacgttaccttaaggtgtcactaccgccacagatttaacaattttatgctgtacaaagaggatcgaatacacgtgcccatctttcatgggagaatcttccaagaaggctttaatatgtccccagttactaccgcacacgcaggcaattatacatgcagaggctcacatcctcatagccccacgggatggtcggcgccttcgaatccgatggtgattatggtcactggaaatcatcgcaagcccagcttgttagcccacccaggtccactggtcaagtccggagaacgcgttatcctgcaatgttggtctgacataatgttcgagcattttttcttacataaggaatggatatccaaagatccatctcgactggtgggccaaatccacgacggtgtcagcaaggcaaatttttcaataggaagcatgatgcgggccctagcaggcacatatcggtgttacggatctgtgactcacacaccctatcagttatcagctccgtcagatccactggatattgtcgtaacaggcctctacgagaaaccttctctctcagcccaacccgggcccaaggttcaggccggggaatcggttactctctcatgctcatccagatcttcgtatgacatgtatcacctgtctcgagagggcggggcccacgagagacgtctgcccgccgtgagaaaggtgaacagaacttttcaagctgattttccgcttggtcctgcaacccacggcggcacgtacagatgtttcggatccttccgccatagcccgtatgagtggtcagacccgtctgatccgttattggtgtccgttacagggaacccctcttcaagttggccgtctccaacggagccgagtagcaagtccggaaatctccgccatttacatatactgatcggaacgtctgttgtcaaaattcccttcacaattctgttattctttcttctgcatagatggtgctccaacaagaaaaagtgctgctgcaacggcccacgtgcctgcagggaacagaagtag

SEQ ID NO: 121540 - DNA, 1194 bp, synthetic construct
  misc_feature 1..1194: note = Description of Artificial Sequence: Synthetic coding sequence
  source 1..1194: mol_type = other DNA
atgtctctgatggtggtcagtatggcatgtgttggattcttcctggatcagagcgtctgggcacatgtgggaggtcaggacaagcccttttgctcggcatggccatcagctgtagtgccccagggcggtcacgtgactttaagatgtcattgcagaagagggtttaatatcttcaccctttacaaaaaggacggggtgcccgtccccgaactctataacagaatcttctggaacagctttcttatctcaccagtgacacctgcccatgccggcacatatcgatgtcgcggttttcatccccacagcccgaccgagtggtctgcaccttctaaccctctggttattatggttaccgggctctacgagaaaccctcactcaccgctcgccctggtcccaccgtccgtgcgggcgagaacgttacgctgagttgttccagccagtctagcttcgacatttatcatttatcgagagaaggtgaggcccacgaattgagactgccagctgttccctctatcaacggcacatttcaggctgattttcctctgggtcctgctacccatggagaaacttacaggtgcttcggatcatttcatggatccccatatgagtggagcgaccctagtgacccactgcctgtgtcggtgaccggaaatcctagctcttcctggccttcccctacggagccatctttcaagaccggtatagccaggcatctccacgccgtgattagatacagtgtggcaattattctgttcacaattcttccgttctttctactgcaccgctggtgctccaaaaagaaggttagcctgaccaagcagcggcctgagaactcgggcccatgcgctgaggcggggtgggagcacgcggatgccgccgtcatgaaccaagaacctgcaggccacaggactgtgaatcgagaggattctgacgagcaggatcctcaagaggtgacatacgcacagctggaccactgtatctttacccagagaaagatcacaggcccttctcagcggtcaaagcgtccctccaccgacacgtccgtgtgcatcgagctccccaatgctgaaccgagggcgctcagtccagcacatgaacaccactcccaggcattgatggggagttcccgggagacaaccgcactgagtcagacgcaacttgcctcttccaatgtacctgccgccggaatatag

SEQ ID NO: 121541 - DNA, 1029 bp, synthetic construct
  misc_feature 1..1029: note = Description of Artificial Sequence: Synthetic coding sequence
  source 1..1029: mol_type = other DNA
atgtccatgagccccaccgtgatcatattagcgtgcctgggattcttcctagaccaaagtgtgtgggcccacgtcggcggccaggacaagcctttttgctcagcttggccctccgccgtcgtacctcagggcgggcatgttacgctacgatgccactgcaggagaggattcaatatctttacgctatacaaaaaagatggcgtgccagtccccgaactgtataacaggatcttttggaattccttcctaataagccccgtaacccctgcacacgctgggacctataggtgccgggggtttcacccacattcacctactgaatggtccgccccctctaatcccctcgttattatggtgacagggctgtacgaaaagccttccctcacggcccgtccgggaccaaccgtgcgcgccggggagaacgtgacgctctcatgtagtagtcagtctagtttcgacatctaccatctttctcgcgaaggggaggctcatgaactgcggctacccgccgtccctagtatcaatggaactttccaggcagatttccccctcggacctgctacgcacggcgagacttatcgttgtttcggttccttccacgggtcaccctatgagtggtcagacccctctgatccgttgcccgtttccgtgacagggaacccctcatcgtcctggccatcccccaccgaacctagctttaagacggacgctgccgtcatgaatcaggaacctgcaggacatcgtaccgtgaacagagaggactccgatgagcaggaccctcaggaagttacttatgcgcaattagatcattgtatttttacgcagcgcaaaattactgggccgagccaaagatcgaaacgcccgtccaccgacacttccgtgtgtatcgagctcccaaatgccgaaccccgggcattgagtccagcccacgaacatcactctcaagctctgatgggatccagcagagagaccacggccttgtcacagactcagctcgcatcatctaatgtcccggctgccgggatttag

SEQ ID NO: 121542 - DNA, 1083 bp, synthetic construct
  misc_feature 1..1083: note = Description of Artificial Sequence: Synthetic coding sequence
  source 1..1083: mol_type = other DNA
atgtcgatgagtccaaccgtgattattctggcatgtttgggatttttccttgatcagtcagtatgggctcacgtaggagggcaggataaaccattttgttcagcttggccctcggccgtggtgcctcaagggggacacgtcacactcagatgtcactgcaggagaggattcaacatttttactctgtacaagaaggatggggttcccgtgcccgaactgtacaacagaatattttggaattccttcctgatcagcccagtgacaccagcacacgccggaacctacaggtgcaggggcttccatcctcattcaccaacagaatggagcgccccttctaatccacttgttatcatggtgactggactgtatgagaagcccagcctcacggccagaccaggacctacagtgagggctggggaaaacgtcaccctatcttgctcatctcagtcctccttcgacatctatcacttgtccagagagggtgaggctcatgagctgaggctgccggccgtgccatccatcaatggcacctttcaggctgattttccattaggacctgccacccatggcgaaacctaccgatgcttcgggagctttcatggatcgccatacgaatggtctgatccaagtgaccctcttcctgtgtcggtgacaggaatagccaggcatctccatgccgtgatacggtacagcgtagcaataatcttgtttacaatcctcccattctttctgctgcatagatggtgctcaaagaagaagaatgcagccgtgatgaatcaggagccagcgggacatcgcactgttaatcgggaagattctgacgagcaggacccccaggaagtgacctacgcgcagctggaccactgtattttcacccagaggaaaataacgggaccatctcagaggagtaagcgcccaagcacggatacctctgtctgcatcgagttgcccaacgccgagccccgcgccctctcacccgcccacgaacaccatagtcaagcccttatggggagttctcgagagaccaccgctctgtctcaaacccagctggcttccagcaatgtgcctgccgcagggatctag

SEQ ID NO: 121543 - DNA, 1134 bp, synthetic construct
  misc_feature 1..1134: note = Description of Artificial Sequence: Synthetic coding sequence
  source 1..1134: mol_type = other DNA
atgtccatgagtcccacagtcattatccttgcatgccttggatttttccttgatcagagcgtctgggctcacgttgggggccaggataagcctttttgctctgcctggccgtccgccgttgtccctcagggcggccacgtcacattgcggtgtcattgtagaagaggatttaacatcttcactctgtataagaaggacggtgttcccgtaccagagctgtataaccggatcttttggaacagcttcctcatctctccagtgacccccgctcacgccggcacttataggtgcagaggctttcacccccattctcccactgagtggtctgctccctccaaccctctggtcatcatggtgactggactgtacgaaaagccatctttgaccgcccgtcctgggcccacagtgcgtgcgggagagaacgtcacactgagttgtagttcacagagttcattcgacatctaccatctttctcgcgaaggggaggctcacgagctgcgcttgcctgcagtgccatctattaacgggaccttccaggctgactttcctctgggtccggctacccacggggagacctataggtgctttggctccttccacgggagcccgtacgagtggagcgatccctctgatccgctgcccgtctcggtcacagggaacccatcctcgagttggccctctccgaccgagccatcattcaaaaccggaatcgcacgacatcttcacgcagtcataaggtattcagtggctattatcctctttactatcctgccattttttctacttcatcgctggtgtagtaagaaaaaaaatgcggccgttatgaatcaggagcccgctggacacagaaccgttaaccgtgaagactctgacgagcaggatcctcaggaggttacttacgctcaactcgatcactgtatcttcactcaaagaaagattacaggaccgtctcagcggtcaaaaaggccaagcaccgacaccagcgtctgtatcgaacttccaaacgctgagcctcgcgctctttcccctgctcacgaacaccactctcaggctttgatggggagtagccgagagaccacggcactgtcccagacccagctggctagtagcaatgtgccagccgctgggatctag

SEQ ID NO: 121544 - DNA, 1233 bp, synthetic construct
  misc_feature 1..1233: note = Description of Artificial Sequence: Synthetic coding sequence
  source 1..1233: mol_type = other DNA
atgagccttatggtcgttagtatggcctgtgtgggcttcttcctgctagagggcccatggccacatgtcggcggccaggataagccctttctcagcgcctggcctgggactgttgtgtctgaaggccagcatgtgaccctgcagtgccgttccagattgggattcaacgagttttcactctctaaggaggatgggatgccggtgcctgaattatacaacagaattttccgtaactctttcctgatgggcccagtgaccccggcacacgcaggaacatatcggtgttgtagttcccacccgcattctcctactggctggtcagctccatcaaatcccgtggtcataatggtgacgggggtgcaccgcaaacctagcctcctagcacaccccggaccactcgtcaaatctggagaaacggtgattctacagtgttggagtgatgtgcgctttgagagattcctgctgcacagagagggcatcaccgaagaccctcttcgtctcattggacagctgcacgacgccgggtctcaggttaactattctatgggcccaatgacgcctgcccttgcgggtacatacagatgtttcgggtctgttacacatttgccttatgaactgagcgctccctctgacccacttgacattgtcgtggtcgggttgtatgggaaaccatccctttccgctcagccaggtcccacggtccaggctggcgagaacgtcaccctgagttgctccagccgttcgctgtttgacatctaccatctgagcagggaggctgaggcaggggaactacgactgactgcggtgctaagagtaaatggtacattccaagcgaatttccctctgggccctgttactcatgggggcaattaccgctgctttggatcattccgcgctcttcctcatgcctggtcggatccttctgaccccctgccagttagcgtgactggcaactcacgctacctccacgccctcataggaacatcagtggtcataatacctttcgcaatattgctcttcttccttctgcacagatggtgtgcaaataaaaaaaacgcagtggttatggaccaggagccggcgggcaatcgcaccgttaatagggaggatagcgatgagcaggatcctcaggaggtgacttacgcccagctcaatcattgcgtcttcacccagcgcaagattacacgaccgtcccagagaccaaagaccccacctacagatacatccgtatag

SEQ ID NO: 121545 - DNA, 1047 bp, synthetic construct
  misc_feature 1..1047: note = Description of Artificial Sequence: Synthetic coding sequence
  source 1..1047: mol_type = other DNA
atgagtctactggtagtgtcaatggcatgcgtcgggttttttctcctccagggagcttggccacatgagggggtgcatcggaaacccagcttactggcacacccaggcagacttgtcaaatctgaagagacagttattctgcagtgctggtccgatgtgatgtttgagcacttcttgttgcacagagagggaatgtttaacgatacactccggctgatcggagagcaccacgatggagtctctaaggctaattttagtattagcagaatgactcaggatctcgcgggtacatacagatgttacggcagcgtcacccacagcccttatcaggtgagtgctccatctgaccccctcgatattgtcattattggactgtatgagaagccatcccttagcgcacagctcggtcccactgtgctcgctggggaaaatgtcaccttatcctgtagctcccggagtagctacgatatgtaccatttaagccgggagggggaggcacacgaacgtagactgccagctggtcctaaagttaatggtacttttcaggccgacttccctctcggtccagccacccacggaggcacatacagatgcttcggcagttttcacgacagcccctacgaatggagcaagtcaagcgacccactcttggtgtctgtaaccggcaatcccagtaatagctggccttcaccaaccgagccctcctctaaaaccggcaatccccgccatctacatatcctgattggcacatcagtggtgataatactgttcatactgttgttctttctcctgcatcggtggtgtagcaacaaaaaaaatgccgcggtgatggaccaggagtccgctgggaatagaactgcgaactccgaagatagtgacgaacaggatccgcaggaagtgacgtatacccaactgaaccattgcgtgtttacacagcgtaagattacccgcccttcccagagaccaaagacaccccccaccgacatcattgtctacactgagctcccaaatgccgagtccaggagtaaggtggtgtcatgcccctag

SEQ ID NO: 121546 - DNA, 1026 bp, synthetic construct
  misc_feature 1..1026: note = Description of Artificial Sequence: Synthetic coding sequence
  source 1..1026: mol_type = other DNA
atgagtctgatggttgtgtccatggtgtgcgtgggcttcttcctactgcagggagcatggcctcatgaaggcgtacaccgaaaacccagcttattagcccatcctggaccattagttaagagtgaggaaaccgtcattttgcagtgctggagcgacgtgcgctttcagcattttcttctgcacagagagggtaagtttaaggacactttacacttaataggcgagcaccatgatggcgtgagcaaggcaaactttagcatcggtccaatgatgcaggatttggcgggcacatacaggtgctacggatccgtaacgcacagtccttatcaactgtctgcccctagcgatcccctcgacattgtaatcactggcctgtacgaaaagccttccctgtctgcccagccaggtccgacggttttggccggggaatccgtgacgctctcttgctcctcccgctcgtcatatgacatgtaccatctcagtagagaaggcgaggctcacgaaaggcgctttagtgctgggccgaaggtgaacgggacattccaggctgattttccactcggccctgccacccacggggggacttaccggtgcttcggcagttttcgcgactcaccttatgagtggtccaactcatctgatcccctcctggtgtcagtgacaggtaatccctccaattcctggccttctcccaccgagccttcatctgaaaccggaaacccgaggcacttacatgtcttgattgggactagtgtcgtgatcatcctgttcattcttctgctgttcttcctcctgcaccgttggtgttgtaacaagaaaaatgccgtggtcatggatcaagaaccagcgggcaataggaccgtcaaccgcgaagattcggatgaacaagacccccaagaagtgacctatgcgcagctgaaccactgtgtattcacccaacgtaagatcaccaggccatctcagaggcccaagactccgccgaccgacatcattgtttatactgaattgcccaatgctgagccttag

SEQ ID NO: 121547 - DNA, 1047 bp, synthetic construct
  misc_feature 1..1047: note = Description of Artificial Sequence: Synthetic coding sequence
  source 1..1047: mol_type = other DNA
atgtctttgatggtggtatcaatggtgtgtgtgggattttttctgcttcagggggcttggccccacgagggggtacaccggaaaccaagcctcctcgcacacccaggccctctggtaaaatcagaggagactgtgattctgcagtgttggtcagacgtacgattccaacacttcctactacacagggaggggaaatttaaggatactttgcatctaattggggaacatcatgacggtgtcagcaaggcaaatttttcgatcggcccaatgatgcaagacctggccggtacgtacagatgttacgggagcgtgacacactccccttaccagctctcagccccctctgatcccctagacattgtaattacaggcttgtatgagaagcccagtttgagtgcccagccgggacctaccgtactggccggcgaatctgttacgctgtcttgcagcagcagatcaagctacgatatgtatcatctgagtcgggagggcgaggcgcacgagcgcaggtttagtgcaggaccgaaagttaacggaacattccaggcagacttcccattggggcccgcaactcacggaggaacgtaccgctgtttcggcagtttccgggattccccgtatgaatggagtaactcatcagacccactgctcgtgtcggttaccgggaacccttccaacagctggccttcaccaaccgaaccctcatccaagaccggaaacccaagacatctgcacattttaattggcacaagtgtcgtaatcatcctgtttatcctgttgtttttccttttacaccgttggtgctcaaataaaaagaacgctgccgtgatggatcaggagagcgccggaaataggactgcgaactcagaggatagtgatgagcaggacccacaggaagtaacatatacccagctgaaccactgtgtgttcacacagcgcaaaatcactaggccttcacaaagaccaaagactccacccactgacattattgtttataccgaactgcccaacgctgagagcaggtccaaggtggttagttgtccatag

SEQ ID NO: 121548 - DNA, 1029 bp, synthetic construct
  misc_feature 1..1029: note = Description of Artificial Sequence: Synthetic coding sequence
  source 1..1029: mol_type = other DNA
atgagtatgagccccactgtgataatcctcgcctgcctcggcttctttcttgatcagtctgtctgggcccacgtaggtgggcaggacaagcccttttgctctgcttggccctcagccgtggtgcctcaaggaggacacgtgaccttgcgctgccattacaggaggggttttaacatcttcacattgtacaagaaggacggagtgcctgtgcctgaactgtataaccggattttctggaatagtttcttgatttctcccgtgaccccggcacatgctggcacataccggtgtcgtggctttcatccgcacagccccaccgagtggagtgccccttctaatcccttggtcatcatggttaccgggctatacgaaaaaccctccctaaccgctcgcccaggtccaaccgtaagggccggcgagaatgtgaccctgtcttgctcctcccagtcaagcttcgacatctaccacctctcaagggaaggcgaggcacacgagctccgtctgcctgcagtcccgagtattaacggaacctttcaggccgacttccccttaggaccggccacacacggggaaacctacaggtgctttggatctttccacggttctccttatgaatggtccgatcctagtgacccccttcccgtgagtgtgacagggaaccctagttcaagctggccctcccctacagaaccttcctttaagacagacgcagccgtgatgaaccaggaacctgcaggccatcgcacggtaaaccgagaggacagtgacgaacaggacccccaagaggtcacatacgcccagctggaccactgcatttttacgcagaggaaaattacaggaccatctcagaggtcgaagcgcccctccactgacacttccgtctgcatcgagctcccaaatgcggagccccgcgccctgtccccggctcacgagcaccacagccaggcattgatgggctctagcagagaaacgaccgcactgagccagacacagctggcatcctccaacgtcccggccgctggaatatag

SEQ ID NO: 121549 - DNA, 978 bp, synthetic construct
  misc_feature 1..978: note = Description of Artificial Sequence: Synthetic coding sequence
  source 1..978: mol_type = other DNA
atgtctatgtctcccacagtcattatcttagcctgcctcgggtttttcttagatcagtcggtgtgggctcatgttggagggcaagataaacccttttgttccgcctggccatcagcggtcgtaccacagggaggacacgtgactctccgctgtcactacaggcggggctttaacatctttactctgtacaagaaggacggcgtcccagtaccagaactttacaaccgcatcttttggaattccttcctgatctctcccgtgaccccagcccacgcaggcacctacagatgccgcggctttcacccccattctccgaccgagtggagcgccccatccaatccgcttgttattatggttaccggcctgtacgaaaagccttccttaacggcacgtcccggtcctactgtgcgcgctggggaaaacgtgactctcagttgcagttcacagtcatccttcgacatctaccatctgagtcgcgaaggcgaggctcatgaattacgcctcccagccgttcccagcatcaatggcacctttcaggccgattttccccttggtcctgcaacgcatggcgaaacttataggtgcttcggctcgtttcatggctcaccctatgaatggtccgacccgtctgatcccctccccgtctctgtcaccgacgcggccgttatgaatcaggagcccgcaggtcacaggacggttaacagagaggatagcgacgagcaggacccccaggaggtcacttacgcccagctggaccattgcatcttcacccagaggaaaatcacgggcccatcccaaaggagcaagagaccaagcaccgatacatcggtctgtatcgagctgcctaatgctgaaccccgcgccctgtctcccgcgcatgagcaccactctcaagcacttatgggatcgtccagggaaacgaccgccctcagtcagacacaactggcgtcttccaacgttccagcggccggcatttag

SEQ ID NO: 121550 - DNA, 1194 bp, synthetic construct
  misc_feature 1..1194: note = Description of Artificial Sequence: Synthetic coding sequence
  source 1..1194: mol_type = other DNA
atgtcacttatggtggttagcatggcttgtgtgggctttttcctagaccagtcagtttgggcccacgtgggaggacaagataagccattttgctccgcatggccctctgctgttgtgccgcaggggggacacgttactttaagatgccactatagacgtggattcaatatatttactttgtacaagaaggatggcgttcccgtgcctgaactttacaataggatcttctggaacagcttcctcattagtcccgtgaccccagcccacgcaggcacttatagatgccggggattccatcctcattctcctaccgagtggagcgccccctccaacccccttgttatcatggtgacaggcttatacgagaagccgagtttgacagcccgcccagggccaacggtaagagcgggtgagaacgtcacactatcctgtagctcccaaagtagcttcgacatctatcatttatctagagagggtgaagcccacgagttgcgacttccagcggtgcccagcataaatggcacttttcaggctgacttccctctgggacccgcaactcatggtgaaacgtatagatgttttgggagtttccacggaagcccatacgagtggtcggatcctagtgaccctctgcctgtctccgtgactggaaacccttctagctcttggccctcacccactgagccatcattcaaaactggcatagcgagacacctgcacgctgtgatccgatactcagtggccatcatcctgtttacaatactcccattcttcttattgcatcggtggtgtagcaaaaaaaaggtatcactgaccaagcagcgaccagagaacagtggcccctgcgcagaggccggatgggagcatgctgatgccgcagtgatgaaccaagagcccgccggtcaccgtactgtaaatcgggaagacagcgacgagcaagatcctcaagaggttacctatgctcaattggaccattgcatattcacccaaaggaagataaccggtccttcccaacgcagtaaacggccttcaactgacacaagcgtgtgtatcgagctgcctaacgcggagcctagggccttgagtcctgctcacgagcatcatagtcaggcactcatgggatcttcaagagaaacaacagctctttcacaaacccaattggctagctcgaacgtgcccgcagcagggatctag

SEQ ID NO: 121551 - DNA, 693 bp, synthetic construct
  misc_feature 1..693: note = Description of Artificial Sequence: Synthetic coding sequence
  source 1..693: mol_type = other DNA
atgtccatgtccccaacagtgatcattctagcctgcctcgggtttttccttgatcaaagcgtttgggctcacgtggggttgtatgagaagcctagtctgaccgcccgtcctggccccacggttcgcgccggggagaatgtgaccctttcatgctcgagtcagtcatcctttgacatctatcacctgagccgcgagggcgaagcccacgaactgaggctgcccgccgtgcctagcataaatgggaccttccaggctgattttcccctcggccccgccactcacggcgagacttatagatgctttggaagtttccacggctccccatatgaatggagcgacccttccgaccccctccccgtgtcggtgacagacgcagccgttatgaaccaagagccggcggggcatcgcactgtgaatcgagaagattcagatgaacaagacccccaggaggtgacatatgctcaattagaccattgtatttttactcagaggaaaattacaggaccatcccagaggtcaaagcgcccgtccacagatacttcggtgtgcattgagttgcctaatgctgagccccgcgctctttccccagcacacgagcaccattcccaggccctgatgggcagcagccgagaaaccacggctctgtcacagacacagcttgcctcaagtaacgtgcctgcagctggaatctag

SEQ ID NO: 121552 - DNA, 762 bp, synthetic construct
  misc_feature 1..762: note = Description of Artificial Sequence: Synthetic coding sequence
  source 1..762: mol_type = other DNA
atgagctgcacgattgaaaaggccttggctgatgcaaaagcgttggtggagcggctgagagaccatgatgacgccgctgagagcctgattgaacagaccaccgccctgaacaaacgagtcgaagccatgaagcaatatcaggaagaaattcaggaactgaatgaagttgcccgacatcgaccacgatctacactcgtgatgggcatccaacaggagaatcggcagattcgggaactccaacaggagaataaggagctaaggacctctcttgaagaacatcaatccgctctagaactcattatgtcaaaataccgtgaacagatgttcaggttgctgatggcctccaagaaggatgaccccggcatcatcatgaagctgaaggagcagcacagtaaaattgacatggtgcacaggaataagtccgaagggttttttctggatgcctcgaggcacattctagaggccccccaacacggcttggaaaggcgccacctggaagccaaccagaatgagctgcaagcccacgttgaccagataaccgaaatggccgcggtcatgagaaaagccattgagattgatgaacagcagggatgcaaagagcaggagcgcatcttccagttagaacaggagaacaaaggtcttcgagagattttgcagattacccgcgaaagcttcctcaacctgaggaaggacgatgccagcgagtcaacgtccctctccgctctggtgaccaacagtgacttatcattgagaaagagctag

SEQ ID NO: 121553 - DNA, 648 bp, synthetic construct
  misc_feature 1..648: note = Description of Artificial Sequence: Synthetic coding sequence
  source 1..648: mol_type = other DNA
atggataatcagggcgtcatctatagtgacctgaacttgcctccaaacccaaaaaggcagcagcggaagcccaaaggcaataagaactcaattctcgccacggaacaggagatcacatacgctgagttgaatcttcaaaaggcctctcaggattttcaggggaacgataagacttatcactgcaaagatctgccttccgccccagagaagctcatagtaggcatcctggggataatctgtttgatattaatggcctctgtggtgacaatcgtggtcatcccttctagacattgcgggcattgccctgaagaatggatcacttactcaaattcatgttactatattggaaaagaaagaagaacttgggaggaaagcttgttggcttgcaccagtaagaattcctccctcctgagtatcgacaacgaagaggagatgaagtttctctctatcattagcccttcctcttggattggggtgttccggaactcatctcaccacccatgggtcactatgaatggcctggccttcaagcatgaaattaaggattccgataatgctgaattgaattgtgcagtcttgcaggtcaatagactcaagtctgcccagtgcggttcctcgatcatctaccactgcaagcacaaactgtag

SEQ ID NO: 121554 - DNA, 702 bp, synthetic construct
  misc_feature 1..702: note = Description of Artificial Sequence: Synthetic coding sequence
  source 1..702: mol_type = other DNA
atggataaccagggtgtcatttattctgacctgaacctgcctccaaatcccaagcgacagcagaggaagcccaaaggcaacaagaattccattttggccacagagcaagaaatcacatatgcagaacttaacttacaaaaggctagccaggactttcaggggaatgataaaacataccattgtaaggatttgccaagcgcccctgagaagcttattgtcggcattcttggcattatttgtctgatactgatggcgagtgttgtgacgattgtggtcattccatcaacattaattcagcgccataacaacagctcacttaacaccagaacacaaaaggcacggcattgtgggcactgccctgaggaatggattacctactcaaacagttgctactatatcggaaaagaaaggcgcacatgggaggaatcactcctggcatgcacgtccaaaaattcgtccttactcagcatcgacaacgaggaggagatgaagtttctgtccatcatctccccctcatcgtggatcggtgttttccgcaattccagccatcacccctgggtaacaatgaacggacttgctttcaagcacgagataaaggactcggataatgccgaattaaattgcgccgtcttgcaggtcaatagactgaagtctgcccaatgtggaagttccatcatctatcactgtaagcataaactctag

SEQ ID NO: 121555 - DNA, 648 bp, synthetic construct
  misc_feature 1..648: note = Description of Artificial Sequence: Synthetic coding sequence
  source 1..648: mol_type = other DNA
atggataaccagggggttatttacagcgacctgaatttgcctcccaacccgaagagacagcaaaggaaaccaaaggggaataaaaactctatcctggccacggagcaggagatcacatacgctgagctaaatctgcaaaaagcaagccaagacttccaggggaacgacaagacatatcactgtaaggatttgccctcagcccctgagaagctgatcgttggcatactcggcataatttgcctcatcctgatggcgagcgtcgtgacaatcgttgtcatacccagcaggcactgtggacactgcccggaggaatggatcacctatagcaacagttgctattacattgggaaggagaggcgaacttgggaggaaagcctgctcgcatgtactagcaagaactcctctcttctcagcatagacaatgaggaagaaatgaagtttctgagcatcatcagccctagtagctggatcggcgtgtttcgcaatagctctcaccacccttgggtgaccatgaacggcttagctttcaagcacgagattaaagatagcgacaacgccgagctgaactgcgccgttctgcaggtaaaccgcctcaaatctgcccagtgcgggagttctataatctaccactgtaagcataaactatag

SEQ ID NO: 121556 - DNA, 702 bp, synthetic construct
  misc_feature 1..702: note = Description of Artificial Sequence: Synthetic coding sequence
  source 1..702: mol_type = other DNA
atggacaatcagggtgtgatttactccgacctgaacctgccccctaatcctaagcgccaacagaggaaacccaaaggtaacaagaatagtattttggcgacagagcaagaaataacatacgctgagttgaatttacagaaagccagccaagatttccaggggaacgacaaaacttaccattgcaaagacttgccttccgcccctgagaagctaatagtgggtatactggggattatctgtttgatcttaatggcaagcgttgtgaccatcgtagttatccccagtactctaatccagagacacaacaatagttcccttaacacaagaacgcagaaagccaggcattgtggccattgccccgaagaatggatcacttatagtaattcatgctattacatcggcaaagaacggcgaacatgggaagaatctctgctggcctgtacttccaaaaattcgagtctgctctcaatagataacgaggaggaaatgaaatttctttccataataagcccctcatcctggatcggagtgtttcgaaacagcagtcatcacccatgggtcactatgaacggcctggcttttaagcacgagataaaggacagcgacaatgccgagctaaattgcgcagttttacaagtaaatcgactgaaatcagcacagtgtgggagctccatcatttaccactgtaaacataaactgtag

SEQ ID NO: 121557 - DNA, 696 bp, synthetic construct
  misc_feature 1..696: note = Description of Artificial Sequence: Synthetic coding sequence
  source 1..696: mol_type = other DNA
atgaacaagcagcgtgggacattcagcgaggtgagcctggctcaggacccgaagaggcagcagaggaagcctaaaggcaacaaatcctccatcagtgggaccgaacaggaaatctttcaggtcgaattaaacttgcagaatcctagtttgaaccatcaggggatcgataaaatctacgattgtcaaggacttttgccaccccctgagaaactaaccgctgaggtcctggggatcatctgcattgttcttatggctacagtactcaaaacaatcgtgttgattccattccttgaacaaaacaactccagccctaataccagaacccagaagacgcgccactgtggccattgtccggaggaatggattacttactcgaatagttgctattatatcggcaaagaacggagaacgtgggaagagagcctgctggcctgcacatccaagaactccagcttactttccatcgataatgaagaagagatgaaattcctcgcttcaattctcccctctagctggataggggtatttcggaattcctctcaccacccctgggtgaccattaatggacttgcctttaagcacaagattaaggactctgacaacgcggagttaaactgcgctgttcttcaggttaatcgcctcaagagcgcccaatgtggctcatctatgatttatcactgcaaacacaaactgtag

SEQ ID NO: 121558 - DNA, 696 bp, synthetic construct
  misc_feature 1..696: note = Description of Artificial Sequence: Synthetic coding sequence
  source 1..696: mol_type = other DNA
atgaataagcagagaggtactttctcagaagtcagtcttgctcaagaccccaagcggcagcaaagaaaacccaaaggaaacaagtcctccatcagcgggaccgagcaggagatctttcaggtggagctcaaccttcaaaatccttctttaaaccaccagggaatcgataaaatttatgactgccaggggctgctgccacctcccgaaaaactgacagctgaagtcctaggcataatctgcatcgttctcatggccactgtgctgaagaccatcgtcctgatccccttccttgagcagaacaacttctcccccaacactagaacccagaaagcccgccattgtggacactgtcctgaagagtggatcacttattcaaatagttgctattacataggaaaagagaggcgcacttgggaggaatctctccttgcatgtacatccaagaacagtagccttttaagcattgacaacgaagaggagatgaagttcttagcctctatattgccctcctcttggattggcgtgttccgcaacagctcacatcatccctgggtgacaatcaatggccttgcatttaagcataaaatcaaagacagcgacaacgcagagttaaattgcgccgtcctccaagttaataggctgaagagcgctcagtgcggcagtagcatgatttatcactgtaagcacaaactctag

SEQ ID NO: 121559 - DNA, 375 bp, synthetic construct
  misc_feature 1..375: note = Description of Artificial Sequence: Synthetic coding sequence
  source 1..375: mol_type = other DNA
atgattccaacgcggcactgcggtcactgtcccgaggaatggataacctacagtaacagttgctattatattggaaaggaaagaaggacatgggaggagagcctcctggcatgtaccagtaaaaatagttcattgttgagtatagataatgaggaagagatgaaattcttagcttctatactgccttcttcttggatcggtgtttttagaaactcaagtcatcacccctgggttaccattaatggtctcgcatttaagcataagatcaaagacagcgacaacgccgaattgaattgcgctgttcttcaagtcaatcggctaaagtctgctcagtgtggcagcagcatgatctatcactgtaaacataagttatag

SEQ ID NO: 121560 - DNA, 774 bp, synthetic construct
  misc_feature 1..774: note = Description of Artificial Sequence: Synthetic coding sequence
  source 1..774: mol_type = other DNA
atgtctaagcaacgtggcaccttcagcgaggtaagcctggcccaggatcccaagtggcagcaaagaaagcccaagggtaacaaaagtagcatttccggcacagaacaagagatcttccaggtggagctcaatcttcagaacgcttcattgaaccaccaggggatagataaaatttacgactgccagggcctgctccctccacctgaaaaattgactgccgaagtgttaggcattatatgtatcgtcttaatggctactgtcttgaagacgattgtcctgattcctttcctggaacagaacaacagctcccccaatgcacgcacacagaaagcacggcactgtggccactgtccagaagaatggattacgtattcaaattcctgttactacatagggaaggagcgccgtacttgggaggagagcttacaggcatgcgcatcaaaaaacagtagcagcttactctgcattgataacgaggaggaaatgaagtttctagctagcatccttccttccagctggattggcgtgttcagaaattcttcccaccacccctgggtgactattaatggactggcattcaaacatgaaataaaagattccgaccatgccgagcggaattgcgctatgctccacgtgcggggcctcattagtgatcagtgcggttcgagcaggatcatcgtcagcatttccttcaggattaaggctcttgagctcgctgtgcatcagataaagttttacatctgctctaaccggaatgatatcatgatcgcctag

SEQ ID NO: 121561 - DNA, 723 bp, synthetic construct
  misc_feature 1..723: note = Description of Artificial Sequence: Synthetic coding sequence
  source 1..723: mol_type = other DNA
atgagtaagcagcgagggactttttccgaagtgtctctggcccaggacccgaaatggcaacaaaggaagccaaaaggaaataagagctctatctctgggacagagcaggaaatcttccaggtggaactgaatctgcaaaacgctagtctcaaccaccagggcatcgataagatttatgactgccagggcctcctgcctccccctgagaagctgacagccgaagtcttggggattatatgcatcgtgctaatggcgacagtgctgaagacgattgtcttgatcccctttctagagcagaacaattcctccccaaatacaaggacccagaagacccgacactgcggccattgccctgaagagtggatcacttattccaactcctgttactacatcgggaaagagcgaaggacttgggaagagtccttacaggcttgcgcgagtaagaatagcagctctcttctctgtattgacaacgaagaagagatgaaattcctcgcatctatcctgccgtccagttggatcggcgttttcagaaactcgtcacatcacccctgggttaccataaatgggcttgctttcaagcacgagataaaggactcagatcacgctgaaagaaattgtgcaatgctgcatgttaggggcctgatttccgaccagtgtggttcctcaagaattatcaggcggggattcatcatgctgacacgcttggtgttaaactcttag

SEQ ID NO: 121562 - DNA, 723 bp, synthetic construct
  misc_feature 1..723: note = Description of Artificial Sequence: Synthetic coding sequence
  source 1..723: mol_type = other DNA
atgagcaaacagagagggactttctctgaggtgtcattggcccaggatccgaaatggcagcagaggaagcctaagggaaataagtctagcatcagtggaaccgagcaggaaatatttcaggtagaactgaacctgcagaatgcaagcctcaatcatcaggggatcgacaagatctacgactgtcaaggattgctgcccccacctgagaagcttacggccgaggtgttgggcatcatatgtatcgtgcttatggctaccgttctgaagaccattgtactcatcccatttctggaacagaacaattctagtcccaatgcacgtacccagaaagcccgccactgtggtcattgtcccgaggagtggatcacatactccaacagctgttactacatcggaaaggagaggcgcacatgggaggagtccttgcaggcctgtgcttccaagaattcgagctctctcctgtgcattgataatgaagaggagatgaagtttctcgctagtattctgccgtcatcgtggatcggcgtgtttcggaactcctcacaccatccctgggtcactattaacggcctggccttcaaacatgagatcaaggacagtgatcatgctgaacgtaactgtgcgatgttgcacgtcagggggctgatatccgaccagtgcggaagcagccggattatcaggagaggctttattatgctcactcgcctggtactgaatagctag

SEQ ID NO: 121563 - DNA, 477 bp, synthetic construct
  misc_feature 1..477: note = Description of Artificial Sequence: Synthetic coding sequence
  source 1..477: mol_type = other DNA
atgaataagcagagaggaacatactctgaggtgagcctggcacaagaccctaagagacagcagcgtaagctgaaggggaataaaataagtatctcaggcaccaagcaggagatattccaagttgaacttaatctgcagaatgcctcttccgatcatcaaggcaacgataagacctatcattgtaaggggcttctgcccccacccgagaaattgacagccgaagtgcttggtattatctgtatcgtgctgatggctactgtgcttaagaccatcgtactgatcccatgtatcggtgttctcgaacagaataacttctccctcaaccgccgcatgcagaaggcccgacactgcgggcactgccccgaagagtggattacctattcaaactcctgttactacattggcaaggagcgtcggacctgggaggaacgcgtgtgctggcctgtgttgagaaggaccttgatctgcttcctgtag

SEQ ID NO: 121564 - DNA, 540 bp, synthetic construct
  misc_feature 1..540: note = Description of Artificial Sequence: Synthetic coding sequence
  source 1..540: mol_type = other DNA
atggcggtctttaagaccactctgtggcgattgatatcaggcaccctaggcataatctgtctaagccttatgtccacccttggtattctgctcaaaaacagctttaccaagctgtcaatcgaaccagcatttaccccgggacccaatatcgaactgcagaaggactccgattgctgctcttgccaggagaagtgggttgggtataggtgcaattgctatttcatctccagcgagcagaagacctggaatgagtctcggcacctttgtgccagccaaaaaagttccttactgcagctgcagaacaccgacgaactggatttcatgagcagttctcaacagttctactggatcgggctgagttatagtgaggagcacactgcctggctctgggagaatggcagcgctttatcccaatatctgttccccagttttgaaacattcaacacaaagaattgcattgcctataatccaaatggcaacgcacttgatgaaagttgtgaagataagaaccgatatatttgtaagcagcagctcatctag

SEQ ID NO: 121565 - DNA, 447 bp, synthetic construct
  misc_feature 1..447: note = Description of Artificial Sequence: Synthetic coding sequence
  source 1..447: mol_type = other DNA
atggctgcattcacaaaactgtcaatcgagccagcatttacaccaggacctaacatcgagcttcagaaggactcagactgctgttcctgccaagagaaatgggtaggctaccgatgtaactgctactttatctcaagcgagcagaaaacctggaatgagtctagacacttatgcgccagtcagaaatctagcctgctgcagctccagaacactgacgaactggattttatgagctcttcccaacaattctactggatcggtcttagctacagtgaagagcacacagcttggctgtgggagaatggttcagctttatcgcagtatctgtttccatctttcgagaccttcaacactaaaaactgtatcgcttacaaccctaatggtaacgcactggacgagagctgtgaggacaaaaatagatatatatgcaagcagcagctcatctag

SEQ ID NO: 121566 - DNA, 540 bp, synthetic construct
  misc_feature 1..540: note = Description of Artificial Sequence: Synthetic coding sequence
  source 1..540: mol_type = other DNA
atggctgtgtttaaaaccaccttgtggaggcttatttctggcacactggggattatatgcctaagtctgatgtctacacttggaatcttgcttaagaatagtttcaccaaattgtctatcgagcccgcatttaccccaggccctaacatcgagctgcagaaagattccgactgttgctcgtgccaagaaaagtgggttggctacagatgcaactgctatttcatcagctccgaacagaagacatggaatgaatcccgtcacttgtgcgctagtcagaagagcagtctgttacaactccagaacactgatgaacttgactttatgtcttcctcacagcaattttactggatagggctgtcctattcagaagaacataccgcctggctgtgggagaacggctctgctttgtcccagtatctctttccctcatttgagacttttaacacgaaaaactgcattgcctacaatcccaatgggaacgcactggatgaaagctgtgaagataagaatagatacatttgtaaacagcagctgatttag

SEQ ID NO: 121567 - DNA, 543 bp, synthetic construct
  misc_feature 1..543: note = Description of Artificial Sequence: Synthetic coding sequence
  source 1..543: mol_type = other DNA
atggccgtgtttaaaactacgctgtggcgtttgatctccggcaccctggggatcatctgcctgtctctaatgagtaccctcggcatccttctgaagaacagcttcactaagctgtccattgagccagcattcactcctggccctaatatcgaactgcagaaggacagtgactgctgttcgtgccaggagaaatgggttggctacagatgtaactgctattttatctcttccgagcagaagacatggaatgaaagcagacatctttgcgccagtcagaagagtagcttacttcaactgcagaacaccgacgagctgcaagacttcatgtcctcctcacaacagttttactggattggcctgagctacagcgaggagcacacagcatggttgtgggaaaacggcagtgcactgagtcaatacctgtttccaagcttcgagacttttaacaccaaaaactgtatcgcttataatccaaacggaaacgcgcttgatgagtcttgtgaggacaagaacaggtacatctgcaaacagcagctcatttag

SEQ ID NO: 121568 - DNA, 156 bp, synthetic construct
  misc_feature 1..156: note = Description of Artificial Sequence: Synthetic coding sequence
  source 1..156: mol_type = other DNA
agcgcactgtcccagtacctgtttccttcttttgaaaccttcaatacaaagaattgtattgcatataatccaaacgggaatgcgttagatgagtcatgtgaggataagaaccggtacatttacaaagtgctcctgtgttgccctggttggtcttag

SEQ ID NO: 121569 - DNA, 420 bp, synthetic construct
  misc_feature 1..420: note = Description of Artificial Sequence: Synthetic coding sequence
  source 1..420: mol_type = other DNA
atggctgcatttaccaaactgagtatagagcctgcatttacccctggacctaacattgagcttcaaaaagatagcgattgctgcagttgccaggaaaaatgggtaggctatcgatgtaactgctacttcatcagcagcgagcaaaagacatggaatgaatcacgccatctgtgcgcaagtcaaaaatctagtctgctccaactgcagaacaccgacgaactggatttcatgtccagttctcagcagttttattggatcggactgtcctatagcgaggagcatactgcatggctgtgggagaatggctccgccctttctcagtacctctttccttcattcgaaacgtttaatacgaagaattgcattgcttacaatcctaacggtaacgccttagatgagtcttgtgaggacaaaaattag

SEQ ID NO: 121570 - DNA, 699 bp, synthetic construct
  misc_feature 1..699: note = Description of Artificial Sequence: Synthetic coding sequence
  source 1..699: mol_type = other DNA
atgcaagatgaggaaagatacatgactctgaacgtgcagtcaaaaaagagatccagcgctcaaacatcccagctcacattcaaggactattccgttaccttacactggtacaagattctgctgggcatttcagggactgtgaacggtatactcaccctgacattgatttctctgatcctgctggtatcacagggtgtactgctgaagtgccagaagggctcctgtagcaatgccacgcagtatgaagacacaggcgatctgaaggtcaacaacggtaccaggcgtaatatttcaaacaaagacttatgtgcgtcccgatctgcagaccagaccgtgctatgccagagtgagtggctgaaatatcagggaaagtgttgctactggttcagcaatgagatgaaaagctggtctgactcctacgtgtactgcctcgagcgaaagagccatctgctcatcatacacgatcagttagaaatggcctttattcagaagaacctgcgacagttgaattacgtgtggataggcttaaacttcacttctctgaagatgacctggacctgggtagatggctctcctatcgactcaaagattttttttatcaaggggccagcgaaagaaaacagttgcgcagctatcaaggagagcaaaatcttttctgagacatgttctagcgtgtttaagtggatttgccaatactag

SEQ ID NO: 121571 - DNA, 549 bp, synthetic construct
  misc_feature 1..549: note = Description of Artificial Sequence: Synthetic coding sequence
  source 1..549: mol_type = other DNA
atgcaggacgaagagcgttatatgaccctgaatgtgcaatccaaaaaacgtagctcagcccagacctcacagctgacttttaaggactactccgtgacactccattggtataagattctcctcgggatttctgggaccgtcaacgggatacttacgctcactctgataagtctgattttgctagttctgtgccagtcagagtggttaaaatatcaagggaagtgttgctattggttctcgaatgagatgaagtcctggtccgattcctatgtctactgtctggaaagaaaatcacacctcctgattatccatgatcagctggagatggcatttatccagaagaacctgaggcagctcaactacgtgtggatcggactgaatttcactagcctgaaaatgacctggacatgggtggacgggtcgccaattgactcaaaaatattcttcattaagggcccagctaaagaaaactcttgcgcggcaataaaagaaagtaaaatttttagtgagacatgcagtagcgtttttaagtggatttgccagtattag

SEQ ID NO: 121572 - DNA, 195 bp, synthetic construct
  misc_feature 1..195: note = Description of Artificial Sequence: Synthetic coding sequence
  source 1..195: mol_type = other DNA
atgcaagatgaagagcggtatatgaccctaaacgtgcagtccaaaaagaggagcagcgcacagaccagccagctcaccttcaaagactattctgtaaccctgcactggtataagatactgctgggcatttcaggcactgtaaatggaatcctgactttaactctgatttcgctgattctgctcgactcttcttag

SEQ ID NO: 121573 - DNA, 588 bp, synthetic construct
  misc_feature 1..588: note = Description of Artificial Sequence: Synthetic coding sequence
  source 1..588: mol_type = other DNA
atgacagatagcgtgatctacagcatgctcgagctgccaacagccacccaggcccagaacgattacggcccacaacagaagtcttcatctagtaggccgtcttgctcttgcctcgtagccatcgccctaggcctgcttaccgcagttctgctgtctgtgttgttataccaatggatcctgtgccaggggagcaattactccacatgtgcaagttgcccctcttgccctgacagatggatgaagtatggcaatcattgctactacttttcagtcgaggagaaagattggaacagttcactggagttttgcctcgcccgcgacagccacctactagtgatcactgacaaccaggagatgtctctgctgcaggtgttcctcagcgaggctttttgttggataggactacggaataatagcggttggcggtgggaagacggcagtcccctcaactttagccgtattagttccaacagttttgtgcaaacatgcggcgcaataaacaagaacggacttcaggccagctcttgcgaggtacccttgcactgggtttgtaagaagtgtccttttgccgatcaggccctgttttag

SEQ ID NO: 121574 - DNA, 570 bp, synthetic construct
  misc_feature 1..570: note = Description of Artificial Sequence: Synthetic coding sequence
  source 1..570: mol_type = other DNA
atgaccgattctgttatatattcgatgctggaactccccacagctacacaggcccagaacgattacgggccacagcaaaaatcttcaagctcacggccgtcttgttcctgccttgtggcaatagccctggggttgttgaccgcagtacttctgtccgtgctgctgtatcagtggatcctatgtcaagggtccaattattccacatgcgcttcttgcccaagctgcccggatcggtggatgaagtatggaaaccattgttactatttcagcgtcgaagaaaaagattggaattcatccctggaattctgtttggctagggattcacacctactcgtaataactgacaatcaagagatgtccttgttgcaggtctttctctcagaggccttttgctggatagggctgcgcaataactccggctggcgctgggaagacgggagccccttaaatttctcacgcatatctagcaatagctttgtccagacctgcggggccataaataagaacggcctgcaggcctctagttgcgaagtgccactacattgggtgtgcaaaaaggttagactctag

SEQ ID NO: 121575 - DNA, 651 bp, synthetic construct
  misc_feature 1..651: note = Description of Artificial Sequence: Synthetic coding sequence
  source 1..651: mol_type = other DNA
atgggctggatcagaggccgaagaagccgccatagttgggagatgagcgagttccataattataacctcgatctaaaaaagtcagatttcagcactcgctggcagaaacagcgctgccccgttgtgaaatcaaagtgtagagagaatgcaagccctttcttcttttgctgcttcatcgccgtggctatgggaatccgcttcattatcatggtgactatctggagcgcagtgttcttaaattccctttttaatcaggaggttcaaatcccccttacagagagttactgtggcccctgtcctaagaactggatttgctacaagaacaactgttaccagttcttcgatgagtcaaaaaactggtatgagtcccaggcgtcatgtatgagccagaatgctagcttgttaaaggtctattccaaagaagaccaggatcttctgaaattagtcaaatcataccactggatgggtctcgtacacattcctacgaatgggagctggcagtgggaggacgggtctatcttatcgcctaatctgcttactatcatagaaatgcagaagggcgactgcgccctatacgccagctccttcaaggggtacatagagaattgcagtacacccaacacatacatctgtatgcaacggaccgtgtag

SEQ ID NO: 121576 - DNA, 243 bp, synthetic construct
  misc_feature 1..243: note = Description of Artificial Sequence: Synthetic coding sequence
  source 1..243: mol_type = other DNA
atgggatggatacgcggtaggagatcacggcattcatgggaaatgagcgaattccacaattacaatctggacctcaagaagagcgacttctcaactagatggcagaagcagcggtgtccggtagtaaaatccaagtgtcgcgagaacgcctcacccttcttcttttgttgtttcattgcggtcgccatgggaatcaggtttattattatggtgacaatctggagtgccgtgtttctaaactag

SEQ ID NO: 121577 - DNA, 651 bp, synthetic construct
  misc_feature 1..651: note = Description of Artificial Sequence: Synthetic coding sequence
  source 1..651: mol_type = other DNA
atgggatggattagggggagacgctctaggcactcatgggagatgtctgagttccataattataacctggatcttaaaaaatcagattttagcaccagatggcagaaacagcgctgtcccgtcgttaaatctaagtgccgcgagaacgcctcccccttcttcttttgttgttttatagctgtggcaatgggaatacgctttatcataatggtgaccatctggtctgctgtctttctgaactctctgtttaaccaggaggtccagataccactgaccgagagctattgtggcccatgccctaagaactggatctgctacaagaataattgttatcagtttttcgacgagagtaaaaactggtacgagtcccaggcctcgtgcatgtcacagaacgccagcctccttaaggtgtactctaaggaggatcaagacctgttaaaactcgtgaagagttatcattggatggggctcgttcacatcccaaccaacggatcctggcagtgggaggatgggtctatcctgtcccccaatctgctgacgatcatcgaaatgcagaagggcgactgcgccctgtacgcatcttccttcaaaggctatattgagaattgttcgactccaaacacttatatctgtatgcagcggacagtttag

SEQ ID NO: 121578 - DNA, 537 bp, synthetic construct
  misc_feature 1..537: note = Description of Artificial Sequence: Synthetic coding sequence
  source 1..537: mol_type = other DNA
atggaccggcctggacctggctcggcgcgccccggcaggactgtgcacgtgtggggctatagagttgaatggaaggttcggaacggaaggaagttgcagccgagcgaatgggccggccggggagatctgggtggcttcaaacgccgctggaaagacacaagagcgacggtgggcaccactttccgccggcgatcccgcgtgagcctggtcggggaattgtccaagttccccctgcctagcgattctagcgggggaaagagttcaagtagcttcgcccgaggagccctcgcctggtgtaggcagaggaatccgaaccctagctgtgccgcagcagaaaccggggctcgaacatctcttcccaaagagagatgtcggggatggagattagggaactggttacataaacaccctcaccccaacacatgccctaggctgccagcatgctggttgccaccgatcctgaccgagaggggcgaacgcgttccgaagcttgtcccgctgctggcctgttacccgaagtctaagccaaaagactag

SEQ ID NO: 121579 - DNA, 1902 bp, synthetic construct
  misc_feature 1..1902: note = Description of Artificial Sequence: Synthetic coding sequence
  source 1..1902: mol_type = other DNA
atgcttcgcatgcgcgttcccgcactgctggtgctgctgttttgctttcgggggcgcgctgggccatccccgcatttcctacagcagcccgaggatctggtcgtgctgctgggcgaggaagctcggttgccctgcgcacttggcgcttattggggtctggtacagtggacaaagagtggcctggcattggggggccaacgagatctcccaggatggtcccgttactggatatcgggcaatgcggctaacggccagcacgaccttcacatccggccagtcgagcttgaagacgaggcttcttacgagtgtcaggccacacaggcaggcctccgcagccgtccagcacagcttcacgttctggtaccacctgaggcacctcaggtactcggcggtccaagcgtgagtttggttgccggggtgcctgccaacctcacatgccgcagccgtggagacgctcgacctacacccgagctactgtggttcagagatggggtgctcttggacggagctacgttccaccagacccttcttaaagagggcacacctggaagcgtggaaagcactctgaccctgaccccttttagccacgatgacggcgcaacctttgtgtgccgcgcacgctcccaggccctgcctacagggagagacacggcgataacacttagccttcagtaccctcccgaagtgactctatccgctagccctcacactgtccaagaaggcgagaaggtaatctttctgtgccaggccaccgctcaaccccccgtgactgggtaccgctgggcaaaaggaggctcgcccgtacttggcgcgcggggacctcgtctggaggtcgtggccgacgcatcttttctcacagaacctgtgtcttgcgaggtgtccaacgctgtgggcagcgctaatagatctaccgccctggatgtcctatttgggcctatcctacaagctaaacccgaaccagtttcggtcgacgtcggagaggacgcatccttctcctgtgcgtggcgcggcaaccccttgcctcgagtcacctggaccagacgaggaggggctcaagtgctaggatccggtgccactctaagacttccaagcgttggaccggaggacgccggtgattacgtgtgtcgcgctgaagccggactttcgggcttgagggggggggctgctgaagccagactgaccgtgaacgccccacccgtggtcactgcactgcacagcgcccctgcgttcctcagggggccagctcgactccagtgtttagtgttcgcgagtcctgctcctgatgcagtggtctggtcctgggatgaaggcttcctcgaagcaggaagccagggcaggtttctggtggaaaccttcccagcacccgagtcaaggggcggcttaggcccagggcttatatcagtcttgcacatttccggaactcaggagtcagacttcagcagatccttcaattgctcagccagaaaccgcctgggggaaggcggggcacaggcctctttaggtcgccgtgatctattgcccaccgtgcgcattgtagcaggagtggccgcagcgacaacaaccctcttgatggttattactggcgtggccctttgttgctggcgccactccaaggctagtgcttccttcagcgagcagaagaatcttatgcggattccaggatcctcagatgggtcctcctcacggggacccgaagaggaggagacagggagtcgggaagatcgcggcccaattgtccataccgaccacagcgaccttgtgctggaggagaaaggcaccctggagaccaaagatcctaccaatggctactacaaggtgcgtggtgtcagcccaccggcaagccccgactccagagtgacctcattccagtggaagtccccaggtatttccaatctgccctag

SEQ ID NO: 121580 - DNA, 660 bp, synthetic construct
  misc_feature 1..660: note = Description of Artificial Sequence: Synthetic coding sequence
  source 1..660: mol_type = other DNA
atgctcaggatgcgcgtgccagcccttctcgttcttctgttctgttttagagggagggcaggaccaagtccccattttctgcagcaaccagaggatttagttgtcctcctcggtgagggaggcgcgcaggccagtctcggtagaagagcctccgcttctttcagtgaacagaagaacttgatgagaattccggggtcaagcgacggctcgtcctctagaggcccagaggaagaagagacagggtctcgggaagatcgggggcccattgtccacactgatcacagcgacttggtcctggaagaaaaagggaccctagagaccaaggaccccaccaacggctattataaagtcaggggggtgtccgtgagccttagtctgggagaggcccctggaggtggccttttccttcctcctcccagtcctctgggccccccaggaacccctacattttacgattttaaccctcatctgggaatggtgcctccttgccgcctgtacagggcaagggccggttaccttactactccccatcctcgggctttcacctcctatatcaagcctacatcctttggaccccctgacctcgcacccggcactccccctttcccctatgccgccttccccacaccttcccaccctcgactgcaaactcacgtgtag

SEQ ID NO: 121581 - DNA, 2067 bp, synthetic construct
  misc_feature 1..2067: note = Description of Artificial Sequence: Synthetic coding sequence
  source 1..2067: mol_type = other DNA
atgctccgcatgcgggttcctgccttgttagttttgctcttctgttttagagggcgagcgggcccctctccccattttctgcagcagcccgaggatttagtcgttttgcttggggaagaagctcgactaccatgcgctctaggtgcatactggggactggtgcagtggacgaagtcgggcctagctctcggaggacaacgggacctgcccggatggagtagatactggatctccggtaatgcagccaacggacaacatgatctacacatccgacctgtggagttagaggacgaagcttcttacgagtgccaggcaacacaggctggactacggtcaagacctgcccagttacatgtgctggtgcctcccgaggccccacaggtgctgggcggaccaagtgtttcattggtcgctggggtccccgcaaatctgacctgcagatctcggggagatgcccggccaaccccggaactgctctggtttcgggacggcgtgctattggatggggcaactttccaccagacactgctcaaggaaggtacacctggttctgtagagtctactctcacactgcctacaggacgtgataccgctatcacgctcagcttacagtacccccctgaggtgaccctgagtgcaagccctcataccgttcaagagggagaaaaagtaattttcttgtgccaggccaccgctcagccacccgtgaccgggtataggtgggctaagggcggcagcccagtgctgggagcccggggcccccggttggaggtcgttgcagacgccagctttctgacggagccagtctcatgcgaagtgagtaacgctgtgggatccgccaacagaagcaccgctctggacgttctcttcgggccgattttacaagccaaacccgaacctgttagtgtggatgtcggggaggacgcaagcttctcctgcgcttggagaggaaaccctctcccgagggtgacctggaccagacgcggcggcgctcaagtcctcggcagcggagcaaccctgagacttccgtcagttggccccgaagacgccggggactatgtgtgtcgagccgaggccggattatcgggcctgagaggcggggccgccgaggcccgactaacggttaacgccccccccgttgtgacagccctgcactcggcccccgcctttcttagggggccagcccggcttcagtgcttggtattcgcgtcgcctgccccggacgcagtggtgtggtcgtgggatgagggattcttggaagctgggtctcaggggcgcttcttagtggagaccttcccggctcctgaatcccgaggcggtctcggccctgggctcataagtgttctgcacatatccggaacccaggaaagcgatttttctagatcctttaattgctcagcccgaaatcggcttggcgagggcggcgcccaggcctctcttggaaggcgcgatcttctgcccacagtgaggatagtggccggagtggccgctgcgaccacaacactattgatggtaattacgggcgtcgcactgtgttgctggaggcactccaaggcatctgctagtttcagcgaacaaaaaaatctcatgcgcatcccaggaagctcggacggctcaagcagtagggggcctgaggaggaagaaacaggcagcagagaagatcgggggccaatagtgcacacagatcactctgatttagtactggaggagaaagggactctggagacgaaggatcccactaacggttactacaaagtgcgtggcgtttctgtgagcttaagtcttggtgaggcgcccgggggggggctctttttacctccaccctctcccctaggcccgccagggaccccaaccttctacgattttaatccgcacctgggtatggtgccaccctgtcgtctgtacagagcgagagcaggttatctgacaaccccccatccccgtgctttcactagctatatcaaacctacttccttcggcccgccagacctggcaccaggaacgccaccattcccttacgcagcttttccaacaccttcccaccctaggctgcagactcatgtttag

SEQ ID NO: 121582 - DNA, 1752 bp, synthetic construct
  misc_feature 1..1752: note = Description of Artificial Sequence: Synthetic coding sequence
  source 1..1752: mol_type = other DNA
atgcttagaatgcgagtcccggcgttgcttgtgcttctgttctgttttagaggccgggctggatggtcacggtactggataagcggcaatgccgccaatggccagcatgacctgcacatcaggccagtcgagctagaggatgaggcgagttacgagtgccaagccacacaagcgggactgaggagtcggcccgcccaactacacgtactggtgccaccggaggcaccacaggtgctaggcggcccctctgtatctctagttgcaggggtgcccgctaacctaacctgccgatcccggggtgacgctcgccctacaccagaactgttgtggttcagagatggtgtcctgctggacggggctacattccatcaaacactgctcaaagaaggaactccggggtctgtcgaaagtactttaacattgaccccattctctcacgatgatggagctacattcgtatgtcgtgctcgctcccaggccctacctaccgggagggacactgccatcactctaagcctgcagtatcccccagaggtgacactgtcggcatccccacacacggtgcaggagggggagaaggtcatttttctttgtcaggcaacggcacagccccccgttacaggctatagatgggccaagggcgggagtccggttctgggggcaaggggcccacgtctggaggttgtggcagatgccagcttcctcactgagccagttagctgcgaagtcagtaatgcggtgggaagtgcgaaccggtctaccgccctcgatgtattgttcgggccaatactgcaagcaaagcccgaacctgtgagtgtggacgtaggcgaagatgctagcttctcttgtgcttggcgggggaaccctctgccccgggtaacttggacccggcgaggcggagcccaagtcctcgggtcaggtgccaccctgcggctcccttcggtggggccagaggacgccggcgactacgtctgtagggccgaggccggactgagcggcctgagaggaggtgcggctgaggctcgcctcaccgttaatgcacctccggtggtcactgccctgcactcggcccctgcatttctaagaggcccagcccgccttcagtgtctcgtatttgcctcccctgcccctgacgccgtcgtgtggtcttgggacgagggattcttagaggccggaagtcagggaagattcctcgtagagacattccccgcaccagaaagcagaggcggtttggggcccggacttatatcggtcctacacatttctgggacacaggaatctgatttctccagatcattcaactgcagcgcacggaatcgcctgggggaggggggggcgcaagccagccttggccgacgtgatcttctcccaacagtgaggatcgtcgccggcgtggcggccgctaccaccaccctcctgatggtgattactggtgtagccctgtgttgttggagacattccaaggcctcagcttcattttctgagcagaagaacttaatgcggattccgggaagtagtgacggttcgtcctctcgcggcccagaggaagaagagaccgggagcagggaagatcgaggacctatcgtgcacacagaccattctgacttggtcctagaagaaaaaggtacactggagacgaaggatcctaccaacggttactacaaggtccgcggagttagtcctcccgcatcccccgactctcgcgtgaccagctttcagtggaagagccctggcatctctaatctgccatag

SEQ ID NO: 121583 - DNA, 2127 bp, synthetic construct
  misc_feature 1..2127: note = Description of Artificial Sequence: Synthetic coding sequence
  source 1..2127: mol_type = other DNA
atgctcagaatgcgagtgccggccctgctggtgctgctcttttgtttccgaggccgagccggcccttccccacactttttgcagcaacccgaggacctggtcgtactgctgggagaagaagcccgcctgccttgcgcccttggtgcttactggggtcttgtgcaatggaccaaaagtggacttgctcttggcgggcagcgggatctgcccggatggtcacggtattggatctctggaaatgcggccaacggacaacacgacctgcatataaggcctgtcgaacttgaggacgaggcctcttatgagtgtcaagccacccaggcggggctgcgctcacgtcccgcgcagttgcacgtgctggtgccacccgaggctccacaggttttgggcggccccagcgtaagtcttgtcgccggtgtgccagcaaacctgacatgtaggtcccgcggagatgcccgtcctaccccggaactcctatggtttagggacggagtcctgctggatggagctactttccaccaaaccctgctgaaagaaggaaccccaggatcagttgaaagcacactcacacttacccctttctcacatgacgacggagctacatttgtgtgtcgtgcccgctcccaggccttgcccaccggaagggacactgccataaccctgtctctgcagtacccgcccgaggtgaccctgagtgcatcacctcataccgtgcaagagggcgaaaaagtgattttcctctgtcaggctactgcacagcctccagtgaccggatatcggtgggcaaagggcggcagtcctgtgctcggtgctcgagggccacggttggaggtggttgcagatgcctctttccttacagagcccgtgagttgcgaagtatcaaatgccgtggggtctgcaaacagatccacagcgctggatgtcttgtttgggccaattctccaggccaagcctgagcccgtgtccgtagatgttggggaagacgcatcgttcagctgtgcatggcgcggtaatccactgccacgggtgacctggacccggcgcggcggagcccaagtgcttggtagtggagcaaccctgcgcctccctagcgtggggccggaggatgcgggcgattacgtgtgtcgggcggaagctggactttccggactccgggggggagccgctgaagctagactgaccgtcaacgcgccaccagtggttaccgccctgcactccgctcccgccttccttaggggacccgcaagacttcagtgcctggtgtttgcatctcccgcacccgacgcagtggtatggtcatgggatgagggcttccttgaggctggttctcagggcaggtttttggtcgaaacgtttccagctcctgaatcgcgcggggggctgggacctggattgatcagcgttctgcacatttctggcacgcaagaatccgacttttctagaagctttaactgctccgcaagaaatcggttgggcgagggtggggcccaggcttctctgggtcggagagaccttttgcctactgtccggatcgtggcaggggtggctgctgccacaactactctgttaatggtgatcacaggggtggcgctttgctgctggcggcactctaaggcttctgccagcttctccgaacaaaagaatctaatgcggatcccagggagctctgacggatccagcagtcgtggtccagaggaggaggagaccggtagccgagaggataggggacccatcgtccataccgaccattccgacttggtgctggaagaaaagggcactttagaaaccaaagatccaaccaacggttactacaaggtccggggggtttctgtaagcctgtcactaggcgaagcaccagggggcggcctgtttctgccaccacctagccctctcggccctcccggaacccctacattttatgacttcaatccacacctcggaatggtgccaccatgccgcctgtatagagccagagccgggtatctgacaacaccacacccccgggccttcacgtcgtacatcaaacctacaagcttcggaccgcctgatctggctcccggcacaccccctttcccctatgctgccttcccaaccccttcacacccaagactgcagacacacgtttag

SEQ ID NO: 121584 - DNA, 738 bp, synthetic construct
  misc_feature 1..738: note = Description of Artificial Sequence: Synthetic coding sequence
  source 1..738: mol_type = other DNA
atggctgtcataataggtgttgccgtcggcgcaggggtagccttcctcgtgctgatggctactattgtggccttttgctgtgccagatcccaacggaatcttaagggcgtggttagtgcaaaaaatgatatcagggtggaaatcgtccacaaggagcccgcatctggtagagagggggaggagcattcgaccatcaagcagctcatgatggaccgcggagagtttcaacaggactcggtgctgaagcagctggaagtgctcaaggaagaagagaaagaattccagaatctgaaggatccaacaaatgggtactattcggtgaatacctttaaggagcaccacagcacgcccaccatcagtctgtccagttgtcaacctgacctacgccctgcaggcaagcaacgcgtacccaccggtatgagctttacaaatatctacagtaccctgtcaggccagggccgcctgtatgattacgggcaaagattcgtgttggggatgggtagcagttctatagagctgtgcgaacgagagttccaaaggggtagcctcagcgactcaagctcattccttgatacgcaatgcgatagctcagtgagcagcagtggtaagcaggacgggtacgtgcagttcgataaggcgagcaaagcaagcgcttctagcagtcatcatagtcagtcctcatcgcagaacagcgacccctcacgcccgttgcagcgaaggatgcagacccatgtgtag

SEQ ID NO: 121585 - DNA, 2337 bp, synthetic construct
  misc_feature 1..2337: note = Description of Artificial Sequence: Synthetic coding sequence
  source 1..2337: mol_type = other DNA
atgaagccctttcagctagacctactgttcgtctgcttctttctgttctcgcaagaactgggactgcaaaagaggggttgctgcctagtgcttgggtacatggcaaaggataagtttcgcagaatgaacgaaggtcaagtgtattcattctctcaacaacctcaggaccaggtggtggtctcgggccagcctgtcacactcctgtgtgcgataccggagtatgatgggtttgtcctctggataaaagatggcctcgcactgggcgtcgggcgggacctgtcaagttaccctcagtatctcgtggtgggaaatcacctctctggcgagcaccatctgaagattctgcgggctgaacttcaagacgacgctgtatatgaatgtcaggccatccaggccgcaatccgttcacggcctgcaaggctcacagtactggtcccccccgacgaccccgtcattctgggcggacctgtaatttctcttcgggccggggatccgctgaatctcacctgtcacgctgacaacgctaagcctgccgcctcaatcatctggcttcgcaagggcgaggtaataaacggcgcaacatattccaagacactgctgcgcgacgggaaacgagagtccattgtgtccaccctgtttatcagccccggggacgtcgagaacgggcagtctatcgtatgtcgggcaacaaacaaggccatccctggggggaaagaaacatccgtgaccattgacattcagcatcctcctttggtgaacttatcagtagaaccccagcctgttctggaagacaatgttgttacattccattgctccgctaaagcaaacccggccgtgacccagtataggtgggcaaagagaggtcaaatcattaaagaggcctcgggtgaagtttaccgcacgaccgtcgattatacctactttagtgagcccgtgagctgtgaagtgacaaacgcattaggcagtaccaacctcagcagaacggttgatgtatacttcgggccaagaatgacaaccgagccacagtcactcttagttgacctaggaagcgatgcaatctttagctgcgcatggacggggaacccttctctgacaatagtgtggatgaaacgggggagcggggtcgttctaagcaacgagaagaccttaacgctcaagtcagtcagacaggaagacgcgggcaagtatgtgtgcagggccgtggtcccgagggtaggagctggcgaacgcgaggtgaccctgacagtcaatggtcctcctatcatttccagcacccaaacccaacatgcactacatggtgagaagggccagattaaatgcttcatccggtctacccctccacccgacaggatcgcgtggtcctggaaggagaatgtgctggagtcaggtacatcagggagatatacagtggagactatttccactgaggaaggggttatctcaaccctgaccatttcgaacatcgtgagggccgatttccaaactatttataattgcacggcatggaattctttcggttccgacactgagatcatccggttaaaagaacagggctcagagatgaaatctggggccggactcgaggcagagagtgtgcccatggctgtaatcattggcgttgctgttggcgctggggtcgcatttcttgtgctaatggctactatcgtggccttctgctgcgctcgaagtcagcgcaatttaaaaggcgtagtgtccgctaaaaacgacattagagtcgagatagtgcacaaagagccagcatccggaagagagggcgaggagcatagcactattaagcaattaatgatggacagaggggaattccagcaagactctgttctcaaacagctggaggttctgaaagaggaagagaaggaatttcagaaccttaaagaccccaccaacggctactacagcgtaaatacattcaaggaacatcacagcaccccaacgatttccctgtcgagctgccaacctgacttaaggccggcagggaagcaaagagtgccaactggaatgagtttcacaaacatctactcaaccctatctgggcaggggcgcctctacgattatggtcaacgattcgtgctaggtatgggatcctcgagcatcgaattgtgcgaaagagaattccagaggggatctctctccgattcatcctccttcctggacacccaatgcgatagttccgtctcttccagtgggaaacaggacggttatgtgcaatttgacaaagcatccaaagcctccgcttcatcttcccaccactcgcaatcatccagtcagaattctgaccctagccggcctttgcagagacgtatgcaaacccatgtgtag

SEQ ID NO: 121586 - DNA, 1803 bp, synthetic construct
  misc_feature 1..1803: note = Description of Artificial Sequence: Synthetic coding sequence
  source 1..1803: mol_type = other DNA
atgaaacccttccagttagacctcttatttgtttgcttttttctgttttcacaggaactggggttgcaaaagcgcggctgctgtctcgtactggggtatatggctaaagataaatttagacggatgaacgaagggcaggtgtacagcttctcacagcagccacaggaccaggtggtcgttagcgggcagccagtgacactgctgtgcgcaatccccgagtacgatgggttcgtgctgtggattaaggatggcttagccctcggagtcggacgagacctgagctcttacccgcagtacctcgtagtgggaaatcacctgtcaggagagcaccacctgaaaatcctgagggccgaactgcaggacgacgctgtctacgagtgccaggccatccaggcagccatccgcagcaggccagccagactgactgtcttggtgcctcccgatgaccccgtgattctgggtggtcccgtgattagcttgagggccggggaccctctaaatctgacttgccacgccgataatgccaagcccgcagcaagtatcatatggttaaggaaaggcgaagtgatcaacggggcaacgtattccaaaaccctgttaagagacggtaagcgagaatctatagtgagtacactgtttatttcccctggcgacgtcgaaaacggacagagcattgtctgtcgggctactaacaaggccatcccaggcggcaaggagacgagcgtaactatcgatatccagcaccctcctttggtgaatctgagcgtggaaccccagcccgtgctggaagacaatgtggttactttccattgcagtgccaaagcgaatcccgctgtcacccagtacaggtgggccaagcgcggtcagatcatcaaagaggccagcggcgaggtgtataggactacagttgattatacttatttcagcgagccagtgtcgtgtgaggtgaccaatgccctcggctcaacgaatctgtcacgaacggtagatgtgtatttcggaccccgcatgacaacagagcctcagtcactgctcgtagatcttggtagtgacgccattttttcttgtgcttggaccggaaacccttcacttaccattgtgtggatgaagcgaggctcaggggtggtgttatctaacgaaaagacccttacactgaaatcagtcaggcaggaagatgccggcaagtatgtatgtagagctgtggtgccccgagtcggtgcgggtgagcgagaagttactctgactgtaaatggaccgcctattatcagttcaacccaaacacagcatgcactccatggagaaaaaggccagattaagtgtttcatacgcagtacacccccaccagaccgcattgcctggagctggaaggagaacgtgctggaatccggaacttcaggacgatacaccgtggaaactatctccaccgaagaaggagtgatatccacactgacgatttctaatatcgttagagctgattttcagaccatctataactgcaccgcctggaattctttcggatcggatacagagatcattagactgaaggaacagggaagcgagatgaaatcaggcgccggccttgaggccgagtccgtacccatggccgtcattataggggtagctgtaggtgctggtgtggcattcctcgtgttaatggccacaatagtagccttttgctgtgcacgctcgcagcgtagcacaggggggcgatcaggcataagtggccgcggcaccgagaagaaggctcgactccgcctgccaagacgggcctcgaagcaggaatgcaatgaacagggctcctag

SEQ ID NO: 121587 - DNA, 2301 bp, synthetic construct
  misc_feature 1..2301: note = Description of Artificial Sequence: Synthetic coding sequence
  source 1..2301: mol_type = other DNA
atgaaaccgtttcagctggacctcttatttgtgtgtttctttctcttcagccaggaactgggactccaaaaacggggctgttgtcttgtgctagggtacatggcaaaggataaatttcgacgaatgaacgaaggacaggtctacagcttttctcagcaaccacaggatcaagtagtcgttagcggccagccagttaccctcctctgtgctatccctgagtatgacggcttcgtgctgtggattaaagacggcctggctctgggcgtgggacgtgacctgtcttcttatccgcaatacttagtcgtggggaatcatctatctggcgagcaccatctcaagatcctgcgtgccgagctgcaggacgacgcagtgtacgaatgccaagccattcaggcagccattagatcgcgccccgctcgactgactgtgctggttcctcccgacgaccccgtgatactgggcgggcctgttatctccttacgggcaggagatccgctcaatctcacctgtcatgccgataacgccaaaccggctgccagtatcatctggctgcggaagggtgaggtgatcaacggcgccacttactcgaagaccctgcttagagacgggaaacgcgagagtatcgtatccaccttatttatcagtccaggggatgtggaaaatggtcagagcatagtctgccgtgcgacaaacaaagctatccctggcggcaaggagacaagcgtgaccatcgatatccaacatcccccccttgtgaatctttcggtcgaaccccagcccgttctcgaggataatgttgtgactttccactgttcagcaaaagccaatcctgccgtgacgcaatacaggtgggcaaagagggggcagattattaaagaggcctctggcgaagtatataggactaccgtggactacacctactttagcgagcctgtgagctgcgaggtgacgaacgctttgggatcaactaatctctcaaggacagtggacgtctatttcggtccacggatgaccactgaaccccagagcctgctagttgatctgggttctgacgccatcttctcgtgtgcctggacaggaaatccaagtttgactatcgtgtggatgaaaagaggttctggcgtggtgctgagtaatgagaaaaccttgaccctaaaatctgtaagacaggaggatgcaggcaaatatgtgtgcagggcggtggtgccccgagtgggagcaggagaaagggaggttactcttactgtgaacggaccccctatcatttcaagcactcagacacagcatgcacttcatggagaaaaaggacagatcaagtgttttatccgctccacacccccgcctgacaggattgcctggtcatggaaggaaaacgtattggaatcaggcacatccggacggtacaccgtggagaccatctccactgaggagggcgtcatctcaacgttgacgattagcaatattgtgagagcagattttcaaactatctacaactgtacggcatggaacagctttggatcagacacagaaatcattcgcctcaaggaacaggaaagcgttccaatggcggttattattggagttgctgtaggggctggcgtcgctttcttggtgttgatggcaacgatagtcgccttctgttgcgctaggtctcaaaggaacttaaaaggagtggtctccgccaagaacgatatacgcgtcgaaatcgtccacaaagagcccgcctccggacgtgaaggagaagagcatagtaccatcaagcagctgatgatggacaggggggaattccagcaggacagcgtgctgaagcaacttgaagtcttgaaggaggaggaaaaagaattccagaatcttaaagacccgaccaacggatactactccgtgaacacgttcaaagagcaccactcaaccccaacaatcagtctgtccagctgtcagccagaccttcgtccagctggaaagcagagggtgcccacagggatgtccttcactaacatttattctacactctccggccaggggaggctctatgattatggtcagcggtttgtgctcgggatgggctcaagctctattgagctgtgcgagagagaattccagcggggcagcctgtctgactcatccagcttcttagatactcaatgtgattccagtgtgtcctcctcgggcaaacaggacggttatgtgcagttcgacaaagcttccaaggccagcgccagctccagtcaccactcccaatcaagcagccaaaactcagacccctcacgccccttgcagaggagaatgcagacgcatgtgtag

SEQ ID NO: 121588 - DNA, 1182 bp, synthetic construct
  misc_feature 1..1182: note = Description of Artificial Sequence: Synthetic coding sequence
  source 1..1182: mol_type = other DNA
atgggtaaaagtgacttcttaacacctaaggccattgctaatagaattaaatcaaaaggtttgcaaaagctcagatggtactgtcaaatgtgtcagaagcagtgtagagacgagaacggctttaaatgccattgtatgagcgagagccatcagcgccagctgctgctcgcctcagaaaacccccagcagttcatggattacttcagtgaggagttccgtaacgatttcctggagttgttgcgacgccggtttggaacgaagcgtgtgcacaacaacatcgtttacaacgagtatatctctcaccgggaacatatccatatgaacgcgacccagtgggaaacccttacagattttacaaaatggctcgggcgggagggactgtgcaaggtggatgagactcctaaagggtggtatatccagtacatcgacagggacccagaaacaattcgcaggcaactggaactagaaaagaaaaaaaaacaggacctggacgacgaggaaaagaccgctaagttcatcgaagagcaggtgaggagggggttagagggcaaagagcaggaggtgccaacctttacggagttgagccgcgagaatgatgaggagaaagtgacattcaatctgtcaaagggagcgtgtagttcatccggcgccacatcaagcaagtcctccacgctgggcccgtctgcgcttaaaaccatcgggtccagcgcttctgtgaagcggaaagagtcaagtcaatcttccacacaatctaaggagaagaagaaaaagaagagtgccctggacgagattatggagatcgaagaagaaaagaagcggactgctcgaactgattactggctgcagccagagattatagtgaaaataattacgaaaaagttgggagaaaaataccacaagaaaaaagccatcgtcaaggaagtgatcgacaaatacaccgccgtggttaagatgatcgattccggcgataagcttaaactggatcaaactcacctggaaactgtgatccctgccccgggcaaacgtattttagttctcaatggcgggtatagaggaaatgagggaaccttggagtcaataaatgagaaaacctttagcgccacgatcgtgatagaaacagggcctcttaaaggtagacgtgtcgaaggaatccagtatgaagacataagcaaactggcctag

SEQ ID NO: 121589 - DNA, 1125 bp, synthetic construct
  misc_feature 1..1125: note = Description of Artificial Sequence: Synthetic coding sequence
  source 1..1125: mol_type = other DNA
atgggtaagagtgacttccttacacctaaggccatcgccaatagaattaagtccaagggtttgcagaagttgaggtggtactgtcaaatgtgccagaaacagtgtagggacgagaacggattcaaatgccattgcatgagtgaatcacatcagagacagctgttgctggcaagcgagaacccacagcagtttatggactacttctctgaagagtttagaaacgacttccttgagctgctcaggaggcgtttcgggacgaaaagagtccacaacaatattgtctacaacgagtatatctctcatcgcgaacatattcatatgaatgctactcagtgggaaaccctgactgattttactaaatggttggggagggagggattgtgtaaggtcgatgagaccccaaaagggtggtatattcaatacatagacagggaccctgagaccattcgacggcaactggagctggaaaaaaagaaaaagcaggacttggatgacgaagagaagaccgccaagttcattgaagaacaggtacggcgcgggctggagggcaaggagcaggaggtcccaacatttacagagctttctagagagaacgatgaggaaaaagtgactttcaatctctcaaagggcgcctgctctagcagtggagctacatcttcaaaaagttctacgctcgggccatccgccctcaagaccatcggttcgagcgcctcagttaagagaaaggaatcaagccagagtagcacgcagagtaaggaaaaaaagaagaagaagagcgccctagatgagatcatggaaattgaggaggaaaaaaagagaaccgctaggactgactactggctccagcccgaaatcatcgtcaaaatcatcaccaagaagctaggggagaagtaccataaaaagaaggccatcgtcaaggaagtgatcgataaatataccgccgtcgtcaagatgatcgatagcggagataaactgaaactcgatcaaacccatctggagactgtaattcccgcccccggtaaacgaattctagtacttaatggaggctaccgaggcaatgaagggacattagagtccatcaatgagaaaacctttagcgccacaattgtgatcgagaccgtgtag

SEQ ID NO: 121590 - DNA, 867 bp, synthetic construct
  misc_feature 1..867: note = Description of Artificial Sequence: Synthetic coding sequence
  source 1..867: mol_type = other DNA
atgaacgcgactcaatgggagaccctcaccgactttacaaagtggttaggccgagagggcctgtgtaaggtcgacgaaactcctaaaggctggtatatccagtacattgacagagatcccgaaaccatccgacggcagttagaactggagaaaaagaaaaaacaggacctcgatgatgaagagaagacggctaagtttattgaagagcaagtgcgtaggggattggagggaaaagagcaagaagtgcccacttttacggaattgtcccgtgagaatgatgaggagaaggttacatttaacttatcaaagggcgcgtgctcatcctcaggggcaacctcatccaagtccagcactctggggcccagcgctctgaaaaccatcggaagttccgcgtccgtaaaacgcaaggaatcctcccagagttcaacccaatctaaggagaaaaaaaaaaagaagagcgctctggatgagatcatggagattgaggaggaaaaaaaacggacagcccgcacggactactggctgcagcccgaaattatcgtgaagatcattaccaaaaaactaggcgagaagtatcacaagaagaaagccattgtgaaagaagtcatagacaagtacactgcggtcgtgaagatgattgatagcggggacaaactcaagttagatcaaacacatctggaaacagtaattccggcgcctgggaagagaatactcgtgctcaatggcgggtacagaggtaatgagggtaccttagaatccattaacgagaagacattctcagctacaattgtaatcgagacagtgtcacttttcacccagagacagaaattccagaacgccctgaagatgtgccactcttttttttag

SEQ ID NO: 121591 - DNA, 2361 bp, synthetic construct
  misc_feature 1..2361: note = Description of Artificial Sequence: Synthetic coding sequence
  source 1..2361: mol_type = other DNA
atgaatgaggcaaaggtgaaagagacactgcgacggtgcggcgcgtccggggacgagtgtggccggttgcaatatgcgctgacctgtctccgcaaggttacagggctcggcggggagcacaaagaagactcatcgtggagctccctggatgctaggcgggaatccggctctggtcccagtactgacacactgtctgcagcctcactgccgtggccccctgggtcctctcaactcgggcgagcaggaaactcggctcaaggtcccagaagtatatctgtctccgcactaccagcatccgactcaccaacccccagcttttctgagggcctgagcgacacgtgcatcccgctgcacgcctctggccgcctgaccccaagggccctgcattcctttatcacaccccctacgaccccccaactgaggcggcatacaaaattgaaaccccctagaacacccccacccccatctcgtaaggtttttcagctcctgccatcgtttccaacgctgacccgaagcaagtcccatgaatcccagctcggcaatcgtattgacgacgtatctagtatgcggtttgatttgagccatggaagtccacagatggtccgccgtgatatagggcttagtgtgacacatagatttagtactaaatcctggctttctcaggtgtgtcatgtctgccaaaagtcaatgatcttcggtgtgaaatgtaagcattgtagactgaagtgtcacaacaagtgtacaaaagaggcccccgcttgtagaatctcttttctgccgttgaccagactgagacggacggagtcggttccttctgatatcaataaccctgtggacagggccgccgaacctcactttggcaccctgcccaaggctctgaccaaaaaagaacatcccccagcgatgaaccacctggactcgtcatcaaacccttcttcgaccacctcgtctactccatcttcgccagcgccattcccgacaagttccaatccctcttctgctacaactccaccaaaccctagcccaggccagagggactctcgctttaacttccctgctgcttatttcatccaccatcgccagcagttcattttccccgtgcccagcgccggccattgttggaagtgcctcctcattgccgagagcctgaaagaaaatgcctttaatatttccgctttcgcgcatgccgcacccttaccagaagcagccgacgggacgcgtctcgacgatcagccaaaggccgacgtgttggaggcccatgaagctgaggcggaagagcccgaggcgggaaagagtgaggccgaggacgacgaggacgaagtggatgatttgccctcaagcaggcgaccttggagggggcctatttctagaaaggctagccaaaccagcgtctatttgcaggagtgggacatcccctttgagcaagtagagctgggtgagcctattggccagggaagatggggtagagtacatagaggcaggtggcacggagaggtggcaatacgcttactcgagatggacggccataaccaggatcatctaaaactgtttaagaaggaagtcatgaactaccggcagaccaggcacgagaacgttgtattatttatgggggcatgcatgaacccaccccatctggccattattactagtttttgtaagggccgtactctccacagttttgtcagagatcctaagacttcccttgacatcaataagacgaggcagatcgcccaagagatcataaaggggatgggctatctacacgctaaggggatcgtgcataaggacctaaaaagcaagaacgtgttttatgacaatggtaaagttgtaatcactgactttggcctctttggtatatctggggtcgtgagggagggacgtcgcgagaatcagctgaagttatcccatgactggctgtgctatcttgctcccgaaatcgtgagggaaatgacacctgggaaggatgaggaccaacttccctttagtaaggccgccgatgtttatgctttcggcaccgtttggtatgaactgcaggcaagggactggccgttaaagaaccaagcagcagaggctagcatctggcagattggatcaggtgagggcatgaagcgggtcctgacgtcagtctccctcggcaaagaagtaagtgagatcttgtctgcatgttgggcgttcgatctgcaggagcgcccttctttttcattgctcatggacatgctcgaaaaattgccaaagcttaaccgcagactgtctcaccccggccacttctggaaatctgcagacataaatagctcaaaggtcgtgccacgctttgagcgtttcggactgggcgtgctggaatcttctaatcccaagatgtag

SEQ ID NO: 121592 - DNA, 2772 bp, synthetic construct
  misc_feature 1..2772: note = Description of Artificial Sequence: Synthetic coding sequence
  source 1..2772: mol_type = other DNA
atggatagggccgcgttgcgtgccgcagcaatgggagaaaagaaggagggtggaggaggcggagacgctgccgccgctgaaggaggcgccggtgcggcagcctctcgggcactccagcagtgcggccagctgcagaagctgatcgacatttctataggaagtctgcgtggcctgcgcacaaaatgcgcagtgtctaacgacttaacacagcaggagatcaggacacttgaggcgaaactcgttcgctacatttgcaaacagcgccagtgtaagttgagcgtggccccaggtgagagaacacccgagctgaactcctatccacgttttagtgactggctttacaccttcaatgtacgccctgaagttgtgcaagagatcccccgggacctgaccctggacgcactgctcgaaatgaacgaggccaaggtcaaggagacccttaggcgctgtggagctagtggcgatgagtgcgggagacttcagtacgccctgacgtgcctcagaaaggtgacagggctcgggggtgaacacaaggaagacagcagctggtcttccctggatgccagacgagagagcgggtctggcccatctacagatactctttcggctgcttccttaccttggccgccaggatcaagccaacttgggagggccggaaattccgcacaaggaccaaggtcaatctccgtgtccgccctgcctgcatctgacagtcccaccccatcgttttcggagggcctcagtgatacttgcattcctctacatgccagtgggcggttgactccaagggcacttcatagttttattacaccccctactacgccccagctgagaagacataccaagctgaagcctcctaggacacccccaccaccctcacgcaaggtgtttcagctgctgccttctttcccaactttgaccaggtcgaagtcccacgagagccagctaggcaataggattgacgatgtttcctcaatgcggttcgatctcagccacggaagcccacagatggtgagacgggatataggccttagcgtgacccaccgattcagcacgaaatcttggctttcccaagtgtgccatgtgtgccaaaagtctatgatttttggggttaaatgcaaacattgcaggttaaaatgccacaacaagtgcacaaaggaggcacctgcatgtcgcatcagttttttgcccttgaccaggctaaggcggacagagagcgttcctagcgacatcaacaacccggtcgaccgggctgccgagcctcatttcggaacactccccaaggccctgacaaagaaagagcacccacctgcaatgaaccatctggatagttccagcaatccaagctctacaacttcgagcacaccctcctctccggccccttttccaacttcgtccaatccttcctctgcaaccactccgcctaacccaagcccagggcaacgtgattccagatttaacttccccgctgcctatttcattcatcaccggcaacagttcatctttcctgtcccgtccgctggccattgttggaaatgtttgcttatagctgaatcactcaaagaaaacgctttcaacatttctgcctttgcccacgccgcgccactgccagaggcggcagacggaacgaggctcgatgaccagcccaaggccgacgtgctggaggcgcatgaggccgaggcagaagaacccgaggccgggaagtcagaggctgaagatgatgaagacgaggtggacgatttaccgtccagtaggcggccctggcgtgggccaatttctagaaaggcatcacagacatcagtctatttgcaggaatgggacatccctttcgaacaggtggaactcggagaaccaatagggcaagggagatggggtagggtccaccgagggagatggcatggcgaggtggcaattcggctgttagagatggatgggcacaatcaagaccatctgaaactgttcaagaaggaagtgatgaattatcggcagacacgtcacgaaaacgttgtcctttttatgggcgcttgcatgaacccacctcacctggctatcattacctcattctgcaagggcagaactctgcactcttttgtgcgcgatccgaagacatctctggacatcaataagactcgccagattgcacaggagataatcaagggaatgggatatctccacgctaagggcatcgtacacaaggacctcaaatccaagaatgtattttatgataacggcaaggtggttataacggacttcggccttttcgggatcagtggcgtggtaagagaaggacgaagggagaatcaattgaagcttagccacgactggctctgttatcttgctcctgagatagtgagggagatgactcccggcaaagacgaagatcaattgccattcagcaaagccgccgacgtctacgcattcggaactgtatggtatgaacttcaagcgagagactggcctctgaagaaccaggcagctgaagcatcaatttggcagatcgggtccggtgagggtatgaaacgcgttctaacttcggttagcctcggaaaagaggtgtcggagatattgtcagcctgctgggcatttgacttacaggagcgcccaagcttttccctgcttatggatatgttggagaagttgcctaagcttaacagaaggctatcacaccctggacatttttggaaaagtgccgacattaactcttcaaaggttgtcccaagatttgaacgattcggactgggagttctcgagtcaagtaaccccaagatgtag

SEQ ID NO: 121593 - DNA, 2289 bp, synthetic construct
  misc_feature 1..2289: note = Description of Artificial Sequence: Synthetic coding sequence
  source 1..2289: mol_type = other DNA
atgaacgaggctaaagtcaaggagaccctaagaagatgtggagctagtggcgacgagtgcggtagactgcagtacgcactaacctgcctgcgcaaggtgaccggcctgggcggggaacacaaagaggacagctcatggtcaagtctagatgcccggagagagagcgggagtggaccaagtactgacaccttatcagccgcatccctgccttggccacccgggagctcccagctaggccgtgctggaaattccgcacaagggccacggtccatttcagtaagtgctttgcccgccagcgatagtcctactcccagcttctccgagggcctgtctgatacttgcatccccctacacgccagtggccgcctgactccaagggctctccactccttcatcactcctcccacaacaccgcagcttcggcggcatacaaagctgaaaccgcctcgaacccccccccctcctagtcgaaaagtgtttcagctcttgcctagttttccaacgttgactcgatcgaagtcgcatgagagccagctggggaataggatcgatgacgtgtcctctatgcggttcgacttgtctcacggatctccccaaatggtcaggcgcgacatcggcctctctgtgacgcaccgctttagcactaagtcctggctcagccaggtatgccacgtttgtcagaagtctatgatatttggcgtgaagtgcaaacactgcagactgaagtgtcacaataagtgtaccaaggaagctccggcatgtcggattagttttctccccctgacccggctgaggcgcaccgaatctgttccatcggatattaacaatccggtcgacagggccgcagagccacacttcggtaccttacccaaggcgcttacaaagaaggaacacccacctgcgatgaatcacctcgactcctctagcaacccttcctccacaactagttcgaccccttccagtcctgcaccgttccccacttcatccaatccaagctccgcaacgacccccccgaacccttctcccgggcagcgggatagcagatttaattttcccgctgcttatttcatacatcataggcagcagtttatatttccagtcccttctgcagggcattgctggaaatgtcttctgatcgctgagtctctcaaagaaaacgcttttaatatcagtgcatttgcgcacgccgcgcccctcccggaggcagccgatggaacccggctggatgaccaacccaaagcggacgtcctcgaagctcatgaggctgaggccgaggagcccgaggctgggaagagcgaggcagaggatgatgaagacgaggtagatgaccttcccagcagccgacgaccgtggagaggtccgatttccaggaaagcgtctcaaacaagtgtatatctgcaagagtgggacataccctttgaacaagtggagctgggtgagcctataggtcagggtcggtggggaagagtccaccgcggacgctggcacggtgaggtcgcaattcggctcctcgagatggatggacacaaccaggaccacctaaaattgtttaagaaagaagtgatgaattatcggcaaactagacacgaaaatgtcgtgttattcatgggagcttgtatgaatccaccacacttagcgatcatcacctcattttgcaagggtcgaacattacattctttcgtcagagatcccaagacctcactggacatcaacaagacaaggcaaattgcccaggagatcataaaaggtatgggatatttgcacgccaaaggtatcgtacataaggacctgaagagcaagaacgtgttctacgataacggaaaagtcgtgatcaccgacttcggactttttggaatttccggggtggtgcgtgaaggtcggagggagaaccagctgaagctttcccacgactggctgtgttacctggcacccgaaatagtgagggaaatgacacctgggaaggacgaagaccaactgcctttctcaaaggcggccgacgtgtatgcattcggaacagtgtggtacgaacttcaagcccgagactggccactcaagaatcaggcggctgaggccagtatctggcagatcggctctggggagggcatgaaaagagtgttaaccagtgtctcactgggtaaggaggtgtcagaaattcttagtgcctgctgggcctttgacctccaggagcgaccttctttctccctcttgatggatatgctggaaaaactgccgaaactcaatcgtcgattgagccaccctgggcacttttggaaatctgcggagctgtag

SEQ ID NO: 121594 - DNA, 375 bp, synthetic construct
  misc_feature 1..375: note = Description of Artificial Sequence: Synthetic coding sequence
  source 1..375: mol_type = other DNA
atgcaggcagacctggaaatacccagggatctgacgctggatgctctcctggagatgaatgaggccaaggtgaaagaaactctgcgacgctgtggcgcgtccggcgacgagtgcggcagactccagtacgctctcacctgcctcagaaaagtgactggtcttggcacatgggggctgccacccagccccttgcccggcctcgtgcctctcgggctgtggccctcgctttggtgggtgatggaaaggggcaagagaggacccgggttcctcggccagcccgggaaggcccgggtcggctgctcccagcctcccgagaaactgtcccagggaccccaggggtccgggtcgtggtgggtttggccgggcagaatttag

SEQ ID NO: 121595 - DNA, 1842 bp, synthetic construct
  misc_feature 1..1842: note = Description of Artificial Sequence: Synthetic coding sequence
  source 1..1842: mol_type = other DNA
tgacactcattcatcactccaccaaccacacctcaactcagacggcatactaagttaaagcctcccagaaccccaccacctccatccagaaaagtgttccagctgctaccatctttccctacgctgactaggtccaaatcacacgagagtcagctcgggaatagaattgacgacgtctcttctatgagattcgacctaagccacggctctccgcagatggtccggcgcgatatcggcctgtctgtgacacatagattttctaccaagtcctggttatcacaggtgtgtcacgtgtgtcagaaaagcatgatttttggagtcaagtgcaagcactgcagactgaagtgtcacaacaagtgtacaaaggaggcccctgcctgcagaatcagctttctgcctctgacacggctgcgtcggactgagtcagtccctagcgacataaacaacccagtggaccgagctgcagaaccccacttcggaacactaccaaaggcgctcaccaagaaggaacacccacctgccatgaatcatctggactctagcagtaatccctcatcaacaacttccagtaccccatcatccccggcacctttccccacctcttccaatcctagctcagccactactcctcctaacccatctcccgggcagcgtgacagcaggttcaactttcctgcagcttattttatccatcaccgtcagcagtttattttccccgatatctccgcctttgctcatgcggcccccctgcctgaagcagcagacggtaccagactggatgatcagcccaaggcggatgtcctcgaggcccacgaagccgaggccgaggaacccgaagcaggaaagtccgaagctgaggacgatgaggacgaggtggatgatttgccatccagcaggcggccctggcggggccctatttcgaggaaggcaagccagacctcagtataccttcaggagtgggatattccatttgagcaagtagaactgggagagcctatcgggcaaggcaggtggggccgggtgcatcgcggccgatggcacggtgaggtagccataaggttgctcgaaatggacggacataaccaggatcacctgaaactctttaagaaggaggtgatgaattatagacagacacgacatgagaacgtggtgttgttcatgggagcttgcatgaatccccctcatctagccatcatcacctcattctgtaagggaaggacattgcacagttttgtgcgcgatcccaagactagcctcgatatcaacaagaccagacagatagcccaagaaattataaagggtatgggttatctccatgctaaaggcatcgtgcataaagacctgaaaagtaaaaacgtcttctacgacaatggcaaagtagtgattactgattttggcttgtttgggatttctggagtggtgcgggaaggacgtcgcgaaaatcagctgaagctttcccacgactggctctgttatctggctcctgagatcgtgagggagatgacgccaggaaaagatgaggaccagctgccattctcgaaagcagccgacgtgtacgctttcggaacagtctggtatgagctgcaggcgagggactggcccttgaagaatcaggccgccgaggcctccatatggcagatcggcagcggggagggtatgaaaagagttttgacttcagtcagcctggggaaagaggtttccgagatccttagtgcatgctgggcttttgacctgcaggaacgtccctcttttagtctgctgatggatatgctagaaaagctgccgaagttaaacagacggttatcccatcccggacatttttggaagagtgccgaactgtag

SEQ ID NO: 121596 - DNA, 2634 bp, synthetic construct
  misc_feature 1..2634: note = Description of Artificial Sequence: Synthetic coding sequence
  source 1..2634: mol_type = other DNA
atggatagggccgccctgagggctgccgcaatgggagaaaagaaggagggcgggggtggcggcgatgcagccgccgcggagggaggcgcaggggccgcagcgagtcgagccttgcaacagtgcggtcaattgcagaaactgattgacatcagcatcggatctctccgtggactacgtacaaagtgcgctgtctctaatgacctgacgcagcaggaaatacgcaccctcgaggcaaaactagttaggtacatttgtaagcaaaggcagtgcaaattgtccgtggctccaggagagcgtacaccagaattgaattcctaccctcgttttagcgactggctgtatacatttaacgtcagacctgaggtggtacaagaaattcctcgcgacctgaccctcgacgcattattggagatgaacgaagctaaagtaaaggagactttgcggaggtgcggagcttcaggagacgaatgcggcagattacaatacgctctgacctgccttcgtaaagtgactgggttgggaggggagcacaaggaggactcttcttggtcctcactggacgcccgtcgtgagagtgggagtggcccgtcaacagataccctctctgccgccagcctgccgtggccccccggctccagtcagctgggacgagccggaaactccgctcaaggtccccggtctattagtgtcagcgccttgcccgcctcagactcacctacacccagcttttccgagggcctttctgatacttgcatcccactacacgcgtcaggccggctgacaccaagggcactgcactctttcattacacctcccaccacccctcaactgaggcgacacacaaaactgaaacccccccggacccctcccccgccgagcagaaaggtatttcagctcctgccctctttcccaacacttacgcgttccaaatctcacgaatctcagctgggaaacaggatcgacgatgtctcgtccatgcggttcgatctcagtcatggctcccctcaaatggtccgccgcgatataggcctgtctgtcacccatcgctttagtacaaagtcctggctctcccaggtttgccacgtatgccagaagtcaatgatttttggggtcaagtgtaagcattgtagactcaagtgccataataaatgcactaaagaggccccggcttgtcgcatttcattcctcccactcacccgactgaggcggaccgagagcgtaccaagcgacatcaataatccagtggaccgcgcggccgagcctcatttcggcacgttgcctaaggccctaacaaaaaaggaacaccccccagctatgaatcacctcgactcctctagtaacccctctagcacaacatcaagtactccaagtagtcccgcccccttccccacgtcttcgaacccttcttccgcgaccactcccccgaacccgagtcccgggcagcgggatagtaggtttaacttccctgcagcatacttcattcaccatcgccagcagttcatttttcctgatatctccgccttcgcccacgccgcacctctccccgaagccgcagacggaacacgcctggatgatcagccaaaagccgacgtactcgaggcacatgaggccgaagctgaagagcctgaggctggcaaatccgaggcagaggatgatgaagacgaagtggatgacctacctagtagtaggcgcccatggcgcggtccgatttcacggaaggcatcacagacatccgtctacttgcaggagtgggacattccctttgaacaggtcgaattaggcgaacctattggtcagggccgctggggaagggttcaccggggcagatggcacggggaggtggctatacgcctgctggagatggacggacacaatcaggatcacttaaaactttttaaaaaggaagtcatgaactacaggcagacaagacacgagaatgtggtgctattcatgggtgcatgtatgaatcccccgcatcttgccataataacatctttctgtaagggacggacacttcactcattcgtgagggatcccaagacgtccctagacattaataaaacccgtcagatcgcacaggagattatcaaagggatgggatacctgcacgccaaggggatcgtgcacaaggatctgaagagtaagaacgtattttatgataatggtaaggtggtaatcacggacttcgggttgttcggaatcagtggtgtggtacgagaaggacgcagagagaaccaactaaagctgtcacacgactggctgtgctatttagcccccgagatcgtaagagaaatgacccccggcaaggacgaagatcaactgcccttctcaaaggcagcagacgtctacgcttttgggaccgtttggtatgaactgcaggctcgggactggccactcaagaaccaggctgccgaggccagcatttggcagatcggctctggtgaagggatgaaacgcgtgctgactagtgtgtcgttagggaaagaggtcagcgaaatcctaagcgcatgctgggcctttgaccttcaagaacgacccagcttctctctcctgatggacatgctggagaagcttcctaaattaaaccggcgcctttcacaccctggacacttctggaagtctgcagagttgtag

SEQ ID NO: 121597 - DNA, 1311 bp, synthetic construct
  misc_feature 1..1311: note = Description of Artificial Sequence: Synthetic coding sequence
  source 1..1311: mol_type = other DNA
atgtacaacaagaaagccaaaatggaacccaacgcaagtgagtccgcaatccccgctaggaggcaacgtcagcctcgagccaagaaaaagtcaaagccgctgaatctgaagatccactcttcagtcgggtcctgtgagaatattccttcacaacagcggagcccattgctgagcgagcgctctctgagatcgttcttcgtcgggcacgcccctttcctcccatcaactcctcctgtccacactgaggccaatttttctgccaataccctttccgtgcctaggtggtcgccacaaattcctcgcagagatctggggaattccatcaagcaccgcttctcaacaaaatattggatgtcacagacatgtactgtgtgcgggaagggaatgctgtttggactaaagtgtaaaaattgtaagcttaagtgtcataacaaatgtaccaaggaggcacctccatgccatctgttaattatacatcggggggatcctgcaagactcgtccggactgaaagtgtgccctgcgatattaacaacccactccgtaaaccgccgcgatattcggatctgcatatttcacagacactcccaaaaacaaataagattaataaagatcacatcccggtcccataccaacctgactcatcgagcaaccccagttctactactagtagcacaccatctagccctgcgcctcctctccccccaagcgccactccgccatccccacttcatcctagcccacagtgtacgcgtcagcagaagaatttcaacctgccagcctctcactactataaatacaagcagcaattcattttcccggacgttgttccagtgccggagacacctacccgggcccctcaagtgattctccacccagtcacgagcaaccccatccttgaaggcaacccacttctgcaaatcgaagtggagccaacttcagagaatgaggaagtccacgatgaggctgaagaatccgaggacgacttcgaagaaatgaatttgagtcttctgtcagccagatcttttcctcgcaaagcctcccaaacctctatatttctccaggaatgggacatcccttttgagcagttagagataggtgaactcattggaaaaggccggttcggccaggtgtaccatggtagatggcatggggaagtcgcgatacggcttatcgatatcgagcgcgacaatgaagaccagctgaaagcgtttaaaagagaggtgatggcgtaccgccaaactcggcacgagaatgtggttcttttcatgggagcttgtatgagccctccccatctcgccataattacttag

SEQ ID NO: 121598 - DNA, 2853 bp, synthetic construct
  misc_feature 1..2853: note = Description of Artificial Sequence: Synthetic coding sequence
  source 1..2853: mol_type = other DNA
atggacgaagagaatatgaccaagtcagaagagcagcaacctctatctctgcaaaaagctctgcagcagtgcgaactggtccagaatatgatcgacttgagcatatcaaatttagagggcctccgcactaagtgcgccacttccaacgatctgacgcagaaggagatccgcactctggaaagtaagctcgtgaaatacttcagcagacaactttcctgcaaaaagaaggtggctctacaagaaagaaatgccgagctagacgggtttccacagctaagacactggttcagaatcgtcgatgttaggaaggaggttctggaggaaattagcccaggacagctttctctagaggaccttcttgaaatgaccgatgagcaggtctgtgaaaccgtcgagaaatacggagccaaccgggaggagtgtgcccggttgaatgcctccctcagctgcctgcggaacgttcatatgtccggaggcaacctgagcaagcaggattggactatccagtggcccaccacggagacaggtaaggagaacaacccggtgtgtcccccagagcccaccccatggattcggacacatctatctcaaagcccccgcgtgccctccaagtgcgttcagcactactgccacacctcgcccacacctggggcacctgtatacacgcacgtcgataggctgacagtggatgcctatccaggcctctgcccaccaccacctctggagtcgggccatcggtccctgcctccctcgccacggcaaagacatgccgtccggacacctccacggacacctaatattgtaacaactgttactcccccgggcactccaccgatgcggaaaaagaataagctcaagccaccagggacaccgcccccctcatcacgcaaactgatacacctcatccccggctttaccgcccttcaccgaagcaagagccacgaatttcagttgggccaccgagtagacgaagcccacacgcccaaagccaaaaagaaatcgaagccgctgaacttaaagatacacagctcagtcgggtcatgcgagaacattccatcgcagcagcgcagccctctgctctcagagagatcgctgcgcagcttcttcgtggggcatgcgccattccttcctagcacccccccggtgcataccgaagcgaatttttcagccaataccctgagtgtaccgcggtggtccccccagattccccggcgcgacttggggaattctattaaacaccggttcagcactaagtactggatgagccagacctgtacggtttgcggaaaaggaatgctgtttggtctgaaatgtaaaaactgcaaactgaaatgccacaataaatgcacaaaagaggccccgccgtgccatctgctgattattcataggggcgaccccgcgagactggtgcgcacggaatctgtcccatgcgacataaataatcctttgcgaaaaccccctcggtattcagacctacatatctcccagactctgccaaagaccaataagattaataaggaccacatcccagtgccctaccagcctgatagttcttcaaacccttcatctactacatcctcaaccccttcaagccccgcccctcctttgccaccctcagctacacctccctctcctctccatccgagccctcagtgtacaagacaacaaaagaacttcaatctgcccgcctcacattactacaaatataagcagcagtttatttttcccgacgtggtgccagtacctgaaactccaaccagagcaccccaggtgattctccatcccgttacttccaaccccattctggagggaaatccgctactccagatagaggtggagccaaccagtgagaatgaagaagtacacgatgaggcggaggaatccgaggacgacttcgaagagatgaacttgtctttgctcagcgcccgctcattcccccgcaaagcaagtcagacttcgatctttttacaggaatgggacatcccgtttgaacaactggagatcggcgagttgatcgggaagggccggtttggacaggtgtatcacgggcggtggcacggtgaagtagctattagactgattgacatcgaaagagacaacgaagaccagctcaaggctttcaaaagagaggttatggcgtaccggcagacacgccacgaaaacgtggtcctgtttatgggggcctgtatgtcaccaccgcacttagccataatcacctcactttgcaagggacgcacactgtactccgtggtgagggacgccaagatcgtgctggatgtcaataaaaccagacagattgcacaggaaattgtgaaaggcatgggctatttgcacgcgaagggaattctacacaaggatctcaagagcaaaaacgttttttatgacaacgggaaggtggttataacagacttcggtctcttcagcatttccggggtgctccaagccggacggcgcgaggataaactcagaatccagaatggatggctgtgccacttggcccctgagattatacggcagcttagcccagataccgaagaagacaaactacctttctctaagcactcagatgtgttcgccctgggaaccatctggtacgagctgcatgcacgggagtggcccttcaagacacagccagcagaggccatcatctggcaaatggggacagggatgaagcctaatttatcgcaaatcgggatgggaaaggaaataagcgacattcttctcttttgctgggcattcgagcaggaagagcggcccactttcaccaagctgatggacatgctggagaaactgcccaaacgaaatagaaggctatcccatcccggacatttctggaaatccgccgaattgtag

SEQ ID NO: 121599 - DNA, 2766 bp, synthetic construct
  misc_feature 1..2766: note = Description of Artificial Sequence: Synthetic coding sequence
  source 1..2766: mol_type = other DNA
atgatagacctatccatttctaacctagagggcctccgcacgaaatgtgcgacaagcaacgatttgacccagaaagagattcgaaccctggaaagcaagctggttaaatacttctcgcggcagctgtcatgcaagaaaaaggtggccctacaagagcgtaacgccgaacttgacggcttcccccagttaaggcattggttccgcatcgtggacgtgagaaaagaggtgttggaagagatatcccctggtcagctgtccctggaagatctcctggagatgacagacgagcaggtatgtgaaaccgtcgagaaatatggcgcgaatcgggaggagtgcgctaggctcaacgcatcactgtcttgcctaaggaatgttcatatgtcggggggcaacctatcaaaacaggactggaccatccagtggcctacaaccgagacgggcaaggagaacaatcccgtctgtccacctgaacccacaccctggattcgaactcatttatcccagtcaccaagagtaccctccaagtgtgtgcagcactattgccacactagccccactcccggagctcctgtctacacacatgtcgatagattgacagtcgacgcgtatcccggtctgtgccctccccccccactggaatctggacaccggtcgctgcctccatccccccgtcagcgccacgcagtcagaactcccccgcggacaccaaacatagtgactaccgtgaccccccctggcactcccccaatgcgcaagaaaaataagctcaagcctcccggcactcctccaccatcttcccgcaaattgatacacttaattccaggtttcaccgccctccaccggtctaagagccatgagttccagctggggcatcgtgtcgatgaggcccacactccgaaggcgaagaagaagtccaagccattgaatctgaagattcatagcagcgtaggatcgtgcgaaaacatcccctctcagcaacgctcacccctcctctccgagcggagtctgagaagctttttcgtggggcacgccccttttctcccttcaactcctccagtccataccgaagctaacttctcggcgaacacgctctccgtcccccgttggagcccccaaattccaagacgagaccttggaaacagcatcaaacacagattctctacgaagtattggatgtcccaaacttgtaccgtgtgcggcaagggcatgttatttggacttaagtgtaagaactgtaagttgaagtgccataataaatgcacaaaggaagctccaccatgccacctcctcataattcaccgaggtgatcccgctagattggttagaacagaaagcgtcccttgtgacataaacaaccctctacggaaacctcctagatattctgatctgcacattagtcagacgctacctaaaaccaataaaattaataaggaccatattcccgtgccatatcaaccagactccagttccaacccttcctccaccacatcctctaccccaagtagccctgcacctccgctacctccctctgccacccccccatcacccctgcatccatctcctcagtgcacgcgccaacagaagaacttcaacctccctgccagtcactattacaaatataaacagcagttcatattcccagacgtcgtgcccgtgccagaaacccctacgcgggctccacaggtcatcctccatcctgtgacatcaaaccccatcctcgaggggaatccgctcttgcagatagaagtggaacctacttcagagaatgaggaagtccatgatgaggcggaggaaagtgaggacgactttgaggagatgaacctgtcactgctgagcgcccggagttttcctcgcaaggcttcccaaacatcaatatttctgcaggagtgggatatcccatttgaacagctagagattggagaactcatcggcaaaggtcggttcggccaagtgtatcacggacgatggcacggcgaagtggcaattcggctaatagatattgagcgcgataatgaagaccagctcaaggcctttaaaagggaggtcatggcttatagacagaccaggcatgagaatgtcgtgctctttatgggggcctgtatgtcgcccccccacttagcaattataaccagcctctgtaagggccgcacactgtatagtgtcgtgagagatgcaaagatagtgctggatgtgaacaagactcggcagatcgcccaagaaattgtcaaaggcatgggttacctgcatgctaagggtatcctccataaagacttgaagagtaaaaatgtgttctatgataatggtaaggtggttattaccgactttgggctctttagcatatctggagtgctgcaggcggggaggcgggaggacaaattgagaatacagaatggatggttatgtcacctggcaccggagatcatacgccaactttcacccgacacggaggaagataagctcccattctccaaacactctgacgtgttcgcactgggcaccatatggtacgagctacacgcaagggagtggcccttcaaaacccagcccgccgaagcaataatatggcaaatgggcactggcatgaagcccaatctaagtcagatcggcatgggcaaggaaatttccgacatactccttttttgttgggcgttcgagcaagaggagagacctaccttcacaaagttaatggatatgctagaaaaacttccaaaacgaaaccgtagattgagccatccggggcacttctggaagtctgcagaactgtag

SEQ ID NO: 121600 - DNA, 1245 bp, synthetic construct
  misc_feature 1..1245: note = Description of Artificial Sequence: Synthetic coding sequence
  source 1..1245: mol_type = other DNA
cgggctaagaagaagtccaagcccctcaacctcaagatccactctagcgtgggaagttgcgagaatatcccctctcagcaaagatcccccctgctgtccgagagatcgctgcgttccttctttgtagggcacgcgcccttcctcccttctaccccccctgttcacaccgaggctaacttctcagccaacactctctccgtgcctaggtggtccccacaaatcccccggcgggaccttggcaattctattaagcatagattctccaccaaatactggatgtctcagacatgtacagtttgcggaaaaggtatgcttttcggattgaagtgtaagaattgcaaacttaagtgccacaacaaatgtaccaaagaagcacccccctgtcacctgttgatcatccaccggggagaccctgccaggttagtcagaaccgagtccgtgccatgtgatattaacaatccactgcggaagcctcccagatattctgatctccacatctcacagactctgcctaagactaacaaaatcaacaaggatcatatcccggttccataccagccagactcgtctagcaatccctcatcaactacaagctctacaccgagctcgcccgcacctccactgcctccctctgctacacctccttccccattgcatccgtcacctcagtgcacccggcagcaaaaaaacttcaatctgcctgcctcccattactataagtacaagcagcaattcatatttccagacgtggtgcccgttcctgaaacacccacacgtgcaccccaggtgattcttcaccccgtgacatccaacccaatactcgaggggaatccactgctccagattgaggttgagccaaccagcgagaacgaggaggttcatgacgaggcggaggagagcgaggatgacttcgaggagatgaatcttagccttctttctgctcgctccttccctcgtaaagcatctcagacctccatctttttacaggagtgggacatcccatttgagcaactggaaatcggtgaactgattggtaaaggaagattcggtcaggtgtaccatggtcgatggcacggagaagtggccatcagactgattgatatcgaaagagataatgaggatcagcttaaagcgttcaagcgagaggttatggcctaccgccagacaaggcacgaaaacgtcgtgctgtttatgggggcatgtatgtcccccccacacctggctatcattacccggcccgtttag

SEQ ID NO: 121601 - DNA, 3921 bp, synthetic construct
  misc_feature 1..3921: note = Description of Artificial Sequence: Synthetic coding sequence
  source 1..3921: mol_type = other DNA
atggaattctacgagtctgcctacttcatcgtgttaatcccttcaatagtaattactgtaatcttcctgtttttttggctgtttatgaaagaaaccctctacgacgaggttttggccaaacagaagcgcgaacagaagctgattcctactaaaactgacaaaaaaaaggccgagaagaagaaaaataagaaaaaagaaattcaaaatggcaacctgcacgagagtgactcagagtccgtgcccagggatttcaaactgtctgacgcgctagctgtggaggatgatcaagtggctcccgtgccgctgaatgtagtcgaaactagtagctcagtccgcgagagaaaaaaaaaggaaaaaaagcagaagcctgtgttggaggagcaggtcataaaagagtcagacgcctctaaaatccccggtaaaaaggtcgagcccgtgcctgtcacaaagcagcccactccaccaagcgaagcagctgctagcaagaagaaacctggacagaagaagtctaaaaacggcagcgatgaccaggacaaaaaggtggaaaccctcatggtgccttcaaaacggcaggaggcactgcctctacaccaggagaccaaacaagagagtggatcagggaagaagaaagcatcttctaagaagcagaaaacagagaacgtctttgtggacgaacctttaatccatgctactacctatatcccccttatggacaacgcagattcttctccagtggtggataagagggaagtgatcgaccttctgaagccggatcaagtcgaaggtatacagaaatccggcacaaagaagttaaaaaccgagaccgataaggaaaatgccgaggtaaaattcaaagactttctgttgagcttgaagaccatgatgtttagtgaggacgaggccttgtgtgtcgtcgatttgctgaaagagaaaagcggagtaattcaagacgcccttaagaagtcaagcaaaggagagctcacaacacttattcatcagctccaggagaaggacaaacttctggccgccgtaaaagaagatgctgccgctacaaaggatagatgcaagcagctgacccaagaaatgatgactgagaaggaacggagcaatgtcgtaatcactcggatgaaggatcggattggcaccctggaaaaagaacacaatgtcttccagaataagatacacgtgtcctaccaggaaacacaacagatgcagatgaaattccagcaagtgcgagagcaaatggaagccgagattgcccatctaaagcaggagaacgggattcttagggacgcagtgagcaatacaacgaatcagctggagtctaagcaaagtgccgagctcaataaactgaggcaagattacgcccgcttggtcaacgaactgacggaaaagaccgggaaattacagcaggaagaagtacagaaaaagaacgccgagcaggctgctactcaactgaaggttcagctgcaggaggccgagagacgctgggaggaagtgcagtcctatatcaggaaacgcacggcagaacacgaggcagcccagcaggacctccagtcaaagtttgtggccaaagagaatgaggtgcaatctctccactctaagctaacggataccctcgtgtctaagcagcaacttgaacagagactgatgcagctgatggaatcagagcagaaacgcgtgaacaaagaggaaagcctgcagatgcaggtgcaggatatccttgagcagaacgaggccctcaaagcccaaattcaacagtttcatagtcagattgcggcgcaaacctccgctagtgtactggctgaggaattgcacaaggttatcgcagaaaaggacaaacagatcaaacagacggaagacagtcttgcttctgagagagaccggctgactagcaaagaagaggaactgaaagacatccagaacatgaatttcctcctgaaagccgaggtccagaagctccaggctttggccaacgaacaggcagcggccgcacacgagctcgagaaaatgcaacagtctgtgtacgttaaagatgacaaaatcagactgcttgaagagcagctccagcatgagatcagcaataagatggaagagtttaaaatcctgaacgatcagaacaaagccctgaaatctgaggtgcaaaaactgcagacattagtttcagaacaacccaacaaagacgtggttgaacagatggaaaaatgcatacaggaaaaagatgaaaaattaaagactgttgaggaactgctggagaccgggctgattcaggtggctaccaaggaggaggaactgaatgccatccgcacggaaaacagtagtctgacaaaagaggtacaagatctcaaggccaagcagaacgatcaggtgtcgttcgcctctttagtagaggagctaaagaaagtcatacatgaaaaggatggaaagattaaaagcgtggaagagctactggaggccgaactgctcaaagtggccaataaggaaaagacagttcagctgtctatcacttccaaagtacaagaactgcagaatctactgaaggggaaggaggaacaaatgaataccatgaaggccgtcctggaagaaaaggaaaaggacctggcaaacactggaaaatggctccaggatttacaagaggaaaatgagtcactgaaagcccatgtacaggaagtcgctcagcacaatctcaaagaagcatcctccgcctctcagttcgaggaacttgaaatagttttgaaggaaaaagagaacgaacttaaaagattggaggccatgctgaaagaacgtgaaagtgacctgtcaagtaaaactcaactactccaggatgtgcaagatgagaataagctctttaagtcccagattgagcagctgaagcaacagaactaccagcaggcgagcagttttccaccgcatgaagaattactgaaagttatctctgagcgggagaaagaaatctctggcctttggaatgagctggactctttgaaagatgctgttgagcatcagagaaagaagaataatgatctgagggaaaagaattgggaggccatggaggcacttgcaagcacagagaagatgttacaggacaaggtgaacaaaacttcgaaagaacgccagcagcaggtggaagccgtggaacttgaagcaaaagaagtgctaaagaagctattccccaaggtgagcgtgccgagtaacctgtcctacggtgagtggctgcatggttttgaaaagaaagccaaggaatgtatggccggcaccagtggctccgaggaggtgaaggtcctggaacacaagctgaaagaggcagatgagatgcacactctgttgcagttggaatgtgagaagtacaagtccgtccttgccgagacagagggtatcttgcagaaactgcagagatcagtagagcaggaagagaataagtggaaggtcaaggtcgatgaaagccacaagaccatcaagcagatgcagagctcttttacatcaagtgaacaggagttagagcggctccggagcgaaaacaaagacattgagaacctgagaagggaacgggagcatctcgagatggaattagagaaggctgaaatggagcggtccacgtacgttactgaggtgagggaactgaaggctcagctcaacgaaactctcacaaaacttcgaaccgagcagaacgagcggcaaaaggtggcaggcgatctgcacaaagctcagcagagtctggagctgattcagtctaagattgtcaaagcagcgggcgacacaaccgttatcgaaaattcagatgtgagtcccgaaacagaaagcagtgagaaggaaactatgtctgtgagcctgaatcagacagtgacacagctccaacagctgctgcaggccgtgaatcaacaattgacaaaagaaaaagaacactatcaagtcctggagtag

SEQ ID NO: 121602 - DNA, 4074 bp, synthetic construct
  misc_feature 1..4074: note = Description of Artificial Sequence: Synthetic coding sequence
  source 1..4074: mol_type = other DNA
atggaattttatgagtccgcttacttcatcgtccttatcccatccatcgttataaccgtcattttcctgtttttctggctctttatgaaggagacactttatgatgaagtgctggcaaaacagaaacgcgagcagaaactgattcccactaagacggataagaaaaaagccgaaaagaaaaagaataaaaagaaggaaatacagaatggaaacctgcatgagagtgactcagagtcagtgccccgcgacttcaagttgagtgatgctcttgctgtggaggatgatcaggttgcacccgtgcccctcaacgtcgtggagacgtcatcctctgtgcgggagaggaagaaaaaggaaaagaaacagaagcctgtgctggaggagcaggtgatcaaggaatctgatgcctcaaagatcccgggaaagaaggtggagccagttcccgtaaccaaacagcctaccccaccttctgaagcagccgccagtaagaagaagccaggccagaaaaagtccaaaaacggaagtgacgaccaggacaagaaggtagagactctgatggtgccatccaagcgacaagaagctctgcctttgcatcaggaaaccaaacaagagtccggctcaggtaagaagaaggcttcatcaaaaaagcagaaaaccgagaatgtatttgttgatgaacccctgatccacgcgacgacttacatcccccttatggacaacgccgatagttccccagttgtggataagagagaagtcattgatttactgaagccagaccaagtcgaaggaatacagaaaagcgggactaagaaactgaagacggagacagacaaggaaaacgcggaggtgaagtttaaggactttctcttatctctcaaaaccatgatgttttcagaagacgaggcgttgtgcgtggttgacctcctgaaggagaaatctggggtaattcaggatgcactgaagaaatcatcgaaaggcgagttgacaaccctgattcatcagcttcaggagaaggataaactcctcgctgccgtgaaggaggacgctgccgccaccaaggaccgctgcaaacagctgacccaggagatgatgaccgaaaaggagagaagtaatgtggtcattactagaatgaaggaccggattgggactctggagaaagagcataacgtgttccagaataagattcacgtttcttatcaagaaactcagcaaatgcagatgaaatttcagcaggttagagagcagatggaggccgagattgctcacctcaagcaagagaacggaattctgcgagatgccgtgtctaatacaacaaatcagttggagagcaaacagagcgcagaactcaacaagctgagacaggactacgctcgcctcgtcaatgagcttactgagaaaacaggaaaactccagcaggaagaggttcagaagaaaaatgcagagcaggccgctacacaactgaaggttcagttgcaagaagctgagcgaaggtgggaggaggttcagagctacattcggaagcgtaccgctgagcacgaagccgcgcaacaagacctccaaagcaagttcgtggccaaggagaacgaggtccagagcctgcattccaagctgacagacactctcgtctcaaaacagcagttagaacagcggctgatgcagctaatggagtctgaacagaagagagtaaataaggaggagtctctgcagatgcaggtgcaggatatcctcgaacaaaacgaagcccttaaggcccagatccagcagttccatagccaaatcgccgctcagacttccgcaagcgtcttggctgaggagcttcataaggtaattgccgagaaggataaacagatcaaacaaactgaagacagcctcgcctcggagagggatcgtttgacaagcaaagaagaggaactcaaggatatccaaaatatgaactttctacttaaggccgaagtgcagaaactgcaggcactggcaaatgaacaggcggcggccgcacatgaactcgagaaaatgcagcaaagcgtgtacgtcaaagatgataaaattagactgttagaagagcagctacagcacgaaatctcaaacaagatggaggaattcaaaatcctcaatgaccagaataaggcgttgaaatccgaagtgcagaaactgcagacgctcgttagtgagcaaccaaacaaagacgtggtggagcagatggagaagtgtatccaggagaaggacgagaagctgaaaactgttgaagagctgctggaaaccggactgatccaggttgctactaaggaagaagaactcaacgcgattagaacagagaatagttctctgaccaaggaggtacaagatttgaaggccaagcagaacgaccaggtgagcttcgcttcgctcgtggaagagttgaaaaaggtcatccacgaaaaggacggcaagatcaagagcgtggaggagctgttggaagccgagttgctgaaggtcgctaataaagagaaaacagtacaggaccttaaacaggagatcaaagccctcaaggaggaaatcggaaatgtacaactcgagaaagcccagcaactgtctatcacgagcaaggtccaggagcttcagaacctgctgaaaggtaaggaggagcagatgaacaccatgaaggctgtgctggaagagaaggaaaaggacttggccaacactggcaagtggttgcaggatctgcaagaagaaaatgagagtcttaaagcccatgtccaggaggtggctcagcacaatctcaaagaggcttccagcgcatctcaatttgaagaactcgagatcgtgctcaaggagaaagaaaatgagctcaagagacttgaagcaatgctgaaagaacgggaatctgatctgtcgagcaagacacagctgttacaggacgtacaggatgagaacaaactgtttaagtcccaaatagaacaactcaaacagcagaattatcagcaagccagttcctttccgcctcacgaagagctgctcaaagtgatctccgagagagagaaagaaataagtggactttggaatgagcttgactcgctcaaggacgccgtggaacatcagaggaaaaagaataacgatcttcgggaaaagaattgggaggcaatggaggccttagccagtaccgagaagatgctgcaggacaaggtcaataaaacctcgaaggagcggcagcagcaagtggaggcagttgagctcgaggccaaggaggtcctgaaaaagttattcccaaaggttagtgtgcctagtaatctgtcatacggggaatggcttcatggcttcgaaaagaaagccaaggagtgcatggctggtacctctgggtcagaggaggtaaaagtgctcgaacacaagctcaaggaggccgacgagatgcacaccttgttgcagttggaatgtgagaagtataagtccgtactcgccgaaacagaaggcatactgcaaaaactacagcgttccgtggaacaggaagagaataagtggaaagtgaaggtggacgagtctcacaagaccattaaacaaatgcaaagctccttcacctcctcagagcaggagctcgaacgactgcggagcgagaataaggatatagagaacttgagacgtgagagagagcacctcgagatggagctggagaaagccgagatggaaagaagcacctatgttacagaagtccgggagttaaaagatctgttgactgaactgcaaaaaaagctggatgactcgtattccgaagcagttaggcagaacgaggaacttaatctactcaaagctcagcttaacgaaaccctcacaaagttgcgtacagagcagaacgagcggcagaaggtcgccggtgatctccacaaggcccagcagagtctagagctgattcagagcaagatagttaaagctgccggggacaccacagtgatcgaaaattccgacgtttcgcctgagacagaatctagcgagaaggaaacaatgagtgtatctctcaaccagaccgttacccaactacagcagctccttcaagcagtcaaccaacagctgacaaaggaaaaggagcattatcaggtgcttgagtag

SEQ ID NO: 121603 - DNA, 3921 bp, synthetic construct
  misc_feature 1..3921: note = Description of Artificial Sequence: Synthetic coding sequence
  source 1..3921: mol_type = other DNA
atggaattctatgagagtgcatacttcatcgtgttgatcccgtctatagttatcaccgtgatctttctcttcttctggttgtttatgaaggagacattgtacgatgaggtgttggcgaagcagaaaagggagcaaaagctcattcccaccaaaaccgataaaaaaaaggcagaaaagaaaaagaataagaaaaaagagatccaaaacggcaacctgcacgagtctgactccgaatcagtcccccgcgattttaaactctctgatgccctggctgtggaggatgatcaggtggcccctgtaccgctgaatgtagtggagacaagcagttcggtgagagagaggaaaaagaaggagaagaaacagaagccagtgttggaagaacaggtgatcaaagagagtgacgcaagcaaaattccaggaaagaaggtagaacccgtacccgtgacaaagcaaccaacccctccaagcgaggctgctgcttccaaaaaaaaacccggccaaaaaaagtccaaaaacgggtcagacgatcaggacaagaaggtcgaaaccctgatggtgccatccaagcggcaagaggccttaccattacatcaagaaacaaagcaagaatctggcagcggtaagaaaaaagcttcatccaaaaagcagaaaacagagaacgtgttcgttgatgagcccctgatccacgcgacaacttatattccgctgatggacaacgcggacagttccccagtggtagataagagggaagtgatcgacctattaaagcccgaccaggtagaaggaatccaaaaatccgggactaaaaaattaaagacagagacagacaaggagaatgccgaggtgaagtttaaggacttcctcctgtcgctcaaaactatgatgtttagcgaagatgaagcactgtgtgtggtggatctgctgaaggagaaaagtggtgttatacaggacgcactaaaaaaatcgtctaaaggagagctgaccacccttattcatcagttgcaggaaaaggataagcttctggccgccgtaaaagaagacgctgcggctacaaaggaccggtgtaaacagctgacccaagaaatgatgacagaaaaggagaggagcaatgtcgtaattaccaggatgaaggatagaataggaactctggaaaaggaacacaatgtgtttcagaataagatccatgtgtcctaccaagaaacccagcaaatgcagatgaagttccagcaggtccgagaacagatggaggctgaaatagcccatctcaaacaggagaacggcatactgcgagatgcagtaagtaacacgaccaaccaactggagtctaagcagtctgccgaactcaataagctgcgccaggattatgctcgccttgtgaatgaattaactgaaaagactggcaagctgcaacaggaggaggtacagaagaaaaacgccgaacaagctgcaacccagctgaaagtacagctccaggaagcagaaaggcggtgggaggaagtacaatcttacatacgcaaaagaaccgcggaacacgaagctgcccaacaggatctccaaagcaaattcgtggccaaggaaaacgaagtccagagcctccactccaagcttaccgacaccctggtctctaagcagcaactggagcaacggctgatgcagttgatggagtcagaacagaaacgagtgaataaggaggaatccctgcaaatgcaagtccaagacattcttgaacagaatgaggccttaaaggcacaaattcagcagtttcactctcagattgctgcccagacgagtgccagcgtgcttgccgaagagcttcataaggtgatcgccgagaaggacaagcagattaagcagaccgaggactctttggccagcgaacgcgaccgattgacgagtaaggaggaggagttgaaggatatccagaatatgaatttcctcctgaaggcagaggtccagaaacttcaagctctggcgaacgagcaggcagccgcggcgcacgagctggagaaaatgcagcagagcgtgtacgtcaaagacgacaagattaggttattagaggaacagctccaacacgagataagcaataaaatggaggagttcaagattctgaatgatcagaataaggccctgaagtccgaagtccagaaattgcagaccttggtaagtgagcagcctaataaggacgtggtggaacagatggagaagtgcatacaggaaaaagacgagaagctgaagactgtggaagagctgctggagactggcctgattcaagtcgccaccaaagaagaggagttgaacgctatccggacagaaaacagttcactcacaaaggaggtacaggatttaaaagccaagcagaacgaccaggtgagctttgcctccttagtggaagaactgaagaaggtaatccacgagaaggatggaaaaataaagagtgtggaggagttgttggaagctgagcttcttaaagttgccaataaggaaaaaacggtccagttgtccattacctctaaagtccaggagttgcaaaaccttcttaagggcaaagaggagcagatgaacacgatgaaagcagtgctggaggagaaagaaaaggacctagcaaatactgggaagtggcttcaagatctgcaagaagagaacgaaagcttgaaggcccacgtgcaggaggtcgcccagcataacctcaaagaggcctcatcagcgtcccaattcgaggagctcgagattgtcctgaaagagaaagagaacgagttgaagcggttagaggcgatgcttaaagagagggaatcggacctgtcctctaagacccaactcctgcaagatgtgcaggatgagaataaactcttcaagtcgcagatcgaacagctcaagcaacaaaattatcagcaagcctcttcttttcccccccacgaagagctactgaaggtgatcagcgagagagagaaagagatctcaggtttgtggaacgagcttgactccctcaaggatgccgtagaacaccagcggaagaaaaataacgacctgcgtgagaagaactgggaggccatggaggctttggcatctactgaaaagatgctacaggacaaagttaataagacctcaaaagaaagacaacaacaggttgaggctgtggaattggaggctaaagaggtgctgaaaaaacttttccccaaggttagcgtgcctagcaacttgtcttacggggagtggctacatgggttcgagaaaaaagccaaggagtgcatggcaggaaccagcggctctgaggaggtgaaagtcctggagcataagttgaaggaggccgacgaaatgcataccctcttacagctcgaatgcgaaaaatataaatctgtgttggcagagaccgaaggcattctccaaaaactccagagaagtgttgaacaggaggaaaataagtggaaggtaaaagttgacgaatcccacaagactatcaaacagatgcaatccagcttcaccagctccgagcaagaactggaacgcttaaggtccgagaataaggatatagaaaatctgcgacgtgagagggaacatcttgagatggaacttgaaaaagccgaaatggaaagatctacatacgtcacagaagttcgggaacttaaggctcagctcaacgaaactctcacgaagctgcggaccgagcagaatgaaaggcaaaaggttgccggggacctgcacaaggcccagcagagtttggagctgattcagtccaagatagtgaaggctgccggcgacacgacggttattgagaatagcgacgtatcacctgagaccgagtcttccgaaaaagagacgatgagcgtctcactgaaccagacagtaacccagcttcaacagctcctacaggccgtgaatcagcagctcaccaaggaaaaggagcactatcaagtgctggaatag

SEQ ID NO: 121604 - DNA, 4074 bp, synthetic construct
  misc_feature 1..4074: note = Description of Artificial Sequence: Synthetic coding sequence
  source 1..4074: mol_type = other DNA
atggaattttacgagtctgcttactttatcgtcctcatccccagcatcgtgataactgtaatttttttgtttttctggcttttcatgaaagaaaccttgtatgacgaagtgcttgccaaacaaaaaagagagcagaagctgatacccacaaaaacagataagaaaaaggccgagaaaaagaagaataagaagaaggaaatccagaacggcaacttacacgaatcagattcagagagcgtgcccagagacttcaaactgagtgatgcactggccgttgaggacgatcaggttgctcccgtcccactgaacgttgtagagacatcctcatccgtgcgtgaaagaaaaaagaaagagaagaaacagaagccggtactcgaggagcaagtgatcaaagaatcagatgcctctaaaatccccggaaaaaaagtagagccagtgcccgtgactaagcagcccactccaccctccgaagccgccgcaagcaaaaaaaagccggggcagaaaaagtcgaagaatggctctgatgaccaggataaaaaggtggagaccctgatggttccttccaaaaggcaggaagcattgcccctccaccaggaaacaaaacaagagtcggggagcgggaagaagaaagcatcctccaaaaagcagaagacagagaatgtttttgtggacgaacctttaatacatgccacaacctatatccctctaatggataatgcagattcatcacccgtggtggataagcgagaagttatcgatcttctgaaacccgaccaagtggaggggattcaaaagtctggcaccaaaaagctcaagaccgagactgataaggagaatgctgaggtcaaattcaaggatttcctcctgagcctgaaaaccatgatgtttagtgaggatgaggccttgtgtgtggtcgacctcttgaaggagaagtcaggcgtcatccaggatgctctaaaaaagagcagcaaaggagagctcaccacactgatccatcagttgcaggagaaggacaagctgcttgctgcagtgaaagaggatgctgcagctaccaaagacagatgcaagcagctcacacaagagatgatgaccgaaaaagagcgatctaacgtcgtgatcacccggatgaaagatcggataggaacacttgaaaaagaacataacgtgttccaaaataagatccacgtttcctaccaggagacccagcagatgcagatgaagtttcagcaggtcagagaacagatggaagctgagatcgcccacctcaaacaggaaaatggaatcttaagagacgccgtgtcaaacaccacaaaccaattagagtccaaacaatctgccgaactcaacaagttgcgccaggattacgcccgactggtgaacgaattgactgaaaaaaccggcaaactgcaacaggaagaggtgcaaaaaaagaacgcagagcaagctgcaacccagcttaaggtgcagctgcaggaggccgagcgccgatgggaagaggtgcaaagctatattcgcaaaaggacagcagaacacgaagccgcccaacaggatctccagagtaaattcgtggcaaaagaaaacgaggtccaatctctccacagtaagctgacagatacactggtctctaaacagcaacttgaacagcgcttgatgcaattaatggaatctgagcagaagcgcgtcaataaggaggagtctctccaaatgcaggtgcaagatatattggaacagaatgaggctttaaaagcccagattcagcagtttcattcccaaatcgctgcccagacctccgcgtcggtactcgccgaagaacttcacaaagtcattgccgagaaggataaacagatcaagcaaaccgaggatagcctggctagtgagcgggataggctgacatcaaaagaggaggagctaaaagacattcagaacatgaactttttgttaaaagcggaggtgcaaaaactgcaggccttagccaatgaacaggccgctgccgctcacgagctcgagaagatgcagcagagtgtgtatgtgaaggatgataaaattagactgctggaggaacagctccaacatgagatttcaaataagatggaagagttcaaaattttaaacgaccaaaacaaggctctcaaaagcgaggtccagaaactccagacattggtcagtgagcagcccaacaaggatgttgtggaacagatggagaaatgcatccaggagaaagatgaaaagctgaagaccgtggaagaactcttagaaacagggctgatccaggttgctacaaaggaggaggagctgaatgcaatccgaacagagaactccagtttgaccaaggaagtgcaggacctgaaagccaagcagaacgaccaggtgagttttgcaagcctggtggaagagcttaagaaggtgatccacgaaaaagacgggaaaattaagtctgtggaggagctcctggaggcagagttgttaaaagtggccaacaaagaaaagaccgtccaagacttgaagcaggaaatcaaggcacttaaagaagaaatagggaacgtacagctggagaaagcacagcagctcagcataaccagtaaggtacaggagttacaaaatctgctgaaggggaaagaagaacagatgaataccatgaaagctgttctagaggagaaagagaaagatcttgcgaacacaggtaagtggctccaggatctgcaggaggaaaacgagagtcttaaggcacacgtgcaggaagtagcacagcacaacctgaaggaagccagctccgcatcacagtttgaggagctggagattgtgttaaaggagaaggagaacgaattaaaaaggctggaggccatgcttaaagagcgggagagcgatctttcctcaaaaacacaacttctccaggacgtgcaggatgaaaataaactgtttaagtcacagatcgagcaattgaaacagcagaactaccagcaggcaagtagttttccccctcacgaggagttgctcaaggtcataagcgaacgggagaaagagatctctggtctatggaacgaactggactccctcaaagatgccgtggaacatcagcgtaagaaaaacaacgatctgagagagaagaattgggaggccatggaagcactggctagcaccgagaagatgttacaggataaggtaaataaaacctcaaaggagcgccaacagcaagtggaggccgtggagctcgaagccaaggaggttctgaagaagctttttcctaaagtgagcgtcccgagcaacttgagctacggagagtggctgcatggtttcgagaagaaagccaaagagtgcatggccgggacttcgggttcggaagaggtcaaagtgctagaacacaaactgaaagaagccgacgagatgcacacgctcttgcagctggaatgtgaaaagtacaaatcagtgcttgctgagacggaggggatcctgcagaagttacagagatcagtggagcaggaggagaacaaatggaaagtgaaggttgacgagagtcacaaaaccatcaaacagatgcaaagttcttttacatcttccgagcaggagctggaacgacttagatccgagaacaaggacatcgagaacctgcgccgcgagcgggaacatctggaaatggaactggagaaggctgagatggagcgttccacctacgtcacagaggtgcgagaactcaaggatttgttgacggaactgcagaaaaagctcgacgacagctatagtgaagctgtcaggcagaatgaggagctcaatctgcttaaggctcagttaaacgagacactgactaagttaaggaccgagcagaacgaacgccagaaggtggcaggcgatttgcacaaagcccaacagagtctggaattgatccagtcaaaaattgtgaaagccgccggtgacacaacagtgattgagaattcggacgtgtcccctgaaaccgagtcgtccgagaaagagacaatgtcagtctcactaaatcagaccgtgacacagttgcaacagcttttgcaagcagtgaaccagcaacttaccaaagagaaggagcactatcaggtgttggagtag

SEQ ID NO: 121605 - DNA, 3921 bp, synthetic construct
  misc_feature 1..3921: note = Description of Artificial Sequence: Synthetic coding sequence
  source 1..3921: mol_type = other DNA
atggagttctatgagagtgcgtactttattgttctgatcccctctatagtgattacagtcatattcctgtttttctggcttttcatgaaggaaactctttacgatgaggtcttggcaaaacagaagagggaacagaagctgattccaacaaaaacggataagaaaaaagcagagaagaaaaagaacaagaaaaaagagatacagaatggaaaccttcacgagtccgattccgagagtgtccctagagatttcaagctgtcagacgccctggctgttgaggacgaccaagtggcgccagtgcctctgaacgtggtggagacaagttcctcagtacgggaaagaaagaagaaggagaaaaaacaaaaaccagttctggaggaacaggtgattaaagaatcagatgcctccaagatcccgggaaagaaagtggaaccggtacctgtgacaaagcagcccactcccccctcagaggctgctgcatccaaaaaaaaacccgggcagaaaaagtccaaaaatggcagcgatgaccaggacaagaaggttgagacccttatggtaccttcaaagcgccaagaagccttaccgctccaccaggaaactaagcaggaatccggatcggggaagaagaaggcctcttcgaaaaaacagaagacagagaatgttttcgtggacgagccactgatacatgccactacctacatcccactgatggataacgccgatagtagccccgtggtagacaagagagaggtcatagacctgcttaaaccagaccaggttgaggggatccagaagtccggtacgaaaaaactgaagacagaaacagataaagaaaacgcagaggtgaaatttaaggacttcctgctgtcactgaaaaccatgatgttctcagaggacgaagcgctgtgtgtcgtggatcttctgaaagaaaagtcaggcgtcatccaagatgcccttaagaagagttccaagggcgagctgaccactctgattcatcagttgcaggagaaagataaactcctggctgcggtgaaagaggacgcggccgcgacaaaggaccggtgcaagcaactcacccaggaaatgatgacggagaaggaaagaagcaacgtggtgattacccgcatgaaggaccgcattggaaccctagagaaggaacacaatgtcttccaaaacaaaattcatgtgagctaccaggaaactcaacaaatgcagatgaagttccagcaggtccgcgagcagatggaagccgaaatagcacatcttaagcaggagaatggcattctaagggatgcagtctccaataccacaaaccagttagagtcaaaacagtcagccgaactgaacaagctgcgccaggactatgcccgtctggttaacgagttgacagagaagacagggaagttgcaacaggaagaagtgcagaagaagaatgccgagcaggcagccacgcagctgaaagtgcagctgcaagaggcggagcgcaggtgggaagaagtgcaatcatacataaggaaacggactgccgagcatgaagcagcccagcaggacctccagtctaaatttgtggccaaagagaatgaggtacaaagtcttcattctaagctaactgacacccttgtttccaaacaacaactagagcagagactcatgcagctaatggaatcagagcagaagcgcgtaaacaaggaagaatccttacagatgcaggtccaggacatcctggagcaaaacgaggccctaaaagcccagatccagcagttccacagccagatagctgctcaaacaagtgcatccgtgcttgctgaggagctgcataaggttatcgccgagaaagataagcagattaagcaaaccgaggactcacttgcaagtgaaagagacagactcaccagtaaggaagaagagttgaaagacatccaaaatatgaattttctattaaaggctgaggtgcagaaactccaggccttggctaacgagcaggccgcggctgctcatgaactggagaagatgcagcagagcgtttacgtgaaagatgacaagattaggctacttgaggagcaactgcagcatgaaatctccaataagatggaggagttcaagattctcaatgaccagaacaaggctttaaaatcggaagtgcagaaacttcagacacttgtatcagaacagcccaacaaagatgtggttgaacagatggaaaagtgcattcaggaaaaagatgagaagctgaagactgtagaagagctgttggaaaccggtctgatccaggtggctacgaaggaagaagaacttaacgcaattcgcaccgagaattcgtcccttaccaaggaagttcaagatctgaaagcaaagcagaatgaccaggtatcctttgccagcctcgttgaggagctcaagaaggtgatacatgagaaagatggtaagatcaaatcagtggaggagctcctggaggccgagctgctaaaggtggccaacaaagagaagactgtgcagctctcaattacctctaaggtgcaggagctgcagaatctcctcaagggaaaggaggaacagatgaatacaatgaaagctgtgctcgaggagaaggagaaggatctggctaacaccggcaagtggctgcaggacttgcaagaggaaaatgagagtcttaaagctcacgttcaggaggtggcccagcacaatcttaaagaagcgtcttcagctagtcagttcgaggagttagaaatcgtgctgaaggaaaaagaaaacgagctgaagcgtctggaggctatgttgaaggagcgcgagagtgatctgagctctaaaacccagcttctgcaagacgtgcaagacgaaaataagctgttcaagagccagatcgagcagctgaagcagcagaattaccagcaagctagttccttcccaccacacgaagagcttctgaaggtgatctccgagagagagaaagaaatttctggtttatggaacgagttggactctcttaaagatgccgtggagcaccaacgtaagaaaaataacgatttacgggagaagaactgggaagccatggaggccctggctagtactgaaaagatgctgcaggacaaggtcaataagacctccaaagaaagacagcaacaggtcgaggccgtggaactggaagctaaagaagtgctaaaaaaattatttccaaaggtgtctgttccatccaacctctcctatggggagtggttacacggcttcgaaaaaaaagcaaaggaatgcatggcgggcacctctgggagtgaggaggtgaaagttttggagcacaagctgaaggaagctgatgaaatgcacacattgctccagctggagtgtgaaaaatataagtccgtgctggccgagacggaagggatactgcaaaaacttcagaggtctgttgaacaagaagagaataagtggaaagtgaaagtcgacgagtcacataaaaccattaagcagatgcagtcttccttcaccagtagcgagcaggagctcgagcgcttgcgttctgagaacaaggacatcgagaacctgcgtcgcgaaagagagcatctggagatggaactcgagaaggctgagatggagagatcaacctatgtcaccgaagtgcgggaactcaaagcccaactgaatgagactctcaccaagcttcggactgaacaaaatgaacgacagaaagttgcaggcgacctgcataaagcacagcagtccctagagctgattcagtctaagatcgttaaagctgccggcgataccactgtgatcgagaactctgacgtgagccctgagacagaaagtagtgaaaaggaaactatgtccgtatccttgaaccagacggtgacccagctccagcagctcttacaagctgtcaatcagcagttgacgaaggaaaaggaacactaccaagtgctcgagtag

SEQ ID NO: 121606 - DNA, 4074 bp, synthetic construct
  misc_feature 1..4074: note = Description of Artificial Sequence: Synthetic coding sequence
  source 1..4074: mol_type = other DNA
atggaattctatgagtccgcctacttcattgtgctgatcccttccatagtcattaccgtcatatttctgttcttctggttatttatgaaggaaactctatacgacgaagtgctggctaagcagaaaagggagcagaagttaatcccaactaaaacagacaagaaaaaagcggagaagaaaaaaaataaaaaaaaggaaattcagaacggcaatctgcatgagtccgattcagagtccgtgccaagagatttcaagctgtccgatgcgttagccgttgaagacgatcaagttgctcccgtgccactgaatgtggtggagacgtctagtagtgtccgcgagcgcaaaaaaaaggagaagaagcagaaacccgtgctggaagaacaggttataaaggaaagtgatgcgagcaagataccaggtaagaaagtggaacctgtccccgtgacaaagcagccaactccgccctctgaggctgccgcctccaaaaaaaaaccaggccagaagaaatctaaaaacggatctgatgatcaggacaaaaaagttgaaaccctcatggttcctagcaaaagacaggaagctctacctttgcatcaggaaaccaagcaggagagcggatcgggcaaaaagaaggcctcgagcaagaaacagaagaccgaaaacgtgtttgtcgacgagccactcatccatgctaccacgtacatccctctcatggataacgctgattcctcccctgtggtggacaagagagaggtaatcgatctgttgaagcctgatcaggtcgaaggtatccagaaaagcgggacgaagaaactgaagacggagaccgataaggagaatgccgaagtcaagtttaaggactttctgttatctctgaagactatgatgttttctgaagatgaggccctctgtgtggtagacctgcttaaggagaagtccggcgtgatccaggacgccctgaaaaaatcaagtaagggagagctgactaccctgatccaccagcttcaggagaaggacaaactgctagcggcagtgaaggaggacgccgccgctaccaaggacagatgcaagcaactaacgcaggagatgatgaccgaaaaggaacggagcaatgtggttataacccggatgaaagatagaatcggaacattagaaaaggagcataatgttttccagaataagattcatgtcagctaccaagagacccagcagatgcaaatgaaattccagcaagtccgggaacaaatggaggcagaaatagcccacctcaagcaagaaaacggaatcctgcgcgatgccgtatccaacaccacgaaccagttggagtccaaacagagcgccgagttgaacaaactgaggcaagactacgcccgactcgttaacgagctgaccgaaaaaacggggaagctgcagcaggaagaagtgcagaagaaaaacgccgaacaggcagctacccagctcaaagtccagctgcaggaggccgaacggagatgggaggaggtgcagagttatattaggaagcggaccgccgaacatgaagctgcccagcaggacctgcagtctaagttcgtggccaaggaaaacgaggtgcagtccctgcactccaaacttacagacaccctcgtgtcgaagcaacagctggaacaaagactgatgcaactgatggagagcgaacagaagcgggtgaacaaggaagaatccttacagatgcaggtacaggatatactcgagcaaaacgaagccctaaaagcgcaaatacagcagtttcatagtcagattgctgctcagacatctgcttctgtgctggccgaagagctgcacaaggttattgccgaaaaggataagcagatcaaacagacagaagactccctggcctctgaacgcgacaggcttacctcaaaagaggaggaactgaaggacatccaaaatatgaactttttgctcaaagccgaggtgcaaaagctccaggccctcgccaatgagcaggccgcagccgcccacgagctggagaagatgcagcaatcagtgtatgtaaaagatgataaaatccggcttctcgaagaacagctgcagcacgaaatatccaacaagatggaggagtttaagatccttaatgatcagaataaggctctgaaaagcgaggtacaaaagttacagacacttgtatctgagcagccgaataaggatgtggtcgaacaaatggagaaatgcatccaagagaaggacgagaagttaaaaaccgtggaagaacttctggagaccggcttgattcaggtagcgacaaaagaagaggaactcaacgccattagaacagagaactcatcactcactaaggaggtgcaggatctgaaggccaaacagaacgaccaagtgagtttcgcttcactcgtcgaggagctcaaaaaagtcatacatgagaaggacggcaaaataaaatccgtagaagagctcctggaggctgaactcctgaaggtggccaataaggagaagacagtgcaggacctcaaacaagaaataaaggccctcaaagaggagattgggaacgtgcaactagaaaaagcccaacagctcagtataacgagcaaggtgcaggagcttcaaaacctcctgaagggcaaggaagaacagatgaatacaatgaaagccgttctcgaagaaaaggagaaagacctggctaatacaggaaagtggctgcaagatctgcaggaagagaatgaaagcctgaaggctcatgtgcaagaagtggcacagcacaatctgaaggaggccagcagcgcttcccagttcgaagaacttgagatagtgctgaaagaaaaagagaacgagctgaaacggctggaggccatgctgaaagagcgggaatccgatctatcctcaaagacccagctacttcaggatgtgcaggatgagaacaaattgttcaaatcacaaattgagcagttgaagcagcagaactaccagcaggctagcagctttcccccacacgaagagttactgaaggtcatatcagaaagggaaaaagagatctctgggctgtggaacgagctggattctcttaaagatgccgttgagcatcagcggaaaaagaataacgaccttagagagaaaaactgggaagctatggaggccttggcgtctaccgagaagatgctccaagacaaagtcaataaaactagcaaggaacgccaacaacaggtagaagcagtcgagctggaggctaaggaagtgctgaagaagctgtttcctaaagtgagcgtacctagcaacctgtcttatggcgagtggctgcatgggttcgaaaaaaaggcgaaagagtgcatggccggcacttccgggtctgaggaggttaaggtgctcgagcacaaactgaaagaagctgatgagatgcatacgctgctgcagctggaatgtgagaagtataaaagtgtgcttgcagaaacagagggtatcctgcaaaaactccagagaagcgtggaacaggaggaaaacaagtggaaggtgaaggtggacgaaagccacaaaactattaaacagatgcaatcaagtttcacctcttctgagcaggaacttgaaaggctgaggtctgaaaacaaagatatcgagaacttacggagagagagagagcatctcgagatggagttagagaaagccgagatggaaagaagcacttacgtgaccgaagtcagagaactgaaggatcttcttaccgagctgcagaaaaagctggacgacagctatagcgaggctgtcaggcagaacgaggagctgaatctgctcaaggcccagctgaacgagacactgactaagcttaggactgagcagaacgagagacagaaagtggccggcgaccttcacaaggcccagcagtcacttgaactcatccagagcaagattgtgaaggcagctggcgatactactgtgatagagaacagcgatgtgagccccgaaacggagtcttctgagaaagaaaccatgagcgtgagcttgaaccagaccgttacccagctgcagcagcttctccaagccgttaaccagcaactcacaaaagaaaaggagcactaccaagttctagagtag

SEQ ID NO: 121607 - DNA, 3903 bp, synthetic construct
  misc_feature 1..3903: note = Description of Artificial Sequence: Synthetic coding sequence
  source 1..3903: mol_type = other DNA
atggaattctatgaaagcgcttatttcattgtacttatcccctccatcgtcattacagtaattttcctgttcttttggctgttcatgaaggagactctgtacgatgaggtgctagcaaagcagaagagggaacagaagcttattcccaccaagaccgacaaaaaaaaagcagaaaagaagaaaaacaaaaaaaaggaaatccagaatggaaacctgcacgaaagtgactcagaatccgttccacgcgacttcaagttgagcgatgctttagccgtggaggacgaccaggtcgctccagtaccactgaatgtcgtggaaactagcagctcagtgagggaaagaaaaaaaaaggagaaaaagcagaaacccgtgctggaagaacaggtgatcaaagagagtgatgcttctaagatccccggcaagaaggtggagccagtgcctgtgacgaagcagccaacacctccaagtgaggcagctgcgagtaagaaaaaacccggacagaaaaaaagtaagaatgggagtgacgatcaagacaagaaggtagagacactgatggttccgtcgaagcgccaggaggcacttcccctgcaccaggaaaccaagcaggaaagcggttccggcaaaaaaaaagcttcatccaaaaaacaaaagactgagaatgtgtttgtcgatgaacctctgattcacgcaacaacttatattccactcatggataacgccgattcctcccccgtggttgataaaagagaagtcatcgatctactcaagcccgatcaggtagaggggattcagaagagcggtaccaagaaactgaagaccgaaactgataaagaaaacgccgaagtgaagtttaaagattttctgcttagtctcaaaaccatgatgtttagcgaggacgaagcattgtgcgtggtcgacttgctgaaggagaaaagcggcgtgatccaagatgcactcaagaaatcttctaagggggaattgactactctaatccaccaactccaagagaaagataaactgctcgcagccgtgaaagaggacgccgccgcaaccaaggatcgttgcaagcagctaacacaggagatgatgacggaaaaagagaggtctaacgttgtcattacacgaatgaaagaccgtattggcaccctggagaaagaacataacgtgtttcagaacaagattcacgtgagttaccaggagacacagcagatgcaaatgaagttccagcaggtcagagagcagatggaggctgaaattgcacacttgaagcaggaaaatggtatcctgcgcgacgccgtgagcaacactacaaatcaactggagtccaaacagtccgctgagcttaataaactgaggcaggactatgccagactggtgaatgaactgaccgagaagacaggcaagctccagcaagaggaagtacagaagaagaacgcggaacaggcggctacccagcttaaagttcagctgcaagaagccgagcgacgatgggaagaggttcaaagctacatccggaaaagaactgccgagcatgaggcggcccagcaggatctccagtcaaaattcgttgccaaagaaaacgaagtgcagtcgctccacagcaaactgacagacaccctggttagtaagcagcagctggagcagcggctcatgcagctcatggagagcgaacaaaagagagtgaataaggaagagtcgttgcaaatgcaggtgcaggacatattggagcagaacgaggccctcaaagcacagatccaacaattccactcccaaattgccgcacagacctcagcatctgtgctcgccgaggagttacacaaggtcattgctgagaaagacaagcagataaaacagaccgaggactcactggcttcagaacgtgataggcttactagcaaggaggaagaactgaaggacatccagaacatgaattttcttctgaaagctgaagtgcaaaagctgcaggcgctggcgaacgagcaggccgcggcagctcatgaattggagaaaatgcagcagtcagtctacgtcaaagacgataagatccgtcttctggaagaacaattgcagcatgaaatttcaaataagatggaggagttcaagatcctgaacgaccagaacaaagctcttaaaagtgaagttcaaaagcttcaaactctggtcagcgagcaaccaaacaaagatgttgtggagcagatggaaaaatgcattcaggaaaaagacgaaaaattgaagacagttgaagaactattggagacaggtcttatccaggtggcaacaaaggaagaagaactgaacgccatccgtacggaaaattctagcctgacaaaggaggtgcaagatctgaaggcaaaacaaaacgaccaagtcagttttgcttcactagtggaggaattgaaaaaggtgattcacgaaaaggatggaaagatcaagtcagttgaggaactcctggaagccgagctgctcaaggtagctaataaggagaagactgttcaggatctgaaacaggaaataaaagcactgaaagaggagatcggaaacgtgcaactggaaaaagcgcagcagctgagtattactagcaaagtgcaggaactacagaaccttctcaagggaaaggaagagcaaatgaacactatgaaggccgtgctggaggaaaaagagaaagatctggccaacaccggcaaatggctgcaggacctgcaggaggaaaacgagtcgctcaaagcacatgtgcaagaggtggcccagcataatctgaaagaagcctccagcgccagccagttcgaggaacttgagattgtccttaaggagaaggagaacgagctaaagaggctggaggccatgcttaaagaaagggagtcggacctttcatcaaagacccagctgttgcaggacgtgcaggacgaaaacaagctgtttaaatcccagatcgagcagcttaaacagcagaactatcagcaagcatcttcttttccacctcatgaggaactgttgaaagtcattagtgagcgggagaaagagattagcgggttgtggaatgagcttgatagtctgaaagatgccgttgagcatcagcggaagaaaaacaacgaaagacagcagcaagtcgaagcagtggaacttgaagcaaaagaggttttgaaaaaactgtttccaaaagttagcgttccttccaacctgtcctatggtgagtggctgcacgggttcgaaaaaaaggccaaggagtgcatggcaggcaccagcgggtccgaggaggtcaaagtgttggagcataagctgaaggaagctgatgagatgcacactttgctgcagttagagtgcgagaaatataagtcagtattggccgaaacagagggtatcctgcagaagctgcagagatcagtcgagcaagaagagaacaaatggaaggttaaagtggatgagtcccacaagaccataaagcagatgcagtcttcttttacctcatcagagcaggagctggagagactcaggagtgagaacaaggatatcgagaacttaagaagggaacgcgagcacctggaaatggaactcgagaaggcggaaatggaacggtcgacctatgttactgaggtccgcgaactgaaggcccagctcaatgagaccctgacaaagttgcgaaccgaacagaatgagagacagaaggttgcaggagacctacataaagcccagcaatcactagagttaatccagagtaagatcgtcaaggccgccggagataccaccgttatcgagaactcggacgtttcgcccgagacagagtcgtctgagaaggaaacaatgtcagtctccctgaaccagacagtgacgcaacttcagcagctgttacaggctgtcaatcagcagcttacaaaggagaaagagcactatcaggtcctggaatag

SEQ ID NO: 121608 - DNA, 4074 bp, synthetic construct
  misc_feature 1..4074: note = Description of Artificial Sequence: Synthetic coding sequence
  source 1..4074: mol_type = other DNA
atggagttttatgaaagtgcctattttatagttctcatcccttccattgtgatcaccgtcatctttctcttcttctggctgttcatgaaggagacgctgtatgacgaggtgctggccaagcaaaaacgagagcaaaagcttattccgacgaagaccgacaagaagaaagctgagaagaagaagaacaaaaagaaggagattcagaatggaaacttacacgagtctgattctgagtcagttccacgcgacttcaagctttctgatgctctggctgtggaagacgaccaggtagcgcccgtgccgttgaatgtcgtagaaaccagtagttctgtgagagagcggaagaagaaagagaagaagcaaaagccggtgctggaagaacaggttatcaaggagagcgacgcctcgaaaatcccggggaagaaggttgagcctgtaccggtcactaaacagcctactccgcccagcgaggcagcagcctccaaaaagaaaccgggccagaaaaaaagtaagaatggatccgatgaccaggataagaaagtagaaaccctaatggtgccatcaaagcgccaggaggctctgccgcttcatcaggaaactaaacaggaaagcgggtccggcaaaaaaaaggcctcatccaaaaagcagaagactgaaaatgtcttcgtggacgagcccctcattcacgcaaccacatatatccctctaatggataatgctgactcatcaccagttgtcgacaagcgggaggtgatcgacctcctgaaacccgaccaagtcgaagggatccagaagtccggtacgaagaagctgaagactgagactgataaagaaaatgcagaagtgaagtttaaggatttcctcctttccctgaagactatgatgtttagtgaagatgaggcactctgcgtggtggatcttctgaaagagaagagcggggtcatccaggatgccctgaagaagtcaagcaagggcgaactaactaccctgattcatcagctgcaggagaaggataagctgctagcagcagtgaaagaagacgcagctgcgacaaaagatcgatgtaaacagctaacacaggagatgatgacagaaaaggaacgttccaacgttgttattacgagaatgaaagatcgaattggtactctggaaaaagagcacaatgtgttccagaataaaatacacgtgtcatatcaggagacccagcagatgcaaatgaaattccagcaagtgagagagcaaatggaagcagaaatcgctcatctgaagcaagaaaacggcatattgagagacgcggtttcaaataccacaaaccagctcgagtctaagcaaagtgcagaactcaataagctgcgccaggattacgccagactggtgaacgaattgactgaaaaaacgggaaagctgcagcaggaggaggttcaaaaaaagaacgcagagcaagcagcgacacagctgaaggtccagctccaggaagctgaacgaagatgggaagaagtgcagtcttacatacgaaagcgcacagccgaacacgaggcagctcagcaggacctacagtccaagttcgtggcaaaagaaaatgaagtccagagcctacacagcaaattgacagatacactggtctcaaaacagcagctggaacagaggctgatgcagctaatggagtctgaacagaagcgggtcaataaagaggaatctcttcaaatgcaggtgcaggacatcttagagcagaatgaggctcttaaggcgcagatacagcagttccactcccaaatcgccgcccagacttcagcaagtgtgctagcagaagaactgcataaggtgattgcggagaaggacaagcaaattaaacaaacagaagactcattggcgtcagagcgagataggctgacttccaaggaagaggaactgaaggatatccaaaatatgaatttcctgcttaaggcggaggtgcagaagctccaggcgttagccaacgaacaagccgctgccgcgcatgagctggaaaaaatgcagcagagtgtctatgtcaaggatgacaagatcaggctcctcgaggaacagcttcaacatgagataagtaataagatggaagagttcaaaatcctcaacgaccagaacaaagctctaaaaagcgaagtgcaaaagctccaaactctggtctccgagcagcccaataaagacgtggtagagcagatggaaaagtgcattcaagagaaggacgagaagctgaagaccgttgaggaactgttggaaactggactcattcaggttgccactaaagaggaggaactgaacgccatacggaccgagaatagctcactcactaaggaagtgcaggatctcaaggccaaacagaacgaccaggtcagtttcgctagcttggtggaagaactgaagaaagtcatccatgaaaaggatggtaaaataaaatccgttgaggaacttctggaggctgaactgctgaaggtcgccaacaaggaaaagactgtgcaggaccttaaacaggagatcaaagccctgaaggaggaaatcggtaatgtgcagctagaaaaggcacagcagctgtcgatcacctcaaaagtgcaggagcttcagaatttgctcaagggcaaagaagagcaaatgaatacaatgaaagccgtgctagaggaaaaagagaaagacctcgctaatacaggtaaatggctccaggatctccaagaggaaaatgaatcactgaaagcgcacgttcaggaggttgcgcagcataacctcaaagaagcctcatccgcttcccagttcgaggaactagaaatcgtcctaaaggagaaagaaaacgaactcaaacggctggaggctatgctcaaagagagagaaagtgatttatccagcaaaacgcagctgctgcaggatgtacaagatgagaataagctgtttaagtcacagatcgagcagctgaaacaacagaactaccagcaagcttccagttttccacctcatgaagagctgctgaaggtaatatcagagcgcgagaaagagatcagcgggctgtggaatgaactggacagtctgaaagatgcagtggaacatcagagaaaaaagaacaacgaccttcgggagaaaaactgggaagcaatggaggcactcgcttccactgaaaagatgttgcaggataaggtgaacaaaacctccaaagagagacaacagcaagtggaagcggtcgagcttgaggcgaaagaagtcctaaagaagctgtttccgaaggtcagcgtcccttccaatctctcctatggcgaatggctgcacggttttgaaaagaaagccaaagagtgcatggcaggcacctctggctctgaagaggtcaaagtgctggagcataagttgaaggaggccgacgaaatgcataccttattgcagctggaatgtgagaagtataagtcagtcctggctgagacggagggtattttgcagaaactccagaggagtgtggaacaagaagaaaataaatggaaagtgaaagttgacgaatctcacaagacaataaagcagatgcagagctctttcacctccagcgaacaagagctggaaagattacgaagtgagaacaaggatatagaaaatctgagacgagaacgcgaacaccttgagatggaattagaaaaggccgagatggaacggagcacatacgtgacagaggtgagggagctcaaggacctcctcacagaactgcagaaaaaacttgacgattcatatagtgaagctgtccggcagaacgaagagttaaaccttctcaaagcgcagcttaatgagacactgacgaagctgcgaacggagcagaacgagcgacaaaaagtggcgggagacctccataaggcccagcagtctcttgagctgattcagtctaagattgttaaggccgccggcgatactaccgtgatcgaaaattctgatgtgtctcccgagactgagtcttcagagaaggaaacaatgtcggtttctctcaaccagacggtgactcagctccaacagcttctgcaggccgtgaaccagcagctaacgaaagaaaaggagcactatcaagtcctggagtag

SEQ ID NO: 121609 - DNA, 228 bp, synthetic construct
  misc_feature 1..228: note = Description of Artificial Sequence: Synthetic coding sequence
  source 1..228: mol_type = other DNA
atggagttctatgaaagtgcttactttattgttctaattccatccattgtgataaccgtcatctttctgtttttctggctgttcatgaaagaaacgctttacgatgaggtgctggccaagcagaagagggagcaaaaacttattccaaccaagaccgacaagaaaaaggccgagaaaaaaaagaacaaaaagaaggaaattcagaatggtaacctgcacgagtcttag

SEQ ID NO: 121610 - DNA, 183 bp, synthetic construct
  misc_feature 1..183: note = Description of Artificial Sequence: Synthetic coding sequence
  source 1..183: mol_type = other DNA
atggagttttacgaatcggcatattttatagttctgataccttctatcgtgattactgttattttcctgttcttctggctgttcatgaaggagacgttatacgatgaggtactggccaagcagaaacgggagcagaaactaattcctacaaaaaccgacaagaaaaaggctgagaagaaatag

SEQ ID NO: 121611 - DNA, 3171 bp, synthetic construct
  misc_feature 1..3171: note = Description of Artificial Sequence: Synthetic coding sequence
  source 1..3171: mol_type = other DNA
atggcctcacagcctaatagcagcgctaagaaaaaggaggaaaagggaaaaaacatccaggtggtcgtcagatgtagaccttttaacctggccgaaaggaaagcaagcgcccatagtatcgtagaatgcgatcccgtgcgtaaagaggtgagtgtgagaaccggaggcctcgctgataaaagttcacgaaagacctatacatttgacatggttttcggcgcatctactaaacaaatcgacgtgtacagatcagtggtgtgtcccatactggatgaggtgatcatggggtacaattgcaccatctttgcatatggtcaaaccgggactgggaagacctttaccatggagggtgagagatcacctaacgaggagtatacttgggaggaggatcccttggctggaatcatacccaggactctccaccagattttcgagaaattaaccgacaatggtacagaattctcagttaaggtgagcttgctggagatatacaacgaagagctcttcgacctgctcaatccttccagtgatgtctcagagcggctgcagatgttcgatgatcctaggaacaagaggggcgtgatcatcaagggcctggaggaaatcactgtgcacaacaaggacgaagtataccagattctggaaaaaggggcagctaagcgtactaccgcagccactctaatgaacgcatacagctcacgtagccatagcgtgtttagcgtcaccatacacatgaaggaaacaaccatcgatggcgaagagttggtgaagatcggtaagctgaacctggtcgatctggccggatcagagaacattggcagaagcggagctgtcgacaagcgggcccgagaggctggaaatattaatcaatcgctgctgacactaggtagggtaattactgcactggtagagcggacgccacacgttccctaccgggaatctaagcttacgaggattttgcaggacagcctgggaggacggactcgcactagtattatcgcgacaatatctcccgcttccctgaacctggaagagactctatccactcttgaatatgcccatcgcgccaaaaatatcctgaacaagccagaggtcaaccagaagcttaccaagaaggccttaatcaaggagtataccgaggaaatcgagaggctcaaaagggacctggctgcagcgcgcgagaagaacggcgtgtacatttctgaagagaactttcgtgtgatgagcggaaagctgacagtgcaggaagagcagatcgtcgaacttattgagaagatcggagccgtggaggaagagctcaaccgcgtgacagaactgtttatggacaataagaatgagcttgatcagtgcaaatctgatctgcaaaacaaaacacaggaactcgagacaactcaaaaacacttacaggagaccaagctgcagttagtgaaggaggagtatatcacgtctgctctcgagtcaaccgaagagaaactccatgacgcagcgtcaaagctgctaaatacagtcgaagagaccaccaaggacgtgtccggtctacatagtaagctggaccgcaagaaggctgtggaccagcacaacgccgaagcacaggacatctttggcaaaaacctcaattctctgttcaacaatatggaggagttaattaaagatggaagtagcaaacagaaagcgatgttggaggtgcataagacactgttcggaaatctgctgtcaagcagcgtgtccgcattggataccataactactgtcgcactggggtccctgacttcaatcccggagaatgtgagtactcacgtctctcaaatcttcaatatgattttgaaagagcagagcttggcagctgagtctaaaacagtcctgcaggagctaattaatgtgctcaagaccgacctgctgtcttcactcgaaatgatactctcacccacagtggtgtccatcctcaaaattaactctcaactgaagcacatttttaaaacatcgctaacagtggcagacaaaatcgaggatcagaaaaaggaactggatggcttcctgagtatcctgtgtaataatctgcacgaactgcaagagaacactatatgtagtcttgtagaatcccagaagcagtgtggaaatctgacagaggatctcaagactataaagcagacccatagccaggaactctgcaaactcatgaatctctggacagaaaggttctgcgcactggaagaaaagtgcgagaacatacagaagcctctgtcctccgtgcaggagaacatacagcagaagtcaaaggacattgtgaacaagatgacatttcatagtcagaaattttgcgctgattctgacgggttctcacaggaactgagaaattttaatcaggaggggacaaagctggtcgaagaaagtgtgaagcactcggacaagctgaacggtaacctggagaaaatctctcaggagaccgaacagcgttgcgagtcacttaatactagaacagtctactttagcgaacaatgggttagttcacttaacgagagggaacaggagctgcacaatctgctggaggtagtgagtcagtgctgcgaagcgtcctctagcgatattactgaaaagagcgacggtcgcaaagccgctcacgaaaaacagcacaatatctttttggaccagatgaccattgatgaggataagctgatcgcccagaatctcgagctcaacgaaactattaaaatcggcctgactaagttgaattgctttttggaacaggatctgaaactagatatccctacagggaccacccctcagagaaaatcatatctgtatccaagcaccctcgtgagaacggagcccagagagcatttactagaccaactgaagaggaagcagccagagctgttaatgatgctcaactgtagcgagaataacaaggaggaaacaatccccgatgtagacgtcgaggaggccgtgctgggccaatataccgaagaacctctctcacaggaaccttctgtggacgcgggagtagactgctcatctatcgggggcgtgcccttttttcagcacaagaaaagccacgggaaggacaaggagaatagaggtataaatacactggagcgctcaaaagttgaggaaaccacggagcacttggtaaccaaatcccgcctgcccctcagagcacagattaacctgtag

SEQ ID NO: 121612 - DNA, 5418 bp, synthetic construct
  misc_feature 1..5418: note = Description of Artificial Sequence: Synthetic coding sequence
  source 1..5418: mol_type = other DNA
atgtcagacaccaaggtgaaagtcgctgtacgcgttcggcccatgaacagacgtgagcttgaactgaacacaaagtgtgttgtggagatggagggtaaccaaacagtgcttcatccacctcccagcaataccaagcagggcgaacgaaaacctccaaaggtctttgcattcgactattgtttttggagcatggatgagagtaatacaacgaaatacgctgggcaggaggtggttttcaagtgtttgggcgaaggtatattggaaaaggcctttcaggggtataatgcttgtatcttcgcgtatggacagaccggcagtggtaaaagcttctctatgatgggccatgctgagcagttagggttaatccctcgactgtgctgtgctctctttaaaaggatctccttagagcaaaatgagtctcagaccttcaaagtggaagtcagctatatggaaatatataacgaaaaggtgcgagacctgctagacccaaagggctctaggcagtctttaaaggttagggagcataaagtccttggaccatatgtagatggactgagccaacttgctgtgacgtcctttgaggatatcgagagcctgatgtccgagggtaacaagtctcggaccgtggcagccactaatatgaacgaggagtcgtctaggtcacacgcagtgtttaacataattattacccaaactctgtatgacctacaatccgggaacagcggcgagaaggtctcaaaagtgagcctggtggaccttgcagggtccgagagggtaagtaaaacaggggcggctggggaaagactcaaagagggctcaaatattaataagagtctcacaaccttgggtctcgttatttcatccctggccgatcaggccgctggaaagggcaagagcaaattcgtcccttatagggattctgtcctaacctggctgcttaaggacaacttagggggaaattcccagacctcgatgatagctactatctctcccgccgccgataactatgaagagacgttatccaccctgaggtacgcggatcgggcgaaacgtatcgttaaccatgcagttgtgaacgaagatccaaacgccaaagtgattagagaattgcgagaagaggttgagaagctcagagagcagttgagccaggcagaggccatgaaggcccctgagttaaaggaaaagttggaagaatcggagaagctgattaaagaattaaccgtgacttgggaggagaaactcagaaagaccgaggaaattgcccaggagcggcagcggcagctggagtcgatgggtatcagtttggagatgtcagggatcaaagtaggggatgataagtgctacctagtcaaccttaatgcagatccagcattgaacgagctgctcgtgtattatctcaaggatcatactcgagttggcgccgatacctcccaagatatccagctcttcgggatcggcatccagccacagcactgcgaaatcgacatcgccagcgatggcgacgtgaccctcactcctaaggagaacgctcgctcttgtgttaacggcaccttagtctgttcaactacgcagctgtggcatggcgaccgaatcctgtggggcaacaaccactttttcaggatcaacttgcccaagcggaagcgtcgcgattggttgaaggatttcgagaaggagactggcccccctgaacacgacttggatgccgcttccgaggcctctagcgagccggattataactatgagtttgctcagatggaagtgatcatgaagaccctgaattcgaacgacccggtgcaaaatgtggtgcaagtgctcgaaaaacagtacctcgaagaaaagaggtctgctctcgaagagcagcgcctgatgtacgaaagggaacttgagcagcttcggcagcagctatcaccggacaggcaaccgcagtcgtcaggaccagatcggctggcctactcttcccaaaccgcacaacaaaaagtaacacaatgggctgaagagagagacgagctcttccggcagagcctggctaagctccgcgagcagctcgtgaaggccaatacattagttagggaggccaactttctagctgaggaaatgtccaagttgactgattatcaagtaactctgcaaatccccgcagctaatctgtcagctaatcggaagagaggagccattgtatccgagcccgcaatccaggtcagacggaagggtaagtccacgcaggtgtggaccatagagaaactggagaacaaactcattgatatgagagacctctaccaggaatggaaggagaaagtgccagaggccaaaaggctctacgggaaaaggggcgatcccttttacgaagcccaggaaaaccataacttgatcggcgtcgcaaatgtatttcttgagtgcttattttgcgacgtaaaattgcagtatgctgtcccaatcatttctcagcagggcgaggtggccgggagactacacgtcgaggtgatgcgggtgaccggagcagttccagaaagggtggtcgaagacgactccagtgaaaattcctcagaatccggctctttggaagtggtcgattccagcggtgaaattatacacagggtaaagaagctgacatgtcgtgtgaaaatcaaagaggcaaccggcctgcctctgaatctgtcaaactttgttttctgtcagtacactttctgggaccaatgcgagagtaccgtcgctgctcccgtggtggatccagaggtcccttctccacagagcaaagatgctcagtacacagtgacattcagccactgtaaggattacgtggtgaatgtgacagaagaattcctggagttcatttctgacggggcactagctatcgaagtgtggggccatcgatgtgccggaaacggatcctcaatctgggaggtggattcactgcatgccaaaactcgtacgttacacgacaggtggaatgaagtgacgaggcggattgagatgtggatatcaatccttgaactgaatgagctcggggagtacgccgccgtagaactccatcaggcgaaggatgtgaacacagggggaatctttcaattacgtcaaggtcactccagaagagtgcaggtgactgtgaagccagtccagcactcaggaaccctcccgcttatggtggaggctatcctgtcagttagcatcggctgcgttacagcccgtagcactaagctgcagcgggggctggactcgtaccagagggacgacgaagatggagatgacatggacagttaccaagaagaagacctcaattgcgtgcgggagcgctggagtgatgcactgatcaagcgacgagaataccttgatgaacagatcaaaaaggtctcgaataaaacagaaaagacagaggacgacgttgaacgtgaagcccaactagtggaacaatgggtgggtttgactgaagagcggaacgccgtgctggttccggcccccggcagtggcatcccaggcgcaccggcagactggatccctccccctgggatggagacccatatcccagtcctctttcttgacctaaacgccgacgatctgagcgccaatgaacagctcgtggggcctcacgcatcgggggtgaactcaatcctcccaaaagaacacgggtctcagtttttctatctcccgattatcaaacacagtgatgatgaagtctcggcgacagcatcatgggacagttcagtccacgatagtgtgcaccttaatcgcgtcacccctcagaacgaacgcatctaccttattgtgaagacaaccgtgcagctgtcccatccagctgccatggagctcgtgctccgaaaaaggattgccgctaatatctacaacaagcagtcttttactcagtctctaaagcgccgcatctctctgaaaaacatcttctactcctgcggcgtcacctatgagatcgtgagcaacatccccaaggcgaccgaggagatagaggacagagaaaccctcgccttgttggctgcgcgatcagagaacgagggtacttccgatggcgagacatatatcgagaaatacaccagaggcgttctgcaggtggagaatattcttagcctcgaacgtctgcggcaggcagtcacagtgaaggaagcattgagcacaaaagctcgccacattcgcaggagcctctctacaccaaacgtgcataatgtgtcatctagtcggcccgatctaagtgggtttgacgaggacgataagggatggcccgaaaatcagttggacatgtccgattacagcagcagctatcaagacgtggcctgctacggcacactgcctcgcgactccccacgtaggaacaaagaaggctgcacttcagagactccccatgctcttaccgttagccctttcaaggccttcagcccccagcctccaaagttctttaagccactgatgcctgttaaggaggagcacaagaagcggattgccctcgaggctcgccccttattaagtcaagaatctatgccaccgccacaggctcataatccgggttgcatagtcccctctggaagtaacgggtcttccatgcctgtagaacataattctaagcgggagaagaaaattgactctgaggaagaggagaacgaattagaagcaatcaacaggaagctgatcagctcacagccttacgtgccagtcgagttcgcggactttagtgtctacaacgcttccctggagaacagagaatggttcagctcaaaggtggatctgtccaatagccgggtgctggaaaaggaagtcagtcgcagcccaacaacaagcagtatcacctcagggtactttagccacagtgcctcgaacgcgactctgagtgacatggtggtgcctagtagcgattcctcagaccagctcgccatccagactaaggatgcggacagcacagagcatagcaccccctcgctggtgcatgacttccgcccttcttctaataaggagctcactgaagtggaaaaggggcttgtgaaggacaaaatcatcgtagtgccgctgaaagaaaactctgccctagccaaggggtcacctagcagccagtctattcctgaaaagaattccaaaagcctgtgccggactggcagttgtagcgaactggacgcctgtccctccaaaatctcccagcctgctaggggattctgtcccagagaagtgaccgtggaacacaccacaaatattctggaagatcattcttttacagaattcatgggcgtgagtgaggggaaggacttcgacgggcttacggattcgtctgcgggagaattgtcctcgagaaggagcctgcccaataaaaccgggggtaaaacagtctccgacggcctccaccatccatcccagctgcatagtaagctcgagaatgaccaggtcatcattcctgaagccgccttctgggtgctgtgttgtcagtag

SEQ ID NO: 121613 - DNA, 5250 bp, synthetic construct
  misc_feature 1..5250: note = Description of Artificial Sequence: Synthetic coding sequence
  source 1..5250: mol_type = other DNA
atgtctgacacaaaagtcaaagtggcagtccgtgttcgccctatgaatcggagagaactcgagctgaacaccaaatgtgtcgtggagatggagggtaaccagacggttctgcacccaccgccctcaaacacaaaacagggtgaaaggaagccgccaaaagtcttcgcatttgactactgcttttggtcaatggatgaatcaaacacaacaaagtatgctggacaggaggtggtctttaagtgcctgggggaaggcatcctggaaaaagcattccagggttataacgcatgtatatttgcctatggacagaccggctctggtaagtcattcagtatgatgggacatgccgagcagttgggacttattccacgcctttgctgcgcattgtttaaacggatttctctggaacagaacgaatcccaaacatttaaggtggaggtctcttatatggagatctataacgagaaagtccgggatctgcttgatccgaaaggttctagacaatctcttaaggttagggagcacaaggtgctgggcccctacgtagacggacttagtcagctggctgttacaagctttgaagatatcgagagtctcatgtccgaaggtaataaatcccgtaccgttgctgctacaaacatgaatgaggagtcaagcaggtcacacgctgtgttcaatattatcatcactcaaactctatacgatctgcagagcggtaacagtggtgagaaagtgagcaaagttagccttgtcgacttagccggcagcgaacgcgtgtccaagacaggcgccgccggggaacgtctgaaagaaggatcaaatataaataagagtctgacaaccttgggactcgtgatcagttccctggcagaccaggcagccgggaagggcaagagcaagtttgtcccttaccgcgactccgtgctgacatggcttttaaaagataatttaggcggtaattcccagacgtctatgattgcgacaatctcccctgctgccgataattacgaagagaccctgtcgacacttagatacgccgaccgtgctaaaaggatcgtaaatcacgcagtcgtgaatgaagacccgaatgccaaagttatacgggaactgagagaggaggtcgagaagctcagagaacagttgtctcaggccgaagcaatgaaggcgccagagctgaaggaaaagttggaggagtcagagaagctcattaaggaactgactgtgacctgggaggagaaactgagaaaaaccgaggaaatcgcccaagagcggcagcgccagctagagagtatgggcatctcgttagagatgagcggcatcaaagtgggagacgacaaatgctacctagtgaacctaaatgctgatccggccttgaacgaacttttggtctactacctcaaggatcacacgcgcgtcggcgccgacacatctcaagatatccaactttttggtataggtattcagccccagcactgtgagatcgacattgccagtgacggagacgttaccctgactcccaaggaaaacgccagaagctgcgtgaacggtaccctggtgtgctcaacaacgcagctctggcacggtgatcgaattctctgggggaataatcacttctttcggatcaacctgccaaagaggaagcggcgcgattggcttaaggacttcgaaaaagagactggcccccccgaacatgacctagatgcagcctcggaggctagcagcgagcctgactataattacgaatttgctcagatggaagtcatcatgaagacccttaactctaatgaccctgtccagaacgttgtgcaagttctagagaaacagtacttagaagagaaacgctccgcactggaagagcagaggcttatgtacgaacgggagctcgagcagttaagacagcagttaagtccagataggcagcctcagtcctcaggcccggataggctggcctatagttcccagactgctcagcagaaagtgacccaatgggccgaggagcgtgacgaattgttccggcaatccctggcaaagcttcgcgagcagctcgtgaaggccaacacactagtccgcgaagctaactttctggcagaggagatgagcaaactgaccgattaccaggtgaccctacagattcctgccgccaatctgtcagcgaatcgcaaaagaggagccattgtgtctgagccagcaatccaagtgcggcgcaagggaaaaagtacacaagtttggacgatcgaaaaattggagaacaagctcatcgacatgcgtgacctttaccaagaatggaaggagaaggtcccagaggctaagagactgtacggtaagagaggagatcccttttacgaagcccaggagaaccacaaccttatcggagtcgctaacgtctttctggagtgtctcttctgcgacgtcaaactgcagtacgccgtacccatcatcagtcaacagggagaagtggccggacgcctacatgtggaggtgatgcgcgtgacaggagccgtgccagagcgcgtagtggaggatgactcctccgaaaactccagcgaaagcggttcccttgaggtggttgacagcagcggagaaatcatccatcgtgttaaaaagctcacctgccgggtcaaaattaaagaggctaccggactgccactgaacctctccaattttgtcttttgtcagtacactttctgggatcagtgtgagtcaacagtggccgctcccgtggtggaccctgaagtcccaagccctcaaagtaaggatgctcagtacaccgtgacttttagccactgtaaggactacgtggttaacgtgactgaggagttcctcgaattcatttccgatggtgctctcgccatcgaggtgtggggccatagatgtgcgggcaatggatccagtatctgggaggtggactctctccacgctaaaacacgcactttgcacgaccgatggaatgaagtgacgcgacgaatcgagatgtggattagcatattggagctcaacgaactgggagaatacgcagctgttgagctccatcaggccaaagatgtaaacacaggcggaatattccagcttcgccagggtcactctcgacgtgtgcaagttacagttaaaccggttcagcactccggaactctgccactgatggtggaggctatcttatccgtctctattggatgtgtgactgcacgctctacgaaactgcagaggggtttggatagctatcaggaggaggacttgaactgtgtgcgcgaacggtggtccgacgcactcattaaacgaagagagtatttggatgaacaaataaaaaaagtctccaacaaaaccgagaaaacagaggacgatgttgaaagggaggctcagctcgtcgaacagtgggtgggcttgactgaagaacgcaacgctgtgctggttcctgctccggggtctggcatcccgggagcacctgctgactggatcccaccccccggaatggaaacccatatccccgtgctttttctggaccttaatgcagacgacctgtcagctaacgaacagctggttgggccccatgcctccggcgtgaacagtatccttcccaaggagcatggcagtcagttcttttacctccccattatcaaacacagtgatgacgaagtttccgcaacggcatcctgggactcttccgtgcacgatagcgtgcacctcaatagagtgactccacagaatgagcgcatttatcttattgtgaagaccaccgtccagctgagccatcccgctgccatggagctcgtgctgagaaagcggatcgcagccaatatttacaacaagcaatcgtttacgcagagcttgaaacgccgaatctccctgaaaaacatcttttactcttgcggagtgacatatgagatcgtcagtaatattcccaaagctaccgaagagatagaagatcgcgagacattagctctgctggcggccaggtccgaaaatgagggaacatccgacggcgaaacgtatatcgagaagtatactcgcggggtgctgcaggtggaaaatatcttgtctctggagcggctacggcaggccgtcacagtgaaagaagcgctgagcaccaaagccaggcatataagacggagcctgagtacgccgaacgtgcataacgtatcttccagtcgtcctgatttatcaggctttgacgaagatgataaggggtggcccgagaaccagctggatatgtccgattattcctcctcctatcaggatgtggcttgctacggcacgctaccacgagactccccgcgccgcaataaagaaggctgcacctcggaaaccccgcacgccctgacagtgtcaccttttaaggcattttccccccagccgcccaagtttttcaagccactgatgccggttaaagaggagcacaagaaacggatcgctttggaggctcgccctctgctctcccaggaggattctgaagaagaagagaacgaactggaggcgatcaatcggaagcttatctcctcacagccatatgtgcccgttgaattcgccgacttcagtgtttataatgccagtctggaaaaccgagagtggttctcaagcaaagttgatttgagcaatagtcgagtgctcgagaaagaagtctcccgctccccaactacatcttctattacctcgggctacttctcacacagtgccagtaacgcaacactcagcgatatggtggtcccgagctccgactcctccgatcagttggccatccagacaaaagatgcagattccacagagcattcaacgccctcactagtgcacgattttaggccctcctccaataaggagctgacggaagtcgagaagggactggtgaaagacaaaatcatagtggttcctctgaaggaaaatagcgcgttggccaagggctctccttccagccagtcaatcccagaaaaaaactccaagtcgctgtgccgcacagggagttgctccgagttggacgcctgtccttctaagatcagccaacctgcacgaggcttctgtcctagagaagtgacagtggaacacacaacaaacatcttagaagatcacagctttactgaatttatgggagtctctgaggggaaggattttgacggtctgacagactcctccgctggggaactaagttcccggaggtctcttccaaacaagactggaggtaaaacagtgagcgatggcttgcaccacccaagtcaactgcatagcaagcttgaaaatgatcaggggggtacaacaagcaggtag

SEQ ID NO: 121614 - DNA, 5313 bp, synthetic construct
  misc_feature 1..5313: note = Description of Artificial Sequence: Synthetic coding sequence
  source 1..5313: mol_type = other DNA
atgtctgataccaaggtgaaggtggctgtgagagtgagacctatgaatcgccgggagctggagctgaataccaaatgtgtcgtggagatggaagggaaccagacagtgttgcacccacctccctccaatacgaagcaaggagagcgtagaccaagccaggtcttcgcctttgattactgtttctggtcaatggacgagtcaaatacaaccaaatatgccggccaggaggtggtctttaagtgcctgggagagggtattctcgagaaagcttttcagggttataatgcgtgcatcttcgcttacggccagaccggtagcggtaagtcgttcagcatgatgggccatgccgagcaattgggccttatcccacgcctgtgttgtgctttgttcaaacgtatcagcttggagcagaatgagtcccagaccttcaaagttgaagtgtcctatatggaaatatacaatgaaaaagtgcgggatttgctggatcctaaggggtccaggcagagtttaaaagtgcgcgagcacaaggtgctgggcccttatgtggatggattgtctcaactcgccgtaacttccttcgaagatatcgagtccctcatgtcagaaggcaataagtctagaactgtggccgcgactaacatgaacgaggaatcatctcgatctcatgcagtttttaacataattatcacacagacactgtatgacctgcaatcaggcaacagcggcgaaaaggtgagtaaagtttcactcgttgacttagcgggatccgaacgggtgtctaagactggggcagccggcgagagactcaaggaaggctcaaatataaacaaatcccttaccaccctaggccttgttattagcagccttgccgaccaggctgccggcaagggaaagtctaaattcgtgccatacagggattccgtacttacctggctgcttaaagacaatctcgggggcaatagccaaacctccatgattgccacaatcagtcccgctgcagacaactatgaagagaccttgagtactctgagatacgcagacagggcgaaaagaatcgtcaatcacgccgtggtgaatgaggaccccaatgccaaagttattagggagctgcgtgaggaggttgagaagctgcgggaacagctgtctcaggctgaggctatgaaagctcccgaactgaaagagaagctggaagagagcgaaaagctcataaaagagctgaccgtgacctgggaggagaaactccgaaagacggaggaaattgctcaggaacgccagcggcaactggaatcgatgggtatttcactcgagatgagcgggattaaggtcggcgacgacaaatgttacctagtgaatctaaacgcagacccggctctgaacgagctccttgtgtactacctcaaggatcacacaagagttggagcagatacgagccaggatattcagctgtttggcattggcattcagccccaacactgtgagatcgatattgctagtgacggtgatgtgaccctcaccccaaaagagaacgcgaggtcctgtgttaatggcactctcgtgtgctctacaacccagctctggcacggcgatagaatattgtggggcaacaaccatttttttaggatcaatctcccaaagcgcaaaagaagagactggctgaaagactttgagaaagagactggcccccccgaacacgacctggacgccgcaagcgaggcttcgagcgagcccgactacaactatgagtttgcgcagatggaagtcatcatgaaaacccttaacagcaacgaccccgtccagaacgtagtgcaggtgttggagaagcagtacttggaggagaaaagaagcgctctcgaggagcagcgtttgatgtatgagcgcgagctagagcagttacggcagcagctgagccctgaccgccaaccacagtcgtcaggccccgaccggctcgcctacagctcccagaccgctcagcagaaagttacacagtgggctgaagagcgagatgaacttttccgacagtctttggccaaactgagggaacagctcgttaaagccaataccctcgtgcgggaggctaatttcctggcagaagaaatgagcaaactgaccgactaccaggttaccttgcagatacccgccgccaacctgagtgccaaccgcaaacgcggagccatcgtgtccgagcctgccatccaagtccgcagaaaaggcaaaagcactcaggtatggactattgaaaagctggaaaacaaattgatcgatatgcgtgatttataccaggagtggaaggagaaagttccggaagccaagcgactctacggcaagaggggagacccgttctacgaagcacaggagaaccacaatcttatcggagtggcaaacgtgttcttggagtgcttgttctgcgatgtgaagttacaatacgctgtgccgattataagtcagcagggagaagtggctggcagactgcatgttgaagtgatgcgcgtgactggcgcagtcccagaacgagtggtggaagacgactcaagcgagaactcttcagagtctgggtccctggaagtagtggactcttctggcgaaattatccatagggtgaaaaagctgacgtgcagagtcaaaattaaggaggctacggggttgcctctaaacctgtcgaatttcgtcttttgccaatataccttttgggaccagtgtgaaagtactgtcgcagcccctgtggtggatcctgaggttccctccccccaatcaaaggatgcccagtatacagtgacttttagccattgcaaagattacgtggtcaatgtcacggaggagtttctggagttcatttcagacggggcactggcgatcgaggtatggggccaccgctgcgcagggaacggatccagcatttgggaggtagatagcctgcatgcgaagactagaacactgcatgaccgctggaatgaagttacacgaagaattgagatgtggattagcatactggagctcaacgaactgggcgaatacgctgccgtggagctgcaccaggccaaggatgttaacaccggcggcatcttccagctaaggcagggacattccagacgagtgcaggtcacagtgaaaccggttcaacatagcggcaccctgcccctgatggtcgaagcaatcctttctgtgtccatcggttgtgtaaccgctcgatcaaccaaattacagcgggggctggacagctaccagcgtgatgacgaggacggggacgacatggactcctaccaggaggaggatctcaattgtgtccgagagcgctggtccgacgctctgatcaaacggagagagtatcttgacgaacaaatcaagaaagtaagtaacaagaccgagaaaactgaggacgacgttgaacgggaagcacagctcgtagagcagtgggttggactgactgaggagagaaatgcagtgctcgtccctgctcctgggtccggtatccccggcgctcccgccgattggatcccccctcctggaatggagacccacatacccgtcctgttcctggatctgaatgccgacgacctttctgccaacgaacagctcgtagggcctcatgcaagcggcgtgaatagcatccttccaaaagaacatggcagccagtttttctaccttcctattatcaaacactccgacgacgaagtgagtgcaacagcgagctgggattcttcagttcacgactctgtgcatttgaatagagtgaccccccagaacgaacggatataccttatcgtcaagaccacagtccaactgtcacacccagccgcaatggaactggtccttagaaagagaattgctgccaatatctataataagcaatcttttacacagtcgctgaagagaagaattagtctgaagaatattttttattcctgcggggtgacttacgaaatcgtgagtaacattcctaaagcaacagaggagattgaggatagggaaaccctcgcgttgctggccgctagatccgaaaacgagggcacttccgacggcgaaacgtacatagaaaaatatacacgcggagtcctgcaggtcgaaaatattctcagtctggaacgcttacgtcaggccgtaaccgtaaaggaagccctgtccacaaaggcccgacatattaggagaagcctgagcacccctaacgtccataatgtgagttctagtagacctgacttgagtggctttgacgaagatgacaaaggctggccagaaaatcagttggacatgagcgattattctagttcttaccaggatgttgcttgctacggcactctgcctcgcgatagtccaagaaggaataaggagggatgcacctctgagacaccccacgcgctgacagtatctcccttcaaggccttctctcctcagcctccaaaattttttaaaccgctgatgcctgttaaagaagagcataaaaagcggattgctctcgaagctaggcccttgctcagccaggaagattccgaagaagaggaaaacgagctggaggccatcaaccgaaaactaatctcttctcaaccgtacgtccccgtggaatttgctgacttttctgtctacaatgcaagtctggaaaatcgcgaatggtttagtagcaaggttgaccttagcaattctagagtgttggaaaaagaggtatctcgcagccctactacaagtagcatcacatcgggatatttttcccacagcgcaagtaatgcaacactgtccgacatggtcgtgccctctagcgactcaagcgaccagctcgcgatccagacgaaagacgctgactcgactgagcacagcactccttccttggtgcacgatttccgcccttcttctaacaaggagctgacggaagtagaaaagggactagtgaaggataaaatcattgtcgtgcccctgaaagagaattctgcacttgcgaagggtagtccctctagtcagtctatccctgaaaaaaactctaaatcgctgtgccgtaccggctcctgctctgagttagacgcttgtccctctaagatcagccagcccgcacgcggcttttgtccccgagaggtaacagtggagcacaccacaaacatcctcgaggaccattcctttacagaattcatgggagtttctgagggtaaggacttcgacggactgacagacagctctgctggggaactgagctcaagacgctcgttacccaataaaacaggaggaaaaactgtgagtgatgggttgcatcatccatcccagctacacagcaaactcgagaatgatcaagttatcatcccagaagccgcattctgggttctttgctgccaatag

SEQ ID NO: 121615 - DNA, 5313 bp, synthetic construct
  misc_feature 1..5313: note = Description of Artificial Sequence: Synthetic coding sequence
  source 1..5313: mol_type = other DNA
atgagtgataccaaagtcaaagtggccgtgagggtccgaccaatgaacaggcgggagctggagctcaatacaaaatgtgtagtggaaatggagggtaatcagactgtgcttcaccccccccctagtaataccaagcagggcgaaaggaagccaccaaaggtatttgccttcgattactgcttttggtctatggacgagagcaacaccactaagtacgccggccaagaagtggtgttcaagtgcctgggggaaggcatcctagagaaagcattccagggatacaacgcgtgcatctttgcgtatggacaaacggggtccgggaaatcattcagtatgatggggcatgctgagcaactaggcctcatacctcgtctctgctgcgcgctgttcaagcgcatctcactggagcagaacgagagccaaaccttcaaggtcgaggtgtcgtatatggagatttacaacgagaaggtcagggatctattagatcctaaaggctcccgacagtcactgaaagtgagagaacacaaagtcctcgggccctacgtcgatggcctctcccagctcgcagtgaccagttttgaggatattgagtctttgatgtctgagggaaacaaatcccggacagttgccgccaccaacatgaatgaagagagttcacgatcgcacgctgtgtttaatatcattatcacacagactctgtatgaccttcagagcgggaacagcggcgagaaagtctctaaagtttcactggtagatctggcaggttccgagagagtttccaagactggggctgctggagagcggctgaaggagggctccaacattaacaagagcttgacaacgctgggattagtgatatctagcttggctgatcaggcagcaggcaagggtaaatccaagttcgtcccctatagggactccgttctcacatggctacttaaagacaatctcgggggcaactcccagacaagtatgatcgcaactatctccccggcggcggataattatgaagagaccctctcaactctgaggtacgccgacagagccaaaaggattgttaatcacgccgtcgtgaatgaggaccctaacgctaaggtcatcagggagcttcgggaggaggtggagaaattaagggagcagctctctcaggccgaggcaatgaaggccccagaactgaaagaaaagttggaggagtcagaaaaactcatcaaagaattaacagtgacctgggaagagaaactgcgaaagaccgaggaaattgcccaagaacggcagaggcaattggagtcgatgggcatcagtctggaaatgtcaggtatcaaagtgggcgacgacaagtgttacctggtgaatcttaatgctgatcctgcactgaatgaactgcttgtctattatctaaaagatcatacgcgcgtgggcgccgatacaagtcaggatattcagctttttggcatcggaattcagccacagcactgcgagatcgacatcgcgtctgacggggatgtgacccttacccccaaggagaatgcccgatcctgtgttaacgggacccttgtctgctctacgacacaactgtggcatggggataggatcctctggggtaacaatcacttcttcagaatcaatctacctaaaaggaagcgacgagactggctgaaagatttcgaaaaagagacaggtccacccgagcacgacctagacgcggcttcggaggcttctagcgagcccgattataactatgagttcgctcagatggaggtgatcatgaagaccctgaacagcaatgatcccgtgcagaacgtggtgcaggttctggaaaagcagtaccttgaagagaaaaggagcgccctggaggagcagcggctcatgtacgagagagagttagagcagctcagacagcaactctcaccagatcggcaacctcaaagctccgggccagaccggctggcatactcatcccaaaccgcccagcagaaggtcacccaatgggcagaggagagagacgagctcttcaggcaaagcctggctaaactgcgggaacagttggtgaaagcaaatacactggtcagggaggcgaatttcctagctgaagaaatgagcaagcttaccgactaccaagtaacattgcagatccccgccgcaaacctatcagctaataggaaacgcggcgccatcgtgagcgagcctgcaatccaggtcaggaggaaaggcaaaagtacacaggtatggacgattgaaaagctggaaaacaagctgattgacatgcgcgacctatatcaggagtggaaagaaaaggtgccagaggcaaagaggctgtacggcaaacggggcgatccattctacgaggcgcaggagaaccataatcttataggtgtggctaatgtgtttctagaatgcctgttctgtgacgtgaagctgcagtacgctgtgcccatcatatcacagcagggcgaagtcgcaggacggctgcacgtggaggtgatgagggttaccggtgcagttcccgaacgggttgttgaggatgactcgagcgaaaactcgtctgaatcagggtccttggaagtcgtcgattctagtggtgaaattattcatcgggtgaagaagctgacgtgccgtgtcaagatcaaagaggccaccgggcttcccctcaacttgtccaattttgtgttttgtcagtacactttctgggaccaatgtgaatccaccgtcgcagccccagtggtggaccctgaggtgccaagtccacagtctaaggacgcacaatatactgtcaccttctcgcattgtaaagattacgtggtgaatgtaaccgaagagtttctggagtttatatctgacggtgcactcgccatcgaagtgtgggggcatcgctgcgcagggaatggatcgagcatctgggaggttgacagtcttcacgcgaagactagaacattgcacgatcggtggaatgaggtgactaggcgcatcgaaatgtggatcagtattctcgaacttaatgaacttggtgagtacgccgctgtggagttgcatcaagctaaggatgtcaacacaggcggtatcttccagttgaggcagggccactccagacgggttcaggttacggtgaagccagtgcagcacagcggtacgctccctctgatggtcgaggctattttatcagtgagcattggttgcgttacggcccgcagcacaaagctgcaacgcggtctcgatagctaccagagggatgacgaagacggcgacgacatggacagttaccaagaagaggatctgaattgtgtgcgcgaaaggtggagcgacgctctgataaaaaggcgcgaatacttagacgagcagattaagaaggtctccaataagacagagaagaccgaagatgatgtggagagagaagcccagctggtggaacaatgggtcggcctcacggaggagagaaacgctgtgttagtgcctgcgcccggcagcgggatcccaggggcgcccgcagactggatcccaccccccgggatggaaacccacattcccgtgctgtttttagacctcaacgctgacgacttatccgctaatgaacaactcgtcggcccacatgcgagcggcgtcaactcaatcctccctaaagaacatggctcacaattcttttatctccctataatcaagcattccgacgatgaggtctcagccaccgctagttgggactcgagcgtccatgactccgttcacttgaatcgagtcactccacaaaacgagagaatttacctgatcgtgaaaacaacagttcagctttcacacccggcggcgatggaactagtcttgaggaagcgtatcgccgctaacatttacaataagcagtcattcacccagagtctcaagcgcagaataagcctgaagaacatcttctatagttgtggggtcacttatgagattgttagcaacatcccaaaagccacagaagagatcgaggatcgcgaaacactcgcactgctcgcagctcggtcagagaacgaaggaacatctgacggcgagacctatatcgaaaagtacaccaggggagtccttcaggtggaaaacatcctgagcctcgagagactccgtcaagctgtgacagtaaaggaggctctttctaccaaagctcgacatattcgcagaagcttgtcaacccctaatgtgcacaacgtgagcagctccagacctgacttgtctggcttcgacgaggatgacaagggctggccagaaaatcagctggacatgtccgactattcctcttcttatcaggatgtagcctgttatggtactctcccacgagattcaccgcggagaaataaagaaggctgtaccagcgagacaccccatgcccttacagtgtcgccattcaaagcctttagccctcagccccctaagttcttcaaacccctcatgcctgtaaaggaggagcacaagaaacgcatagcgttagaggctcgcccgcttttgtcccaggaggatagtgaagaggaagagaacgaactggaggcaataaataggaagctgatatcctcccagccttacgtccccgtcgaattcgctgatttctctgtctacaacgctagcctcgaaaatagagaatggttcagttcaaaggtagacctttccaattccagagtgttggagaaggaagtgagcagatccccaaccacgagcagtattacttcaggttatttcagccattcagcctcaaacgcaaccttaagcgacatggtcgttcctagctccgactccagtgatcagcttgcaatccagacaaaggatgccgattcaacagagcactctacgccatcactcgtccacgacttcagacctagctcaaacaaggaactgaccgaagtggagaagggcctggttaaggacaaaattatcgtggtgcccttgaaggagaactcagcgcttgccaaggggtccccgagctctcaatccattccagaaaagaacagcaagagcctctgtcgcacgggcagttgttctgaactcgacgcatgccctagcaaaatctcccaacctgccagaggtttttgcccccgggaggtgactgtggagcatactaccaatatcctagaggatcactcttttaccgagttcatgggtgttagcgaggggaaagactttgatgggctcactgattccagtgcaggagagctgtcctccagacgaagcctaccaaacaagacaggcgggaaaaccgtgagtgacgggcttcatcacccgagtcagttacactctaaactagagaacgaccaggtaattattccggaggccgcattctgggtgctgtgctgtcaatag

SEQ ID NO: 121616 - DNA, 5274 bp, synthetic construct
  misc_feature 1..5274: note = Description of Artificial Sequence: Synthetic coding sequence
  source 1..5274: mol_type = other DNA
atgagtgacacaaaagtgaaggtagccgtgcgcgtaaggccaatgaatcgtcgcgagctggaactcaacaccaagtgtgtggtcgagatggaagggaaccagaccgtcttgcatcccccaccatcgaataccaaacagggtgagcgcaagccccctaaggtgtttgcgttcgattactgtttctggtcaatggatgagagtaacaccactaagtacgctggacaagaggtggtgttcaaatgcctcggagagggcattctggagaaggcctttcagggttacaatgcatgtatctttgcttatggtcagaccggatcagggaagtcatttagcatgatggggcacgctgaacagctggggctaataccaaggctgtgttgcgcgctcttcaaacggatttctttggaacaaaatgaaagtcagacctttaaggtagaggtgtcctacatggagatatacaatgaaaaagttcgagacctacttgatcccaagggttcccgacagtcacttaaggttcgggaacacaaggtgctaggaccatacgtggatggtctatcacagctcgctgtgacctccttcgaagacatcgagagcctcatgtcagaaggaaacaagtccaggactgtggctgccacgaacatgaacgaggaatctagcagaagccatgcagtgttcaatataattatcacacagacactgtatgatctacagtcaggcaacagtggggaaaaggtgtcaaaagtgtctctcgtcgacctcgcggggtctgagagggtgtcaaaaaccggggccgccggcgaacgacttaaagaaggctctaacattaacaagagcctcacaaccctcggtttggttatctcaagcttggcagaccaggcagccgggaaaggtaagtccaagttcgtgccatacagggattcagtgttaacctggctccttaaagataacttaggaggtaattcccagacctccatgatcgcaaccatctcgccagcagccgacaactatgaggaaaccctgagcaccctgagatatgcagaccgcgcgaaacgcattgtgaatcacgctgtagtcaatgaagatcctaacgccaaggtgatcagggagctccgcgaagaagtggagaagctgcgcgagcagttatcgcaagccgaggctatgaaggccccggagctgaaggaaaagcttgaagaaagcgagaagctcatcaaggagttgactgtgacctgggaagagaagctgcgcaaaaccgaagagatagcccaggaacgccagaggcagctggaaagtatgggtatcagtctcgagatgtccgggataaaggtcggtgatgacaagtgttatctggtgaatttgaacgccgaccccgccctaaacgaactgctagtttattatctgaaggatcacacgcgcgttggagcagatacatctcaggacatacagctgtttgggattgggatccagccccagcattgtgagatcgatattgcgtctgatggtgacgtcaccctcactcctaaggaaaatgctcgttcttgtgtgaatggcacacttgtgtgctccaccacgcaattgtggcacggagaccgtatcctctggggcaacaaccacttcttccgcatcaatctgcccaagcggaagcggcgggactggctgaaagattttgaaaaggagacaggtcctcccgagcacgatcttgatgcggcctcggaggccagctctgaacctgactataactacgaattcgcccagatggaggttattatgaagacacttaactctaacgaccccgtgcagaatgtggtgcaggtactggagaaacagtatttagaagagaaaaggtctgcgctagaagagcagcgtctcatgtacgagcgagaactcgagcagctccgccagcagttgagcccagaccgtcagccacagagcagcgggcccgataggctggcctactcatctcaaactgcgcagcagaaagtgacgcagtgggcggaggagagagacgagctgttccggcagagtctagcgaagctcagagaacagcttgttaaggccaacactcttgtacgtgaggcgaatttcctggctgaagagatgtctaaattaactgactatcaggtcactctccaaatccccgccgcaaacctgagcgctaaccgtaaaagaggagctatcgtgtcggagcctgccatccaagtgaggcgcaagggcaaatcaactcaagtctggaccattgagaaacttgagaataagctgattgacatgcgagacctataccaggagtggaaagaaaaggtgccagaagccaaacgactttacggcaaacgaggcgacccgttttacgaggctcaggagaatcacaatttgatcggagtcgccaacgtgtttctggaatgcctgttctgcgatgtgaagttacagtacgccgtgcctattatttcacagcaaggagaggtcgccgggcggctgcatgtagaagtgatgagggtgacgggggccgttccagagcgggtcgtggaagatgatagttctgaaaattccagtgagtctggctccctcgaggtcgtggatagctcgggggaaatcatccatagagttaagaaactgacctgccgtgttaagattaaagaagcaaccgggttgcctttgaacctcagcaatttcgttttttgtcagtatactttctgggatcaatgcgagagcacggtggccgctccagtggtagaccccgaagttccctccccacagtctaaggacgcccagtataccgttaccttttcccattgtaaagattacgtggttaacgtaaccgaagagttcctggagtttatctcagatggagccctggcgatcgaggtctggggacaccggtgcgcgggtaacggctctagcatctgggaggtggactcactccacgccaaaactaggacactgcacgaccgatggaacgaggtgaccagacgtattgaaatgtggatatccatcttggagctaaatgagttgggcgaatacgccgctgtggagttgcatcaggccaaggatgtaaacacaggcggaattttccagctgcgccagggccattctcggagggtgcaggtaactgtgaaacctgtccagcacagtggaacgctcccattgatggttgaagctattctgagtgtatccattggctgcgtaacggctaggtccaccaaactacaaaggggcctcgacagctaccaggaggaagacttgaattgtgtccgagagaggtggagcgacgccctcataaagcgccgggagtacctcgatgaacagatcaaaaaggtgagcaataagactgaaaagacggaggacgacgtggagcgtgaggcccagctagtggagcagtgggtcgggttgacggaagagaggaatgccgtcctggtgccagctccgggatccggtatcccaggcgctccagctgattggattcccccccctggtatggagacacatattcccgtactcttcctggatctgaacgcggacgacttatctgctaatgagcagctcgtcggccctcacgcttccggtgtgaattcaattctcccaaaggaacatggtagtcagtttttctacctgcccatcatcaaacatagtgacgacgaagttagcgctacagcatcttgggattctagtgtgcatgactctgtacatctgaaccgtgtgactccgcagaatgagcggatttacctcatcgttaaaaccacagtgcagctctcccacccagccgccatggagcttgtcctccggaaacgcatcgctgctaatatttataataaacagtcttttacccaaagcctgaagagaaggatcagcctcaaaaacatcttttattcttgcggagtaacttatgagatcgtgagtaacatacccaaggcgacagaagagatcgaagacagagaaacgcttgcactcctggcagccagaagcgaaaacgaaggaacatcagacggggaaacttatattgagaaatatacacgcggcgtccttcaagtggaaaacatactaagcctcgagagactgaggcaagcagttacagtgaaggaggccctttcaaccaaggctaggcatattagaaggagcctaagtacacctaatgtgcacaacgtttcaagttcacgccccgatctttccggtttcgatgaggatgacaaaggttggccggaaaatcaacttgacatgagcgattacagctcttcataccaggatgtcgcctgctacggtactttgcccagagacagtcctagacggaataaagagggttgtacctccgagaccccgcatgcactgacggtgagcccttttaaggcatttagcccccagccccctaagttttttaaacctcttatgccagttaaggaagaacacaagaaaagaattgctctggaggccaggccactgctcagccaagaggatagcgaggaagaggaaaacgaattagaagctattaataggaagctcatctcctcccaaccttacgtaccagtggagtttgcggatttcagcgtgtacaacgccagtctggagaatcgggagtggttctcgagtaaggtcgacctgtccaactccagagtcctcgagaaagaggtttcgcgttctccaaccacatcctccatcacctcaggttatttcagtcactctgcctcaaatgccacactctcagacatggtggtgcccagcagcgactccagtgatcaacttgcaatccagactaaagatgccgacagcaccgaacactccaccccaagcttggtccacgattttcgcccttcttcaaataaggagctcactgaagtcgagaaaggccttgtcaaggataaaatcattgtggtgcccttgaaggaaaactcagcccttgcgaaggggtctccctccagtcagtccatccctgagaagaacagcaaatcgctctgccgcacagggtcttgctcggaacttgatgcatgcccctccaagataagtcagccagcccgagggttctgtccgagggaggtgaccgtggaacacaccaccaatatccttgaagaccacagttttaccgagttcatgggtgtgagcgagggcaaggatttcgatggcttgactgattcctccgcaggtgaactgtcaagcaggaggagcctcccaaacaagaccggcggcaaaaccgtgtccgatggtcttcatcacccatctcaactccattctaaactggagaatgatcaagttatcatacctgaagccgccttttgggtgctgtgttgccagtag

SEQ ID NO: 121617 - DNA, 213 bp, synthetic construct
  misc_feature 1..213: note = Description of Artificial Sequence: Synthetic coding sequence
  source 1..213: mol_type = other DNA
atgtcagataccaaagtgaaagtggcggtccgggtgaggcctatgaatcgacgagaattagaactcaacaccaaatgtgtggtggaaatggaagggaatcagaccgtccttcacccccctccaagtaatactaagcagggggaacgccttgtgaccgtggcacacatttcaaattccagcaccctggggggccaaggcaagagaataacatag

SEQ ID NO: 121618 - DNA, 1038 bp, synthetic construct
  misc_feature 1..1038: note = Description of Artificial Sequence: Synthetic coding sequence
  source 1..1038: mol_type = other DNA
atgcccaagctcttgaagagtctgttcccagtgagggatgagaaacgaggcaagagaccgtcccccttggctcatcaggctcagccggagatgggcccggatgttctcgtgcagacgatgggcgcccctgccttaaagatttgtgacaaacccgctaaagtgcctagtccacctcctgtcattgccgtgactgcagtgaccccagcgcctgaggctcaggacggccccccttctcccttatctgaagcttccagcggatactttagccacagcgtcagtactgcgactctatccgacgctctgggccccggcttggacgccgcagctccacctggcagtatgcctacagcacccgaagcggagcctgaagccccgatttcccatccgccgccccctactgccgttccagctgaggaacctccggggccacagcagctggtgagtccagggcgagaacgcccggacctggaggcccccgcccctgggagcccattccgggtgagacgtgtgcgcgccagtgaactcaggtcattttctcggatgctggccggagatcccggttgttcaccgggtgccgaagggaacgcacccgcgccaggggccgggggtcaggccttggcctccgacagtgaggaggccgatgaagttccagaatggctgagagagggggagttcgtgaccgttggcgcccataaaaccggggtggtgcgatacgtcggcccagctgatttccaggaagggacctgggtgggagtcgagctcgatctgcccagcggtaagaacgatgggtccataggcgggaaacaatatttccgctgcaatccaggatacgggctgctggtgaggccgagcagagtgcgacgcgctacaggccctgtccgcagaaggagcaccggtctgcgtctgggggcccctgaggccaggagaagcgctaccttgtcaggaagcgctacaaacctcgcctccttgaccgccgcccttgcaaaggccgaccggtcccacaaaaaccccgaaaacaggaagtcttgggcctcttag

SEQ ID NO: 121619 - DNA, 5481 bp, synthetic construct
  misc_feature 1..5481: note = Description of Artificial Sequence: Synthetic coding sequence
  source 1..5481: mol_type = other DNA
atgggcgacagcaaggttaaggtggctgtccgaatccgtccaatgaatcgtcgcgagaccgacttgcataccaagtgtgttgtggacgtcgacgcaaacaaggtcattctcaatccagtcaacactaacctgtcaaaaggagatgcacgcgggcagccaaaggtatttgcatatgatcactgtttttggtccatggatgagagtgtgaaagaaaagtatgcgggacaagacatcgtgtttaagtgcctgggcgagaacatccttcaaaatgcttttgatgggtataacgcctgcatcttcgcctacgggcaaaccggatcaggtaagtcctacacaatgatgggcacagccgaccagccaggcctgatcccgaggctctgcagtggcttattcgaacgtacccaaaaagaagagaacgaagaacaaagcttcaaggtggaggtgtcatacatggagatttataacgagaaagtgagagacctgcttgaccccaagggttcccggcagaccctaaaggtcagagaacattccgttctggggccctacgttgacggtctcagcaagctggcagtcacctcttacaaggacattgaaagccttatgtccgaggggaacaagtcaagaacagtagctgccacaaacatgaatgaagagagtagcagatctcacgcagtttttaaaataaccctcacccataccctatatgatgtgaaatcaggcacatcaggagagaaggtgggcaaactctccctcgtggaccttgctggcagtgaacgagctactaaaaccggcgccgctggtgaccgcttaaaggagggttcaaatataaacaaatctctaacgacactgggcttggtgatcagcgcactggccgaccaatcagctgggaaaaacaagaacaagtttgtgccttatagagactccgttttaacctggctgcttaaggactccctaggcggcaactcaaagactgcgatggtcgctactgtgtcccccgcagccgacaattatgacgaaacactttccaccttaagatacgccgatcgtgccaagcatatcgtgaaccacgccgttgtgaatgaagatcctaatgcaaggatcattagggatcttagagaggaggtggagaagttgagggaacagttgacaaaagccgaagcaatgaagtcacctgagcttaaagataggctcgaggagtctgagaagctgattcaagagatgacagttacttgggaagagaaactgagaaaaacagaggagatcgctcaggagagacagaaacaactagagtctttaggcattagtctgcagtccagcggaattaaggtgggagacgataagtgcttcctagtcaacttgaacgccgacccggcccttaatgaactgctcgtgtactacctgaaggagcatactctcattggctctgccaactctcaagatatacagctgtgcggcatgggcatcctccctgagcactgtattattgacatcaccagcgaagggcaggtgatgttgacccctcagaagaataccagaaccttcgtgaacgggtcctcagtttcttctcccatccagttgcaccacggcgatcgaatcttgtggggcaacaaccatttcttcagacttaaccttcctaaaaaaaagaagaaggccgaaagagaggatgaagaccaggatccttctatgaagaatgaaaattccagtgagcaattggatgtcgacggagactctagttctgaagtgagcagcgaggtgaacttcaactacgaatatgcccagatggaagtgactatgaaagccctcgggagtaatgatcctatgcagtccattctaaactccttagagcagcagcatgaggaggagaagaggtctgcactcgaacggcagagactgatgtatgaacacgagctggagcagctgaggagacgcctctcccccgaaaagcagaattgcagaagcatggaccggttctccttccatagcccaagtgcccaacagagacttcgccaatgggcggaggaacgagaggccaccctcaataattccttaatgcgtctgagggagcagatagtgaaggccaacctgctagtccgggaggctaactatattgctgaagaattggataaacgcaccgagtataaagtaacccttcagattccggccagctcccttgacgccaacaggaaacgcggttcactgctctctgaacccgcaattcaggtgcgccggaaaggcaaaggtaagcaaatctggagcttggagaagctggataatcgtctgcttgatatgcgcgatttataccaagaatggaaggagtgcgaagaggataatcccgtgatcagatcatacttcaagcgggcagatcctttttacgatgaacaagagaatcattctctcattggagtggctaacgtctttctggagtccttattttacgatgtgaagctgcaatacgcagtccctattattaatcaaaagggtgaggtcgcggggcgactacatgtcgaagttatgcggctttcaggggacgttggcgagagaatagccggcggggacgaagtcgccgaggtaagctttgaaaaagaaacccaagagaacaagctcgtctgtatggtcaagattttgcaggcgactggcctgccccagcacctatcgcatttcgtgttctgcaaatattcattctgggaccaacaggagcctgtgattgtggctcccgaagtggataccagtagctctagcgtctctaaggaacctcattgcatggttgtcttcgaccactgcaacgagttctccgtgaacatcacagaggactttatcgaacacttaagcgagggcgcgctcgctattgaggtgtacggccacaagataaacgatccccgaaagaacccggcactatgggatctggggataattcaagccaaaacacggtcactgagggatagatggagcgaggttactaggaaactggaattctgggtacaaattttggagcaaaacgaaaatggagaatattgccctgttgaagtgatttctgccaaagacgtcccaaccggcggtatattccagctccgccagggccaatcccgtcgggttcaggttgaagttaagtccgtacaagaatccggcacccttcctctgatggaggaatgcatcctttctgtgggaattggctgtgtgaaggtgcgaccgcttcgggccccaaggactcatgagacatttcatgaagaggaggaagacatggacagctaccaggacagggatctagagcgcctgcgtagaaaatggttgaatgctttgactaaacgacaggaatacttagatcaacagttacagaagctagtgagcaagagggataaaactgaggatgatgccgaccgagaagcccagttgctggaaatgagacttacactgaccgaggagagaaacgcagtaatggttccctcagctggatcaggcatcccaggagctcccgcagagtggactcctgtgcccggcatggaaacacatattccggtgattttcttggacctgaatgccgacgacttttcatctcaggataatctggatgacccagaagccggcgggtgggacgctaccttgactggagaagaagaagaggaattcttcgagctgcagattgtaaagcagcacgacggggaggtgaaggctgaagcctcctgggactccgccgtgcatggatgtccacagttatccagggggacaccagtggacgagcgcctatttctgatagtgagagtgactgtccaattgtctcaccccgcagacatgcagctggtgctccgcaaacgaatatgtgtgaatgtgcacggcaggcaaggattcgcacagagcctcctgaagaagatgtcacacagatcgtctatccctgggtgcggcgttacgttcgaaatcgtgagtaatatacctgaagatgcacagggagtggaggaacgggaggctctagcccggatggcagccaatgtggaaaaccctgcaagtgccgatagcgaggcatacattgaaaagtatctgaggagtgtacttgctgttgaaaacctcctgacgctcgatcgcttgcggcaggaagtcgcagtcaaggagcagctgactggcaaaggcaaactgagcaggcgttccatttcgtccccaaatgtgaaccgactctccggcagcaggcaggatctgattccatcctactcattgggaagcaacaaaggtcgatgggagagccagcaggacgtttctcagacaaccgtgtcccgaggaattgcccccgctccggccctgagcgtgtcaccccaaaataaccattcaccagaccccggcctgtcaaatctcgctgcttcgtatctgaatcccgttaaatcctttgttccccagatgcccaaactgctgaaaagcttattcccggtccgtgacgagaagagaggcaagcgccccagcccccttgcccatcaacctgtaccacggattatggtgcagtccgccagcccagacattcgcgtcaccagaatggaagaagcccaacccgagatgggtccggatgttttagtgcagaccatgggcgcccccgcattaaaaatctgcgataaaccggctaaagttccgtcccccccacctgtgatcgccgtgaccgccgtgacccctgcaccagaggctcaggacggtcccccatctcctctttcggaggccagctcgggctactttagccactcagtctcaaccgccacattgtctgacgccctgggcccaggtctggacgcagctgcaccgccaggctcaatgccgactgcaccagaagccgagccggaggctccaataagccacccacccccccccacggctgtaccagctgaggaacccccgggtcctcagcagctggtgtcacctggcagagagcggcccgatctggaggcacccgctcccgggagtccctttcgggtccggagggtgcgcgccagcgaacttaggtctttttctcgcatgctcgccggggaccccggatgctccccaggagctgagggcaatgcccctgcccctggcgccgggggtcaggctctggccagtgattctgaggaagccgacgaagttccagaatggctgagagagggggagtttgtgaccgtgggcgctcacaagacaggagttgtgagatacgtcggccctgccgactttcaggaaggcacttgggtgggggtggagcttgacctgcccagcggcaagaacgacggatccattggaggcaaacagtacttcaggtgtaatcccggttatgggttgcttgtgaggcccagtcgcgttagaagggctactggaccagttaggcggaggagcaccgggcttagactcggtgccccagaagcccggaggagcgcgaccctgagcgggagcgccactaatttggcgagcctcactgccgcattggctaaagctgaccgcagtcacaaaaatccagaaaatcgcaaaagctgggcctcatag

SEQ ID NO: 121620 - DNA, 4947 bp, synthetic construct
  misc_feature 1..4947: note = Description of Artificial Sequence: Synthetic coding sequence
  source 1..4947: mol_type = other DNA
atgagtttgcacagtacccacaatcgtaataatagcggtgatatcctggacattccatcgagccagaactcttcttctttgaatgccctcactcatagctctcgcttaaaactgcacctgaagtctgatatgtccgagtgcgaaaatgacgatccactattacggtccgcaggcaaggtgcgcgatatcaaccggacctatgttatctccgcatcccggaagaccgctgatatgcctctaacgcctaatccagttggccggctcgccttgcagcgccgcactacccgcaataaagaatcaagtctgctggtgtccgagttggaagacactaccgagaaaacagctgagaccaggttgaccttgcaaaggcgggccaaaactgattctgcggaaaagtggaagacagcagagatcgacagcgttaagatgacactgaacgttggtggtgaaactgaaaataacggtgtcagcaaagaatcacggaccaatgtgaggatcgtcaacaacgcaaaaaactccttcgtggcctcatcggtccccctcgatgaggaccctcaggtgattgaaatgatggccgataagaagtataaggagactttcagcgcgccctcccgggcgaatgagaacgttgcactcaaatattcttccaatcgaccgcctatagctagcctgtcacagacagaagtagtgcgcagcggtcacctgactaccaaacccacccagtccaaactggatatcaaagtcctggggacagggaacctgtatcacagatccattgggaaggagatagccaaaacaagtaataagttcggtagtttagaaaaacggacgccaaccaagtgcactactgaacacaagcttactactaagtgctccctgccccagttgaagagtccagctccctcgatcctgaagaaccggatgagtaacctccaagtgaagcagcggcctaaatcaagcttcttagccaacaagcaagaacgctctgctgagaacactatacttcccgaagaagaaactgtggtgcagaatacatctgccgggaaagatccactaaaagtggagaactctcaagtgacggtcgctgtgcgtgtgagaccctttactaaacgggagaagatcgagaaagccagccaagtggtctttatgtccggcaaggagatcaccgtggaacatcctgataccaaacaggtgtataacttcatttatgatgtttcattttggtcatttgatgaatgccatccacattatgcgagtcagactacggtgtacgaaaagctcgctgcccccctgctggagcgggcattcgaagggtttaacacgtgcctgtttgcatatggacagactggaagtggcaaatcctacacaatgatgggtttttcagaggaaccaggcattattccgagattctgcgaggatctgttttctcaagtagcaaggaaacaaacccaagaggtcagctatcatatcgagatgtccttcttcgaggtgtacaatgagaagatacacgaccttctggtgtgcaaggacgagaacgggcagaggaagcagccgttgcgtgtgcgcgagcacccagtctacggaccgtacgtagaggcgttaagcatgaacatagtctcatcgtacgcggacatccagagctggctcgagctgggaaacaagcagcgagcgactgctgccacaggcatgaacgataagtcatcacggtcccatagcgtctttacgctggtcatgacccagacaaaaacagagttcgtggagggagaggagcacgaccaccgcatcacctcaagaatcaacctgattgacctcgccggcagtgaaaggtgtagcactgcccatacaaatggagatcgactgaaagaaggggtgtccattaacaagtccctgctgacattggggaaagttatctccgcgctgagcgaacaagcgaatcagagatcggtatttattccttatcgggagtctgtgttgacttggttgctcaaagaatccctcgggggaaactccaaaaccgcaatgatcgcaactattagccctgctgcatcaaatatcgaggagaccctgagtaccctgcgctatgcgaatcaagctaggttgattgtcaatattgctaaggttaacgaggatatgaacgctaagctaattagggaactcaaggccgaaatcgcgaagttgaaggcggctcagagaaattcccggaacattgatccagaaaggtacagactctgccgacaggagatcacctctctccggatgaagctgcatcagcaggagagagatatggccgagatgcagagagtctggaaggaaaagtttgaacaggccgaaaagaggaagctgcaggagacaaaggagttgcagaaagctggcataatgtttcagatggacaaccaccttcccaacctcgtcaacttgaatgaggaccctcaactctccgaaatgctgctctacatgatcaaggaaggaacaaccacggtaggcaagtataagccaaattcttcccatgacatccagctcagcggtgtgctcatcgctgacgatcattgcaccatcaagaattttggtggaactgtcagcatcatacctgttggggaggcgaagacgtacgtgaacggaaagcatatcctcgagatcactgttttaagacatggggaccgtgttatactagggggtgatcattacttcagattcaatcacccagttgaggtacagaaaggcaaaagaccatcaggacgggacacccctatcagcgagggacccaaagactttgaattcgcaaaaaatgaattgctgatggcacaaagaagccagctcgaggctgaaatcaaagaggctcagctgaaggctaaggaagagatgatgcaggggatccaaattgcaaaagagatggctcagcaggagttgagctcccagaaggccgcttacgagtccaaaataaaagcactggaggctgagctgcgagaagagagccaacggaaaaaaatgcaggagataaataatcagaaagccaaccacaaaatagaggagttagagaaagctaagcaacacctggagcaagagatttatgtgaacaagaagcgcctcgagatggagacgctggccaccaagcaggccctcgaagatcactccatccgccacgctcgaatcttggaagctcttgagactgagaagcagaaaattgccaaagaggtgcagattttgcaacagaatcgcaataacagggataaaaccttcactgtgcaaaccacctggagctcgatgaagctatccatgatgatccaggaagccaacgctatctcctccaagcttaaaacttattacgtattcggtcgtcacgatattagtgataaatcgtcatccgacaccagcatccgggtgcgaaaccttaagctgggaatcagtacattctggtctttagaaaaattcgagtcaaagctcgctgccatgaaagaactttacgaatcaaatggttcaaaccggggggaagacgcattttgcgaccctgaagacgagtgggaaccggatataaccgacgcccccgtctctagtctctcaagaagacgcagtagatcgctgatgaaaaatcgtcggattagcggatgcctgcatgacattcaagtgcatccaataaagaacttacactcatctcacagtagcggcctgatggacaaatcctcaacaatatactccaatagcgcagagtccttcctaccaggaatctgcaaggaactgatcgggtccagtctagactttttcggccagtcttatgatgaggagcgcaccatcgccgacagccttatcaactcatttctaaaaatctataacggcctctttgctatctcaaaagcccacgaggagcaggacgaggaatcccaggataacctgttctcctcagacagggccattcaatcactgacgattcagactgcgtgtgcattcgaacagctcgtggtgttaatgaaacattggctgtctgaccttcttccatgtactaacattgcacgactggaggatgagctccgccaggaagtaaagaagttgggcggatacctgcagctgtttcttcagggttgctgcctcgatatcagttcaatgataaaggaggcacagaagaatgcgatccagattgttcagcaggccgtgaagtatgtgggtcagctcgcagttctaaagggaagcaaacttcactttctagaaaacggcaacaataaggctgcctctgtccaggaggaattcatggatgccgtgtgcgatggggtggggctgggcatgaagatacttctggacagcggactggagaaggcgaaagagcttcaacacgagctcttccgccagtgtaccaaaaatgaagtcactaaggaaatgaagacaaatgccatggggctgattaggagtctcgagaatatctttgcagagtccaaaataaagagctttcgtaggcaggttcaggaagagaacttcgagtatcaggattttaaacgaatggttaatcgggctcctgagttcctgaaactgaaacactgcctggagaaggctatagaaatcatcatatctgcccttaagggctgtcactcagatatcaacttgctccagacttgtgtggagagcattcggaatcttgcaagtgatttctactctgattttagcgtaccgagtacctctgtgggttcctacgaaagccgcgtcacccacatcgtacaccaggagctggagtctctggctaaatcactccttttctgctttgagtctgaagagtcccctgatctactgaagccatgggagacttataatcaaaatacaaaagaagagcatcaacagtccaagtcgtcaggcatcgacgggtcaaaaaacaaaggcgtgcccaagcgggtctacgagctgcacgggagctccccagcggtatcttcagaggagtgcaccccatcaaggattcagtgggtgtag

SEQ ID NO: 121621 - DNA, 5073 bp, synthetic construct
  misc_feature 1..5073: note = Description of Artificial Sequence: Synthetic coding sequence
  source 1..5073: mol_type = other DNA
atggcgggggcctctgtcaaggtcgccgtgcgggttaggccatttaacagtagggaaatgagcagggattcaaaatgtatcattcagatgtccgggagcactactactatagtgaaccccaagcagcctaaggagactccgaagtcttttagttttgattactcctactggagccatacttctcctgaagatataaactatgccagtcagaagcaggtgtacagggatatcggcgaagaaatgttacagcacgcctttgaaggatataacgtttgtatatttgcttatggtcagacaggtgcgggaaagtcttatactatgatgggaaagcaagagaaagatcaacaggggataataccccagctgtgtgaagacctcttctccagaatcaatgacactactaatgataacatgagttacagtgtcgaggtgtcttatatggagatttactgtgagcgtgtgagggatctgctcaacccaaaaaataagggaaacctcagagtgcgggaacaccctctgctgggaccctatgtcgaggacctgtctaagttggccgttaccagttataacgacatccaggacctgatggatagtggaaataaagccagaacagttgccgcaacaaacatgaacgagaccagttcacggtcacacgctgtgttcaacattatcttcactcagaaacgccatgacgctgaaacgaatatcacaacggaaaaggtgtcaaagatttcgttagtggacttagctggctctgaaagggctgattctaccggggctaagggaacgaggttgaaagagggcgcaaatattaacaagtccctgaccaccctggggaaagttatctccgcattggccgagatggactctgggcccaataaaaataaaaaaaagaagaagacggactttatcccctacagggattccgttctgacatggctgttgcgcgaaaacttaggaggtaattcgcggaccgccatggtggctgcgctttccccggccgatattaattatgatgaaaccctgtccacgctcagatatgcggaccgtgctaaacagattcgctgtaatgcggttattaacgaggatcctaataataaactgattcgggaactgaaggatgaagtgacaagactgagagatctgctctatgcacagggcctgggtgacattacggacatgacaaacgccctggtaggcatgtcgcccagctcatccctctccgcccttagtagtagagcagctagcgtgtccagtctgcacgagcggatcctgtttgcaccaggttccgaagaagcaatagagcggctgaaggagacagagaaaattatcgctgagcttaatgagacatgggaggaaaagctgagaagaactgaggctattcgcatggagcgcgaggcattattggctgaaatgggggtggccatgagggaagatggaggcactctcggagtcttctctcccaaaaagaccccacacctcgtcaatttgaatgaagatcccttaatgagtgaatgtcttctgtattacattaaagatggcatcacacgcgttggccgcgaagacggagaacggcggcaggatatcgtactttctggtcactttatcaaagaggagcattgtgtttttcggagcgactcccgaggcggctcggaagctgttgtcacactggagccatgtgaaggagcagacacttacgttaacggaaagaaggtcacagagccgtctattctgagatctggcaatagaatcattatgggaaaatcccacgtcttccgcttcaatcatccagaacaggctaggcaggagagggaacggacaccctgcgcagagacacccgctgagccagtggactgggcctttgcgcagcgcgaattattggaaaagcagggtatagacatgaagcaggagatggagcagcgcttgcaggagctcgaagatcagtacaggagggagcgagaggaagccacttacctcttagagcagcaaagactggattatgagtcaaagctcgaggctttgcagaagcagatggactctcggtattatcccgaggtaaacgaagaagaagaggaaccggaggatgaggtccaatggactgagcgagagtgtgagctggctctttgggccttccgtaagtggaaatggtaccaatttacctccctgcgcgacctgctctggggaaatgctatcttcctcaaggaagctaacgcaatctccgtggaattgaaaaagaaggtgcagttccagtttgtcctcctaactgatacactgtacagcccacttccacctgacttgctgccgcccgaggctgcgaaggaccgagagactaggccttttcctcgtactattgtggccgtcgaggtgcaggaccaaaagaatggggccacccactattggacattagagaaattacggcaacgcctggatctgatgagagagatgtatgatagagcagcagaggtccctagctcagtgatcgaggattgcgataacgtggtaaccggcggagatcctttttatgacagattcccttggttccggctggtgggccgggcatttgtctacctaagcaacctgctatacccagtgccactggtgcatagggtcgcaattgtgagcgagaagggggaggtgaaaggattcctccgggtggctgtgcaggccatcagcgcagacgaagaggcaccagactatggctctggggttcgccagtccggaaccgcaaagatatcattcgacgaccagcattttgaaaaatttcagagcgaatcatgccccgtggtgggaatgtccagaagcggcacctcccaagaggagttacgaatcgtagagggccaaggccaaggcgccgacgttgggccctctgctgacgaagtaaataataacacctgttctgccgtgccccccgaaggcttgctgctcgattcctctgagaaggctgcactggacggccctctggatgccgctctggatcacttaaggctcggaaatacatttacattcagagtcaccgtgcttcaggcgtcttctataagcgctgagtatgccgacatcttttgtcagttcaactttattcaccgtcatgacgaggccttcagcaccgaaccactcaaaaacaccgggagaggcccgcctcttgggttttatcacgtccagaatatcgcggttgaggttaccaaatcattcattgagtacatcaagtctcagcccatcgtgtttgaagtattcggacactaccagcagcacccgtttccacctttgtgcaaggatgtgctgtctcccttaaggccctctaggcggcacttcccaagagtgatgcccttatcaaaacccgttcccgcgacaaaactgtcaacactcactcgcccatgccctggaccatgtcattgcaagtacgatctcctcgtttacttcgagatctgtgagttggaagccaacggtgattacattcccgccgtagtggatcatagaggcgggatgccctgtatggggactttcttgctgcaccaggggatccagaggaggattacggtcacactcctgcacgagacagggagtcacatccgctggaaggaagtgcgggaactggttgtcggacgcatccgtaatactccagaaactgatgagagccttatcgaccctaacatattgagtctgaatatcctgagctctgggtatatccatcccgcacaggacgatagaaccttttatcaatttgaagctgcttgggacagtagcatgcataatagccttctcctgaatcgagtcacaccctaccgcgaaaagatctacatgactctctctgcatacatcgagatggaaaactgtacacagcccgcagttgtcacgaaggacttttgcatggtgttctattcaagggacgcaaagcttcctgcctctaggagcattcggaacctcttcggcagcggctctcttagagcgagtgagtccaatcgcgttactggcgtttatgaactgtcgctgtgccacgtggcagacgccggaagtccaggcatgcagcggaggcgcaggcgggtgctcgacacatcagttgcatatgtgaggggggaggagaatctcgcgggatggaggcctaggtctgactcattgattttggaccaccagtgggaactggaaaagctgagcttactacaggaagtcgaaaaaacaaggcattacttactgctccgagagaagctcgagacggcgcagcggcctgttccggaagcgttgagccccgccttctcagaggactccgagtcacacggcagttccagcgcaagcagtcccctgtcagcagagggtcgaccaagtcctttggaggcaccaaatgagcggcagcgggaacttgcagtcaaatgcctcagactgctgacccataccttcaatcgcgagtacacacactcccacgtgtgcgtgtccgcctcagaaagcaagctcagcgaaatgagtgtaacgctgctccgggatccttctatgagccccctgggagttgccactctaacccccagcagcacctgtccctctctggttgagggccgctacggtgcgacagacctgagaacgccacagccctgttcgcggccagcttccccagaacccgagctgctgccggaggcagattccaaaaaactccccagccctgcccgcgccaccgaaacagacaaggaaccccagcggcttttggtgccagatatccaggagatcagagtctcccccatagtaagtaaaaagggctacctgcatttccttgagccccacacctctggctgggcccggcggtttgtagttgtacgtaggccctacgcctacatgtataactccgacaaagatacagtcgaaaggtttgtcctgaacctggcgacggcccaggtcgaatactctgaggaccagcaggcaatgcttaagactcccaatacttttgcagtgtgcaccgaacatagagggatcttactgcaggcagcctcggataaagatatgcatgactggttgtacgccttcaatcccctgctagccggcaccattcgtagcaagttatcacgaagacggtccgcccaaatgagagtgtag

SEQ ID NO: 121622 - DNA, 5400 bp, synthetic construct
  misc_feature 1..5400: note = Description of Artificial Sequence: Synthetic coding sequence
  source 1..5400: mol_type = other DNA
atggccggtgcatccgtgaaggtggccgtacgcgtgaggccttttaattcgcgcgaaatgtctcgggacagcaagtgcataatccagatgagcggatcgacgacaacaattgtgaatcctaagcagcctaaagagacgccgaaaagcttcagctttgattattcttactggtcacacacctcccccgaagatatcaattacgccagccagaaacaggtgtatagggatatcggggaggagatgcttcagcatgcgtttgagggctataacgtgtgtatcttcgcttatggacagaccggcgcgggtaaaagctataccatgatgggaaagcaagagaaagaccagcagggtatcatcccacaactgtgcgaagacctcttctcccggatcaacgatacgacaaacgacaacatgtcttattccgtggaggtttcatacatggagatttattgcgagcgagtgagggatctgctgaatcccaagaacaagggcaatctgcgggtgagagaacacccgctgttagggccctacgtcgaagatctatcaaaactggcggtgacgagctacaacgacatacaggacctgatggattccggcaataaggctcggacagtagccgctacgaacatgaacgagacttccagcagatcccacgcagttttcaacattatttttactcagaagcgccatgacgcagaaaccaacatcactactgagaaggtttctaagatttccctggtggacctggcaggttctgagcgagccgacagcaccggagcaaaggggactcgtcttaaagagggtgcaaacatcaacaagtctctgacgaccctggggaaggtgatcagcgccctggccgagatggtatcagggccagctcggaataagaagaagaagaaaacagacttcataccatatcgggattcagtgctgacatggctgcttagggaaaatctcggaggcaattcaaggactgctatggtggctgcactgtcaccagccgatataaattacgatgaaaccctctcaacattacggtatgcagatcgcgcaaagcaaatcaggtgtaacgccgtcatcaacgaagatcctaataacaagttaatccgtgaattgaaggatgaagttacacggctccgcgatttactatatgcacagggactgggggatatcaccgacaccaacacagtgcccggcggccccaagcttactaatgccttggtgggaatgtcgccctcctcttccctcagcgctttgtcctctagagccgctagtgtttcttccctgcacgagcgtattctcttcgcccctggaagcgaggaagccattgaacggctcaaggaaacagaaaagatcatcgctgagctcaacgaaacatgggaggagaaactgagacggacagaagccatacgtatggaacgcgaggctttgctcgctgagatgggagtggctatgcgggaagatgggggcactctaggagtgttctcccctaagaagactcctcatttggtgaaccttaacgaggacccccttatgagcgaatgcctgctctactacatcaaggacgggatcacaagggtgggccgcgaggacggggaacgtcgacaggatattgtgttgagcggacatttcattaaggaggagcattgcgttttccgatctgattcccgtgggggatcagaggcggtggtaactctagagccttgcgaaggggctgatacctacgtaaacggaaaaaaggtaaccgagcctagcatactgaggagtggaaaccgaatcattatgggcaaatctcatgtgttccgtttcaaccacccggagcaagctcgccaagagagagaacggacaccgtgcgcagagacacccgccgagcctgtggattgggcgtttgcccagcgcgagctgctcgagaagcagggcatcgacatgaagcaggagatggaacagcggctgcaggagctggaagatcaatatcggagagagagggaggaggctacttacctgctggagcagcagcggctggactacgagtcaaagctagaagccctgcagaaacaaatggacagcaggtattaccctgaggtgaatgaggaggaagaagaacccgaggacgaggtgcagtggaccgaaagagaatgcgagctagccctttgggcatttcgcaaatggaaatggtatcagttcacatcacttagagatctcttatggggcaatgccattttcctgaaagaggcaaatgcgatttctgtggagctcaagaagaaagtccagtttcagttcgtcctcctcactgacacactgtacagcccactgcctcccgacctattaccccctgaagccgccaaggaccgcgagacacggcctttcccgaggacgatcgtggcagtcgaagttcaggatcagaagaacggggctacgcactattggacactggaaaagcttcgacagagactcgacctgatgcgcgagatgtatgatcgcgcagccgaagtcccttcgagcgtgatcgaagactgtgataatgttgtcacgggaggagatccattttacgacagattcccttggttccggttagtgggatcctcagctattagtggctgtaacagttatcctctcttgaatacttgtatgagcgagaggatggctgcgctcaccccctcgccaacctttagtagtcctgatagcgatgctactgagcctgctgaagagcagtcagttggtgaggaagaagaggaggaagaagaagaagaggatgaggaggaggaggatctggaagacgatgtgtttcctgaacacgctctgtgcgacggcagagaccccttctatgacaggcctcccttgttcagcttggtgggaagggctttcgtctatcttagcaacttgctttatcctgtgcccttagtccatcgcgtggctattgttagcgagaagggagaggtgaaaggctttctgcgtgtagccgtccaggctatctcagcggacgaagaagctccggactatggctccggggttaggcagtccgggacggctaaaattagtttcgacgatcagcacttcgagaagtttcaatcagagtcatgcccagtagttgggatgtcacgcagcgggacctctcaggaggaactgaggattgttgagggccagggccagggagctgacgtcggtccaagtgctgacgaggtgaataacaacacgtgcagcgctgttcctcctgagggcctgcttttggactcgagtgagaaagctgctctcgatggccctctggacgccgccctggatcatttgcgtctggggaacaccttcactttccgagtaactgtacttcaggcttcttccatttctgccgaatatgccgacattttctgtcagtttaacttcattcatagacacgacgaggccttctccacagagcccctcaagaacaccgggcgcggccctccgcttggtttttaccacgtgcagaacattgccgttgaggttaccaaatcatttatagagtacattaagtcccaacctattgtttttgaggtgttcggccactatcagcagcatccctttcctccactctgcaaagatgtgttatctccgcttcgccccagccggagacatttcccccgtgtgatgcccttgtccaaaccagtacccgctacaaaactctctacactgaccaggccttgtcccgggccatgtcattgtaagtacgacctgctggtttactttgagatctgcgaactcgaagccaatggcgattacattcccgctgtggtcgatcacagaggaggcatgccgtgtatgggcacttttcttctgcaccagggaatccagaggaggatcacagttaccctgctccacgagactggaagtcatattaggtggaaggaagtacgagagctggtggtggggaggattcggaatacaccggagaccgacgagagtctaattgatccgaatattctgtctcttaatattctctctagcggttacatccatcctgcacaagatgatcgcgtaagcctcggaaatgatacgcgtaccttttaccagtttgaggcagcgtgggactcaagcatgcataactcactactgctgaaccgggtgacaccctatcgagagaagatctatatgaccctgtcagcttacatcgagatggaaaactgcacacagccggcagtagtcactaaagatttctgcatggtgttttacagcagagatgcaaagcttccagcatcgcgctccattcgcaatctgttcggctccggcagtctgagagcgagcgaaagtaatcgggttaccggcgtgtatgaattaagcttatgccacgtcgccgatgcgggcagtccaggaatgcagcgccggcgtagaagagtgctcgacactagcgtggcctatgtccggggagaggagaacctggctggctggaggccgcgctcagactcactcattctggatcaccaatgggagctggagaaactgagtctactccaggaggttgaaaagaccagacattatctacttctgcgcgagaagttggagacagcccagagacccgtgccggaggctctgtctcccgcattttccgaggacagcgagtctcacggctcgagctcagcgtcatcccctctgagcgcggagggtcgaccctcacctctcgaagcgcccaatgagcgtcaacgcgagcttgctgtgaagtgtctgcgattactgacgcatacattcaacagggaatacacccattctcatgtctgcgtaagtgcctccgaatcaaaactcagtgaaatgagcgtaactctgttacgagaccctagcatgagtccactcggggtggccaccctgactccaagttccacatgcccaagcctggtggaagggcggtacggggcaacagacctgagaacgcctcagccttgctctagacctgctagcccagaacctgagttgttaccagaagctgatagtaagaaacttccatctcctgctagagctaccgaaaccgataaagagccacaacgtctcctagtacccgacatccaggagattcgggtctcacctatcgttagtaaaaaaggctatctgcactttctggagcctcatacgtctggttgggcacgtagatttgtggttgtccgacgcccttatgcttatatgtataatagtgacaaggacaccgtggagcggtttgtccttaatctggcaacagcacaggtagaatactccgaggatcaacaggctatgctgaaaacacccaacacctttgcagtgtgcacagaacatagggggatactgttgcaggcagccagcgacaaggatatgcatgattggttatacgctttcaaccctctgcttgcaggtacgattagatcgaagttgtccaggcggcgaagcgcccagatgagggtgtag

SEQ ID NO: 121623 - DNA, 117 bp, synthetic construct
  misc_feature 1..117: note = Description of Artificial Sequence: Synthetic coding sequence
  source 1..117: mol_type = other DNA
atggctggcgcttccgtgaaggttgcagtccgggtcagaccctttaactcccgcgagatgtcccgtgatagcaaatgtataatccaaatgagcggctctacgacaacaatcgtgtag

SEQ ID NO: 121624 - DNA, 5376 bp, synthetic construct
  misc_feature 1..5376: note = Description of Artificial Sequence: Synthetic coding sequence
  source 1..5376: mol_type = other DNA
atggcaggcgcctctgtcaaagtcgctgtccgggtgcgtcctttcaactccagagaaatgtcaagagactcaaaatgtatcatccagatgagtggcagcacaactactatagtgaaccccaagcagcctaaagagacgcctaaatccttcagctttgactatagctactggtctcacacctcgcctgaagatattaattacgcctcacaaaagcaggtttacagagatattggcgaggagatgttgcagcatgcctttgagggctataatgtatgtattttcgcctacggtcagaccggtgctggcaagtcatataccatgatgggcaagcaggagaaggatcagcagggcataatccctcagctatgtgaagatctcttctcccggattaatgacaccaccaatgacaacatgagttattcagtggaggtctcatacatggaaatttactgtgagcgagtccgtgacctactgaatcctaagaataaagggaacctgcgcgtcagggaacaccccctccttggcccctatgtagaggacttgtccaaattggccgtcacaagttataatgacatacaggatctgatggatagcggcaataaggcccggactgtggcagctacaaacatgaacgagacatcttctcgaagtcatgctgttttcaacatcattttcacccagaagaggcatgacgccgaaacgaatatcactaccgagaaagtgagcaagatctctcttgtcgatctcgccgggtcagagagagccgattccacgggcgctaaggggactcggttgaaggagggggcaaatattaacaagtccttgactacactggggaaggtgatcagcgcactggcggaaatggattccggccccaacaagaataaaaaaaagaagaagacagactttatcccttatagggactccgtactgacatggctgctccgtgagaaccttggaggcaattcaagaacagccatggtggcagccctgagccctgcggacattaattatgacgagaccctgtcaacccttcggtacgcagatcgagctaagcagatcagatgcaatgccgtcatcaatgaagaccctaacaacaagctgatccgagagctcaaagatgaagtgacaaggctccgcgacctgctatacgctcaaggtctgggcgacattacagacacgaataccgtgcctggcgggcctaaactaacaaacgcccttgtggggatgagcccaagctctagcttatcggctctgtcaagccgagccgcatccgtctcatccttgcatgaacgcatactattcgctccgggctctgaggaggccatagagcgactgaaagaaaccgagaaaatcattgcagaattgaatgagacatgggaggagaaactaagacgcactgaggctatcaggatggagcgggaggctctgctggcagagatgggggtcgccatgagagaggacggcggaacactgggcgtcttttcgccaaagaagacaccccacttggtcaacctcaatgaggaccccctcatgtcagagtgtctcctctattatattaaggatgggattacaagggtgggccgagaggatggggagagaagacaggacatagtgttgtccggacattttatcaaagaagagcactgcgtgtttaggagcgattccagagggggctctgaagcggttgttaccttagagccatgcgagggcgcagatacatatgtgaatggaaagaaagttaccgaaccttcaatactcagatctggcaataggataatcatgggaaagtcacatgtgttccggtttaatcaccctgagcaggcccgccaggagcgtgagagaactccttgtgctgagaccccagcggaacccgtggactgggcctttgcccagcgcgagcttctcgaaaagcaaggtatcgacatgaagcaggagatggagcagcgcctccaggagctcgaagatcagtatcggagagagcgtgaggaggcaacttatctgctcgagcagcagagactggactacgagagcaaactggaagctcttcagaagcagatggattctagatactacccagaagttaatgaggaggaggaggagccggaagacgaagtgcagtggaccgaaagagaatgtgagctggcgttgtgggcatttcggaaatggaagtggtaccaattcaccagtctgcgagatctcctatggggcaacgccatcttccttaaagaagctaatgccatcagcgtcgagctgaagaagaaagtacagttccagttcgtgctgttaactgacactctgtacagccctctccccccagacctgctccccccagaagctgctaaggacagagagacaagaccctttcctcggacaattgtggccgtggaggtgcaagaccaaaagaatggagctacacactattggacgctggaaaagttgcgtcagcgactagatttgatgcgggagatgtacgacagagctgctgaggttcccagttcagtcattgaggactgcgacaacgtggtgacagggggggatccgttttatgatcgcttcccatggtttcgcctcgtgggaagtagtgcaatcagcggctgcaatagctaccctctgcttaacacttgcatgagcgaaaggatggccgctctgacaccatctcctacctttagttccccagactccgatgctaccgagccggccgaggaacaaagtgtgggcgaagaagaggaagaagaggaggaggaggaagatgaagaagaagaggacctggaagacgacgtgttccccgaacatgccctgtgtgatgggcgtgaccccttctatgatcgcccccccctttttagcctcgtaggccgtgcgttcgtttatttgtcaaacctgttatacccagtccccctagtacacagggtggcaattgtaagtgagaaaggcgaggtaaaaggctttctccgagttgcagtgcaggccattagcgctgacgaagaagctcctgattatggcagcggggtgcggcaaagcggaaccgccaaaatctctttcgacgaccaacactttgagaagttccaatccgaaagttgtccagtggttgggatgtcacggtctggcacaagccaggaagaactgcggattgtcgaggggcaaggacagggtgccgatgttggacccagcgcagacgaagtaaataataacacgtgcagtgcagtcccccctgaagggcttctgctcgattcctccgagaaggccgcactcgacgggccccttgatgccgctctggatcacctccgcctaggaaacacatttacatttcgggtgaccgtattacaggcgagctccattagtgccgagtatgcggacattttctgccaatttaactttatccaccgccatgacgaggcattcagtacagaacctctaaagaacacaggcagagggccccccttgggcttttaccatgtgcaaaacattgccgtggaagtcactaagtcatttatcgagtacataaaatcccagccgattgttttcgaagtcttcggtcactatcagcagcacccatttcctccgctttgcaaagacgtgctgtcaccccttaggccctcccgccgccacttccccagagtaatgcctctgagcaaaccagtccccgcgacaaaactgtccaccctgacccggccatgccccgggccatgtcattgcaaatatgatctactggtctacttcgagatatgtgagctcgaagccaacggagattacatacctgcggttgtcgaccacagaggcggtatgccctgtatgggtaccttcctcctgcaccaaggaattcagcgccgcattacagtcaccctgctgcatgaaaccgggtcccatatccgttggaaggaggtccgcgaactggtcgtgggacggatccgcaacacaccggagacagacgagagcctgatcgaccccaatattctcagcctgaacatcctgtccagcggatacattcacccagcgcaggacgatcgcaccttttatcagtttgaggccgcctgggactcaagcatgcacaactcgctgcttctgaatagagtcaccccctacagagaaaagatctatatgactctgtcggcgtacattgagatggaaaattgcacacagcctgctgtggtgaccaaagatttttgcatggtcttttattccagagatgcaaaactgcctgcctcacggagcatccggaacttgttcggttctggctccctgagagcctctgagtcaaatagggtcaccggagtctacgagctgtctctctgtcacgtggccgatgcagggagcccagggatgcagcggcggagaaggcgcgtactggacacttctgttgcctatgtgagaggcgaagagaatctggcgggctggagacctcgaagtgattctctgatcttggaccaccagtgggagttggaaaaactgagccttctgcaggaagtggaaaagaccagacattacctcctgctgcgcgaaaagctcgagacagctcagcgccctgtccctgaggccctttccccagcattttctgaggactctgaatcgcatggctcgagcagcgccagtagtcccttgagcgcagaggggcggcccagtccactggaggcaccaaacgagcggcaaagggaacttgcagtgaagtgtctgcggctcctgacacacaccttcaacagggaatacactcacagccacgtctgtgtgagtgcctcagaaagcaagctctccgagatgtctgtgaccctcctcagggatcccagcatgtcacccctgggagttgctactctgactccatcttctacctgcccgagtcttgttgaggggaggtacggcgctactgatctgcgtaccccgcaaccttgctctcgaccagccagccccgaaccggagctgctgcctgaagcagatagcaagaaactcccgagtcccgccagagccacggaaaccgataaggagccacagcgcctcctggtgccagatatccaggagattagagtgagccctatagtctcaaaaaagggttacctgcacttcctggagccccacaccagtgggtgggccaggcggttcgtcgttgtgcggcgtccctatgcatatatgtataattccgacaaagacacggtggagcgatttgtgctaaacctggccaccgctcaggtcgagtattcagaagatcagcaggcaatgctaaaaacacccaacacattcgcagtttgtactgagcatcggggcattctcttacaagcggcaagtgataaagatatgcatgattggctctatgcattcaatcccctgctggccggaacaattcggtctaaactgtctcggaggagatcagctcagatgagggtctag

SEQ ID NO: 121625 - DNA, 5313 bp, synthetic construct
  misc_feature 1..5313: note = Description of Artificial Sequence: Synthetic coding sequence
  source 1..5313: mol_type = other DNA
atgagcggtgcgagcgtgaaggtggccgtgagagtccgccccttcaattcacgggagacgagcaaagagagcaagtgtataatccagatgcaagggaacagcacgagcataatcaacccgaagaaccctaaagaggcccccaaaagcttcagcttcgactactcgtactggtcacacacttctccggaggatccctgcttcgcgtcacagaacagggtgtataatgacataggaaaggagatgctcttacacgcgtttgagggctataacgtgtgcatctttgcctatggacagacaggtgccggcaagagctacacaatgatggggaagcaggaagaatcccaggcgggtatcattccgcagctgtgtgaagaactgttcgagaaaatcaacgataactgcaatgaggagatgtcttatagcgtggaagtgagctatatggagatctactgtgagagggtgagggatctgctgaaccccaagaacaagggcaatctgagagtgagagagcaccccctcctgggaccttatgtggaggatctaagcaaactcgccgtgaccagttatactgacatcgcggacctcatggacgctggaaataaggctcgcacggtggctgcaactaatatgaacgaaacctctagcaggtctcacgccgtgttcaccattgtctttacacagaagaagcacgataacgagaccaacctctcgacagagaaggtgtcaaagatttcccttgtggatttggctgggtccgaaagagccgactcaacaggagccaaagggacacggttaaaggaaggtgcaaatattaataagtctttaactaccttgggaaaagtgatctccgctcttgctgaagtctcaaagaaaaagaagaagaccgatttcatcccctaccgtgattccgtgctcacttggcttttgcgggagaatctgggtgggaattcaagaacggccatggtggccgcactctctccagccgatattaactatgacgagactttgagcacgcttcgctacgccgaccgggctaaacagattaaatgtaacgccgttatcaatgaggatcccaacgctaaattggtccgcgagcttaaggaagaagtcactagactgaaagaccttctcagggctcagggtctgggcgacataatcgacacgagtatgggctccctcacttcctcaccctcatcctgtagcctgagtagccaggtgggtctgacctccgttacatcaattcaggagaggattatgtcaacccccgggggtgaggaagccatcgagagactcaaggaaagcgagaaaatcattgccgaactgaacgaaacatgggaggaaaaactccgcaagactgaggccattcggatggaacgagaggcactcctggcggaaatgggggtggccataagggaggacggaggcaccctcggggtcttttctcccaagaaaacccctcatctggtaaatctgaacgaggacccattaatgtccgagtgtctgctgtactatataaaagacgggatcacacgggtgggccaggctgacgccgaaaggagacaggacattgtgcttagtggggcccatattaaggaagaacactgtattttcagatctgaacggtcaaacagcggggaagtgattgtgaccctagaaccttgcgagaggtctgaaacgtatgtgaacggaaagcgggtgtcccagccggtccagctacggtccggaaaccgcatcatcatgggaaagaaccacgtgttcaggttcaaccaccctgagcaggcaagagcagagagagagaagacgccgtcagctgagaccccatcagaacctgttgactggacgttcgcccagagggagctccttgaaaaacaagggattgacatgaaacaggaaatggaaaaacggctgcaggagatggaaatcttatacaagaaagagaaagaggaagctgacctcctcttggagcagcagcggttagattacgagtccaagctgcaggccctccaaaaacaggtggagacacgcagcctcgctgcagaaacgaccgaggaggaggaggaagaggaggaggtcccctggacccagcacgaatttgaattagcccagtgggcattcagaaaatggaaaagccaccagttcacctcactgcgggacctgctgtgggggaatgctgtgtatctcaaagaagctaacgctattagcgtagaactgaaaaagaaagttcaatttcagttcgttctgctaaccgataccctgtattccccactgcctccggagctgctcccaaccgagatggaaaaaacccacgaggatcgccctttcccaagaaccgtcgtggctgtagaggttcaggaccttaaaaacggagccacccactactggtccctggaaaagctcaagcaacgactcgacctgatgcgggaaatgtacgaccgtgccggtgagatggcatccagtgcacaagacgagtccgaaacaactgtgacagggtctgacccattctatgatcgctttcattggttcaagttggtcggcagcagcccaatctttcatggatgtgtgaatgagcgcctggccgatcggacgccctcacccaccttctctactgcagacagcgatatcacagaactggccgatgagcaacaagacgaaatggaagactttgacgacgaggcatttgtcgacgatgccgggagtgatgctggaaccgaggaggggagcgatctcttctccgacggccatgacccgttttatgataggtccccctggttcattcttgtcggcagggcattcgtgtacctgtccaacttgctgtaccccgtaccgctcattcatagagtcgccattgtcagtgagaagggagaagtgagggggtttctccgcgtggcggtccaagctattgctgcagacgaggaggctcccgattatggaagcggaatcagacagtctggaacggccaagatcagtttcgacaatgagtatttcaaccagagtgatttcagttctgtggcgatgacaaggagcggcttatctttagaggagcttcggattgtggagggccagggacagtcatcagaagtgatcaccccccccgaggagatcagccggatcaacgacctcgatctgaagtcatctacactgctcgatgggaaaatggttatggaggggttctcagaggaaataggaaaccacttgaagcttgggagcgcttttacatttagggtgactgtcttacaggcttcgggtattcttccggagtacgcagacattttttgtcagttcaattttctacatagacacgacgaggcattttcaacagaaccccttaaaaacaatgggagaggctcacctctcgccttctatcatgtgcagaacatcgcagtggagatcaccgagagctttgtggactatataaagaccaaaccaatcgtgttcgaggtgtttggacattatcagcaacacccactgcatcttcagggtcaggagctgaatagtcccccccagccctgtcggcggttcttccctccccccatgccgctgtctaagccggtgccagccacaaagttgaatacgatgagcaaaactagcctcggccagtccatgtccaaatatgatctgctggtgtggttcgagatttctgaactggaaccaaccggcgagtacattccagccgttgtagaccacaccgcgggcctgccatgtcagggcactttccttctgcaccagggaatccaacgaagaataacagtaacaataattcacgagaagggttccgagttgcattggaaagacgtgagagagctcgtggtcggcaggatccgaaataaacccgaggtggacgaagccgccgtggatgcaattctctcactgaacataatttctgccaaatatttaaaatcctctcataattctagtagaactttctatcgcttcgaggccgtgtgggactcatctctgcataacagcttgctcctcaacagggtcaccccatatggcgagaaaatctatatgaccctctccgcttacctggaattggaccactgtattcagcctgctgtaattaccaaggacgtgtgcatggtcttctactccagagacgcaaagatatcgccccctagatcccttcggagcctctttggatctggttacagcaagtcccctgactccaatagggtcaccggaatttacgagttgtcactatgtaagatgtccgatactgggagccctggaatgcagcgcaggagacgcaaaatcctcgacacatctgtggcctatgttagaggagaggaaaatctggcaggctggagacctaggggagattccttaattcttgagcaccagtgggaactagaaaagttggagctactccatgaggtggaaaaaacgcgtcacttcctcctgctgcgcgagagattgggggattcaattcctaagagcctgagcgatagcctgagcccgtcactgagttccggtaccctcagcacatcaaccagtatatctagtcaaatctccaccaccaccttcgaaagcgctatcaccccatccgaatccagcggctacgattctggtgacattgagagtctggtcgatagagagaaggaattggcaaccaagtgtctgcagttactcacccacacctttaaccgggaattttctcaagttcacggctctgtgagtgattgcaaactctcggatatctctccaatcgggagagatccctccgagagctcatttagctctgctacattaaccccctcttcaacttgtccctctctcgtggactctaggagtaactctctcgaccagaaaaccccagaggctaatagccgcgctagcagcccctgccccgaattcgagcagttccagatagtaccagcagttgagacaccgtatctcgcccgggcaggaaagaacgaatttttgaatctcgttcctgacattgaggaaatccggccatcttcagtggtgtccaaaaagggatacctccatttcaaagaaccactgtactccaattgggcaaagcattttgttgtggtgcggcgtccttacgtgttcatatacaactcagacaaagatcctgttgaaaggggtataatcaacctgtccactgcccaagtggagtatagcgaggatcagcaagctatggttaagaccccgaacacttttgccgtctgcacgaaacacagaggagtgctgctccaggctctcaatgataaggatatgaacgattggttgtacgctttcaatccattgctggctgggacaattcgctccaagcttagtcgtagatgccctagtcaatctaaatattag

SEQ ID NO: 121626 - DNA, 5472 bp, synthetic construct
  misc_feature 1..5472: note = Description of Artificial Sequence: Synthetic coding sequence
  source 1..5472: mol_type = other DNA
atgagtggtgcctctgtaaaagtcgccgtcagagtcagaccctttaactctcgagagacatccaaggaatccaaatgcatcatccaaatgcaagggaactccacatccatcattaacccgaagaacccaaaagaggcccctaagagtttctcctttgactacagctactggtcacatacaagccccgaggacccatgttttgcatctcagaaccgagtttataatgacattgggaaggagatgttactgcatgcttttgagggctataacgtctgcattttcgcctatggtcaaacgggagctggtaaatcttataccatgatggggaagcaagaggagtcccaggcgggtattataccccagctgtgtgaagagctgtttgaaaaaattaacgataactgcaatgaggagatgagctacagcgtagaggtgtcctacatggaaatctactgcgagagggtgagggatttattgaacccaaagaataaaggcaacttgagagtgcgggagcaccctctgctcgggccatatgtcgaagatttgagcaaactggccgtgacctcttacaccgacatcgccgatttgatggacgccggaaacaaagcgaggacggtggctgccaccaatatgaacgaaaccagctctcgcagccacgcagtgtttaccattgtgtttacccagaagaaacacgacaacgagactaacttgtccactgaaaaagtctccaaaatcagtcttgtggatctcgccgggagtgaacgcgcggactccacaggggcaaaaggcacccgacttaaggagggagccaatattaacaagtccttaactacactagggaaagtgatctcagccctcgccgaggttgacacttctaaaaagaagtccaaaaagaagaagaaaaccgatttcatcccataccgtgattccgtgcttacgtggctgcttcgggagaatcttggtggcaattcgcgtacggcgatggtagctgcgttgagccccgccgatattaattacgatgagactttaagcactttgcgttacgccgatcgcgctaagcagattaaatgtaatgcagtcattaatgaggaccccaacgctaaactcgtgcgagaattaaaggaagaggtcacccggctgaaggacctgctgcgcgcacagggcctgggggatattatagatatagatcctttgatcgatgactacagtggcagcgggtccaagtatctgaaggacttccagaacaacaagcatcgatatctgctcgcctcggagaatcagcggcccgggcacttttccactgcttccatgggatcactgacctcgtccccttcctcctgctcattgagcagtcaagtcgggctgacctccgttacctcaatccaggagcggataatgtccaccccaggcggtgaagaagctatagagaggctgaaggagtccgagaaaataatcgccgaattgaacgagacctgggaagagaaactcagaaagaccgaggccattaggatggagagggaggcgcttcttgccgagatgggagtagcgatccgggaagatgggggcaccctaggcgtattttctcctaaaaagacgccacatctcgtcaatttgaatgaggacccactgatgtccgaatgtcttctctactacatcaaggacggaattacaagagtaggccaggccgatgccgagcgccggcaagatatcgtgcttagtggcgcgcacatcaaggaagaacattgcatcttcaggagtgaaaggtcaaactctggcgaagtgattgtcactctggagccgtgcgaaagaagcgaaacatatgtcaacggtaaaagggtgtcccaacccgtccagcttagaagtgggaacagaatcatcatgggcaaaaaccatgttttcaggttcaaccaccctgagcaagccagagctgagagggaaaagacaccttcagccgagacacctagtgagccagtcgattggacctttgcgcagcgagagctgctcgagaagcaaggtatagacatgaagcaggaaatggagaagaggctgcaggaaatggaaatactctataagaaggaaaaagaggaggcagacctgctgctcgagcaacagcgcctcgattacgagtcaaagctgcaagcactacagaagcaggtggaaacccgtagcctcgccgctgagaccacagaggaagaggaggaagaagaggaggttccatggactcagcatgaatttgagctcgctcagtgggcgttcagaaagtggaaatctcaccagtttacatccttgcgcgatttgctctggggaaacgccgtttacttaaaggaggcgaatgcgatttcggtggaacttaagaagaaagtacagttccaattcgttcttttgacggacacattatactcacccttgcctccagagctgctgccaactgaaatggagaaaacccatgaggacaggccttttcctaggactgtggtggcagttgaggtgcaagacctgaagaatggagccacgcactattggagtctggaaaaactgaaacagcgcctggacctcatgagagagatgtacgaccgcgccggagaaatggcaagcagcgcccaagatgaatctgaaacgaccgtaaccggcagcgatcccttctatgaccggttccactggttcaagctggttggatcaagccctatctttcacggatgcgtcaacgagcgacttgccgacaggacacccagccccactttcagcacggccgacagcgatatcaccgaactggccgatgagcaacaggatgaaatggaggacttcgatgatgaagcctttgtggacgatgcaggatcagatgcaggtacagaggaggggtccgacttatttagtgacggacacgaccctttttatgaccgcagtccgtggttcatactggtagggcgcgcctttgtgtacttgtctaacttattgtaccccgtgccgctgatccatcgcgtagccattgtcagcgagaaaggtgaagtgcgcgggtttctgcgcgtggccgtgcaggctatcgcagccgacgaggaagctccggattatggaagcgggattcggcaatccggtacggccaaaatctcattcgacaacgagtactttaaccagtccgatttttcaagcgtcgccatgactaggtccgggttgtcactcgaggagctgaggattgtggaaggccaggggcaatcaagcgaggtgattactcctccagaggaaataagccggattaacgacttagatctaaaaagttccactctactggacggtaaaatggtaatggaaggcttctctgaagaaataggtaaccatctcaagttaggctccgccttcaccttcagggtgaccgtgctgcaggcatctggcatcctgcccgaatatgcagacattttctgccagttcaattttcttcacaggcacgacgaagcgttctcgacagaacccttaaaaaacaatgggaggggcagccctctggccttctaccatgtgcagaacatcgctgtggaaatcaccgagagttttgtggactacatcaaaactaagccaatcgtcttcgaagtgttcggacattatcaacagcaccccctacacctccagggccaggagctaaactcacccccccagccatgtcgcaggtttttccctcctcccatgcctctgagcaaacctgtccccgccaccaaactgaacacaatgagcaaaactagccttggacagtcaatgagcaagtacgaccttctcgtgtggttcgaaatcagtgagctggagccgacaggggaatacatccccgctgtggtggatcatactgctggattaccttgccaggggacattcctgctccatcaaggtattcaaagacgcatcacagtgaccataatccacgagaaggggtcagaattacattggaaagacgtacgtgagctcgtggtgggccggatccgcaataagccggaagtggatgaagccgcagtggacgctatactcagcctaaatataatcagcgcgaagtatctgaaatcatcccataactccagcagaaccttttaccgcttcgaagccgtgtgggattcgtctctgcacaactccctgctcttaaaccgtgtcactccttacggagagaagatttatatgacgctgagcgcatacctcgagttggaccactgcattcagcccgccgtgatcaccaaggatgtgtgcatggtcttttatagcagggatgcaaagattagcccaccgagatctctgagatccctcttcggttcaggctattccaagagcccagactctaaccgggtaactggcatctatgagctgagtctctgcaagatgtcagatactggctcccccggcatgcagcgacggagacgaaagatcctcgatacttctgttgcgtacgtcaggggtgaagaaaacttggctggctggcggcccaggggcgacagtttgatattggagcaccaatgggagctcgaaaagctggagctccttcatgaggtagagaagacccggcactttctcctcctgcgcgagcgcctgggtgatagtattcccaagagtctttccgactccctgagtccaagcctgagcagcggcactctctcaacgagtacatcaatttcatcacagatatcaacaaccacatttgagagtgcaattacgccctctgaatcctccggttatgactccggtgacattgagtctttggtggaccgggaaaaagaattagccaccaagtgtctgcaattactcactcatacttttaacagggaattcagccaggtgcacggttctgtcagtgactgtaagctcagcgacatctctcccattggcagggatccctcagaatctagcttttcgtccgctactcttactccttcttccacatgcccgagtctagtcgactcacggagtaattccctggaccagaagactcctgaggctaacagtcgagctagttccccctgtcctgagtttgagcagtttcagatcgtccctgccgtggagaccccttacctggcccgggctggcaaaaatgagttcctcaacctggtccctgatattgaagagatccgacctagttctgtggtcagcaagaagggatatttgcattttaaggagcccctgtacagcaactgggcaaagcacttcgtggtggtgagacgcccctatgtgttcatatataattctgacaaagaccccgttgaaagagggataataaatctctccaccgcccaggtcgagtactctgaggatcagcaggcaatggtgaagaccccaaatacattcgcagtttgtaccaaacatagaggcgttcttttgcaggctctcaatgacaaagacatgaacgattggctgtacgcgttcaaccctttattggcgggaaccattagacctggtcatcttgcgtcggagataatccgggaagataagtcagtctcattctcgtgccagtag

SEQ ID NO: 121627 - DNA, 5472 bp, synthetic construct
  misc_feature 1..5472: note = Description of Artificial Sequence: Synthetic coding sequence
  source 1..5472: mol_type = other DNA
atgagcggcgcctccgtgaaagtggctgtgagggtcaggccatttaacagtcgcgagaccagcaaagaatctaagtgcattattcagatgcagggaaactccactagcatcatcaaccccaagaatccaaaggaggccccaaagtctttcagcttcgactatagctactggagtcacacctcccccgaggacccttgtttcgcttcccaaaaccgggtgtataatgatatcggaaaagagatgttactccatgccttcgaaggatacaacgtttgtattttcgcttacggacaaacaggcgctgggaagagctacacaatgatgggaaagcaggaggaatctcaggccgggataatccctcagctctgcgaggaactgttcgagaaaatcaatgataattgcaacgaagagatgagctactcagttgaggtgagttatatggaaatttactgcgagagagtcagagacctgctaaatccaaaaaataagggaaaccttcgagtacgtgagcatccactcttgggcccctatgtggaagacctgagtaagctcgcagtaacctcatacacagatatcgccgacctcatggacgccggaaataaggcccgaaccgtcgccgctactaatatgaacgagacatcctcgagatctcatgctgtgttcacaattgtgtttacacagaagaagcacgataatgagaccaatctttctactgagaaagtgtcaaagatctccctcgtggatctggctggtagcgaaagggcagattccacaggcgcgaaagggacaaggctcaaagaaggcgccaatattaataaatctctgactactctggggaaagtaattagtgcgctcgctgaagtcgataattgcacaagcaagtccaaaaagaaaaaaaagaccgattttattccctacagggactccgtccttacgtggctgctgcgggagaatttgggtggtaattctcgtactgccatggtcgccgcactgagccctgctgatatcaactatgacgagacgcttagtacactacggtacgcggatagagctaagcagatcaaatgtaacgctgttataaacgaggatcccaacgcaaagctggtgcgagagctgaaggaggaggttactcggctcaaggatctgctccgggcgcagggactcggggatataatagacattgaccctctcatcgacgattattcgggttctgggagtaaatacctgaaggatttccaaaataataagcatagatacctgctggcctctgaaaaccagagacccggtcacttttccaccgcttccatgggcagccttacctcttctcctagctcatgttccctgtcgtcccaggtggggttaacgtcagtgacctctatccaggagaggattatgagtactcccgggggagaggaagctatcgaaagactgaaggagagcgagaagatcatagcagagcttaacgagacatgggaggaaaaacttcgtaagactgaggccattcgaatggagcgggaggcactgttggctgaaatgggggtcgccatacgggaggacggcggtactctcggggttttttctcctaagaagacaccacatttggtaaacctcaatgaggaccctttaatgtccgaatgtctgctgtattacattaaagacggcattacaagggtgggccaggcagatgccgagcgccgccaggacattgttcttagcggtgcgcacattaaggaagagcactgtatttttaggtcagaaagaagcaactccggggaagtaatcgttactctggaaccctgcgaaagaagcgagacctatgttaatggaaagagggtctcccagcccgtccagctccgctccggcaaccgcattatcatgggaaagaaccacgtatttcgctttaatcacccagaacaggcccgagccgaacgagagaaaaccccatcagctgaaaccccatccgagcctgtggactggacattcgcccaaagggagctactggagaaacagggtattgatatgaaacaagagatggagaaaaggctgcaggagatggagatcctctacaagaaagagaaggaggaggctgaccttctgctggaacagcagcgactagattacgaaagcaagcttcaagctctgcaaaaacaggtcgagacccggagcctggcggctgagacaaccgaggaggaagaagaggaggaggaagtaccatggacccagcacgagtttgagctggcgcagtgggccttcaggaagtggaaatcccaccaattcacttctcttcgcgacctgctatgggggaacgctgtgtacctgaaagaggcaaatgcaattagtgtcgagctcaagaagaaagtgcagtttcagtttgtgctgctcactgatacgctttactcgccattacccccagaactcctgccgacggagatggagaaaacgcacgaggaccggccatttccgcgtaccgtggtcgctgtagaagtgcaagacctcaagaacggggccacccattactggagcctagaaaagttaaaacagcgcctggatctgatgagggagatgtatgatagagcaggggaaatggcctcttctgcccaagatgagtccgagacaactgtcacaggcagcgaccctttttacgatcgattccattggttcaaactggtgggatcgtcgcctatcttccatggttgtgttaacgaacgactcgccgataggacgccctcccctacgttcagcaccgccgattccgacatcacagagctcgccgacgagcaacaggacgaaatggaggatttcgacgacgaggccttcgtagacgatgctgggagcgacgccggtacagaagaggggagcgatttgttcagcgacggtcatgatccattctatgacagatctccctggtttattcttgtcggtcgcgcctttgtctatctgagcaacctgctgtaccctgtgcccctgatccaccgggttgccatcgtgagcgagaaaggagaagtaaggggcttcttaagggtggccgttcaagccatcgccgcagatgaggaggcccccgactacggtagcggcatacgccaatcaggcactgccaagatctcctttgataatgagtactttaatcagtctgattttagcagcgtggctatgacgaggagcggcctgagtcttgaggaactgcgcattgtagaaggccagggccaatcatctgaggtaattaccccacccgaagagatttcccgtatcaacgatctggatctgaaatcttccactctactggatggcaaaatggtgatggagggattcagcgaggagatcggtaatcacctgaagctggggtccgcgtttactttcagagtgacagtcctccaagcctctggcattctcccggagtacgccgacattttctgccaattcaacttccttcacaggcacgatgaagccttctccacggaaccactcaaaaacaacggcagaggatctccacttgcattctaccacgttcagaatattgctgtggagattacagagagttttgtggactatatcaaaacaaagccaattgtgtttgaagtcttcggccactaccagcagcacccattacacctgcagggccaagaattgaacagtcccccccagccctgtaggaggtttttcccgccacccatgcccctctccaagcctgttccggctacaaaattgaatactatgagcaagacctctctgggacagtctatgtctaaatacgacctcttggtttggttcgaaatctccgagctggagccaacgggcgagtacatccctgccgtggtggatcatacagccggactgccttgccagggaacttttctgctccaccaggggatccagagacgaattactgttactatcattcacgagaagggctccgaacttcactggaaagacgtgagggagcttgtcgtgggccgtattaggaacaagccagaagtagatgaggctgcggtggacgctattttgagcctgaacattatctcagcaaagtacctgaaatccagccacaatagctctaggaccttctaccggttcgaggccgtctgggactcgtcgttacataacagtctgctgctaaatcgggttaccccatatggcgagaagatttatatgacactctctgcctatcttgaactcgaccactgcatacagcctgcggtgatcacgaaagatgtgtgtatggtgttctacagccgggacgcaaagatctcccctcccaggagcctgagatccctgtttgggtctggatactccaagagcccagacagtaatcgcgtaaccggaatctatgagttatctttatgcaaaatgtccgatacaggcagtcctggcatgcagcgacggcgccgcaagattctggacacatcagtagcttatgtgaggggggaggagaacctggccggctggcgtccgcgcggagattccctgatattggagcatcagtgggaattagagaagttagagcttctacacgaagtggagaagacaagacattttctgcttttgcgcgaacgactgggcgattcaatcccaaaatctctgtctgattctctgagtccatctctgagtagtggcacgctgtcgacaagcacttcaattagttcacagatatccaccacaaccttcgagtctgctataactccgtcggaatcttccggctacgattcgggagacattgagtccctggtagaccgggaaaaggagctagcaacaaaatgcctacagctgttgacacacaccttcaacagggagttctctcaggtccacggatcagtaagtgactgtaaactgtccgacatttcgcccattggtagagacccctccgaatcatcattctcttccgcaaccctgactccgagtagcacttgcccttctctggtggattcacgctctaattctcttgatcagaaaaccccggaagccaattcccgggcatcaagtccttgccccgaatttgaacaattccaaatcgtaccagcagtcgagacgccgtatctggccagagccggaaagaacgaattcctgaacctcgtgccagacatcgaggagattagacccagtagcgtggtgagtaaaaaaggctacttgcacttcaaggagcccctctacagcaattgggcaaagcatttcgtcgtcgtgcgccgcccctatgtgtttatatacaactcagataaggatccggtcgagaggggcataattaacttgagtacagcacaggtggagtacagcgaagatcagcaggcaatggtgaaaaccccgaatacctttgccgtgtgtaccaagcaccgcggagtgctgttgcaggctctgaacgacaaagatatgaacgactggctgtacgcttttaacccgcttttggctgggactatcagaccgggacatctggcctcagagatcatacgcgaagataaatccgtgtcctttagctgccagtag

SEQ ID NO: 121628 - DNA, 3462 bp, synthetic construct
  misc_feature 1..3462: note = Description of Artificial Sequence: Synthetic coding sequence
  source 1..3462: mol_type = other DNA
atgagtggcgctagcgtgaaggttgctgtccgtgttagaccttttaattccagagagacgagtaaagaatccaagtgtattatccagatgcaaggcaattctacctctatcataaacccaaagaaccccaaagaagccccaaagtccttctctttcgactattcctattggagtcacacttccccagaggatccctgctttgctagtcagaacagggtgtacaacgacatcggaaaagagatgctcctgcacgccttcgaggggtacaatgtttgcattttcgcctatggccagacaggggctggcaagagctacaccatgatgggaaagcaggaggaatctcaagctggaatcatccctcaactgtgcgaggagcttttcgagaagatcaacgataactgcaacgaagagatgtcttattctgtcgaggtttcgtacatggagatctattgtgagcgggttagagatttgctgaacccgaagaacaaaggcaatctgagagtgcgcgagcaccccctgctcggtccctatgtggaggacctcagcaaactggccgtgacctcctatacagacattgccgaccttatggacgcgggaaacaaggcgcggactgtcgctgccactaacatgaatgagacgtcttctcgcagccacgccgtgttcacaatcgtgttcacacaaaagaagcatgacaacgagactaacctgtccaccgagaaagtgtccaagataagcctagtcgatcttgccggctctgagcgggctgattcaaccggggctaaaggcacccggctgaaggagggcgcaaatatcaataagagcttaaccacactagggaaggttatctcagcccttgcagaggtgtccaaaaaaaagaaaaagactgatttcatcccctatcgagatagcgttttgacttggcttcttagagagaatcttggaggtaacagccgcaccgctatggtcgcagcgttatcgcctgcagacattaattacgatgagactctgtcaactttgcggtacgccgatcgagccaagcagattaaatgcaatgctgtgataaacgaagacccgaatgccaagcttgttagggaactcaaggaggaagtgacccggctgaaagacctgctacgcgcccagggccttggtgacatcatcgatacctccatgggatcgttgaccagtagtcccagctcttgttctttaagcagtcaggtcgggctgacatccgtgacttctatacaggagcggattatgagtactcctggaggcgaagaggccattgaaaggctgaaggagtcagaaaagataatagcggagctgaatgaaacatgggaagagaaattgcggaaaaccgaggcaatacgcatggagcgtgaagccctgctggccgagatgggagtcgcaatcagggaagacggtggaacactcggggtgtttagcccaaagaaaactcctcacttggtgaacctcaatgaggaccctctcatgtccgagtgtttactgtattatatcaaggatggcatcactagagtcggtcaggctgacgcagagcgcagacaggacattgttcttagcggcgcgcacatcaaggaggagcactgcatcttcagaagcgaaagatccaattccggcgaagtgattgtaactttggagccatgcgaaagatctgaaacctacgtgaatggcaagagagtctcacaacccgtgcagctgcggagcggaaaccgcattattatgggaaaaaaccatgtattcaggttcaaccatcctgagcaggcacgtgctgagagggagaaaacgcctagtgctgagaccccatccgagccggtcgactggacattcgcccagagggagctactggaaaagcagggaattgatatgaaacaagaaatggagaaacggctgcaggagatggaaatcttgtacaaaaaagagaaggaggaggcagacctgttactggaacagcagaggctcgatgccgattcagacagcggggacgactctgacaaacgaagctgtgaggagtcctggaagctgatcacctccctcagggaaaagctgccaccgagtaagcttcagactatcgtgaagaaatgtgggttaccctcttctgggaaaaagagggagccgatcaaaatgtaccagatacctcagcgtaggcggctgtcgaaggattcgaagtgggttaccatctccgatctcaaaatccaggccgtgaaggagatttgctacgaggtcgcacttaatgacttccgccattcacggcaggagatcgaagcacttgcaatcgttaagatgaaggagctgtgtgccatgtacggcaagaaagaccccaacgagcgcgatagctggcgcgccgtcgcacgcgacgtgtgggacaccgttggagtgggggatgaaaaaatcgaagatgtgatggctactggtaaagggtccacagacgtagatgaccttaaggtccacattgataagctcgaggacatcttacaggaggtgaagaagcagaacaatatgaaggacgaggagatcaaggtgcttcgtaacaaaatgctgaaaatggaaaaagtgctgccactgatcggatcccaggaacagaagtcacctgggtcccataaggccaaggaacctgtgggagccggcgtttccagtacctccgagaacaatgtgagtaagggagacaatggtgagctggcgaaggaagaacgcgtttctcagcttatgaatggcgaccccgcattccgacgtggcaggctgcggtggatgcggcaagaacaaattcgcttcaagaacttacagcaacaagagattactaaacaactgcggaggcagaacgtgccgcatcggtttatcccaccagagaatcggaagccaaggtttccattcaagagcaaccctaaacatcggaattcatggagtcccggcacacacataatcatcacagaggacgaagtgatcgagctgcgtatacctaaagacgacgaggctcggaaaggtaataaggaagagtcccaggaaaagggaggtaaaggtgctttcaaggatcctcaattcccgtgggggtcccaggggatgagaagccaggaccatatccaagtgtcaaagcaacacattaacaaccagcaacagcctccgcagttgcggtggcggtccaactctctcaacaacgggcagcccaaatcaacccggtgccaggcatctgcaagtgctgagtctctaaacagtcactcaggtcatcccacggctgatgtgcagacgttccaggctaagaggcatattcaccaacaccgccagtcttattgtaattacaacactggcggtcaattagagggtaatgccgcaacctcttaccaaaagcagaccgataagccctcacactgttctcagtttgtgacgcctccacggatgcggagacagttctccgctccgaatttgaaggccggaagagaaaccacagtctag

SEQ ID NO: 121629 - DNA, 5451 bp, synthetic construct
  misc_feature 1..5451: note = Description of Artificial Sequence: Synthetic coding sequence
  source 1..5451: mol_type = other DNA
atgagcggggccagtgtgaaggtcgccgtacgtgtccggcctttcaacagcagagaaacgagcaaagagtccaaatgtatcatacagatgcaaggcaattccactagtattattaatcccaagaatcctaaggaagcccccaagtcattcagcttcgattactcctattggagtcatacctctcctgaggacccatgcttcgctagccagaatcgagtatataatgatatcgggaaagagatgctgctgcacgcatttgagggttataatgtgtgtatcttcgcatatggacagaccggcgcaggaaaaagctacaccatgatgggtaagcaagaggaatcacaggccggcatcattccgcagctctgcgaggaactgttcgaaaagatcaacgacaactgcaacgaagaaatgtcctactctgtggaagtctcatacatggaaatttactgtgaaagggtccgcgacctgctgaaccccaaaaacaaaggcaacttgagagtgcgcgagcatccactgctcgggccgtatgtcgaggatctgtccaagctcgcagtgactagttacacggacatagccgacctcatggacgccggaaacaaagcacgtactgttgcagctactaacatgaatgaaacctcctcgagatcccatgccgttttcacgatagtattcacacagaaaaaacacgataacgaaacgaacctgagcactgaaaaagtgtcaaagatcagcctggtggatctggctggttccgaaagggccgattcaactggagctaaagggactcggcttaaggagggcgcgaacattaataagagcctgaccactcttggaaaagtgatctcagctctggccgaggttgacaattgtacctccaagtctaaaaagaaaaagaagaccgattttataccttatcgcgacagcgtgctgacatggttgctacgcgaaaacctcggtggaaactctcggactgccatggtcgcggcactctctcctgccgacattaactatgatgagactctgagcaccctgcggtatgcagaccgagctaagcagatcaagtgcaatgcagtcatcaacgaagatcccaacgcaaaattggtaagggaactcaaggaggaggtcacccggctgaaggatttgctacgggctcaaggtctgggcgatataatcgatatcgacccattgatagacgattattccggtagcggcagcaagtatttaaaagattttcaaaataacaagcatcggtacctattagcttccgaaaaccaacgtccagggcactttagtacggcctccatgggtagtcttacgagcagtcctagcagttgctccctgtcttcacaggtgggtttaacaagtgtgacttccattcaggaaaggatcatgtctacacccgggggcgaggaggcgattgagcgcctgaaggagtcggagaagatcattgccgaactgaatgaaacttgggaggaaaagttacgcaaaaccgaggccatcagaatggagagagaggctctgttggcagagatgggagtggccatccgcgaggatggcgggactttaggcgtcttcagtcccaaaaaaacgcctcacctcgtgaatttgaacgaggaccccctcatgagcgagtgcctcctgtactacatcaaagacggcatcaccagagttggacaggccgatgctgaaagacgtcaagacattgtgctttccggggctcatatcaaggaagaacactgtattttccgatccgaacgctctaactccggcgaggtcattgttacccttgaaccgtgtgagaggtcagagacttacgtaaacgggaaaagagtatcacagcccgtccagctccgcagtggaaacaggatcatcatgggaaaaaaccacgtgtttcgtttcaaccacccagagcaggctagagcagaacgggagaagacgcccagcgctgaaacaccttccgagcctgtggactggactttcgcccagagagagctgctagaaaaacaggggattgacatgaaacaggagatggagaaacgcctccaggagatggagattctgtacaagaaggaaaaagaggaagctgatcttctgctggagcaacagcgtttggattacgagtccaaacttcaagctcttcaaaaacaagtagaaacaagaagtctcgctgctgaaaccacggaggaagaggaggaggaggaagaggtcccatggacccagcacgagtttgagctagcccagtgggcttttcgaaaatggaagtcgcatcagttcacatccctcagagatttgttatggggaaacgccgtgtacctcaaggaagcaaatgccatctccgtggagttaaaaaaaaaggtgcagttccagttcgtgctccttacagatacactgtattcccctctgccccctgaactcctgcctactgagatggaaaaaacgcacgaagatcggccatttccccggaccgttgtagcagtggaagtgcaggatctgaaaaatggggccacgcactactggtcgctggagaagctaaagcagagactggacctcatgagagaaatgtacgacagggccggtgagatggcaagctcagctcaggacgaaagcgagaccacggtgactggaagtgaccctttttacgaccgcttccattggttcaagctggtcggatcatcccctatcttccacggatgtgtcaatgaacgactggcagatcgcactccttcaccaaccttcagcacagctgattctgacatcactgaactggccgacgagcagcaggacgagatggaagatttcgatgatgaggccttcgtcgatgacgcaggcagcgacgccggcaccgaggagggttctgatctcttttcggacggtcacgacccgttttatgaccgctcaccctggttcatccttgtgggcagggccttcgtctatctgtctaatcttctgtaccctgttccattgatccaccgggtggccatcgtgtccgaaaagggggaggtgcgcggatttttgcgcgtggcggttcaggctatcgccgcagacgaagaggccccagactatgggagcggcatcaggcagtccggaacagccaaaatttcctttgataacgaatattttaatcaatctgacttttccagcgtcgccatgacacggtctggcttaagcttggaggaacttcgcatagtggaggggcagggccagtctagcgaggttattacaccccctgaggagattagccgtatcaacgatttggacctgaagagctccaccctgctggatggaaagatggtgatggaaggcttttcagaggagatcggcaatcatctgaaactcggatctgcgttcacatttcgtgtaaccgtgctgcaagcctctggcattctgcccgagtacgctgacatcttttgccaatttaatttcttgcacagacatgacgaggcatttagcaccgagccgctaaagaacaacggaagaggaagtccactcgctttttaccatgttcaaaatattgctgtcgagatcacagaatcgttcgtagattacattaagaccaagcctattgtttttgaagtgttcggacactaccagcagcatcccctgcacctgcagggccaagaactgaacagtccgccgcagccctgccggagattttttcccccgccgatgcccttaagcaagccagtgcccgccaccaagctgaacaccatgtcaaagacttcccttgggcaaagtatgtccaagtatgatctcctcgtctggttcgagatctccgaattagagcccaccggggaatatatccctgccgtcgtcgatcataccgcaggcctaccatgccaagggactttcctgctgcatcagggcatacagaggcgaatcactgttactattatccatgagaaggggtccgaactgcattggaaggatgtgcgcgagttggtagttgggagaattcgcaataagcccgaggtagacgaggcggccgtggatgccattttgagcttaaacataattagtgctaaatacttaaagtcaagccacaattcctcaaggacgttctacaggttcgaagctgtgtgggatagctcgttgcataactcgctgctgctgaaccgagtcacgccatacggggaaaaaatctatatgaccctatcagcttatctggagttagaccattgtattcaaccggcagtaataaccaaagacgtctgtatggttttttattctagagatgcaaagattagtcctccgaggagcctgcgttctttgtttggaagcgggtatagtaaaagtccagactcaaatcgggtgactgggatttatgagctcagtctgtgcaaaatgtcggacaccgggtcgcctggcatgcagcggaggcgccgaaagatcctcgatacctccgttgcctacgttcggggggaagagaacttagctggatggcgtccgcggggggattcactaattctggagcaccagtgggaattggagaaactggagctgctgcacgaagtggaaaaaaccagacacttcctgcttctcagggagcggttaggtgacagcatccccaagtccctaagtgattcactctccccttcactctcaagcgggaccctgagcacttcaacttcaatcagtagccagatcagcaccacaaccttcgaaagtgccattacacccagcgagagctccggatacgattctggcgatatcgagtcgttagttgatagagaaaaggaactggccactaagtgccttcaactactgacccatacattcaaccgtgagttcagccaggtacacggctcagtctcagattgcaagctgagcgacatcagcccaatcggccgtgatccctctgaatcttctttttccagcgctaccctcactccgagcagcacttgtccgtcgttagtggattcacggtccaacagccttgatcagaaaactccagaagccaatagccgggcaagctcaccgtgtccagagttcgaacagtttcaaattgtccctgccgtagagaccccttacctggcccgggctgggaaaaatgagttcctgaacttggtacctgacatagaggagattcggccctcctcagtcgtttcaaagaagggctacttacatttcaaggaaccgctttactctaactgggccaaacatttcgtagtagttaggcgtccctacgtgtttatatataattctgacaaggacccggtcgaaagaggtatcatcaacctgagcaccgctcaggttgaatattctgaggatcagcaggccatggtgaaaacccctaatacctttgccgtttgtacaaagcaccgcggcgttctgctgcaggcccttaacgacaaggacatgaacgactggctctatgcatttaaccctcttctcgcaggcaccattcggtcaaagctgtccagacgttgcccatcccaatcaaaatactag

SEQ ID NO: 121630 - DNA, 3462 bp, synthetic construct
  misc_feature 1..3462: note = Description of Artificial Sequence: Synthetic coding sequence
  source 1..3462: mol_type = other DNA
atgagcggtgctagtgtgaaagtggctgtgagggttcgccctttcaacagccgagaaactagcaaagagtctaaatgtatcatccaaatgcagggaaactcaacctctattattaatcctaagaaccctaaagaagcgcccaaatcctttagtttcgattattcatactggagccatacctccccagaagacccatgcttcgctagccagaaccgcgtttacaacgacattggcaaggaaatgctgctccatgctttcgagggctataacgtgtgcattttcgcctacgggcaaacaggcgctggcaagtcatataccatgatgggaaaacaagaagagagccaggctggtatcatccctcagctgtgtgaggagcttttcgagaaaattaatgataactgcaatgaagaaatgtcttactctgtcgaggtctcttacatggagatttactgtgaacgcgtcagagacttattaaaccccaagaataaagggaatctgagagtgcgcgagcatccgttgctagggccctacgtggaggacctgagtaaactggccgtgacatcctacaccgacatagcggacctcatggacgccggaaataaggcgcgaaccgtggctgccacaaacatgaatgagacatcaagtaggagccacgccgtcttcacaatagtgtttacccagaagaaacatgataacgagacaaacctgtccaccgagaaggtgagcaagattagcctcgtggacttggcagggagtgaacgcgcagactctactggcgcaaagggcactcgcttgaaagagggcgctaatatcaacaaaagccttaccaccctgggcaaggttatctccgcacttgccgaggtgagcaaaaagaaaaagaagacagattttataccttaccgcgattcagtgctgacatggctcttgcgggaaaacttaggagggaactctcgcaccgctatggttgcagctttaagtcctgccgacatcaactacgacgagaccctgtctaccctccgctacgccgatcgcgccaaacaaattaagtgcaacgccgttattaacgaagaccccaacgccaaacttgtcagagagttgaaagaagaggtgacacgcttaaaggacttactccgggcgcagggactgggggatatcatcgacacgtccatgggctcattgactagcagtccaagttcttgctcactgtcttcacaggtaggtctgacctcggtgacaagcatccaagaacggatcatgagcacaccgggaggagaagaggctattgagcggttgaaggagtctgagaaaatcatcgcagagctgaacgagacttgggaagagaaactcaggaaaaccgaggccattcgtatggagcgtgaagctctgttggcagagatgggcgtggcgattcgagaagatggcggaactctaggcgtttttagtccgaaaaaaacaccccatctggtgaatctgaatgaggaccccctcatgtccgaatgcctgctttattatatcaaggatggaattacacgggtgggccaagcagatgccgaacgacgccaggacattgtgctgtccggagctcatatcaaggaagagcactgcatcttcaggagcgaacgaagcaactccggggaagtcatagtcacactcgagccttgtgagcgtagtgagacctatgtaaatggtaaaagagtctcccaaccagttcaacttaggtctggaaaccggatcattatgggcaaaaaccacgttttccgattcaatcatcccgaacaagcgagggcggaacgggagaagaccccttctgctgaaaccccctcggagcccgtggactggactttcgcccagcgggagctgctcgaaaagcagggaatcgacatgaagcaggaaatggagaagcggctccaggagatggagattctgtacaagaaggaaaaagaagaggccgatctgctccttgagcagcagaggctggacgctgacagcgacagcggggatgactctgacaaacgatcatgcgaggagagctggaagcttatcacctcccttcgcgagaagctccccccttcaaaactccaaaccatcgtaaagaagtgcggcttaccaagctccggaaaaaagcgagagcctattaaaatgtatcaaattccacagagaagacggcttagcaaggattccaagtgggttaccataagcgatctgaagatccaggcggtcaaagaaatctgttatgaggtggccttgaatgactttaggcatagccgtcaggagatcgaagctttagcaatagttaagatgaaggaattgtgcgccatgtacggcaaaaaggacccaaacgagcgagatagctggcgggctgtagcccgtgacgtttgggatacagttggagtcggcgatgagaagatcgaagatgtcatggctacaggtaaaggtagtactgacgtggatgacctaaaagtccacatcgacaagctggaggatatccttcaagaggtgaagaagcagaataacatgaaagacgaggagattaaggtgttacgcaataaaatgttgaagatggagaaagtcttacccttaatcggctcccaggagcagaagagccctggcagccataaggcaaaagagcctgtaggtgcaggcgtttcttctactagtgaaaacaacgtgtctaagggagataacggcgaactcgcaaaagaggaaagagtgtctcagttgatgaatggtgatcctgctttccggagaggacgactccggtggatgcgacaagagcagatacggttcaagaatctgcaacagcaagagattaccaagcagctgcgacggcagaacgtgccacaccggttcatccctcctgagaatcggaagccccggtttccgttcaagtccaatccaaaacatcgaaacagctggagtcccggtacccatataatcataaccgaggacgaagtaattgagctcaggatccccaaggacgatgaggcccgtaaaggtaataaggaagagagccaggagaaaggaggaaagggagcctttaaagatccacagtttccgtgggggtcacagggcatgcgcagtcaggatcacattcaggtgtctaaacagcacatcaataatcagcagcaacccccacagttgcgctggcgctctaactcactgaataatggccagccaaagtctacaagatgccaggcatcggcctccgctgaatcactgaactctcactcaggacacccgacggcggacgtgcagactttccaagctaaaaggcacatccaccaacataggcagagttactgtaactataatacaggtgggcagcttgagggcaacgcggccacctcatatcagaagcagacagacaaaccctctcactgctcacagtttgtgacgccgccccggatgcgacggcagttttctgcccccaatttaaaagctgggagggaaacaaccgtgtag

SEQ ID NO: 121631 - DNA, 2673 bp, synthetic construct
  misc_feature 1..2673: note = Description of Artificial Sequence: Synthetic coding sequence
  source 1..2673: mol_type = other DNA
atgtcacagggtatcctgtcaccccctgccggccttctgtctgatgatgatgtcgtagtgtcccctatgtttgagagcactgccgcagacctgggcagcgttgttcgaaaaaacctgctgtccgattgctctgtggtatcaacctccctggaggataaacagcaggtgccaagcgaggacagtatggaaaaggtgaaggtgtatctccgggtgaggcccctactcccatcagagctcgaacgccaagaggaccagggatgtgtgaggatcgagaacgtagagacgctggttctgcaggcgccaaaggatagtttcgcactgaagtctaacgagaggggaatcgggcaggcaacgcaccgattcacttttagtcagatatttggacccgaagttggacaagcttcatttttcaacctgaccgtgaaagaaatggtgaaagatgtccttaaaggtcagaactggcttatttatacttatggtgtgactaactccgggaaaacccatacgattcaaggcacgatcaaagatggaggaatcctgccccgctcactggccctcatattcaatagtctacaaggccagctgcatccgacacccgatctgaagccgctgttatccaatgaagtgatctggctggattcaaaacaaatccgccaagaggagatgaaaaagctgagcctcctgaacggtggacttcaggaagaggagctttctacaagccttaagagatccgtgtatattgagagtcgcatcggcacatccacatcctttgacagtggtatcgcaggtctgagcagtatatcacagtgcacctcttcatcacagctcgacgaaacttcccataggtgggcccagccagacaccgctcccttacccgttcccgctaacattaggttttcaatatggatctcatttttcgagatctacaacgagcttctttacgatctgctggaaccaccttcgcaacagcgaaagcggcagactctcagattatgtgaagaccaaaatggaaacccctatgttaaggatcttaattggatacacgtgcaggacgccgaggaggcatggaagctcctgaaggtgggcaggaagaatcagagtttcgccagcactcatctgaatcagaattcgtctaggagccattcaatcttcagcatccggattctgcaccttcaaggagaaggggacattgtcccgaaaatctccgaactgtccttgtgtgacctggcaggctcagagcgttgcaaggatcagaagtccggggaaaggctcaaagaagctgggaacatcaacacttctctgcatacactgggccgctgcatagctgcccttcgtcagaaccagcaaaaccgttctaaacagaatctggtgcctttccgtgacagcaaactgactcgagtttttcagggcttctttacgggtcgaggaagaagctgtatgatcgtcaatgtcaatccttgtgcctcaacatatgacgaaacgttgcacgtggccaagttttcggcaatcgcctcccagcttgtccacgcacccccgatgcagctcgggttcccatccttacacagtttcatcaaagagcacagtctgcaggtttcccccagtctggagaagggagcaaaagccgatactggactggacgacgacattgagaacgaggcagatatctctatgtatggcaaggaggagcttctccaggttgtcgaggctatgaaaacgctgctgttaaaggagcgccaggaaaaacttcagctggagatgcacctgcgggacgaaatctgcaatgagatggtcgagcagatgcagcagagagaacagtggtgctcggagcacctggatacacagaaagaactactggaagaaatgtacgaggagaagttaaacattctgaaagaatcactaacaagcttctatcaggaggagatccaggagagagacgaaaagattgaggaactggaggcgctactacaggaggctcgccagcagtcagtcgcacatcaacaatctgggagcgaactggcactgagaaggagccagcggctcgctgccagtgctagcactcagcagctgcaggaggtcaaggccaagcttcagcagtgtaaggcagaactcaatagcaccaccgaggagttgcataagtatcaaaagatgctggagccacccccatccgcaaagccttttaccattgatgtcgataagaagcttgaagaaggtcagaaaaacattagactgttacgaaccgagttacagaaactaggcgagtcactgcagagcgctgaacgggcttgctgccatagtaccggggcaggcaagctgaggcaagcccttacgacctgtgacgatatactgatcaaacaggatcaaactcttgcggagctgcagaataacatggtattggtgaaattggacctgcgaaaaaaggcagcttgtatcgccgaacagtaccacactgttttgaaactccagggccaggtttcagcgaagaaaagattaggaacgaatcaggagaaccaacagccaaaccagcaaccacctggaaaaaaaccattcctacgaaatctgttaccacgtacccctacatgtcagagctcgactgactgtagtccttacgcaaggatactgcgatcccggagaagccccctgcttaagtccggacccttcggcaaaaaatactag

SEQ ID NO: 121632 - DNA, 678 bp, synthetic construct
  misc_feature 1..678: note = Description of Artificial Sequence: Synthetic coding sequence
  source 1..678: mol_type = other DNA
atgagccagggaatcctgtccccccctgccggcctcctgagtgatgatgacgtggtggtgtccccgatgtttgagtccaccgccgccgacttggggtcagtggtgagaaaaaatctgttatccgactgcagcgttgtgtctacctctctcgaggacaaacagcaagtcccatctgaggatagcatggaaaaagtgaaagtgtacctgagggtcagaccgcttcttcccagcgaacttgagcgtcaggaggatcaagggtgcgtgcgtattgagaatgtggagactctggttctgcaggcacctaaggatagctttgcattaaagtcaaatgaaaggggtattggccaagccacgcaccgcttcaccttctcacagattttcggcccagaggtcggccaagccagctttttcaacctgaccgtgaaagaaatggtgaaggacgtccttaaggggcagaactggctgatatatacttacggcgtgaccaatagtgggaaaacacataccattcaggggacgatcaaagacggcggaatccttccacgcagcctcgccctaattttcaattccttgcagggacaactgcaccctaccccggacctgaaacccttgctatccaacgaggtaatctggctggactcaaaacagattcggcaggaagagatgaagaagctgtag

SEQ ID NO: 121633 - DNA, 2619 bp, synthetic construct
  misc_feature 1..2619: note = Description of Artificial Sequence: Synthetic coding sequence
  source 1..2619: mol_type = other DNA
atgtcacaaggaatactatccccgccagctggcctgttgagtgacgacgacgtggtggtgtctcctatgttcgagagtaccgccgctgacctggggagcgtggtcaggaagaatttgctgtcagattgctccgtggtaagcacttcattggaggacaaacaacaggtcccatccgaggacagcatggaaaaggaggatcagggttgcgtgaggattgaaaacgtcgagacccttgtgctgcaagctcccaaggacagttttgcgctgaagtctaacgaaagggggataggtcaagctacccataggtttacgttctctcagatattcggacccgaagtaggacaggcgagtttcttcaacctgacggtgaaggaaatggttaaagacgtcctcaaaggccagaactggctgatctatacgtatggggtgaccaacagcggtaaaacccacactatccagggcacaatcaaagatggcgggatcctgccaaggtccctggccctgatttttaatagcttgcaggggcagctgcatcctacccctgaccttaagcccctcctttccaacgaggtgatttggctggacagcaagcagatccggcaggaggaaatgaagaagctctctctcctgaacggggggctgcaagaggaagagctaagcacgagcctgaagcgtagcgtgtatatagagtcacgaattggcacatccacttcttttgactccggcatagcaggcttatcatcaatcagccagtgtacttcctcttcccagcttgatgagacctcccataggtgggcccagcccgatacggccccgcttccagttcctgccaacatacggttttccatctggattagcttcttcgagatttataatgagctgctgtacgacctcttggagcctccgtctcagcagcggaagcgccaaactctgaggttatgcgaagaccagaatggaaacccctatgtgaaagatctcaattggatacacgtccaggacgcagaagaggcttggaaactccttaaggtggggagaaagaaccagagtttcgcatctacacacctaaaccagaatagctctcggtcacactctatcttcagcatacgtatcctgcatctccagggggaaggcgacatcgtgccgaaaatctctgagctatcattgtgcgacctggctggcagcgaaaggtgcaaggaccagaagagtggcgagagattgaaggaagccggaaacatcaacacaagtcttcatacccttgggcgatgtatcgctgcactgaggcaaaaccagcagaaccggagcaaacagaacctagtcccgttcagggattcaaaactgaccagagtgtttcaaggtttttttaccgggcgtggccggagttgcatgattgttaacgtcaatccatgcgcttctacctacgatgagaccctgcatgtggccaaattctctgcaatcgccagccagctggtgcacgcacccccaatgcaactaggatttccttcgctccactcttttatcaaagagcattctctgcaggtcagcccatccctcgagaagggagccaaagcagacaccggattagacgatgatatcgagaacgaggctgatatctccatgtacggaaaagaggagctactgcaggtggtcgaagcaatgaagactctgcttttgaaagaaagacaggagaagctccagctcgaaatgcacctccgtgatgagatatgcaatgaaatggtcgaacagatgcagcagagagaacagtggtgcagcgagcatctggatacacagaaggaactactggaggagatgtatgaagagaagctgaacatcctcaaagaaagcttgacatccttctatcaagaagaaatacaggagagggatgaaaagattgaggaattggaagccctgctgcaggaagcgaggcaacaaagcgtggctcaccaacagagcggttctgaacttgcacttcgacggtctcagaggcttgcggcctctgctagcactcagcaactgcaggaggtgaaggctaaattacagcagtgcaaggcagagctgaattcaacaacagaggagttgcataagtaccagaagatgctcgaaccacccccatcggctaagcctttcaccatcgatgtcgataaaaagctcgaagaaggacagaagaacatcaggctgctgcgcacagaacttcaaaagctcggcgaatctcttcagagtgccgaaagagcctgttgccactctactggagctgggaagcttaggcaggccctgaccacctgcgatgatatcttaatcaagcaggaccaaaccctggctgaactgcaaaataacatggtgctcgttaagctcgatctgagaaagaaggccgcttgcatcgcggaacagtatcacactgtgctgaaacttcaaggccaggtgagcgccaaaaagcgccttgggacaaatcaggaaaaccagcagcccaaccagcagcctccagggaagaagccctttctgcgaaaccttctgccgcgcaccccaacgtgtcaaagcagtaccgattgtagcccctacgctcgtatcctccggagtagaaggtccccgcttctgaagtcgggacctttcggcaaaaaatactag

SEQ ID NO: 121634 - DNA, 480 bp, synthetic construct
  misc_feature 1..480: note = Description of Artificial Sequence: Synthetic coding sequence
  source 1..480: mol_type = other DNA
atgagccaggggattctgagtccgcccgccggcttactgagcgatgacgatgtcgttgtgtctcctatgtttgaaagcaccgcagctgatctcgggtcagtggtcaggaaaaatctgctttccgactgcagtgtagtgagcacatccctggaagataagcaacaggtgccatctgaagattctatggagaaggtcaaggtttatctgcgagtccgacctctcctgccttcggaactggagagacaggaggatcagggctgcgtcagaattgagaatgttgaaaccctggtactgcaggcacccaaggactcattcgctttaaagagcaatgaaaggggcatcgggcaagccacccacagattcacttttagtcagatcttcggccccgaggtgggccaagcatctttctttaacctgactgtgaaagaaatggtgaaggacgtcctgaagggccagaactggctcatatacacatactag

SEQ ID NO: 121635 - DNA, 4884 bp, synthetic construct
  misc_feature 1..4884: note = Description of Artificial Sequence: Synthetic coding sequence
  source 1..4884: mol_type = other DNA
atgttgggcgcgccggatgaaagttctgtgagggtcgccgtccgcatccgtccccaattggccaaggagaaaattgagggctgccacatctgcacttcagtgacccctggagaaccccaggtgttcctaggtaaggataaagcatttacgttcgactatgtcttcgacattgactctcagcaggagcagatctacattcaatgcatagaaaagctgatcgagggttgctttgaggggtacaatgccactgtttttgcttatggtcaaacaggcgctggaaagacttacacaatgggaaccgggttcgacgtgaatattgtggaagaagaactgggaatcatctcaagggcagtcaagcacttgtttaagtcaatcgaagaaaagaaacacatcgctatcaaaaacggcctgcctgctccagacttcaaggtgaacgctcagtttctggagctgtataatgaagaggtgttggatctgttcgatacaactcgcgatatagatgcaaagtctaagaagtcaaatattcgaatacatgaggactcaactggaggtatctatactgtcggagttacaaccaggacagtcaacacagagtctgagatgatgcagtgtctgaagctgggggccttgagtcgcacaaccgcctccacccaaatgaatgttcagagttcccggtcccatgccatcttcaccatccatgtgtgccaaacaagagtctgtccccagatcgatgccgacaacgctacggataacaagatcattagcgaatcagctcagatgaacgaatttgagacattgactgccaaatttcattttgtggatctcgcagggagtgaaaggctgaagcgaacaggtgccactggggaacgagctaaagaagggatcagtattaactgcggactgcttgcgctgggtaacgtgatttcagccttgggtgataagtctaaacgcgcgacccacgttccttatagggattctaaattaactaggctgcttcaggatagcctgggtggtaattcccagactatcatgatcgcctgcgtgtccccgagtgatcgtgattttatggagaccctcaataccctgaagtacgcgaaccgagccaggaacatcaaaaacaaagtgatggtcaatcaggatcgagcctcccagcaaatcaacgccctgagatctgaaattacccggctccagatggagctgatggagtataagacgggcaagagaattatcgacgaagaaggcgttgaatctattaacgacatgttccacgaaaacgctatgttgcaaactgagaataataatttgagggtccggataaaggctatgcaagaaactgttgatgctctccgcagcagaataacccagctggtgtctgatcaggctaatcacgtgctggccagagcaggcgagggcaatgaggaaatatctaacatgatacactcttacatcaaggaaatcgaggatcttcgcgccaaactgctggaatcggaggctgtgaatgagaacttgcgtaagaatctgacgagggcaacagcccgcgctccatacttcagcggcagttctacttttagccccacaatcctgtcgtcggacaaagagactatcgagatcattgacctagccaagaaggacttggaaaagctgaaacgtaaggaaaaaaggaagaagaagcgcctgcagaaactggaggaaagcaatagagaagaacgttcagtggccggcaaggaagacaatacggatacagaccaagaaaagaaggaagaaaaaggggtatccgaaagggaaaacaacgaactggaagtcgaagagtcccaggaggtatccgaccatgaagatgaagaagaagaggaggaagaagaggaggacgacatcgacggtggcgagtcctctgacgagagtgatagcgaaagcgacgagaaagccaattatcaagccgacttggcgaacattacttgcgaaattgccattaaacagaagctgatcgatgagctggaaaacagccagaagcgcctgcagaccttgaaaaagcaatatgaggagaagctgatgatgctgcagcataagatcagagacactcaactagaacgggaccaggttttacagaacctgggtagcgttgaatcatacagtgaagagaaagctaaaaaagtccgatctgaatacgagaagaaacttcaggccatgaacaaagagctccaacgattgcaggccgcgcagaaagaacatgcccggctcctgaaaaatcagtcacaatatgaaaaacagctcaagaaattgcagcaggacgttatggaaatgaaaaagaccaaggtccgtctgatgaagcagatgaaggaggagcaggaaaaggctcgtctgaccgagtcacggcggaacagggagatcgcccaattaaaaaaagatcagcggaagcgcgaccaccagttacgattactggaggcccagaaaagaaatcaggaagtcgtgctgcgtcgcaagacggaagaggtgactgcactgcggaggcaggtacgcccaatgagtgataaggtggcaggaaaagtgaccaggaagctgtcctcatccgacgcgcctgctcaagatacagggtccagtgccgctgcggttgaaaccgatgccagtcggaccggcgcccagcagaagatgcggatcccggtggctcgtgtgcaggccctgccaacacctgcgacaaacggcaatcggaagaagtaccagcgcaaagggctcaccggaagagtcttcattagtaagaccgctaggatgaaatggcagcttctcgagaggcgggtgaccgatataattatgcaaaaaatgaccatttccaacatggaagctgatatgaatcgccttttgaagcagcgggaagaactgacgaaaagaagggaaaaactaagtaagagacgcgaaaagattgtaaaggaaaacggggaaggcgacaaaaacgtggcaaacattaacgaggaaatggagtccttaaccgcgaatatcgattatatcaatgactcgattagcgactgtcaagcaaacattatgcagatggaagaggcaaaggaagaaggggaaacccttgatgttaccgcagtgatcaacgcgtgtactcttacggaggcgcggtatttactggatcatttccttagcatgggcattaacaagggactgcaggccgctcagaaggaagctcaaataaaggtgctggaaggccgcctgaagcaaaccgagatcactagtgccacacagaaccagttgctcttccacatgctgaaggaaaaagcggagctcaatcctgagcttgatgccttactcgggcacgccctccaagatttcaaacatttcttcgtggagaatgtcgaggactcaacagacgaagatgctccactcaacagtccgggctccgaagggtccaccctctcctccgacttaatgaagctctgcggcgaggtcaagccaaagaataaagcacggcggcgaacaaccacccaaatggagctgctgtacgcggacagctctgagctcgcaagtgatacctccactggtgatgcatctctgcctggacccctgacaccggtggcggaggggcaagagataggtatgaacacagagacctctggaacttccgcacgtgaaaaggaattgtctcctccccccgggctgccatccaagattgggagtattagccgtcagagctccttatcagagaagaaaataccagagccaagccccgtaaccagacgcaaagcctatgaaaaggcggagaagtccaaggccaaggaacagaaacagagcgatgagtcagacagcagtctttccgaggtgcatagaggaatcatcaacccatttcctgcttctaagggcattcgcgcattcccattacagtgcattcacattgccgaagggcacactaaggccgtgttatgcgtcgattccaccgacgatcttttgttcaccgggtccaaggatcgcacatgcaaggtgtggaatctagttacgggtcaggagattatgtccttaggggggcacccaaataacgttgtcagcgtgaaatattgcaattatacatccctcgtgttcactgtctccacgtcctacattaaagtctgggacattcgggattcagcaaagtgtatacggaccctgacttcttcaggccaggtgaccctcggcgatgcttgttctgcaagcactagccggaccgttgctattccgagcggcgaaaatcaaatcaatcaaatcgcactgaatcccacagggacctttctgtacgccgcctccgggaacgctgtgagaatgtgggatcttaagaggtttcagtctacagggaagctgacaggtcacctgggccccgtgatgtgtttgaccgttgatcagattagcagcggacaggacctcataattacggggtcaaaggatcactatattaaaatgttcgatgttactgaaggagctctgggaaccgtctcccctactcataactttgaaccaccccattatgatggcatcgaggctttgaccatccagggagataatctcttttctggtagccgcgacaacggtatcaaaaagtgggatctgactcaaaaagacctgctgcaacaggttcctaatgcccacaaggactgggtttgtgcgctcggagtagttcctgatcatcccgtccttctttccggctgccgcggcggaattttgaaggtgtggaatatggacacattcatgccagtaggtgagatgaaaggccacgattcaccaattaacgcaatctgcgtgaattctacacacatattcactgctgccgatgatcggactgtgaggatttggaaggctcgcaacctgcaggacggccaaatctcagatacgggggatctgggtgaagacattgcctctaattag

SEQ ID NO: 121636 - DNA, 5025 bp, synthetic construct
  misc_feature 1..5025: note = Description of Artificial Sequence: Synthetic coding sequence
  source 1..5025: mol_type = other DNA
atgctcggagccccagatgagtcttccgtcagggtggctgtccggatccggcctcagctggctaaagaaaaaattgaaggctgccatatatgtacatccgtgacccccggggagccccaggttttccttgggaaagataaagcctttactttcgactacgtttttgacatcgacagtcagcaggaacagatctacatccagtgcatcgaaaagctgattgaggggtgctttgaaggctacaatgcgactgtcttcgcttatggccagacgggcgccggcaaaacctacactatgggtaccgggttcgatgtgaacatagtggaagaggagcttggcatcatatcccgagcagtgaagcatctgtttaagtccatcgaagagaaaaagcatattgccattaagaatgggctgccagcacctgacttcaaggtgaatgcccagtttctggagctctacaatgaagaagtgttggatctgttcgacaccacccgagacatcgacgccaagagtaaaaaatctaatattaggatccatgaggactctactgggggtatttacacagtgggagtaacgacgcgcacagtgaacacggaatccgagatgatgcaatgcctgaagctcggtgccctcagccggacaactgcctcaacccagatgaacgtgcaatcttctcgctctcatgccatcttcacaattcacgtttgccaaacccgggtctgtccacaaatcgacgccgacaatgccaccgataataaaattatttctgaaagcgcacagatgaatgagttcgagacattgactgctaaatttcacttcgttgacctagctggctccgaaaggctcaaaaggaccggagcaactggagaacgagcaaaagaaggcattagcattaactgcggcctactggcactagggaacgttatttccgcactgggagataagtcaaaacgggcaacccacgtgccataccgtgactctaagttgactcgtctgctgcaagattccctgggtggaaattcacaaaccatcatgattgcctgtgtctctccttcagatagagactttatggagacactgaataccctgaagtatgcgaatagggccagaaacatcaaaaataaagtgatggtgaaccaagaccgcgcttctcagcaaattaacgcgctgcgaagcgaaattacacggctgcaaatggagctaatggaatataaaaccggcaaacgcattatcgacgaagagggagtggagtccatcaatgacatgtttcacgagaacgcaatgctgcagaccgagaataataacttacgagtgcgaatcaaggccatgcaggagacagttgatgccctgcggtccagaattacccagttggtaagtgaccaggcgaaccacgtgctcgctagagcgggagagggcaacgaagagatttcgaacatgattcactcctatatcaaggagatagaggatctccgtgccaagctgcttgaaagtgaagctgtcaatgaaaatctccgcaaaaacctaactcgggctacggcgcgggccccttacttctcgggcagttcgaccttctccccaactatcctctctagcgataaagagacgatcgagatcatcgatctggcaaaaaaggatcttgagaagttaaaaagaaaagagaagaggaaaaaaaagaggctacaaaaactcgaagaatcgaaccgggaagaacgatcggtcgctggaaaggaggataacactgacaccgaccaggagaaaaaggaggagaaaggggtctctgagagggagaacaatgagctggaggtggaggagtcgcaagaggtctctgaccacgaagatgaggaggaggaagaggaagaggaggaagacgatatcgatggtggcgagtcaagcgatgaatcagattccgagagtgacgaaaaggctaactatcaggccgacctagccaatatcacttgtgagattgctattaaacagaagctgatcgacgagttagaaaactctcagaaacgtctccagacccttaagaagcagtatgaagagaaactgatgatgctgcagcataagatccgcgacacccaacttgaaagagaccaggtactacagaatctgggtagtgtcgagagctattctgaggaaaaggctaagaaggtgcgctctgaatatgaaaagaagttgcaagccatgaacaaggagctccagagactacaagcagcccagaaggaacacgctaggctattgaagaaccaatcccagtacgagaaacagctcaagaaacttcagcaggacgtcatggaaatgaaaaaaaccaaggtgaggttaatgaagcaaatgaaggaggaacaggaaaaggcccggcttaccgaaagccgccgaaatcgggagattgctcagctcaagaaggaccagcgtaaaagagatcatcagctccgcttactggaagcccagaaacgcaatcaggaggttgtactgagaagaaagacagaggaagtgaccgcactgagacggcaggtacggcctatgtccgataaagtggccggaaaggttacccggaaactgtcttcctcagacgcccccgcccaagatactggatcgagtgctgccgctgtggaaaccgacgcttcgcggactggcgctcagcagaagatgaggatccccgtagccagggtgcaggctcttccgacgccagcaacgaacgggaaccggaagaagtatcaacggaaagggttaaccgggcgggttttcatctctaagacagcccgaatgaagtggcagctgctggagaggagagtaacggatattatcatgcaaaaaatgaccatctccaacatggaagctgatatgaatagacttctaaaacagagagaagagctaaccaagcgaagagagaagctttccaagcgacgcgaaaaaatcgtcaaagagaacggtgagggtgataaaaacgtggcaaacattaacgaggaaatggaatctctgacagccaatattgattacatcaacgactcaatcagtgattgccaggcaaacatcatgcagatggaagaggccaaggaggagggcgagacccttgatgtgacagccgtgataaacgcatgtaccttgaccgaagcccgatatctcctggaccatttcctgagcatgggaattaataagggcctgcaagcagctcaaaaggaagcccagataaaggttctggagggacggctgaagcaaaccgagatcactagtgccactcaaaaccaactactctttcacatgttgaaggaaaaggccgagctgaaccctgaactggacgccctgttgggacacgcgctgcaggacctggactcagtgcctcttgaaaatgtggaggattcaacagacgaggacgccccactcaactcacccggctcggagggcagtaccctgagtagcgatctgatgaagctctgcggagaggtcaaaccgaagaacaaggcaagacggaggacgacaactcaaatggaactcttgtatgccgattcctcggaactggccagcgatactagtaccggagatgcttctctcccaggtcccctcactccggttgctgaaggtcaggagatagggatgaataccgaaactagcggaacaagtgcaagagaaaaggaactgtccccccccccaggcctgcccagcaaaatcggctcgattagccgtcagagctcgctgagcgaaaagaagattcccgagccatcccccgtgaccaggagaaaggcatacgagaaagcagaaaagtcaaaagccaaagaacagaagcattccgattcagggacttctgaagcctcactgagcccgccctcctctcctccgagcaggccccgaaacgagctgaacgtgtttaatagactgaccgttagccagggcaataccagcgtgcaacaggataagtctgacgagagcgactctagtctctccgaagtccatagatcctcccgccgaggaatcattaacccattcccagccagtaaagggataagggccttcccgctccagtgcatccatatcgccgaagggcatacgaaagcagtgctttgcgtggatagtaccgatgaccttttgttcactgggtctaaggataggacctgtaaagtttggaacttggttacaggacaggagatcatgtctttgggaggtcatcctaataacgtcgtaagtgtgaagtattgcaattatacaagcctcgtcttcacagtgagtacaagctacatcaaagtgtgggatatacgtgactcagcaaaatgcattcgcactctgacgtcatcaggccaagtaactttaggagacgcctgttctgcatctactagccgcactgtggccatcccatcgggggagaatcagattaatcagatcgccctaaatccaactggaacattcttatacgccgcgagcggaaacgctgtgagaatgtgggacctcaagcggtttcaaagtacaggtaagctcaccggtcacctcgggcccgtgatgtgcctgacggtggaccagattagctcagggcaagatctgatcatcaccggttctaaggatcactatatcaagatgttcgacgtcacagagggagcattagggactgtctctcccacccataatttcgagcctccccactatgatggcattgaggccctgaccatacagggtgataacttattctcaggctcacgagacaatggaatcaaaaagtgggaccttactcagaaggaccttttgcaacaggtgccaaatgcgcacaaggattgggtttgcgctctgggagtggtccccgatcacccagtgcttctcagcgggtgcagaggtggcatcctgaaggtgtggaacatggacaccttcatgcccgtaggtgaaatgaaggggcatgattcccctattaatgcgatctgcgtgaattctactcatatttttacagccgctgacgacagaactgtgaggatctggaaagcccgtaatttacaagacggccagatcagcgatacaggggatttgggagaggatatagcaagcaactag

SEQ ID NO: 121637 - DNA, 4986 bp, synthetic construct
  misc_feature 1..4986: note = Description of Artificial Sequence: Synthetic coding sequence
  source 1..4986: mol_type = other DNA
atgctgggggcccccgacgagtcctccgtccgggtcgcagttcggatccgaccccaactggccaaggagaaaatcgaggggtgtcacatctgcacatctgtgactcccggagaaccacaggtgtttcttggcaaagataaggccttcacgtttgactacgtgttcgacatcgattcccaacaagagcagatctacatccagtgtatagagaaacttatcgaggggtgttttgaaggatacaatgccaccgtgttcgcctacggccagactggcgcagggaaaacttacactatgggtaccggtttcgatgtgaatattgtcgaggaagaactcggcatcatcagtcgcgcagtgaagcatttgtttaagagtatcgaagagaagaaacatatcgcaatcaaaaacggcttgcccgcgcctgattttaaggttaatgcccagtttttggagctgtacaacgaagaggtgctggacctcttcgacaccacaagggatatcgatgccaagtcgaagaagtccaacatacggatccacgaggacagcaccgggggaatctatactgtgggagtcactactcgcacagttaatactgagtccgaaatgatgcaatgtctaaagttgggggctctatccagaaccactgccagtactcagatgaacgtgcaaagcagtagatcccacgccatctttactatccacgtgtgtcagactcgcgtctgtcctcaaatcgacgccgacaacgcgacagataataagattatcagcgagagtgcccagatgaatgagttcgaaaccctgacagcaaagtttcacttcgtcgacctcgccggatccgaacgactcaaacgaaccggagcaactggagaacgtgctaaagagggcatctctattaattgcggtttgctggcactcggaaatgttatctccgcactgggggataaatcaaagcgcgcaacacacgtgccatatcgagacagtaagctgactagactgctgcaggatagcctgggcggcaattcacagactataatgattgcctgcgtgtctccctcggacagggactttatggagactcttaatacactgaagtacgccaatcgagcccggaatattaagaataaagtgatggtgaatcaggacagagcaagccaacagataaacgccctcagaagcgagataacacggcttcagatggaactgatggagtataagactggaaagaggatcattgatgaggagggtgtggagtccatcaacgacatgttccacgaaaatgccatgcttcagaccgagaacaataatctgagggtcagaataaaggcgatgcaagaaaccgtggatgcgctgcgctctagaatcacacagctggtgtcagatcaggccaaccacgtgttggctcgagcaggcgaggggaatgaagaaatctccaacatgatccactcctacattaaggaaattgaagatctgcgagcaaaactgctcgaaagcgaggctgtgaacgagaatctgcgaaaaaacctgactcgggctacggcacgggccccatactttagtggctccagcactttttccccgaccatactgagcagtgacaaagaaacaattgagatcatcgatttggctaagaaggacctcgaaaagttgaaaaggaaagaaaagaggaagaaaaagtcagtggccgggaaggaggataataccgacactgatcaggaaaaaaaggaggaaaagggagtcagcgagagggaaaataacgaacttgaggtggaggaatcccaggaggtaagtgaccacgaggacgaggaggaagaagaagaggaagaagaggatgatattgatggcggcgagtccagcgacgagtccgacagcgaaagtgatgagaaggctaattaccaggccgatctcgccaacataacatgcgagatcgctattaaacaaaagctgatcgacgagctggaaaactcacaaaagcggctgcaaaccctcaagaaacagtatgaggaaaaactgatgatgctgcagcataagatccgggacactcagctggaacgagaccaggtactccagaatcttggcagcgtggagtcctattcggaagagaaggcaaaaaaagtgcgctctgagtatgaaaaaaagttgcaggccatgaacaaggagttgcagagactccaagctgcccagaaagaacacgccaggctgctgaagaatcagagccagtacgaaaagcagctgaagaagctgcagcaggacgtcatggaaatgaagaagacaaaggtccgcttgatgaaacagatgaaggaagaacaggaaaaggcaaggttgactgagtcacgtagaaatagggagattgctcaattgaaaaaagaccagcgtaagagagatcatcagttacgcttgctggaggcacagaagagaaatcaggaggtggtgctgaggcggaagaccgaagaggtgactgctctccgtcggcaggtacggccaatgagcgataaggttgccgggaaggtcacccgcaaactctccagcagcgatgccccggcccaggataccggaagttctgctgctgctgtggagaccgacgcaagccgaacaggtgcccagcagaaaatgcgcattcctgtggctcgcgttcaggccctgcctacaccggctaccaatggcaaccgcaagaagtaccaaaggaaaggcctgacaggccgcgtgttcatcagcaaaactgcccggatgaagtggcaactcctggagcggcgggtaacagatattatcatgcaaaagatgacaatttccaacatggaagcagacatgaaccgattgctgaaacagcgcgaagagctgacaaagaggagggagaagctctccaaacgccgggaaaaaatcgtcaaggagaacggcgagggggacaaaaacgtagccaacatcaacgaggagatggaaagcctgaccgcaaatatagattatatcaacgactcgatctccgattgccaggcaaatataatgcagatggaggaagcaaaggaggagggcgaaaccctggacgtaacagccgtaataaatgcctgcactctgacggaggctcggtaccttctcgatcacttcctgagtatggggatcaacaaaggcttacaggctgcgcagaaggaggcccagataaaagttctggagggtcggctgaaacagactgaaatcacttctgcaacgcagaaccaactgctgtttcacatgctgaaagaaaaggccgagctcaatccggagctggacgccctacttggccatgcattgcaagatctggattcggttcccctagaaaatgtggaggactctacagacgaggacgctccgctgaattcgcccggctctgaagggtctactttgtcctcagacctaatgaagctgtgcggtgaggtaaaaccgaagaacaaggcccgaagaagaacgaccactcagatggaactcctttacgcagattcttctgaattagcgtctgatacatcgaccggagatgcatctctccccggtcctctcacccccgtcgcggaggggcaggaaattggcatgaacacagaaacaagtggtacttccgcccgcgagaaggaactgagtcctcctccaggcctgcccagtaagatcggatctattagccgacaaagcagcctcagcgaaaaaaagataccagaaccgagccccgtcactcgcagaaaggcctatgaaaaggcggaaaaaagcaaggcaaaggaacaaaagcactcagatagtgggacatccgaggcctccctgtcccccccttcgtccccaccgtcccgcccacgtaacgaactgaatgtctttaatcgcctgaccgtgtcgcaaggaaatacttctgtgcagcaggacaagtcagacgagtctgacagctccctcagcgaagtgcatcgctcctctcgcaggggaataattaatcctttcccagcctcaaagggtatcagagcctttcctctgcaatgtatccatatcgccgaaggccatactaaagccgtgctgtgcgtggattccactgacgaccttttgtttacgggcagtaaagaccggacttgtaaggtgtggaacctcgttacgggtcaagagatcatgagcctaggaggacatccaaacaacgtggtttctgtcaagtactgcaattatacttctctggtgttcacagtgtcgaccagctatatcaaagtgtgggacattcgcgactctgcaaaatgtataagaactcttacttcaagcggacaggttactttgggcgatgcctgttccgccagtacatctagaactgttgcgataccctccggagagaaccagattaaccagatcgcactcaacccaacgggcacttttctctatgccgcttctgggaacgcagtgcgcatgtgggacctgaagcggtttcagagtactggaaagctcaccgggcacctcggccccgtgatgtgcttgaccgttgaccagatctcttccggccaggatctcatcattacagggtctaaggatcactatatcaagatgtttgacgtgacagagggggccctgggaacagtgtccccgacccataatttcgagcctccacattacgacgggatagaggcactgacgatccagggggataacctcttttccggatcccgtgacaatggcatcaaaaaatgggaccttacacagaaagaccttctccaacaggtccctaatgcgcataaagattgggtgtgcgccttgggagtcgtgccggatcacccggtattgctctctggatgtcgcggaggtattctgaaggtgtggaatatggacacgttcatgcccgttggcgaaatgaaaggacatgactcaccaattaacgctatttgcgtgaactccacacatatcttcaccgccgccgatgatcgtacggtcaggatatggaaggccagaaacctgcaagacggccagatcagcgacaccggcgacctcggggaagatattgccagcaattag

SEQ ID NO: 121638 - DNA, 5028 bp, synthetic construct
  misc_feature 1..5028: note = Description of Artificial Sequence: Synthetic coding sequence
  source 1..5028: mol_type = other DNA
atgctcggcgcgccagatgagtcctccgtcagggtggcagtgcgtattcggccgcaattggccaaggaaaaaatcgaagggtgccatatctgcacatccgtaacacccggagaacctcaggtgtttctcggcaaagacaaggcattcactttcgattacgtatttgatatagatagccagcaagagcagatttacatccaatgcattgaaaaacttatagagggctgcttcgagggctataacgccaccgtattcgcatacggacagaccggagctgggaagacatatactatgggcacgggctttgacgtgaacatcgttgaggaggagcttggaattatcagccgcgctgttaagcatctctttaagtctatcgaagagaagaaacatatagcaataaagaatggtctgccagctccagacttcaaagtcaacgcccaatttctggagctgtataacgaggaggtcctggacctgtttgacacgaccagggatatagacgctaagagcaaaaaatccaacatccgtatccatgaagattcgactggcgggatatacaccgtgggagtcaccacaagaactgttaatactgagtccgaaatgatgcagtgccttaaacttggcgccctttcaaggaccacagcgtctactcagatgaatgtccagagcagccgatcccatgccattttcaccatccacgtgtgtcagacccgtgtgtgcccccagattgatgccgataacgccacagataacaagattatctctgagtccgcacaaatgaacgaattcgaaacattaactgctaaattccattttgtcgacttagcaggttcagaaaggttgaagcgcaccggagccactggagagcgcgccaaagagggaattagcattaactgcgggctcctggctcttgggaacgttatcagcgccttgggcgacaagtcgaagcgggctactcacgtcccctaccgggactctaagttaactaggctgttgcaagactcattgggcggaaattctcagactatcatgatagcctgcgtgtctccttctgatcgtgattttatggagacccttaatacactcaagtatgccaacagggcccgcaatatcaaaaacaaggtcatggtgaaccaggatcgggctagccaacagataaatgctctgcgtagcgagattacccggctgcagatggagctgatggaatacaaaactggtaaaagaatcattgacgaagaaggtgttgaaagcatcaacgatatgttccatgaaaatgcaatgctgcagaccgagaataacaatttaagggtgagaatcaaggccatgcaggaaaccgtggatgctttgaggtccaggattacacagttggtctcagatcaggccaatcacgtgctggcacgggccggtgaggggaacgaggaaatttccaatatgatccatagttacataaaggagattgaggacctccgcgccaagctgttggagtccgaggccgtgaatgaaaatctccgaaaaaacctcacccgcgccacagcaagagctccatatttcagtgggtcctcaaccttcagcccgactattctgagcagcgataaggagacaatcgagatcattgacctggccaagaaagacctcgaaaaactgaagagaaaagaaaagagaaaaaaaaaacggctgcagaagcttgaggagtcgaatcgcgaggagaggagtgttgcgggaaaggaagataacactgacacggaccaggagaagaaggaggaaaaaggcgtgtccgagagggagaataacgaactggaagtcgaagagagccaggaagtgtccgaccatgaggatgaagaggaggaggaagaggaagaggaggacgatatcgatggaggcgagagttctgacgaatcagattccgaatccgacgagaaagcaaattatcaggctgacctcgcgaatatcacctgtgaaatcgctataaaacagaagttaatagatgagctagagaattcgcagaagaggctacagaccctaaagaagcagtatgaagagaaactgatgatgctacaacacaaaatcagagatactcagttggaacgcgatcaggttcttcagaatctgggctcagtcgagtcttactcggaggagaaggcaaagaaagttagatctgagtatgaaaaaaaactgcaggctatgaataaagagctgcagcgtctgcaagcagcccagaaggagcacgcacgcctgttaaagaaccagagccagtacgagaagcagttaaagaagctgcagcaagacgtcatggaaatgaagaaaacaaaagtgcggttaatgaagcagatgaaggaagagcaagagaaagcccgcttaactgagagccggcgcaatagggagatcgcccagctgaagaaagaccagcgaaagcgggatcaccagctgaggctgctggaagcacagaagcgcaatcaggaagtggtactccgacgcaaaacggaagaagtaaccgctctgcggagacaggtgaggcctatgagtgataaagtagccgggaaagtgactcggaaacttagcagctccgatgctcccgctcaggatactggtagctcggcagcagccgttgaaacggacgctagccggacaggcgcccaacagaagatgcggatcccagtcgcaagggttcaagcactgcctactcctgccaccaatggcaatagaaagaagtaccaacgcaagggcctcactggccgggtatttatcagcaagaccgctcggatgaaatggcagctgttggagaggcgggtcaccgatattattatgcagaaaatgacaattagtaatatggaagctgatatgaataggctccttaagcaaagggaggagctcacaaaacggcgcgagaagctctccaaaaggcgggagaaaatcgtgaaggaaaacggtgaaggcgataagaatgtggccaatattaatgaagagatggagagcctgactgccaacatcgactacataaatgacagcatctccgattgccaagctaacatcatgcagatggaagaagcaaaagaggaaggggagacattggatgttaccgctgtgataaacgcctgtactctgacagaagcgcgctatttgcttgaccattttctgagtatgggaataaacaaaggccttcaagcagcacagaaggaagcacaaattaaagttctggaggggagactcaagcagacagaaatcactagcgcaacacagaaccagctgctgttccacatgctaaaagagaaggccgaactgaatcccgagctggacgcactactcggccatgccctgcaggactttaagcatttctttgtagagaatgttgaggacagtaccgatgaagatgcaccacttaactcccccggatctgagggctcaactctgtccagtgaccttatgaagctgtgcggggaggtgaaacccaagaacaaagcccggaggcggacgactacccagatggaactcctatacgccgattcatcggagctggcttctgacacgagtacgggagacgcttcgctccccgggcccctcactccagtggctgaaggacaggagatcggtatgaacactgaaacctcaggcaccagcgctcgcgaaaaagaattaagccccccccccggcttgcctagcaaaataggtagcatctcaagacaatcttccctgtcagagaagaagattccagaacccagccctgtaaccaggcgaaaagcatatgagaaagcggagaaaagcaaggcaaaggagcagaagcattctgatagcggtaccagtgaggcttcactgagccctccaagttcccctccaagcaggccacgaaacgaactgaatgttttcaataggctcaccgtgagtcaggggaacacatccgtgcaacaagacaagtctgatgagagcgacagtagcctgagtgaggtccaccgtaattcaaatttgagaggtatcatcaatccatttccagcctccaaaggcatacgggctttccccctgcagtgtatccacatcgccgaggggcacaccaaagccgtgctctgtgtggactccactgacgatttgctgtttaccggctcgaaggatagaacatgtaaagtatggaatctggtcaccggacaggaaatcatgtctctcggagggcaccccaacaacgtggtatctgtcaagtattgtaattacacttccctcgtgttcactgttagcaccagctacattaaggtgtgggatatacgagacagcgcgaaatgtattcgcactctcacttcctccggacaggtcaccttgggggacgcgtgcagcgcatccactagcagaacagtggcaattccaagcggagaaaaccagataaatcagatcgcacttaacccaaccggaaccttcctgtacgcagctagtggaaatgccgtgagaatgtgggacctaaaaaggtttcagtcaaccggcaagttgacaggccatctgggccccgtgatgtgcctgacagtggatcagatcagttctggccaggacttgatcattactggcagtaaagatcactatattaagatgtttgacgtcactgagggagcattaggcacagtctctccaacacataattttgagcccccccattacgatggaatagaagcgctgactatccagggtgacaacctgttctccggaagccgggacaatgggattaagaagtgggatttaacacagaaggatctgctccagcaagtacctaatgctcacaaggattgggtgtgcgctctaggcgtcgttcccgaccaccctgtgctcctttccggatgcaggggcggcattctaaaagtatggaacatggacaccttcatgcccgtaggtgagatgaagggacatgacagccctattaacgccatctgcgtgaattccacacacatcttcactgcagctgacgacagaactgtaaggatttggaaagcccgcaacctacaggatgggcaaatctccgataccggagacttaggagaggacattgcctctaactag

SEQ ID NO: 121639 - DNA, 4866 bp, synthetic construct
  misc_feature 1..4866: note = Description of Artificial Sequence: Synthetic coding sequence
  source 1..4866: mol_type = other DNA
atgcttggtgctcccgacgaaagcagtgtgagagtggccgtacgcataagaccccagctcgctaaggaaaaaatagagggctgtcatatctgcacctctgtgacccctggggaacctcaggtgtttttgggcaaagataaggccttcacttttgactatgtgtttgatatagactcgcaacaagaacaaatatatattcagtgcatcgagaaactgattgaaggctgtttcgaggggtataacgccaccgtgttcgcctacggacagactggtgctggaaagacctatacaatgggcacgggcttcgacgtgaacattgtagaggaggagctgggcatcatttcaagggctgtcaaacacctcttcaagagcattgaagagaaaaaacatattgccattaagaatggcctccctgcacctgattttaaagtcaacgctcagttcctcgaactgtacaatgaggaagtccttgatttgttcgataccactcgggacatcgacgcgaaatcaaaaaagtctaacattaggattcacgaagactcgaccggcggaatctataccgtcggcgtgacaactaggacagttaatacggaaagcgaaatgatgcagtgccttaagcttggcgccctgtcgcgaactactgccagcacccagatgaacgtgcaaagcagtcgctcacatgccatatttactatccatgtttgccagactagggtctgccctcagatcgatgccgataacgccaccgataataaaatcatcagcgaaagtgcccagatgaacgaattcgagactctgacggccaagtttcactttgtggatctggcaggcagcgaaagactgaagaggaccggcgccactggggagcgcgccaaagaggggattagcattaattgtggtcttctcgcgttggggaatgtgatcagcgccctcggggacaagtccaaacgcgcgacccatgtgccttatagggactctaagcttactcggctgctgcaggacagtctaggtggaaactcccaaaccatcatgatcgcttgcgtgtcaccatccgatagagattttatggagaccctgaataccttgaagtacgcgaacagagctagaaacataaagaacaaggtcatggtgaaccaagaccgggccagccagcagatcaacgccctccggtcagagatcaccaggctgcagatggaattgatggagtataaaacaggaaagcggattatcgacgaggaaggggtggagtccatcaacgacatgttccacgagaatgcaatgttgcagactgaaaacaacaacctgcgggtcagaatcaaggccatgcaggagacagtcgacgcactgcgaagtcgcatcacccagcttgttagcgatcaggcgaaccatgtcctagctcgcgcgggcgaggggaacgaagaaattagcaacatgatacattcttacatcaaagagatagaagacttgcgtgccaagcttctggaaagtgaggctgttaacgaaaatctgagaaagaatctcaccagagctaccgccagagccccgtacttctccggctcgtcaactttttccccaaccatcctttcttccgacaaggaaactatcgaaatcattgacctggctaaaaaggacttggagaagctgaagcggaaagaaaaacgtaagaagaaaagcgtggcagggaaggaagacaacacggacactgaccaggagaagaaagaggaaaaaggcgtgtcagagcgtgaaaacaacgaactcgaagtagaagaatcccaggaagtgagtgatcatgaggacgaggaggaagaagaggaagaggaagaggacgatatcgatggcggggagagttctgacgaaagcgactcagaaagtgacgaaaaagcaaactaccaggccgatctggcaaatatcacctgtgaaatcgctataaagcagaagctcatcgacgagctcgaaaactcccagaaacgtctccagaccctgaaaaaacaatacgaggagaagctgatgatgcttcagcacaaaatccgggatacccagttagaacgggatcaggtcctccagaatttggggagtgtcgaatcatattccgaggagaaggccaagaaggtcaggagtgagtacgaaaagaaactacaagcaatgaataaggagctgcaacgcctgcaggccgcacagaaagagcatgctcgtctgcttaaaaaccagagccagtacgaaaaacagctgaaaaagcttcagcaggatgttatggagatgaagaagacaaaggtcagactgatgaaacagatgaaggaggaacaggagaaagccagactaaccgagtcaagaagaaatcgagaaatcgctcagctcaaaaaggatcagagaaagagggatgtaaccgccttgcgcagacaggttagacccatgagcgacaaagtggccggcaaggttactcggaagttatcgtcttccgatgcccccgcccaagacaccggcagcagcgccgcagccgtcgagacggacgccagcagaacaggagcacagcagaagatgagaatacctgtcgcccgggtgcaagctcttcccactcctgcaaccaatggaaacagaaagaagtatcaacggaagggactcactgggcgtgtcttcattagtaaaacagccaggatgaagtggcagctgcttgaacggagggtcaccgatatcattatgcagaagatgactatttccaacatggaagctgatatgaatagattgttaaaacagcgggaagagctaactaaaagaagggagaagctgagtaagcggcgcgagaagatcgtcaaagagaatggggaaggcgacaagaatgtggccaatatcaatgaggagatggagagcctaacagccaacatagactatatcaatgacagtataagcgattgtcaggccaacattatgcagatggaggaggcaaaagaggagggagagactctcgacgtcacagccgtgattaacgcttgtacccttacagaggctcgatatctgctcgaccattttctgagcatgggaatcaataaaggtctgcaagctgctcagaaagaggcacagatcaaggtgctggagggccgcctgaagcagaccgaaataacgagtgctactcagaaccagttgctgttccacatgctgaaggagaaggccgagctgaaccctgagcttgatgctctattaggccacgctcttcaggacttggattctgtgcctcttgaaaatgtcgaggattctacggacgaggatgcgcccctgaactcccctggctccgagggttctaccttgagctccgacctgatgaagttatgcggggaagtcaagccgaaaaataaagcacggcggcggacaacaacccagatggaactgctgtacgcagatagttccgaattggccagtgacacaagcactggagacgcctccctgcctggccccctcacccctgttgccgagggccaagagataggaatgaacacagaaacttcaggcacctctgctagggaaaaagagctctctccacccccgggactgcccagtaaaatcggaagtatctcacgccaatctagcttatctgagaagaaaattcctgagcccagccccgtgacccgcagaaaagcatatgaaaaggccgaaaagtccaaggctaaggaacagaagcactccgactctggcacgagcgaggccagcctcagcccaccatcctcccctccctcacgacccagaaatgaactgaacgtcttcaatcgcctgacagtgagccagggcaataccagtgtccagcaggataagggaatcattaacccgtttcctgcttccaaaggcattcgcgcttttcccttacagtgcatccatatagcagagggccacacaaaggcagtgctttgtgtggatagtaccgatgacctcctgtttacaggcagcaaagaccgcacatgtaaggtgtggaacttagtgacaggacaagagatcatgagtcttggggggcaccccaataatgtggtctccgtgaagtactgcaactatacaagtctggtgttcaccgtgtccacctcctatatcaaagtttgggatatcagggattcagctaaatgtatccgcaccctgacttctagcggacaggtgacactcggtgacgcctgctccgcctccaccagcagaacggtcgctatcccatcaggcgagaaccagatcaaccagattgcgctcaacccgaccgggacttttctttatgctgcctctgggaatgctgtgagaatgtgggacctgaaaagatttcagtccactggcaagctcactgggcacttgggccccgtgatgtgtctgactgtcgaccagatctcatcaggacaggatctgataatcaccggatctaaagaccactacataaagatgtttgatgtaaccgaaggcgccctcggcaccgtgtcccccactcacaacttcgaacccccacattacgatggaatcgaggccctcactatccagggggacaatctgttctctggttcaagagataatggcattaaaaagtgggatttaacccagaaggacttgctgcaacaggtgcctaacgcccacaaggactgggtctgtgccctcggagtggtgcccgatcacccagtgttgctgtcaggatgccgcggggggatcctgaaagtgtggaacatggatacattcatgcctgtcggcgagatgaaaggccatgattcacccattaacgctatttgtgtaaatagtacacacatcttcacagcagcggacgacagaactgtgcgtatttggaaagcccgcaatctgcaggacggccagatttccgataccggcgaccttggtgaggacattgccagtaactag

SEQ ID NO: 121640 - DNA, 4914 bp, synthetic construct
  misc_feature 1..4914: note = Description of Artificial Sequence: Synthetic coding sequence
  source 1..4914: mol_type = other DNA
atgcttggggcacccgatgagagctccgtaagggttgctgtgagaatccgcccgcaacttgccaaagagaagattgaaggttgccatatttgcactagtgtgacacctggcgagccccaggtgtttctaggaaaggataaggctttcaccttcgattatgtcttcgatatcgactcacagcaggaacagatttatattcaatgcatcgagaaattgatcgagggctgcttcgagggttacaatgctaccgtgttcgcatacggccagacaggcgcagggaaaacctatacgatgggcaccggatttgacgtaaatatcgtggaagaggagctcggaataatctcccgggccgtgaagcacctgttcaagtcaatcgaggagaagaagcatattgcaattaaaaacggactccctgctccagatttcaaggtcaatgcacagtttctagagttatacaatgaagaggtgcttgaccttttcgacacaaccagggacatcgacgccaaaagtaagaagagtaacattaggatacatgaggacagcacaggagggatctacactgtgggcgtgaccacgaggacggtgaataccgaaagcgaaatgatgcagtgtctgaagctaggcgctttgagccgcaccacagcatctacccagatgaatgtgcaaagttcccgctctcacgctatcttcaccattcacgtgtgtcagacacgtgtgtgcccgcagattgacgccgacaatgcaacagataacaagataatctccgagagtgcacagatgaatgagtttgagactttgacggccaagtttcatttcgtcgatctggccgggagtgagagactgaaacgtacgggtgcgactggagaacgagccaaggagggcatttccataaattgtggcctgctggcattgggcaatgtaatcagtgcactgggcgataagagcaagcgggccacgcatgtaccctatagagactctaagttgactcgactgctgcaagattccttgggcggcaactcacaaacaatcatgatcgcctgtgttagcccgagtgaccgcgattttatggaaacccttaataccctgaagtacgctaacagagccagaaatattaagaacaaggtcatggttaatcaagacagggcttcccagcagatcaatgccctgcgctccgaaataacaagactccagatggaactgatggagtacaagacaggtaagagaataatcgatgaggagggcgtagagagcattaacgacatgtttcacgagaacgcgatgctgcagactgagaacaacaatttgagggtaagaatcaaggcgatgcaggaaactgtggatgcgctgcggtcccgcataacccagctggtttccgaccaggcgaaccatgtgctggcccgtgctggggagggtaatgaggagatctctaatatgattcatagttacatcaaggagatagaggatctgagggcaaagcttctggaaagtgaagcagtgaacgagaatctgcgtaagaacttaacgcgagccactgccagagctccttacttctcaggcagctcaacattctctcccacaattctgagctcagacaaagaaactattgagattattgatcttgccaagaaagatctggagaagctaaagagaaaggagaaacggaaaaagaaatctgttgccggcaaagaggacaacacggatacagatcaggaaaaaaaggaggaaaaaggggtcagcgagcgcgagaacaacgaactggaggtggaagaaagccaggaggtctctgaccatgaagatgaagaagaagaggaggaggaggaggaggatgacatcgatggaggggaatcctcagacgagagcgactccgagagcgacgaaaaggcaaattaccaggccgacctggccaacatcacatgtgagatcgcaattaagcaaaagctgatagatgagttggagaacagccagaaacgcctccagaccttgaagaaacaatatgaggagaagctgatgatgctgcaacacaagatcagagacactcagcttgaacgcgaccaggtgcttcagaacctgggctctgttgagtcctactctgaagagaaggccaaaaaggtgagatccgagtatgagaagaaattgcaagcaatgaataaggaattacagcgcctgcaggccgcccaaaaggagcacgcacgtctcctaaagaatcaaagccaatatgagaagcagcttaaaaaactccaacaggatgtcatggagatgaagaaaacaaaggtgcgccttatgaaacagatgaaggaggagcaagagaaggcccgtctgaccgagagcagaagaaatagggaaatcgcgcagctgaagaaagaccagcggaaaagagatcaccaactgcgcctgctcgaggctcaaaagcggaaccaggaagtggttcttcggcggaaaacagaagaggtcactgcattgcggcgccaggtgcgccctatgtccgataaggtggctggcaaagtaacgaggaagctgtcttcatcagacgcccccgctcaggataccggctcctcggctgctgccgtcgaaacggatgcttcaaggaccggcgctcagcagaagatgcgcattcccgttgcacgcgtgcaggcactgccgactcccgccaccaatgggaaccgcaaaaaatatcagagaaaggggttaacagggcgagtctttatatccaaaaccgcacgtatgaagtggcagctcctggaaaggcgcgtcactgacattataatgcaaaagatgacaatcagtaatatggaggccgatatgaatcggttacttaagcagcgggaggaactgaccaagcgacgcgagaagcttagtaaacggcgggagaaaattgttaaggagaacggcgagggcgacaagaacgtcgccaacattaatgaagaaatggagagcttgacagctaacattgactatatcaatgactctatctcagactgtcaggctaacattatgcagatggaggaagcaaaggaggagggggagacactggacgttactgccgtaatcaatgcctgcactctgaccgaagcgcgatacctactggaccacttcctttccatgggaataaacaaaggactgcaggcagcccagaaggaagcgcagatcaaggtgctcgagggcagactgaagcaaaccgaaatcacctcggccactcaaaaccagttgctgtttcacatgctcaaagagaaggcagagctcaatcccgagctggacgccctgctcgggcacgctctacaagagaacgttgaggactctaccgatgaagatgcccctttgaattctccaggttctgagggctcaaccctgagcagcgaccttatgaagttatgcggagaagtgaagccaaaaaataaggcccgacgccggacaaccacccagatggaactgctgtacgccgattcatctgagctggcctcagatacaagtaccggcgatgcctctttgcccggacctctgaccccagtagccgaagggcaagaaattgggatgaacaccgagacatccggtaccagtgcccgggagaaagagctgagccctccaccggggttgccttctaaaatcggcagtatcagtaggcagagctcgctctctgagaagaaaataccagaaccatctccagtcactcggcgcaaagcgtatgagaaggcagaaaagtctaaagctaaggagcagaaacattcagactctggaacctcagaggccagcttgagccccccttccagccccccctctcgccctcgaaacgagctcaatgtttttaacagacttaccgtttcacagggcaacacctcagtccagcaggacaaaggaataatcaacccctttcccgccagcaaaggtatcagagcttttccccttcagtgcatacatatagcagagggtcacactaaggctgtgttgtgcgtcgacagcaccgacgatttactctttacaggatcgaaagatcgtacgtgtaaagtgtggaatctcgtgactggacaggagataatgtctcttggtggccatcccaataacgtcgtgtccgtgaagtattgcaattacaccagtctggtcttcaccgtaagtaccagctatattaaagtttgggatatccgagatagcgccaaatgtatcagaactttaacttcttctgggcaggtcacattgggtgacgcatgctccgcgtcgacatcacggacagtcgcgattccttctggcgaaaaccagattaaccaaatcgcgctgaacccaaccggcacctttttgtacgccgcaagcggaaacgcagtgcgaatgtgggatctcaaacgcttccagtcaacgggaaagttaactggccacctgggccctgtaatgtgcttaacagtcgaccagatatcatcaggacaagatcttatcattacaggttccaaagaccattacattaagatgtttgatgtgaccgaaggcgccttggggactgtgagtcctacccacaatttcgaacccccccattatgatggtattgaggccctgaccatccagggggacaatctgttttctggcagcagagataatggcatcaagaaatgggatctaacccagaaggatctcctgcagcaggtccctaacgcccataaggactgggtatgcgcccttggggtcgttcccgaccaccccgtgctactttccggctgcagaggaggtatcctgaaagtgtggaatatggacacctttatgcctgtcggggaaatgaagggacatgacagcccaattaacgcaatctgtgtgaacagcacccacattttcacagcagcggatgatagaacagttaggatctggaaggctcgcaacctccaggatggtcagatttccgacacaggggatctgggtgaagacattgcatccaactag

SEQ ID NO: 121641 - DNA, 1986 bp, synthetic construct
  misc_feature 1..1986: note = Description of Artificial Sequence: Synthetic coding sequence
  source 1..1986: mol_type = other DNA
atgaaccgcctcctaaaacagcgcgaggaacttaccaaacgaagggagaaactctctaagcgaagggaaaaaatcgtgaaggagaacggtgagggggacaaaaatgtggccaacatcaacgaggaaatggagtcactcaccgcaaatattgactacattaatgactcaatatcggactgccaggccaatattatgcaaatggaggaggctaaggaagagggggagactctggacgttacggcagttatcaacgcttgcacgctcacggaggccaggtatttattggaccattttctctcaatgggcataaacaaggggcttcaggcagcgcagaaagaagctcaaatcaaggtgttggagggccgcctgaaacagacggagatcacttctgccacgcagaatcagctactcttccatatgctaaaagagaaggccgaactcaaccccgagctggatgccctgttgggacatgcgttacaggagaatgtagaggattcaactgatgaagacgccccgctgaatagtccgggatccgaagggtctacattatctagtgacttaatgaaactctgtggggaggtaaaaccaaaaaataaggcccgccgccgcaccacaacgcagatggaactgctgtacgccgatagctctgagttggcttccgatactagcaccggcgacgccagtctgccaggaccgttgacccctgtggcagagggacaggaaataggaatgaacaccgagacctcagggacctccgcccgcgaaaaggagctgagcccccctcccggactgccgagcaaaattggatctataagtcgtcagagctccctcagtgaaaaaaagatccctgagccctcccccgtgacgagaaggaaggcgtatgagaaggccgagaaaagcaaggccaaggagcagaagcagggaatcatcaatccattccctgctagcaaaggaatccgcgcatttcctctgcaatgtattcatatcgcagaagggcataccaaagccgtgctctgcgtggatagcaccgacgatctcctattcaccggcagtaaagatcgaacctgcaaagtgtggaatctggttaccggacaggagattatgtccctgggcggtcacccgaacaacgtggtcagtgtgaagtattgtaattatacttcgcttgtgttcaccgtgagtacctcctatatcaaggtgtgggatatacgcgactcagccaaatgcatccgcacacttacctcctccggccaggtaaccctaggagacgcatgcagcgcctctacttctagaacagtggcaattcccagcggcgagaaccagatcaatcagattgctctgaatcctacaggaacttttctgtatgctgccagcgggaatgcggtcaggatgtgggatctgaaaaggttccaatccacgggaaagctgacaggtcatctgggccctgttatgtgtctgaccgtggatcagatctcctctggtcaagacctcattattacagggtcaaaggatcactatataaaaatgtttgatgttactgagggggccctgggcaccgttagccctacacacaatttcgagccaccacattatgacggcatagaagctcttacgattcagggcgacaatctcttcagtggcagccgtgataatgggataaagaagtgggacctgacccaaaaagatctgttgcagcaggtgcctaacgcccataaggactgggtgtgcgcattgggagtcgtccccgaccatcccgttctactgtccgggtgcagggggggcattcttaaagtatggaacatggatacctttatgcctgtgggggagatgaagggccatgacagtcctatcaatgctatatgtgtgaatagtactcacatctttaccgccgcggacgacaggactgttcgaatttggaaagcccggaatttacaggatgggcagatatccgataccggcgatttgggcgaggacatcgccagtaattag

SEQ ID NO: 121642 - DNA, 4875 bp, synthetic construct
  misc_feature 1..4875: note = Description of Artificial Sequence: Synthetic coding sequence
  source 1..4875: mol_type = other DNA
atggctggccagggtgattgctgtgtcaaggtggctgtccggattaggcctcagctaagcaaggaaaaaatcgaaggatgtcacatctgcactagcgttacgcccggtgagcctcaagtactcctcggcaaagataaggccttcacatatgacttcgtttttgacctcgacacatggcaagaacaaatatatagcacatgtgtttccaagcttatcgagggttgtttcgagggctataacgccacagttctggcctacggacagactggcgccggtaaaacctatacgatgggtactgggttcgatatggccacttccgaagaagaacaaggaatcatccctagggcaattgcccacctgtttggaggcattgcagagcgcaaacgccgggcacaagaacagggggtggcggggcctgaatttaaagtttccgcccagttcctggaactttacaacgaagagatcttggacctgtttgacagtacacgcgaccctgatactcggcatcgccggagtaacataaaaattcatgaagacgctaacggcggcatttacacaacgggagtcacttccaggctgatccacagtcaagaggaactgatacaatgcctcaagcagggcgctctgagccggacaacagcctctactcagatgaacgtccagagttcaaggtcacacgccatctttaccattcatctctgccagatgcggatgtgtacacagcccgacctagtcaacgaggctgtcactggactccctgacggaactcccccatcctctgaatatgaaactttgacggcaaagtttcatttcgtggacctcgccggctcggaacggctgaagcgaacaggcgccaccggcgagagagcgaaggaaggcatctctatcaactgtggcctgttagctcttgggaatgtcatttcggcactgggagaccagagcaaaaaggtggtccacgtgccataccgagattcaaagctgacacggctgctgcaggatagcctgggggggaattctcagaccattatgatcgcgtgcgtctcaccgagtgatcgcgacttcatggagaccttgaacacgctcaaatatgccaaccgggcccggaacataaagaataaagtggtggtgaaccaggataagacatcccagcaaatctccgccctgagggccgagattgcccggcttcaaatggaattaatggaatataaagcaggtaaacgggtgattggcgaagatggggctgagggctactctgacctgttcagggagaatgccatgcttcagaaggaaaatggagcattgaggctcagggtgaaagctatgcaggaggctatcgacgctattaacaaccgcgtaactcagctgatgtcacaggaggcaaacctgctcctggcaaaggccggtgacggcaacgaggctattggggctctcatacagaattatattcgcgagattgaggagctgcgcacaaaattgctggaatcagaggcaatgaatgaatcactgcgcaggtcactctccagggcttcagcgcgatccccttattcacttggcgctagccctgctgcccccgctttcggcggttctcccgctagtagcatggaggacgcgtctgaggtcattaggcgagctaagcaagacctcgaacgactgaaaaagaaggaagtgcgacagagacggaagtcacctgagaaagaagcctttaagaagcgagccaagctgcagcaggagaatagcgaagagactgacgagaatgaggcagaggaggaggaagaagagcgtgacgagagcggctgcgaggaggaagaaggccgagaggacgaggacgaagattccggttccgaggagtcattggtggactcagattcagaccctgaggaaaaggaggtgaacttccaagctgacctagcagatttgacttgtgagattgagatcaagcaaaagctgatagatgaacttgaaaattcccaacgaagactgcagaccttaaagcaccagtacgaagaaaagcttatcctgctgcagaacaagataagagacacccaactagaacgggatcgggtgcttcaaaacctcagcacaatggagtgttacactgaggaaaaggctaataaaattaaagctgattacgagaaaagactccgtgagatgaatcgcgacctacagaagctgcaggctgcccagaaggaacatgcccgtctgctgaagaatcagtcacgttacgagcgtgagttgaagaagcttcaagctgaagttgccgaaatgaagaaagcgaaagtggccctcatgaaacagatgagggaggaacagcagaggaggcgtctggtggagaccaaacgcaatagggagatagcccaactgaagaaagagcagagacgtcaggagttccaaatcagagcacttgaatcacagaagagacagcaggagatggtgttaaggagaaaaactcaagaagttagcgccttgcgtcgccttgccaagccaatgagcgagcgggtggcgggacgggcaggactgaaaccccccatgctggattcaggagccgaggtatctgcatctacaacctcatccgaagccgagtccggagctcgtagtgtgtccagtatcgtacgtcagtggaataggaaaattaaccattttctgggcgatcatccagccccaactgtcaatggtactcggccggcgcggaaaaaattccaaaagaaaggggctagtcagtcgttcagcaaggcagccaggcttaaatggcaatccctggagagacgcatcatcgatatcgtgatgcagcgcatgactatcgtgaacttggaggctgatatggaaaggctgattaaaaagcgggaggagttgtttctgctgcaagaggccttacggagaaaacgagaacggctacaggccgagtcacctgaagaggagaaggggctgcaggaactggcggaggagattgaggtgctggccgccaacatagactatatcaatgatggaatcaccgattgccaagctaccattgtgcaactagaagaaaccaaagaagaattggactctactgatacctcggtagtgatcagtagttgcagccttgctgaggccagactgctgcttgataatttcttaaaggcctcaattgacaagggcttgcaagtagcccagaaggaagcccaaatccgcctgctagaaggacggctgaggcagacggatatggcaggtagctcccagaaccaccttctactcgacgctctgcgggagaaagctgaggcccatccagaactccaagcgttaatttacaacgtccagcaagagaacggatatgcctcgactgatgaggagatatccgagtttagcgaaggcagtttctctcagtctttcacgatgaaaggctccacaagtcatgatgattttaaatttaagagtgagcctaaactgagtgcgcagatgaaggccgtgtccgcagagtgcctgggaccccctttagacatatccactaagaacatcaccaagtccttggccagcctagtcgaaataaaggaagacggcgtgggtttcagtgtgcgcgatccttactaccgggaccgcgtcagcaggacagttagtctaccaaccaggggatcaacttttcccagacaatctagggctaccgaaacatctcccttgactaggcgtaagtcctatgataggggtcagccgatccgttctaccgatgtgggcttcacaccaccctcttcgcctccaacgcggcctagaaatgataggaacgtgttttctcgcctcacttcgaaccagtcccaagggagcgctctggataagggtatcatctctccagtcggaggagccaagggcgctcgcactgctccattgcagtgcgtgtctatggctgaggggcatacaaaaccaatactttgtttagacgccaccgacgagctgctgttcaccggatccaaggatcggtcctgtaagatgtggaacttggtgaccgggcaggagatagccgccctgaaggggcaccctaataacgtggtgagcattaagtactgttcccacagcgggttggtgtttagcgtaagtacaagctacattaaagtatgggatattcgggactccgctaaatgcatccgtaccctgacttcgtctggccaggtcatttccggggacgcatgcgcggctaccagcacccgggccatcacaagcgcacagggcgagcaccagatcaaccaaattgccctgtccccaagcgggacaatgttatatgctgcctccggaaatgcggtgaggatctgggaattgtctaggttccagccagttgggaagctgacagggcatatcgggccagtgatgtgtctgaccgtgactcagaccgcatcacagcacgacttggtcgtcactggatccaaagaccactacgtcaagatgttcgagttgggagaatgcgtaacagggaccatagggccgacacataattttgaacccccacactatgacggcatcgagtgcctcgctatccagggcgacattttgttcagtggatccagagacaatggtatcaagaaatgggatctagatcagcaggaactaattcagcagatacctaacgcccataaggactgggtgtgtgctctggcttttattcccgggagaccaatgttgctatccgcctgccgcgcaggtgtcataaaagtctggaatgttgacaatttcactcccatcggggagatcaagggccacgacagtcctatcaacgcgatttgcaccaacgcgaagcatatttttaccgcgtcatcggactgtcgggtgaagttgtggaactacgtgcctgggctcaccccttgcctgccgagaagggtgctcgctatcaaaggtcgcgccacaaccctgccatag

SEQ ID NO: 121643 - DNA, 4833 bp, synthetic construct
  misc_feature 1..4833: note = Description of Artificial Sequence: Synthetic coding sequence
  source 1..4833: mol_type = other DNA
atggcgggccagggagattgttgtgtgaaggttgcagttcggatcagacctcagctctccaaagagaaaatcgagggatgtcatatatgtactagtgtgactccgggggagcctcaggtcttactggggaaagacaaagcctttacatatgacttcgtattcgacttagatacctggcaggagcagatctactcaacctgcgtgagtaagctaatagaggggtgctttgagggctataacgcaacagtactggcttatggacaaactggagcaggaaagacctacaccatggggacgggcttcgatatggcaacctcagaagaggagcagggtatcatacctcgagcaatcgcgcacttgtttggagggattgccgagagaaagcgacgtgcacaggagcaaggtgtcgccgggcccgaatttaaagtttctgcccagttcctggagctgtacaacgaagagattttggacttgtttgactccacaagggatcccgacactagacacaggagaagtaatatcaaaattcatgaagacgcgaacggcggcatttacactacaggggttactagtcggcttatccatagccaagaagagctcatccagtgcttgaaacaaggcgccctgtctcgaacgaccgcgtcaactcagatgaatgtgcagtctagccgttctcatgccatctttaccatccatctgtgccagatgaggatgtgcacccaaccggatctggtgaacgaggcagtcacgggtctgcctgatgggacgcctcctagcagcgaatacgaaactttgacagcaaagttccacttcgtcgacctcgcggggtcagagagactcaaaaggaccggcgccactggcgagcgcgccaaagagggaatcagtattaactgcgggctgctggccctgggtaatgtgattagcgccctgggcgatcaaagcaagaaggtggtgcacgtgccgtatcgtgacagcaagcttacccgtctgctccaggactcccttggggggaattcccagacaattatgatcgcctgcgtgtccccctcagatagagacttcatggagacccttaatacacttaagtatgctaacagagcccggaatattaaaaataaagtcgtggtgaatcaagacaagacttcccagcagattagcgctctacgggcagaaattgcccggttacaaatggagcttatggagtacaaggcggggaagagagtgattggggaagacggtgccgagggatatagcgatctatttcgcgagaacgctatgttacagaaggagaacggcgccttgagattaagagtcaaagcaatgcaggaagccattgacgccattaacaaccgggtaacccagcttatgagtcaggaggccaacctcctgctcgctaaggccggcgacggaaatgaggcgattggcgcattgatacagaactatatccgggaaattgaggaactcaggaccaagctgctggaatcagaggccatgaatgaaagtctgaggagaagcctatcacgtgccagcgccaggagcccgtactcgttgggcgcgagtccagctgccccagccttcggagggtctccagccagttccatggaagatgcatctgaggtgatccgccgcgcgaaacaggatctggaacggctcaaaaaaaaggaggtccggcaacgaaggaagtctcccgagaaagaagcttttaaaaagcgggctaagctccaacaagaaaacagtgaggaaactgatgagaatgaggctgaggaagaagaagaggagagagacgagagtggctgtgaggaggaggaaggaagggaggatgaagacgaggactcaggaagcgaggaaagcctggtggattcagattctgaccccgaggagaaggaggttaacttccaggctgacctcgcggatctgacatgcgagatcgagatcaaacagaagctcatcgatgagctcgagaattctcaacgtcgacttcaaaccctcaagcatcagtacgaggagaagctcatcctgttgcagaataagatccgcgacacccagttagagagagacagagtcctgcagaatctctcaacaatggaatgctatacagaggagaaagccaacaagatcaaggccgattacgaaaagaggcttcgggagatgaatagggacctccagaaacttcaggcagctcagaaagagcatgcccgtctgctcaagaatcagtctcggtacgagcgcgaactgaagaaactacaagctgaggtggcagaaatgaagaaggcaaaggttgcattgatgaaacagatgcgcgaggagcagcaaagacggcgcctcgtggagacgaaacgaaatagggagatcgcacagctcaagaaggagcagcggcgacaggaatttcaaatccgcgcactggaatcacaaaaacgccagcaggagatggtgctgagaagaaagacccaggaggtctccgccttacgccgacttgctaaacctatgtctgagcgggtcgcaggtagagcaggacttaaacccccgatgttggatagcggggccgaggtgagtgcctcaaccacgtcttcagaggcagaatccggcgccagatccgtatcatcaattgtccggcagtggaacaggaagatcaatcacttcctgggcgatcaccctgccccgaccgtgaatggcactcgtcccgctaggaagaaatttcagaagaagggcgcatctcaatcctttagtaaggccgcacgccttaagtggcagtccctggaacggagaatcattgacatagtgatgcagaggatgaccatcgtgaacctagaagcggacatggagcggctgattaagaagcgggaggagctgtttctgcttcaggaagcgctgcgtagaaagcgggagagactccaggcggaatcacccgaagaagaaaagggactgcaggagctcgctgaggagatcgaggtgctggcagccaacattgactatattaacgatggaataactgactgccaagcaactattgtgcaactggaggaaacaaaagaggaattggacagcactgacacgagcgtggtcataagttcttgcagcttggccgaagctcgtttgctcttagataactttttaaaagcctcgattgacaaaggactgcaggttgctcaaaaagaggcgcaaattcgtctgcttgagggtaggctccgtcagactgatatggccggatcatcccagaatcatctacttcttgatgctctccgcgagaaggccgaggcgcatcctgagcttcaggccctgatctacaatgtgcaacaggagaacggttacgcctctaccgatgaggagatctctgaattctccgagggcagctttagtcagagtttcaccatgaagggtagcacatcacacgatgatttcaagtttaagtcagagcctaaactttccgcgcaaatgaaggccgtcagtgctgagtgtttagggcctccgctcgatatcagcacaaaaaatataacaaagtccctggcgagcctcgtggaaattaaagaagacggcgtggggttctcagttagagatccttactaccgggaccgggtttctcgaacagtcagtctgcctactcgaggcagtacattccctcgccagagtagggctaccgagacatctcctttaactcggcgaaagagttacgaccgaggacagccaatccgtagcacagacgtgggcttcacccccccttctagccctccaacccggcccaggaatgacaggaacgtttttagcagactgacttcgaatcagtctcaagggtccgccctggataaggggattattagccctgtaggaggagccaaaggcgcccggacggcaccactgcagtgcgtatccatggctgaggggcacacaaagccaattctatgcctggacgccactgatgagttgctctttacagggtccaaagatcgatcatgcaagatgtggaatctggtgacaggccaggagattgctgcgttgaaaggccatcctaacaacgtcgtaagcattaaatattgctcccactcaggtctcgtgttttcagtgagtaccagctatattaaggtgtgggatatccgggactcagcaaaatgtatacggacccttacgtcatccgggcaggtgatttccggcgacgcctgcgcagccacaagcactagggctattacgtccgcacagggggagcaccagatcaaccaaatcgcgctcagcccgtctgggaccatgttatacgcagcatcaggcaatgctgtgcgaatctgggagctgtccagattccaacctgtcggaaagctcaccggtcacatcggaccagtgatgtgtctgaccgtgactcagaccgcttcacagcacgatcttgtggttacaggatcgaaagatcactacgtcaagatgtttgagctgggtgagtgtgtcacaggtaccataggacccactcacaactttgagccccctcactatgacggaatcgagtgtctcgctatccagggcgatattcttttcagcggttcaagagataacggcattaaaaaatgggatctggatcagcaagaactcatccagcagatccctaacgcccataaggattgggtgtgcgctctagcgttcatcccgggcagaccaatgcttctgagtgcctgccgggccggggtgataaaggtgtggaatgtggacaacttcactcccatcggtgagatcaagggccacgattctcctataaatgcaatatgcactaatgcaaaacacatattcacagcctccagcgatctgactgtgaagttttggagcgtgagacggctaccgcacagtgggcctccatag

SEQ ID NO: 121644 - DNA, 4914 bp, synthetic construct
  misc_feature 1..4914: note = Description of Artificial Sequence: Synthetic coding sequence
  source 1..4914: mol_type = other DNA
atggcggggcagggagattgctgtgtgaaggtggccgtgagaatcagaccacagctaagtaaggagaaaatcgagggttgtcacatctgtacctcggttacccctggagagccgcaggtcttacttggaaaggacaaagctttcacctatgatttcgtgttcgacctggacacatggcaagagcaaatttacagcacctgtgtgagcaagctgatagagggttgttttgaaggatataatgcaaccgtgttggcttacgggcaaaccggtgctggcaagacttatacaatgggaacaggatttgacatggccactagcgaggaggaacagggaataatcccacgggcaattgcacatctgttcggcggcatagcggagcggaaacgccgcgcccaggagcagggcgtagccggcccagagttcaaagtgtctgctcagtttcttgaactttacaatgaggagatacttgatcttttcgacagcactagggatcccgatactaggcacagacgaagcaatatcaaaatccacgaagacgcaaacggtggtatttacactacaggagtgacctctcgcctcatacactcacaagaggagctgatacagtgcctaaagcaaggcgccctgtctcgtactactgcctccacccagatgaatgtccagtcctcaaggtcccacgcgatttttacaattcatttatgccagatgagaatgtgtacacagccagaccttgttaatgaagccgtcacagggcttcccgacggcacgccgccgagcagcgaatatgaaacactcaccgctaagtttcacttcgtggacttggctggttctgagcggttaaagaggacaggagccactggcgaacgagccaaagaagggatatccatcaactgtggtctcctggccctcggaaatgtgatcagcgccctcggcgaccagtctaagaaggtggtgcacgtgccctaccgtgactccaaactgacccgcctgctgcaggactctctcggcggcaactctcagacaattatgatcgcttgtgtttctccgtccgatcgcgattttatggaaacgctaaatactctcaaatacgctaaccgagcgaggaatattaaaaacaaagtagtcgttaaccaggataagacttcccagcaaatctcagctcttcgcgccgaaattgcaagactgcagatggagttgatggagtataaggccggaaaaagagtgattggagaggacggagccgagggctattcagatctcttccgggaaaacgccatgctccagaaggagaacggcgcgctacggctgagggtgaaggcgatgcaggaggctatagacgcgattaacaatagagtgactcagttgatgtctcaggaggcaaacctcctattagcaaaggctggagatgggaatgaggctatcggagccctgatacaaaactatattcgagagattgaggagctgcgcacaaaactgctggagagtgaagcaatgaacgaaagcctgcgcagatcactgtcacgggcctcggccaggtccccctactcccttggcgcttcccccgctgcccccgcctttgggggcagcccagccagctctatggaggacgcgtccgaggttatacggcgcgcaaagcaggatcttgaaagactgaagaagaaagaggtgcgacagagacggaaaagccctgagaaagaggcctttaagaaaagagctaagctgcagcaagaaaactctgaagaaaccgatgaaaatgaagcagaggaagaagaggaagaaagggacgagtccgggtgcgaagaagaggaggggcgcgaggatgaagatgaagacagcggaagtgaggaaagcctggtggactccgactccgacccagaggagaaggaagtcaatttccaagccgaccttgccgatcttacttgtgaaatagagattaagcagaaactcattgacgagttggaaaacagtcaaagacggctccaaacattgaaacatcagtacgaggagaagctgatcctgctgcaaaacaagattcgggacactcaactggaacgggatagagtgttgcagaacctatctaccatggagtgctacaccgaggagaaagcaaataaaatcaaggctgattacgagaagcgccttcgtgagatgaaccgtgatctgcagaaactgcaggccgcccagaaagagcacgcccgcctcctaaaaaatcagagcagatacgagcgcgaactaaagaagttgcaagcggaggttgccgagatgaaaaaggcaaaggtggcccttatgaagcagatgcgggaagaacagcagaggagacgactcgttgagacaaagcgaaaccgcgagatcgcacagctcaagaaagagcagagacgccaagaattccaaattagggcgctggaatctcagaagcgtcaacaggagatggtgctccggcgcaagacccaagaggtaagtgcccttaggagactggccaagcccatgagtgagagggtcgcaggccgggccggcttgaaacctcctatgctagactcaggcgccgaagtctctgcttccacaacctcttccgaggcagagtccggtgcacgtagcgtgtccagtattgtgaggcaatggaatcggaagattaatcattttctgggcgatcatcccgcccctaccgtgaatggaactaggccagcccgcaagaagtttcagaagaaaggggcgtcccaaagcttctccaaggccgcacgactgaagtggcagtcgctggaacgacgaatcattgacattgtcatgcagaggatgaccattgtcaacttggaggcagatatggaacgactcattaagaagcgcgaggagctgtttctgctgcaggaggcactccggagaaaacgcgagagacttcaggcagaatcaccagaagaggaaaaaggtctgcaggagcttgctgaggaaattgaagtcttggcagctaatattgactatataaacgatggcattaccgattgtcaggccaccattgttcagctggaagagaccaaggaagaactggactcgactgacacttctgttgtcatctcttcctgtagccttgccgaggcacggctgttgttggataacttcctgaaagcctccatagacaaggggttacaggtggctcagaaggaagcgcaaatccgccttctggaagggcggctcaggcaaacagacatggccggttcctcacagaaccacctgcttctggacgctctccgcgaaaaagctgaggcccatcctgagctgcaggccctaatctacaatgtgcagcaggagaacggctacgctagtacagatgaagaaatatcagaattctctgaaggatctttcagtcagagcttcactatgaaagggtcaacttcacacgacgattttaagtttaagtctgaacccaagttgtctgcccaaatgaaggccgtgagtgccgagtgccttgggcctccactcgacatatcaactaagaacatcactaaatctcttgcctctctagtggagataaaggaagatggggttgggttctccgtgagagacccctactatagagaccgcgtatcccgaaccgtgtcactgccaacccgcgggagcacctttccccgacagtcaagggcaactgaaacatcaccattaacaagacgtaagagctatgaccgtggccagcctatcagatcaaccgatgttggttttacaccccctagttccccgcccacacgcccccgcaacgaccgcaatgttttttcgcgccttaccagcaaccagtcacaggggagtgccctggataagagtgacgactcagactcctccctgtctgaggtactgagaggtattatctctccggtcggcggagccaagggcgctcgtactgcaccgttacaatgtgtcagtatggccgaggggcacaccaaacctattttatgcttggatgccaccgatgaactactgtttaccggatccaaggataggtcttgcaagatgtggaatctggtaacaggccaggagatcgcagcactcaaaggacatcctaataatgtggtgtcaattaaatactgctcacattcaggattggttttctctgtgagcacaagctatatcaaagtttgggacatccgcgactctgccaagtgcatccggaccttaacatcctctggacaggtcatctccggagatgcatgcgctgctacctccacccgtgctatcacatccgcccagggggaacaccagatcaaccaaattgcactgtccccctccgggacaatgctgtacgcggcctctgggaacgctgttaggatctgggaactttctcgcttccaaccagtggggaaactcactgggcatattggacctgtgatgtgcttaacagtgactcagaccgcttcacagcacgacctcgttgttaccgggtctaaggatcattacgtaaaaatgttcgagctcggggagtgcgtgacaggcacaatcggacccacccataactttgagccgcctcattacgatggcatcgaatgtttggcaattcaaggggacattctgttcagcggatcaagagacaacggcattaagaagtgggacctggaccagcaagagctgatccaacagatcccaaacgcccacaaagactgggtatgcgctttagcattcatccccggtcggcccatgctcctcagcgcctgtcgggctggagtgatcaaagtctggaacgtcgacaactttactccaattggtgagattaagggacacgactcccctatcaacgcgatctgtaccaacgccaagcatatttttaccgcctcatctgattgccgagtgaaattgtggaactatgttccaggtcttaccccatgcctaccaaggcgcgttcttgcaataaaggggagagccactactttgccttag

SEQ ID NO: 121645 - DNA, 4872 bp, synthetic construct
  misc_feature 1..4872: note = Description of Artificial Sequence: Synthetic coding sequence
  source 1..4872: mol_type = other DNA
atggctggtcagggggattgctgtgtcaaggtagcagtgaggatccgcccccagctgagcaaggagaaaattgaggggtgtcacatttgcacaagtgtgacccctggggaaccccaagtcctgttaggcaaggataaggcttttacgtatgactttgtctttgatctggatacttggcaggagcagatctactccacatgcgtgtctaaactgatcgaaggttgtttcgagggatataacgcaacagtcctcgcctacggccagactggcgctgggaaaacctacacaatggggaccgggttcgacatggccaccagcgaggaggagcagggaattatcccacgcgcgatcgcacacttgtttggaggaatcgcagagcgaaagagacgtgctcaggaacagggggtggccggacctgagttcaaagttagtgcccaatttctagagctgtataatgaagaaattctcgatctgtttgactccactagagatcccgacactcgtcaccgacggtcaaatatcaagattcacgaggatgctaatggaggcatttataccaccggggtcacctcacggctaattcactcccaggaggagcttattcaatgtctgaagcagggcgctctgagtcggaccacagcctctacgcagatgaatgttcagagctctcgatctcacgccattttcacaatccacctctgccaaatgcgaatgtgcactcaacccgacctcgtgaatgaggcagtgaccggtctgcccgacggcaccccgccgtcttccgagtatgagaccttgactgccaagttccactttgttgatctggctgggagcgaacgtctcaagaggaccggggccacaggtgagagggccaaggaggggataagcattaactgtggactgctcgccctcggcaatgttatatctgctctgggggatcagtcaaagaaggtggtgcatgtaccataccgcgactccaagttaacccgcctcttgcaggactctctcggtggcaacagccagaccattatgatcgcttgcgtgtcgcccagcgaccgagacttcatggagaccctgaatactctcaagtacgcgaaccgggccagaaatataaagaacaaggtggtcgtaaaccaggacaagacaagccagcagatatctgctctgagagcggaaattgctcgtctgcaaatggagctgatggagtacaaagccggaaagcgggtgataggtgaagatggggcggagggatatagtgacctcttccgtgaaaatgctatgctacagaaggaaaatggggcattaagactgcgggtgaaggcaatgcaggaggcgatagatgctatcaacaaccgcgtcacgcagttgatgtcccaggaagcaaatctgctccttgccaaggccggcgatgggaacgaagcaattggcgccctcatacagaactacatccgagagattgaggaactacggacgaagcttcttgagagtgaagctatgaacgagagtctcaggcgcagcttgagcagagcgtcagcacgctccccatactcattgggagcctctcctgcagctccagcttttggaggcagccctgcctccagcatggaagacgcttcggaagtcatcagacgggcgaaacaggatctagagcggttaaagaaaaaggaggttcggcagcgacgcaagagccccgaaaaggaggcgtttaagaaacgcgcaaagctgcaacaggaaaatagcgaggagacggacgagaacgaggccgaggaggaagaggaagagagagacgaaagcggttgcgaggaagaggagggccgcgaggatgaagacgaggatagcggttccgaggagagccttgtagactccgacagcgatccggaggaaaaggaggtgaactttcaggcggatcttgcggacttgacctgtgaaattgagattaagcaaaaacttatagacgaattggaaaatagtcagagaaggctgcagactcttaaacatcagtatgaagaaaagctcattctgctgcagaacaagatccgcgacacacagctcgagcgggaccgggtcctgcagaacctctctaccatggagtgctacaccgaggagaaagccaataaaattaaagccgattatgagaaacgattgcgtgagatgaatagggacttacagaagctgcaggccgcccaaaaggagcacgccagactgcttaaaaaccagtcacgctacgaacgtgaactgaagaaactgcaggcagaagttgccgaaatgaagaaagccaaggtcgcactgatgaaacagatgagagaagagcagcagcgcagaaggctggtcgagactaaaaggaatagagagattgcccagcttaaaaaggaacagcgccgccaagaatttcaaatccgagcgctcgaaagtcaaaaacgacaacaggagatggtgttgaggcggaaaacacaggaggtttcagccctccggcggctggcgaaacctatgtctgagcgggtggccggccgcgctggcctgaagcctccaatgctggacagcggggctgaggtcagtgcatccaccacatctagcgaggctgaaagtggcgcccgcagcgttagcagcatcgtccgacagtggaaccggaaaattaatcactttctgggagaccatcccgcccctactgttaatggtactcgccctgcaagaaaaaaatttcagaagaagggcgcatcacagtccttctcaaaagcggcacgcctgaagtggcagtcactggaacggcggatcatagatatcgtcatgcagagaatgacgatagtcaacttggaggctgacatggagcgtcttattaaaaagagggaggagctgttcctgctccaagaagctctgcgccgaaagagggaacgtctgcaggccgaatcgccagaggaggaaaagggcctacaggagctggcggaggagattgaagtgctcgcagccaacattgattacattaacgacggaattacagactgccaggctacaatcgtgcagctggaagagactaaagaagaactggacagcaccgacaccagtgtcgtcatctcaagttgctcactggcagaagcccggttacttctcgacaacttcctgaaggcaagcatcgacaaaggcttacaggtggcacagaaagaagctcagatacgcctgttggaaggccgtctgcgccagacagatatggccggcagctcccagaatcatttgctcctggatgcccttcgagaaaaggccgaggcacacccagaactgcaggccctgatctataatgttcagcaagaaaacggttacgcaagcactgacgaggagatttccgagttctccgaaggcagcttcagccagagtttcacgatgaagggatctacctcacatgacgacttcaagtttaaaagcgaacccaagctgtccgctcaaatgaaggccgtttccgccgagtgcctcgggccgccactcgacattagtaccaagaacatcaccaaatcactagcatctctcgtcgaaattaaggaagatggggtcggctttagtgtgcgggacccctactacagagatcgggtcagcaggaccgtgtcactccctacgagaggatctaccttccctaggcagtccagggctaccgagactagccctttgactagaaggaaatcctatgaccggggccagcccatccgtagtaccgatgtgggctttacccctccctcctcacctccaaccaggcctaggaacgacaggaatgtattttcgcgcctgacatccaatcagtcacaggggagtgccctggataaatcagatgacagtgactcttctctgagcgaagtcttaagagggatcatatcacctgttggaggcgccaagggggctcgcaccgcgccactgcagtgtgtatctatggcagagggccatacaaagcccatcctgtgtttggatgccactgacgagctactgttcaccggctccaaagacagaagttgtaaaatgtggaaccttgtgactggccaagagatcgccgccctgaagggccaccccaataacgtcgtgtcaataaaatactgctcacactctggcctcgtgttctctgtgagcactagttacataaaggtgtgggacattcgcgactctgcgaagtgtatacggacactaacctcatctgggcaagtaatctcgggggacgcctgcgccgcaactagcacccgggctataacttccgcacagggagaacaccagatcaatcagatcgcactgtccccttccggaactatgctctatgcggcttcgggaaatgctgttcggatctgggagcttagtcgattccagcctgtggggaagctgactggtcacattggcccagtgatgtgtctgactgtgactcagacagcttcccagcacgatctggtggtgaccgggtctaaggatcactatgtgaaaatgttcgaactgggtgagtgcgttacaggaaccatcgggccaacgcacaacttcgaaccgccacattatgacggcatagagtgcctggccattcagggtgatattctgtttagcggctcaagggacaacggcatcaaaaaatgggatctggaccagcaggaactgatacagcaaatccctaacgctcacaaggattgggtgtgtgctctggcgttcatacccgggcggcccatgctcttaagtgcatgccgggccggggtgataaaggtatggaacgttgacaactttacccctattggggagataaaggggcatgactcacccataaatgccatttgcaccaacgctaagcacatctttaccgccagctcggatttgaccgtgaagttttggtcggtacgcaggctcccgcactcaggtcccccttag

SEQ ID NO: 121646 - DNA, 5007 bp, synthetic construct
  misc_feature 1..5007: note = Description of Artificial Sequence: Synthetic coding sequence
  source 1..5007: mol_type = other DNA
atggcaggccagggtgactgctgtgtcaaggtggcggtccgcatacgaccacagctgagcaaggagaaaatcgaaggctgccacatctgcaccagcgtgactcctggggaaccacaagttctgctcgggaaggacaaggcctttacatacgattttgtgttcgacctggacacctggcaagagcagatttactcgacatgcgtgagtaagctgatcgaaggctgctttgagggatataacgccacagtactggcgtacggccagacaggcgctgggaagacctatacaatgggcacaggatttgacatggccacctcggaagaggaacaaggtatcatcccccgcgctatagcacatctctttggagggatcgccgaacggaagcgacgcgcacaggagcaaggtgtggccgggccagagtttaaggttagtgctcagtttctagagctctataacgaggaaattctcgatctgtttgattcaacacgggaccccgatacacggcatcggcggagtaatattaagattcacgaagatgcaaatggcggaatctacactaccggagtgacgagtcggctgattcactcccaggaagaactcattcagtgtctcaagcagggcgccctgagccggaccaccgcatctacacagatgaacgtccaatcatcccgcagccatgcaatcttcacaatccatctgtgccagatgcgcatgtgcacccagccagacctggtaaatgaggcagttaccggcctccctgatggcactcctccctcctctgagtacgaaacattgacggccaagttccacttcgtggatctggccgggagcgagcgcttaaagaggactggcgctacgggggagagggccaaggaagggatttccattaattgtggactactagctttggggaatgttatttcagcgctgggagaccagtcgaagaaagtggtacacgtaccttatagagatagcaagttgacccggctgctgcaggactcgttaggcggcaattcccaaacaatcatgattgcatgtgtgtcccctagcgacagggactttatggaaaccctaaatactctgaagtacgccaacagagccagaaacatcaagaacaaagtggttgtgaatcaggacaagacgtctcaacagatctctgctctgcgggccgagatcgcccggttacagatggaactcatggagtataaggctggcaaaagggtcataggtgaagacggggcggagggatactccgaccttttccgcgagaacgccatgcttcagaaggagaatggagcattaaggctgagagtcaaagccatgcaggaggccattgatgcgataaacaaccgcgtaactcagttgatgtctcaggaggcaaatctcttattagccaaggcaggcgatggcaacgaagcaattggcgctttgattcagaattatattagagagatcgaagagctccgcacaaagctactggagagcgaagccatgaacgagtctctgcgcaggtcccttagtagggcatccgccaggtcaccgtactcgctgggggcgtctcctgccgcccctgctttcgggggctcaccggcctcatcaatggaggatgcatcagaggtgattagaagagctaaacaggacttggagagattaaagaagaaagaggtgcgacagcgcaggaaatcccccgaaaaggaggcattcaaaaaacgggcgaaattacagcaggagaatagcgaagaaaccgacgagaacgaggcagaggaggaagaagaggagcgggacgagagcggctgcgaggaggaggaaggaagagaagatgaagacgaggactccggatctgaggaatccctggtcgattcagactccgatcccgaggaaaaggaagtaaactttcaagctgatctggcggatctgacctgcgagattgaaattaagcagaaattgattgatgaactggaaaattcccagaggcggcttcaaaccctcaaacaccaatatgaggagaaactaattctgctgcaaaacaaaatccgcgacacccagctggaacgggatagagtactgcagaatctatccaccatggaatgctatactgaggagaaggctaataaaatcaaggcggactatgagaaaaggctgcgggaaatgaacagggacttacagaagctccaggcagcacaaaaggaacatgcccggctgcttaaaaatcagagtaggtacgaacgtgaactgaagaaactccaggccgaagtggccgagatgaagaaagcaaaggtggctctaatgaaacagatgcgtgaagagcagcagcgtcgccgtctggttgaaaccaagaggaatcgagaaatcgcacaactgaaaaaagaacagcgccgtcaggagttccagattagggcgctagagtcccagaaacgccagcaggagatggtgcttcgcagaaaaacacaggaggtcagcgccttaagacgcctggccaaaccaatgagtgagagggtggccgggagagccggtctcaagccgccaatgctcgatagcggggctgaggtcagtgcctcaacaacttcaagtgaagccgagtctggcgcaaggagtgtgtcctctatagtgcgtcagtggaatcggaagatcaaccacttcctcggcgaccatccagctcctaccgtcaatggtactcggccggcacgcaaaaaattccagaagaaaggagcctctcagtctttcagtaaagccgccaggctgaagtggcaatcgttggagcgtaggattattgacatcgtgatgcaacggatgactatcgttaacctcgaagcagatatggagagattgattaaaaaacgggaggaactcttcctcctgcaggaggcactgcgtagaaaacgggagagactgcaggcagagagtccggaagaagagaaaggtctgcaagaacttgccgaggaaatcgaggtgttggcagcgaacatcgattatattaatgacggcatcaccgattgccaggctacaattgtgcaactggaagagaccaaagaggagttggatagcacagacacgtctgttgtgatttcctcatgctcactggcagaggcccgcctgctgctggataactttctaaaggcctcaatagacaaaggtctgcaagtggcccagaaagaagctcagatccggcttctcgagggacggctccggcaaaccgacatggcaggctcctcccagaaccacttgctgcttgacgccctcagggaaaaggctgaggctcaccccgaacttcaggccctaatctataatgtccagcaggaaaatgggtacgcatctacggatgaggagatctccgaattttccgagggctctttctcccagtcctttacaatgaaaggctcgacctcccacgacgatttcaaattcaaaagtgagccaaagttgtccgcacagatgaaagctgtatcggccgagtgcctggggccaccactggatattagcacgaaaaacattaccaaaagcctggcttccctggtcgagattaaagaggacggtgtggggttctcggtgcgggatccctactatcgagatcgggtgtcccgcaccgtgtctttgccaaccagaggcagcacctttcccaggcagtctagagccacggaaacaagcccattaactaggcgaaagtcctacgatagaggacagccaataaggtcaacggacgtcggttttactccaccctcatccccccccacgcgcccccggaacgacagaaatgtgttcagccgcttgacatcgaatcagtcccagggaagtgcattggacaaatccgacgactccgatagtagcctttctgaagttctgcgagggattatctcgcctgtgggtggcgccaagggtgccagaaccgcacctctgcagtgcgtgtcaatggcggaagggcacacaaagccaattctgtgtcttgatgccactgacgaacttctgttcaccggctctaaagatagatcgtgcaaaatgtggaacttggtgaccggccaggagatcgccgccttaaagggacacccaaacaacgtcgtatctatcaaatattgttcacactccggcctggtgtttagcgtgtctacttcttatatcaaagtttgggatattcgtgatagtgcgaaatgtatccggacactgacctcatccggacaggtcatatctggggacgcatgtgcagcgacatcaacgcgggcaattacttccgcccagggcgagcatcagatcaaccagatcgcactttccccctcaggcaccatgctgtacgcagcatccggaaatgcggtgcggatctgggagctaagtcggttccaacccgtggggaaactgacgggccatatcggccctgtgatgtgcctgaccgtcacccagaccgccagtcaacacgacctggtagtcaccggtagtaaagatcactacgttaagatgtttgaactgggggaatgcgttacaggtaccatcggaccaactcataacttcgagcctcctcactatgatggaatcgaatgtttggccatccaaggagatattctcttttctggctcacgggataacgggatcaagaagtgggacctggaccagcaggaactgattcagcagatccccaacgcacacaaggattgggtgtgcgccttggccttcatcccgggtcgcccgatgctgctgagcgcctgtcgggctggagtgattaaggtgtggaatgtcgataattttacaccaattggggagataaagggtcacgactctccgattaatgccatctgcacaaatgcaaaacacatatttaccgcttcatcagactgcagagtaaaattgtggaattatgtccccggcctgaccccttgcctgcctaggcgggtgctggctatcaaaggaagggccacgacttgccctgatccaccacagctgtccctgagtcctttaagtttcttccccagtttcttgttccccctcttcccccactttgacctgagctgcttcctcacctag

SEQ ID NO: 121647 - DNA, 1998 bp, synthetic construct
  misc_feature 1..1998: note = Description of Artificial Sequence: Synthetic coding sequence
  source 1..1998: mol_type = other DNA
atggccgctggtgggtcgacccaacagaggcgaagggaaatggctgccgcttcagcggcagccatctcaggcgccggccgatgtagactttctaagataggtgccacgagaaggccccctcccgccagagttagagtggcggtgcgcctcaggccctttgtcgacgggaccgccggggcctcagacccaccctgtgttagggggatggacagttgctccctggagatcgcgaactggcgaaaccatcaggaaaccctcaagtatcagtttgacgccttctacggcgaacgtagtacacaacaggatatttacgccggcagcgtgcagccaatcctccgccatctgctggagggacagaacgctagtgtcctcgcctacggccccaccggcgctggcaaaacacacactatgctgggaagccctgaacagcccggggtgatcccccgcgcactaatggacctcctgcagctgacacgcgaagaaggggcagagggccgaccctgggcgctgtccgtaacaatgtcctaccttgagatctaccaagagaaagtcctcgatctcctggacccagcatccggcgacttagtgataagagaagattgtaggggtaacatcctcattcctggccttagtcaaaagccaatctctagttttgcagactttgagaggcatttccttcccgcctccaggaacagaacggtgggagctactaggctgaatcagaggtcgagcagaagccacgcagttctgctggtaaaagtcgaccagagggaacggttggctccattccgccaacgtgaaggaaaactctatctgatagatcttgctggttctgaggacaaccggcggactggcaacaaaggtctgcgcctcaaagagagcggcgcaatcaacacaagtctgttcgtgttgggcaaagtggtcgacgcgctgaatcagggcctccctcgcgtgccctatcgcgattctaagctcacaaggctcctgcaggactctctggggggtagtgctcatagtatcctgatagccaatattgcgcctgagagacggttctacctggatacggtatcagcccttaacttcgccgctagaagcaaagaagtcataaaccgcccctttaccaacgagtcactgcaaccacacgcccttggccccgtaaagctgtcccaaaaagagctgcttggccctccagaagcaaagagagcccgcgggccagaggaggaggagatagggtcaccggaacctatggctgctccagcctctgccagccagaagcttagccctcttcaaaagctaagttctatggatcccgcgatgctagagagattactgtccctggatagattgcttgcgtcacagggctcacagggtgcaccactgcttagcacacctaaacgtgagaggatggtcctgatgaagacagtggaggagaaggatctggaaatcgaaagattaaagaccaaacagaaagagctggaggccaagatgctggctcaaaaagccgaagagaaagaaaatcactgcccaaccatgctgagacccctctcccatcggaccgttactggcgctaaacctttgaaaaaggcggtggtcatgccattgcagctgatccaggaacaagccgcctccccaaatgctgagatacatatcctgaagaataaaggtagaaagaggaaattggagtccctggatgctctggaaccagaagagaaggctgaagattgctgggagctgcaaatcagccccgagttactggctcacggcagacaaaaaatactggacctgttgaatgaaggaagtgcccgagacctgaggtctctccagcgtatcggaccaaaaaaggcgcagttgatcgtcgggtggagagagctccacgggcccttctctcaggtagaggatctggagagagtcgagggcatcacaggcaaacaaatggagagcttcctgaaggccaacattctgggcttggccgctggtcagaggtgtggggcctcctag

SEQ ID NO: 121648 - DNA, 219 bp, synthetic construct
  misc_feature 1..219: note = Description of Artificial Sequence: Synthetic coding sequence
  source 1..219: mol_type = other DNA
atgctggcccaaaaagctgaggagaaagaaaaccattgcccgactatgcttcgacccctatcgcacaggacagtgacgggtgcgaaacctctgaaaaaggctgttgtgatgcctttgcagcttattcaggaacaagctgcttcccctaatgctgaaatccacatcctcaaaaataaaggtcgaaaaaggaaaggcgcaaacattactaccgggtactag

SEQ ID NO: 121649 - DNA, 1794 bp, synthetic construct
  misc_feature 1..1794: note = Description of Artificial Sequence: Synthetic coding sequence
  source 1..1794: mol_type = other DNA
atggacagctgcagtcttgagatcgccaattggcggaatcaccaagaaacattaaagtaccagtttgatgctttttacggagagagatccacccaacaagatatttacgccggctccgtgcaacccatactgcggcacctgttagaaggccagaacgctagtgtcctcgcttatggcccaaccggtgctggcaagacacatacaatgcttggcagccctgagcagccaggtgtgattcctcgggctctcatggacctgctgcaactgaccagagaggagggcgctgagggacgaccatgggccttgagcgtaaccatgagttacctggaaatctaccaggaaaaagtcttggacctgctggatcctgcgtccggagacctggtcatacgggaggattgcaggggtaatatccttatacctggcttgtcccaaaaaccaattagctcttttgccgattttgaaaggcactttcttcccgccagtcgtaacaggaccgtgggtgctacacggctcaaccaacgctccagcagaagccatgccgttcttctagttaaggttgaccagagggagcgcctggctcccttccggcagcgtgagggcaagctatacctgatagatctggctggatctgaggataaccgcagaacaggtaataaagggctacgcctgaaagagagcggggcaataaacacctcactgttcgtgcttggtaaggtcgttgacgccctaaaccagggattgccccgcgtgccgtatagagactcaaaactcactagattgctgcaagactcactggggggatcagcacatagcatattgattgccaacatagcccctgagaggcgcttttacctggacaccgttagcgctctgaacttcgcagcccgcagcaaggaggtcatcaatagacccttcactaatgaatcattgcagcctcatgctctgggccctgtaaaactgagtcagaaggaactcctcgggccccctgaggccaagagagccaggggccctgaggaggaggagataggttcgcctgaaccgatggctgcacccgccagtgcttcccagaagctgagccctttgcagaaactctcttccatggatcctgccatgctcgagagactgctgtctctggatcggctgcttgcgtcacaggggtcacagggggcacccctgctgagtacccctaaaagggagaggatggtgctgatgaaaaccgtcgaagagaaggacctggaaatagaaagactgaaaaccaaacaaaaagaactggaggctaagatgctggcccaaaaggccgaggagaaagaaaaccactgtcccacaatgctcaggccgctgtctcatagaaccgtcaccggagctaagccactcaaaaaagccgtggtgatgccactccagctgatccaggagcaggccgcttctccgaacgccgagatacatattctgaaaaataaaggccggaagaggaaactcgaaagcctggacgccctcgaacctgaggagaaggcggaagattgctgggagctgcaaatttcccccgagctgctggcacacggcagacagaaaatcttggatctgttgaacgaaggtagcgctagggatctgagaagcctgcaacgcatcgggccaaagaaagcccaactcatagtgggttggcgcgaactgcacggccccttcagccaggtggaggacctggaacgagtggaaggcataacagggaaacaaatggaatcgttccttaaggccaatattttagggctggccgctggacagaggtgtggagccagctag

SEQ ID NO: 121650 - DNA, 1794 bp, synthetic construct
  misc_feature 1..1794: note = Description of Artificial Sequence: Synthetic coding sequence
  source 1..1794: mol_type = other DNA
atggacagttgtagtcttgagatagccaactggcgtaaccaccaggaaactctgaagtatcagtttgacgctttctatggggaacgatcaacccagcaagacatctacgccggttccgtgcagccaattttgcgacatttgctagaaggacagaacgcctctgtgctcgcgtatggacccacgggtgctggcaagacccacaccatgctgggctcgcccgagcagcctggggttattcctcgagccctgatggatctgttacaactgactagagaggagggcgcagagggccggccttgggcgctgtccgtgactatgagctatctggaaatctaccaggaaaaggtgctggacctccttgatcccgcaagtggggatttagttatcagggaggattgcagaggtaatattctgatcccaggtctctctcaaaaaccaatctctagtttcgccgacttcgagagacactttctccctgccagtcggaatcggaccgtgggcgcgacacggcttaaccaacggtcatcccggtcccacgccgtgttgctcgtcaaagtggatcagagagagaggttggcgcctttccggcagcgggaagggaaattatacctcattgacctggctggctccgaagataatcgtaggacgggtaacaagggactcagacttaaggagtccggcgccatcaatacatcattgttcgtgctgggcaaggtggttgacgcgctcaaccaagggctcccacgcgtgccatacagagatagtaagctgacccgtttactccaagactcactgggtgggtcagctcattccatcctgattgccaatattgcacctgagcggcgtttttacctggatactgtgagtgccctcaattttgctgccaggtcaaaggaggtgatcaatagaccttttaccaatgagtctctgcagccccacgccctgggtcctgtgaaactctctcagaaagaactcttgggtccccccgaggcaaagagagctcgcggacccgaagaggaggaaattggctccccagagccaatggctgcccctgcaagtgcgtcacagaagctgtcaccactgcagaaattgtcttcgatggatccggctatgcttgagaggcttttgtccctggacagactgctggctagccagggttcgcaaggcgctccattgctgagcacacccaaacgggaaagaatggtgctcatgaagaccgtggaggagaaggatctcgaaattgaaagactgaagactaaacagaaagagcttgaggcaaagatgctggcccagaaagcggaggagaaggagaatcactgtccgacaatgctccgcccactctcccacaggaccgtgactggcgccaagccactgaagaaggctgttgtgatgcctcttcagctgattcaggagcaggcagcgtcaccaaacgcggagatacacatcctgaagaataaaggacggaagaggaaactcgagagccttgatgctctggaacctgaagagaaagccgaagattgctgggaactgcagatcagcccagaactgttagcccatggccgccaaaagatcctagacttattgaatgaggggtccgcacgcgacctgcggagcctgcagagaatcggtcctaagaaggcgcagttgatcgtcgggtggcgagaactacacggacctttttcacaggtggaagacctggagcgggtggagggcatcaccggaaaacaaatggaaagctttctcaaagccaatatactgggcctagcagccgggcaaaggtgcggcgcatcgtag

SEQ ID NO: 121651 - DNA, 2883 bp, synthetic construct
  misc_feature 1..2883: note = Description of Artificial Sequence: Synthetic coding sequence
  source 1..2883: mol_type = other DNA
atgaagtctgctagggctaagacaccacgaaaacctaccgtgaagaagggctcacagaccaacctcaaagaccccgtcggagtatattgcagggtccggcctctgggatttcccgaccaggaatgttgtattgaagtgattaacaatactaccgttcagcttcacacacctgagggatatcgcctgaatcggaacggtgattataaagaaacgcagtactcattcaagcaagtgttcggcacacatactacacagaaagaattattcgatgttgtcgcaaatcctctcgtaaatgacctgattcatggcaagaacgggctcttatttacctatggcgttaccgggtcaggaaagacccacactatgacaggcagtcctggcgaaggtggcttattgccaagatgcctggacatgatttttaatagcattggcagctttcaggctaaaaggtatgtcttcaagagcaacgacaggaactccatggatatccagtgtgaggtggacgccctcctcgagcgccagaaaagggaagctatgcctaacccaaaaaccagcagctctaagaggcaggtggatccagaatttgccgacatgatcacggtccaggagttttgcaaggccgaggaggttgacgaagacagcgtgtatggtgtgttcgtaagctacatcgagatctataacaattatatctatgacctcctggaagaggtgcccttcgaccccattaagccaaaacctcctcagagcaaattgctgagagaagataaaaaccataatatgtatgtggcaggttgtactgaggtcgaagttaagtcgacggaggaggccttcgaggtgttttggaggggacagaaaaaacgtcgaatcgccaatactcatctcaatcgtgaaagtagtcggtctcactcagtgttcaacatcaagcttgtgcaggccccgctggacgccgacggcgataatgtgctgcaggagaaagagcagatcaccatttcccagcttagccttgtcgacctggcaggatctgagcgcactaatcgcacaagggcagaaggcaaccggctgcgcgaggccggaaacatcaaccagtccttgatgacactccgaacttgcatggacgtattgagggagaatcagatgtatggtaccaataagatggtcccctacagggacagtaagctgacacatctgttcaagaactactttgatggggagggaaaggtgcgcatgatcgtgtgtgtcaacccgaaggcagaggactacgaagagaatctgcaggttatgagattcgctgaggttacccaggaggtcgaagtggcgcgcccagtcgataaggccatatgcggactgacccccggccgacggtatcggaaccagcctagagggcctgtcggcaatgagcctctcgtcactgacgtggttcttcagtcatttcctccgttgccatcgtgcgagatactggacattaacgatgagcagaccctgccccgcctgatcgaagcgcttgaaaaacgtcataatttaaggcagatgatgatcgatgagttcaacaagcagtccaacgcttttaaggcactgctgcaagagttcgataacgctgtcctcagcaaggagaatcacatgcagggcaaattaaatgagaaggaaaagatgatttcaggacaaaaactggagatagagagactcgagaagaagaataaaacgctggaatacaagattgaaatcctggagaagaccactaccatctatgaggaggataagcgcaatctgcagcaggaattggagacccagaaccagaagcttcaacgccagttttctgacaaacgccgcttggaggcacgactccagggcatggtcacagagaccacaatgaaatgggaaaaagaatgtgaacgtagggtagccgctaaacagctggaaatgcagaataagttatgggtgaaggatgaaaaactaaagcaacttaaggccattgtgacagagccgaagacagaaaaaccagagcgcccaagccgggaaagagatagggagaaagtgactcaaagatctgtgtcaccttcgccggttccattatcatccaactacattgctcagataagcaacggccagcaactcatgtctcaacctcagcttcataggcgaagtaatagttgctcctccatttccgtggctagttgcatttcagagtgggaacaaaaaatccccacatacaatactccactcaaagtgacatctattgcccgccggcgccagcaggagcccggacaatccaagacatgcatagtctccgaccggcgtcgcggtatgtactggacagaggggagggaagttgttcctaccttccggaacgaaattgagattgaggaagaccactgtgggagactcttgtttcaaccagatcagaatgccccccccattagactgcgccatcggcgtagtcggtcagcgggagaccgctgggtggatcataagccagcctcaaacatgcaaacggagaccgtgatgcaaccccatgtaccacacgccatcactgtgagcgtggccaatgagaaggctctcgctaagtgtgagaaatacatgcttactcatcaggaattagcttccgatggagaaatcgagacaaaactcattaagggggacatttataaaaccaggggaggaggccagtctgtccagttcactgacatagagactttgaagcaggagtcacctaatgggtcgcgtaagcgaagatcgagcacagtagcccccgcgcagcctgatggggcagagtccgaatggactgacgtggagaccaggtgcagcgttgcagtggaaatgagagctgggtctcagttggggccagggtaccagcatcacgcacaacccaaacgtaagaaaccgtag

SEQ ID NO: 121652 - DNA, 2022 bp, synthetic construct
  misc_feature 1..2022: note = Description of Artificial Sequence: Synthetic coding sequence
  source 1..2022: mol_type = other DNA
atgataaccgtgcaggaattctgtaaggcagaggaagtggacgaggattccgtgtatggggtgtttgtttcttacattgaaatctacaacaactacatatacgatctcctggaagaagtgccttttgatccaattaaacccaagtggaattcatgctcgacaccaatgcgtaacaccgacttcgtacctcctcagagcaaactcctgcgtgaggataaaaaccataacatgtacgtggccggctgcacggaggtggaagttaaaagcacagaggaggcatttgaggttttctggcgaggacagaagaagcgccggattgcaaacacacacttgaatcgggaatcttctaggtcacactctgtctttaatattaagctggtccaagccccgctcgacgctgatggcgacaacgtgctgcaagaaaaagagcagataacaataagccagctcagcctcgtggacctggcaggtagcgagcgtaccaatcgtacgcgtgccgaaggcaatcgcctccgagaagcaggaaatatcaatcagagccttatgacgctgagaacctgcatggacgtacttagggagaatcagatgtatggtacgaataaaatggtgccttaccgagatagcaagctcacgcacttatttaagaactattttgacggagaggggaaggtgagaatgattgtgtgcgttaaccctaaggccgaagattatgaggaaaacctccaggtgatgcgctttgccgaggtgactcaggaggtcgaggtcgccaggcctgtggacaaagcaatctgtggtctgacaccaggcaggcgctaccggaaccaacctcgcggccccgtgggtaatgaacctctagtcactgacgtggtgctgcagtcattcccccccctgccatcttgcgagattctcgacattaatgatgagcaaacactgcccagactgattgaggctctggaaaagcgtcataatttgcggcaaatgatgatagatgagtttaataaacagagtaacgcgtttaaagctctgcttcaggaatttgacaatgccgtacttagcaaggaaaatcacatgcagggaaaattgaacgaaaaagagaaaatgatttctggtcagaagctggagattgagaggcttgagaagaagaataagacgcttgagtacaaaattgaaatcctcgagaagacaacaactatttacgaggaggacaaacgtaacctgcagcaggagctcgagacccaaaatcagaagctgcagcgccagttctcagacaaaaggcgactggaagcccgcctacaggggatggttacggagaccacaatgaagtgggagaaggaatgcgagaggcgggtagcagctaagcaattggagatgcagaacaaactgtgggtcaaggacgagaagctgaaacagctcaaagcgattgtcaccgaaccaaaaaccgagaagccggaacgcccgagcagggagcgcgacagggaaaaagttacccagaggtccgtatccccctctcctgtaccattgttgtttcagccggatcaaaatgcaccaccaatacggctgcggcaccgaaggagcaggagcgccggcgatagatgggtcgatcacaaaccggcctctaatatgcagactgagactgttatgcaacctcatgtgcctcatgcaatcactgtgtcagtcgcgaacgaaaaggcacttgctaagtgtgaaaaatacatgttgacgcatcaagaactggcctccgacggcgaaattgagacgaaattgattaaaggagacatctataaaaccaggggtgggggccagagtgtccagttcacggacatcgagacattaaaacaggaaagccccaacggcagtaggaagcgcagaagctctactgtggcccccgcacagcccgacggggccgagagcgagtggaccgatgttgagacgagatgttctgtagctgtcgaaatgcgggccggcagccagctaggccccgggtaccagcaccacgcccagccgaagcgaaaaaaaccgtag

SEQ ID NO: 121653 - DNA, 2022 bp, synthetic construct
  misc_feature 1..2022: note = Description of Artificial Sequence: Synthetic coding sequence
  source 1..2022: mol_type = other DNA
atgatcactgtgcaggagttttgcaaggcggaggaggtcgacgaggactccgtctacggtgtattcgtgtcttatatagagatctataacaattatatatacgatctgttggaagaagtcccgttcgatcccattaagcccaaatggaacagctgttccacccccatgaggaatacggatttcgtgcctccgcaatcaaagctgttaagagaagataagaatcacaacatgtacgtggccggatgcacagaagtggaggtgaagagcacagaggaagccttcgaggtgttctggcgcggacagaagaaacgaaggatcgccaacactcacttgaaccgggaaagcagccgaagccactccgtcttcaatattaagctcgtccaggctccactggacgctgacggggacaatgtgcttcaggaaaaagagcagataactatttcccagctctctcttgtggacctcgccgggtccgagcggactaaccgaacacgcgctgagggtaatcgtctccgcgaggccggaaacattaatcagtccctaatgacactcagaacttgcatggacgtgttaagagaaaatcagatgtacgggaccaataaaatggtgccctatcgggatagcaaattaactcatctatttaaaaattatttcgatggggagggaaaggtgcggatgattgtgtgcgtgaaccccaaggctgaggactatgaggagaatttgcaggtcatgcgcttcgctgaggtcacccaagaggtcgaggtcgctcgacctgtggacaaggccatctgtggcctgactcctggaagaagatatcgtaatcagccgagaggccccgtgggcaacgagcctctcgtgactgacgtggtgctgcagtctttcccccccctgccatcctgcgagattctagatatcaatgacgagcagactttgccccgcctaatcgaagccctggagaagagacacaacctccgtcagatgatgatcgacgagtttaacaagcaatcgaacgcttttaaggcattactgcaggaattcgataatgcggtattgagtaaggagaatcatatgcaggggaaactcaatgagaaagagaagatgatttccggacaaaagttggagatcgaaaggctggaaaaaaagaacaagactctggagtataagatcgagattctggaaaagacaacaacgatctatgaggaggacaaaaggaacttacaacaggaattggaaactcagaaccaaaaactacaaaggcagtttagcgacaaacgcaggctggaagcgcgattacaaggcatggttactgaaactactatgaagtgggagaaagaatgtgaacgccgagtcgcggccaaacagctcgaaatgcagaataagttgtgggttaaggacgagaaactgaagcaactcaaggcaattgtcaccgagccaaaaactgagaaaccagaacgtccgagcagggagagagacagagagaaggtgactcagaggagcgtgtcaccaagccctgttcctttactgttccaacctgaccaaaacgcccctccaattcgcctccgacatcggaggtctcgctccgccggggatcgttgggtcgaccataagccagcctccaatatgcagacagagaccgtaatgcagccgcacgtaccccatgctattactgtaagcgtggccaatgagaaggccctggccaagtgcgagaaatacatgctcacacaccaggaattggcctccgacggggagattgaaacaaagcttataaagggggacatctacaagacaagggggggcggccagtccgtccagttcaccgacatcgagaccttgaaacaggaaagtcccaatggctcccgcaaacgacggtctagcactgtggctcctgcacagccagatggtgctgaaagtgaatggaccgatgttgaaactaggtgctcagtcgctgtggaaatgagagctggatcacagttgggccctggttaccaacaccacgcgcaacccaagcgaaaaaagccatag

SEQ ID NO: 121654 - DNA, 2571 bp, synthetic construct
  misc_feature 1..2571: note = Description of Artificial Sequence: Synthetic coding sequence
  source 1..2571: mol_type = other DNA
atgaaaagcgcccgtgccaagacccccaggaagccaaccgtgaaaaagggctctcagactaatttaaaagatcccgtgggtgtctactgtagagtgagaccgttgggtttccctgatcaggagtgctgtatcgaagttatcaacaacacaactgtgcagcttcacacacccgaaggataccggctgaacagaaacggggactacaaggaaactcaatatagcttcaaacaagtgttcggtacacatacaacacagaaggaattgtttgatgtagtagctaaccccctggtgaacgatctcattcacggcaagaatggcctactgttcacctatggagtcacgggatcagggaagacccacaccatgactggaagcccgggagaaggtggactcctacctcgatgtctggacatgatctttaatagcattggctcatttcaggccaaacgctacgtctttaagagcaatgacaggaattcaatggacattcagtgtgaggtcgatgcgttactggaaaggcagaagagagaagcgatgccaaatcccaaaacaagctcatcgaagcgtcaggtggaccctgaatttgcagatatgattacagttcaggaattttgcaaagctgaagaagtggacgaagactctgtgtatggagtattcgtttcctacatcgagatctacaataattatatttacgacctgttagaggaggttccatttgaccctatcaaaccgaaaccgccccagtccaaactgctcagggaagataaaaatcacaatatgtatgtggcagggtgtaccgaggtcgaggtaaagagcactgaggaggcgttcgaggttttttggcggggacagaagaagagaaggattgcgaatacccacctgaatagggagagctctcggtctcattccgttttcaatatcaagctggtgcaagctccgctcgacgcagatggcgacaacgtgctgcaagaaaaggaacagattaccatttctcagctaagcctggtcgatctggctggttctgaacggacaaacagaacacgggccgaggggaaccgtctccgcgaggctggaaacattaaccagagcctcatgacactgcggacctgtatggatgtgctccgggaaaaccagatgtatggaactaataaaatggtgccgtacagagattccaagctcacccacttgtttaagaactattttgacggtgaaggcaaggttcgcatgattgtctgtgtgaatccaaaagccgaggactatgaggagaatctccaggtgatgcggtttgccgaggtcacacaggaggtggaggtggcccgccctgtggacaaggccatatgcgggctgactcctggcaggcgctaccgaaatcagcccagagggcccgtcgggaacgaacctctggtaactgacgtcgtcctacagagcttccccccactccctagctgcgagatcctagacatcaatgacgagcagactctgccgcgtctcattgaagccctcgagaagcggcacaaccttcggcagatgatgattgacgagtttaacaagcagtctaacgccttcaaggcactgctccaagagttcgacaatgccgtactctccaaggaaaaccatatgcagggcaagcttaatgagaaggaaaaaatgatttccggacaaaagctggagattgaacgcctcgagaagaaaaataaaactttggagtacaaaatagagatactggagaagaccacgacaatttacgaggaagataagcgaaatttgcagcaggaattggagacgcaaaatcagaaacttcaaaggcagttctctgataagcgacggctggaagcaaggcttcaggggatggtcactgaaactacaatgaagtgggagaaagagtgcgaaaggcgcgtggcagccaagcagctggagatgcagaacaagctgtgggtgaaggacgagaagcttaagcagctgaaagccatcgtgacagaaccgaaaaccgaaaaacctgaaagaccctcaagagagagagaccgggaaaaagttactcagcgctccgtcagtcctagcccggttcccttactgttccagcccgaccaaaacgccccaccaatccggctgcgccacaggcggagtcgaagtgcaggcgatcgttgggtggatcataaacctgcctcaaatatgcaaactgagactgtgatgcagccccacgtgccacatgccattacagtaagtgtggcaaacgaaaaggccctggccaaatgcgagaagtacatgctgactcatcaggagctggcctcggatggtgaaatcgagactaaactcattaaaggagacatctacaagaccaggggagggggtcagagtgtccaatttaccgatatcgagacactaaagcaggaatcccctaatgggagcagaaaaagacgcagctctaccgtggcccccgcccaacccgatggggcggaaagcgagtggacagatgtggagacccgctgctccgtggcggtcgagatgcgagcagggagtcaactggggccgggataccagcatcacgcacagcccaaaaggaagaagccatag

SEQ ID NO: 121655 - DNA, 2520 bp, synthetic construct
  misc_feature 1..2520: note = Description of Artificial Sequence: Synthetic coding sequence
  source 1..2520: mol_type = other DNA
atgaccggatctccaggcgaggggggtctgctccctagatgcctcgatatgatttttaattccatcggaagcttccaagccaaaagatatgtgtttaagtcaaacgatcggaatagcatggatattcagtgcgaggttgacgccttgctggaaagacagaaacgggaggccatgcccaatcctaagacttcctcaagcaagcgccaggtcgacccagagtttgcagacatgattaccgtgcaggagttctgtaaggccgaggaggtggatgaggatagtgtgtatggggtttttgtgtcgtacatcgagatctataacaattatatttatgatctcctggaagaagtcccattcgatcctattaagccaaagcccccgcagagcaagctgctgagggaggacaagaatcacaatatgtacgtagccggttgcactgaggttgaggtaaaaagcactgaggaagcgtttgaggtgttctggcggggacagaagaagaggcgcattgccaatacccatctgaatagggaaagcagtcgcagccatagtgtgttcaacattaagctggttcaggctcctcttgatgctgacggggacaacgtactgcaggaaaaggaacaaattacaataagccagctgtcactggtcgacttggccggttccgagcgcaccaaccgaactagggcagagggaaatcggctgcgagaggctggcaatattaaccaaagcctgatgaccttgagaacctgtatggacgtgcttagggagaaccaaatgtacggaacgaacaaaatggttccttacagagacagcaagctgacacaccttttcaagaactacttcgacggcgagggtaaagtgcggatgatagtttgcgtgaatcctaaggctgaggattacgaagaaaacctgcaagttatgcgcttcgcagaggtgacccaggaggtggaagtagcaagaccggtggataaagcaatttgcggtttaacacctggaaggcggtaccgcaaccaaccgcgtggccccgtcgggaatgagccccttgtcacggatgtggtgttacagtcttttccacccttaccatcttgtgagattttggacattaacgacgaacaaacattaccacggctaatcgaggccctcgagaaacgccacaatctgcggcaaatgatgatagatgagttcaataagcaatctaacgcattcaaagcgctgctgcaagaattcgataacgccgtcctgtctaaggagaaccatatgcagggcaaattgaatgagaaagagaagatgatctcagggcaaaagctggagatcgaaagactggaaaagaaaaacaagaccctcgaatacaagatcgaaatcctagagaaaaccactacaatatatgaggaggataaaagaaacctgcagcaggaattagaaacacaaaaccaaaagctgcaaaggcagtttagcgataaaaggcgtttagaggcaagacttcagggaatggtcacagaaaccacaatgaagtgggagaaggaatgtgaaagacgggttgccgcaaagcagctcgaaatgcagaacaaactgtgggtgaaagacgagaagctgaagcagctgaaggctatcgtcactgagcccaaaacggagaaaccggaacgcccttccagggagagggatcgcgaaaaagttacccagcgaagtgtatctccatccccagttcctctgtcttcaaactacatagctcagattagcaacggccagcagttgatgagccagcctcaactgcataggcgctctaactcatgctcttctatcagcgtggccagttgtatttcggaatgggagcaaaagatcccaacatacaacacccccctcaaggtaaccagcatcgccagacggaggcagcaggagccgggacaatctaagacgtgcattgtgtcagaccgtcgccgtgggatgtattggactgagggacgagaggtggtgccgacattccgcaacgaaatcgaaatcgaggaggaccattgcggacggctgttgttccagcctgaccaaaacgcaccccccattcggctgcgtcaccgaaggtccaggagcgctggtgacagatgggtggaccataagccagcttccaacatgcaaacagagaccgtgatgcagccccatgtcccgcacgctatcaccgtgtcggtggcaaacgaaaaagcgctggcaaaatgcgagaaatatatgctcacgcaccaagaacttgcaagcgatggggagattgagacgaagctgatcaaaggcgacatttataagacgcgaggcggcgggcaatcagtgcagttcaccgatattgaaaccctgaaacaggagagcccgaacggcagcagaaagagacggtcgtcaacagtcgcacccgcacagccagatggcgctgaaagcgagtggaccgacgtggagacacgctgcagcgtcgcggtggagatgcgcgcaggatcacaattgggtccaggttatcagcaccacgcacagcctaaaaggaagaaaccttag

SEQ ID NO: 121656 - DNA, 3705 bp, synthetic construct
  misc_feature 1..3705: note = Description of Artificial Sequence: Synthetic coding sequence
  source 1..3705: mol_type = other DNA
atggccagctggctttacgaatgcttgtgcgaggccgaattagcccagtactactctcactttaccgccctcggcctccaaaaaatcgatgagctcgcaaaaatcactatgaaagattacagcaagctgggcgttcatgacatgaatgatcgaaagcggctgtttcagctgatcaaaattattaagataatgcaggaggaggataaagccgtctctataccagagaggcatctccaaacaagctccctcagaatcaagtctcaggagctgagaagcggcccgagacggcagctgaactttgattctccagctgacaacaaggaccgaaatgccagcaatgacggctttgaaatgtgctctttgtctgacttttccgcaaacgaacagaaaagcacctatttgaaggtgctggagcatatgctgccagatgactcacagtatcataccaagaccgggatcctcaacgcaaccgccggagactcatacgttcaaacggaaatttcaacttccctgttcagccccaattacctgagcgctatactcggagactgcgacatacccattattcaacgtatttctcacgtttctggttataactatggaatcccacatagctgtataaggcaaaatacctctgaaaaacagaacccgtggacggaaatggagaaaatacgagtctgtgtgaggaaacgacctctaggaatgcgggaggttagacggggggagatcaatatcattactgtggaggacaaagaaacattattagtgcacgagaagaaggaagctgtggacctcacccagtacatcctccaggtgatcctgaagggtagtaaggaaaggtctacaggggccaccggggtcaacgctgacagctcccggagtcatgccgtgattcagatccagattaaagattccgctaaacggacttttggcaggatctcctttattgacctggccggctccgagagggcagccgacgctagagacagcgatcgacagaccaaaatggagggtgccgagataaatcagagtctcttagccctgaaagagtgcattcgggctcttgaccaggagcacactcatacgcctttccggcagtcgaagctgacccaagttctgaaggacagctttatcggaaatgccaagacctgtatgatagcaaatataagcccatcacacgtcgcaacagaacatacattgaacactctgcggtacgccgacagggttaaggaactaaagaaagggataaagtgttgtacctctgtaaccagtagaaatcggaccagcgggaactcttcccctaagcgtattcaaagttctccgggcgccttgagtgaggacaaatgttcacctaagaaagtgaagttaggattccagcagagcctgacagtggccgcacctggctctacaagggggaaagttcatccactgacctcccaccctcctaacattccctttacctcagcccccaaggtgtcaggcaagagaggtgggtctcgcggatcaccctcgcaggagtgggtaatccacgcctctcccgtgaagggtacggtgcggtccggccacgttgcgaaaaaaaagccagaggaaagtgctcccctttgcagcgaaaaaaaccggatggggaataagactgttctgggttgggagagcagagcctccgggcccggcgaagggttagtcagaggtaagttatctaccaagtgtaagaaagtgcagaccgtgcagcctgtgcagaagcagctggtgtcaagagtggaactgagcttcgggaatgcccaccacagagccgagtacagtcaggattcacagcgaggcactcccgcccgtcccgcttccgaagcttggaccaatatcccgccacatcagaaggagagagaggagcatctgcgcttttatcatcagcagttccagcagccccctttgctgcagcagaaactaaagtatcagccgctcaaaagatcacttagacagtataggccgcccgagggtcagttaaccaacgaaacaccacccttgttccactcatatagtgagaaccacgatggtgctcaggtagaggaacttgatgattccgatttctctgaggatagtttctctcacatttcgagtcagagggcaaccaagcagcgaaacactctggagaactccgaggacagcttttttctacaccaaacctgggggcagggtcccgaaaagcaggtcgccgagagacaacagagcctgttctccagtccccgaactggggacaagaaggatctaacgaagtcttgggtggacagtagggatcctattaatcaccggcgggcggcgctggatcattcttgttcccccagtaaaggaccggtggactggtcacgagagaattccacaagttccggcccatctcccagggactcgctggctgagaaaccatactgttcccaggtagacttcatataccggcaggaaaggggaggaggctcctcgtttgacctgaggaaggatgcctctcaatctgaggtgtccggggagaacgagggtaatctgccgtcgccggaggaggacgggtttactatttcactgtctcatgttgccgtgcccggatcacccgaccaaagggatactgtaactacaccacttcgagaagtctcggcagacggccctatccaggtgaccagtaccgtgaagaacggacatgccgttcctggcgaggacccaagagggcagctggggacacatgccgaatacgccagcgggctcatgagccctctgactatgtctttgctggagaaccccgataatgaaggatctccaccaagcgagcagctcgtgcaggacggcgcgacacactccctggtagccgaatccactggcggacctgtggtgagccacaccgtgccaagcggagatcaagaagcagccctccccgttagcagcgcaacccggcacctgtggctgagctcgtcccccccggacaacaagccagggggtgacctgcccgcattgagtccttctcctatacgacagcaccccgcagataagctccctagtcgcgaagccgatctcggagaggcttgccaatcgcgggagacagttttgttcagtcatgaacacatgggttccgagcagtatgatgcagacgccgaggagacgggactggatggcagttggggttttcctggcaaaccatttaccacaatacacatgggcgtgccacattcaggccctacgctgacaccacggaccgggtcttccgatgtggctgaccaactgtgggcacaggagcgcaaacacccgaccagactggggtggcaagaatttggacttagcaccgatcctattaaattaccatgcaattcagaaaatgtgacctggcttaagcctcgacctatctcccggtgtctggcccggccaagcagccctctcgtgccgagctgctctcctaaaacggctggaacactaaggcaacccaccctggaacaggcacagcaggtggtgattcgggcccaccaagaacagcttgacgaaatggccgagctaggcttcaaagaagagacgctcatgagtcaactggcctctaacgatttcgaagatttcgtgacgcaactagacgaaatcatggtgctcaaaagcaagtgcattcagtctctccggtcccagcttcagttatacctcacatgccatgggccgaccgctgcaccagaaggtacagtgccgtcatag

SEQ ID NO: 121657 - DNA, 4107 bp, synthetic construct
  misc_feature 1..4107: note = Description of Artificial Sequence: Synthetic coding sequence
  source 1..4107: mol_type = other DNA
atggcctcctggttgtatgagtgtctttgcgaagccgagcttgcccagtactattctcatttcactgctctgggtcttcaaaaaattgatgagctcgctaagattacgatgaaggactattccaagttgggcgtccacgatatgaatgataggaaaagactgttccagctgataaagattatcaaaattatgcaggaagaggataaggccgtgtccatccctgaaagacacctgcagacttctagcctgcggatcaaatcccaggaactgcggagcggccctaggcgccagcttaactttgacagtccagccgacaataaagaccggaatgcctctaatgacggctttgaaatgtgttccctgagtgactttagtgccaacgagcaaaaatcaacatacctaaaggtactcgaacacatgctacccgatgactcgcaataccacacgaaaaccggtattctgaacgccaccgccggggacagctatgttcagacagagatcagcacctccctattcagcccaaactatctgtccgcaattcttggggactgtgacattcccattatccagagaattagccatgtgtccggttacaactacggaatcccccattcatgcattcggcagaacacgtcagaaaaacagaacccttggacagaaatggagaagataagggtctgcgtcaggaaacggccattggggatgagagaggtgcgtcgtggggagatcaacataatcacagtggaggataaagagacactgctggtccacgaaaagaaggaggcagtagacttgacccagtatatcctacagcatgttttctacttcgacgaagtgttcggagaggcttgcacaaaccaggacgtatacatgaaaaccactcacccgcttatccagcacatatttaacggaggaaacgccacttgcttcgcatacggccagacaggcgcggggaaaacatatacaatgatcggtacacatgaaaaccccgggctttatgccttggctgcaaaggacatattccgccagctcgaggtgagtcagcctcggaagcacctattcgtgtggatttctttttacgagatatattgcggccagctgtatgacttgctaaaccgcagaaaaaggctctttgcacgcgaagacagtaaacacatggtgcagatagtggggctccaggaacttcaggttgattctgtggagctgctgctcgaggtcattctgaaagggtccaaggagagaagtaccggcgcgaccggcgtcaacgccgactcttctcgttcacacgctgtgatccagattcagatcaaagattctgctaaaagaaccttcggtagaatcagcttcattgacctggccggctctgaaagagccgccgacgcgagagactcagaccggcagacaaagatggaaggggccgagatcaatcaatcactcctggccctgaaagagtgtattagagccctcgaccaggagcatacccatactccctttaggcaaagtaagttgacacaggttcttaaagactccttcattggcaatgcaaagacatgtatgattgccaatatttctccctcacatgtggctacagagcacaccttaaatactctgcgctacgctgaccgggtcaaagagttgaaaaagggaatcaagtgctgcacatctgtcaccagcagaaatagaacttcgggcaatagcagccccaaacgtatccaaagcagcccaggcgcactgagcgaggacaaatgttcccctaagaaagtaaagctggggttccagcaaagccttaccgtggctgcccctggctcaacccggggcaaagttcacccactgaccagccatccacccaacattccatttacgagtgccccgaaggtctccggcaaaagggggggtagccgaggaagcccctcccaagagtgggttattcacgcgagccctgtgaaaggcactgtgcgttccgggcacgtcgcaaaaaagaagcctgaggaaagtgcccccctctgctctgaaaaaaatagaatgggaaataagactgttctagggtgggagagccgggctagcggccctggggaagggctggtgcgcggcaaactgtctaccaagtgtaagaaggtccagaccgtgcagccggtccagaagcaactcgtctcccgagtcgaactgtctttcggaaacgctcatcaccgggcagaatatagtcaggatagccagcggggtacacctgcgcgtcctgcttccgaggcctggactaatatccctccccaccagaaagagcgggaagaacatctaaggttttaccatcagcaattccagcagccaccactgctccagcagaagttaaaataccagccactgaaacggtcccttcgccagtatcgtccacctgagggccagctgactaacgagactccaccgctgtttcattcctattccgagaatcacgacggcgctcaggtggaagaactggatgactccgacttttcagaggattcttttagccacataagcagccagcgcgctacaaaacaacgaaacacactggaaaactcggaggattccttttttttacaccagacctggggccaagggcccgagaaacaagtggccgagcgccagcagtctctcttcagttccccacggaccggggataagaaagatctgaccaaatcttgggtcgactcaagggacccaatcaaccataggcgcgccgcacttgaccattcctgcagcccctcaaagggaccagtggattggagccgagagaattctacatcttccggacctagccctagagattctctcgctgagaagccatattgcagccaagtggattttatataccggcaggaaagggggggagggtcatcatttgatctgaggaaagacgcgtcacagagcgaagtgtcaggtgaaaatgaaggcaatctgccgtctccagaggaggatggatttactatttccctgagccacgttgcagtgccgggctcgcctgatcagagggatacagtgaccacaccactgagggaagtgagtgccgacggacccatccaagtgacctcaaccgttaagaatgggcatgccgtacccggtgaagatccgagaggacagctggggacccacgcagagtatgctagcggcctgatgtcacctctgaccatgagcctgctggagaatcccgataatgagggctcccctcctagtgagcagctggtgcaggatggagcaactcacagcttggtcgccgagtcaacaggaggcccagttgtgtcgcatacagtgccctctggtgaccaagaggccgcacttcctgtaagctccgcgactcggcacctatggctttcatcctcccctcccgataacaagcccgggggtgatctgcctgcattatccccgtccccaattagacaacaccctgccgataaactgcccagccgagaagctgaccttggagaggcctgtcaaagccgtgagactgtgctgtttagtcacgagcacatggggtctgaacagtatgacgcggacgcagaggagaccggcttggatggcagttgggggtttccgggcaagcccttcactacaattcacatgggggttcctcattccgggcctaccctgactcctaggaccggtagctcagacgtcgctgaccagctgtgggctcaagaacggaaacaccccacccggctaggctggcaggagttcgggctgtctaccgatcccattaaactgccctgcaactctgaaaacgtgacatggctaaagcctagacccatttccagatgtctggcacggccatcatcacctctcgtgccatcgtgctcgccgaagacggccggtacactccgccagccaacattggaacaggctcagcaggtggttattcgggcccaccaggaacaattagacgagatggctgagctgggattcaaagaggagacgctcatgagccagctcgcaagcaacgacttcgaagactttgtcacccagctggacgagatcatggtgctgaagtctaagtgcattcaatctctcagatcccagttacaactgtatctgacttgtcacggcccaacggcagcccccgaggggactgttccctcctag

SEQ ID NO: 121658 - DNA, 4107 bp, synthetic construct
  misc_feature 1..4107: note = Description of Artificial Sequence: Synthetic coding sequence
  source 1..4107: mol_type = other DNA
atggcctcctggctgtatgagtgtttatgtgaagccgagctggcacaatattactctcactttacggccctggggctacagaagatcgatgaactagcaaaaatcactatgaaagactattccaaacttggggtgcacgatatgaatgaccggaagcggcttttccagttgattaaaattatcaaaatcatgcaggaggaggataaagccgtctccatacctgaacgccatctgcagaccagtagcttgcgcattaaatctcaggaacttcgttccgggccccgcagacagctgaactttgattcaccagccgataataaggatagaaacgcctcaaatgatggcttcgagatgtgctccctgtctgactttagcgctaacgagcaaaagtccacatacctgaaagtgctggagcatatgctgcctgacgacagtcagtatcacactaagacgggcatcctgaatgctacagctggtgatagctacgtccaaacagaaatcagtaccagcctgttctcgccgaactacctgtccgccatcctaggcgattgcgatattcccataatacagcgtatctctcacgttagtgggtataattacgggatcccccatagctgtatcagacagaacacctctgaaaagcagaatccttggaccgaaatggagaaaatccgtgtctgtgtgcgaaaaaggccactagggatgagggaagtacgtaggggggagatcaatattatcaccgtggaggataaggaaaccctgctcgtgcacgagaagaaggaggccgtagatctcacccaatatattctccaacatgtgttctactttgacgaggtatttggagaagcctgcactaaccaggatgtgtacatgaagactactcatcctttgatccaacatatttttaacgggggaaacgccacatgtttcgcttacggacaaaccggcgctggaaagacctacactatgataggaactcatgagaatcctgggctatacgcacttgctgcaaaagacattttccgacagctggaagtgtcacagccccggaaacatctgttcgtctggatctcgttctatgaaatctactgtggccagctatacgatctcttgaatcgtcggaagcgcctcttcgcacgcgaagactccaagcatatggtgcagatcgttggtcttcaggagctccaggtcgactccgtggaactgcttcttgaggtgatcctgaaagggtctaaggagaggtccacgggggccactggtgtgaacgcggattcctcccgcagccacgccgtgattcagatacagattaaagatagcgcaaagcgcacgttcggacgcatttctttcatcgacctggcaggatcggagagggccgcagacgcccgagactcggatagacagacaaaaatggagggtgccgagattaaccagtccctgctggctttaaaagagtgcattagagctttagatcaggaacatacacacactccgttccggcaatccaaactgacccaggtgctcaaggactcattcattggcaacgccaagacctgcatgatagccaacataagccccagccacgtggcgactgagcatactctcaacacattaaggtacgctgaccgggttaaggagctcaaaaaggggatcaagtgctgcacatccgtgacctctagaaatcggacatcaggcaacagctcccccaagcgtattcagtcttccccaggagctctatcagaagataaatgttccccaaaaaaagttaagttggggttccaacagtccttgaccgttgcggctcctggttccacgagagggaaagtacatccactcacttcccaccccccaaatataccatttacatccgcccccaaagtttctggcaagaggggaggaagccgaggctcccctagtcaagaatgggtcatccatgcctcccccgtgaaagggaccgtccgatccggccatgtcgcaaagaagaagccagaggagagtgcaccactctgctcagaaaagaaccgaatgggcaataagacggtactcggatgggagtctagggccagcgggcccggggagggtcttgtgcgcggcaagctttccaccaagtgcaaaaaagtccaaactgtgcagccagtccagaagcagctggtctcgagagtggagctgtccttcgggaatgctcaccacagggcagagtattcgcaggactcacaacgaggaaccccagcgcgccccgctagtgaggcatggaccaacatcccaccgcaccaaaaggagcgcgaggaacaccttcgtttttaccaccagcagtttcagcagcctcctctcttacaacagaaattaaagtatcagcccctcaagcgcagcctgaggcagtatcgccctcctgaagggcagctgacaaacgagacacctccactctttcactcctatagcgaaaatcatgatggtgcccaagtcgaggaattagacgactcagacttcagtgaagatagctttagccacattagtagtcagagagccacaaagcagcggaatactcttgaaaactccgaggattcattttttctgcaccaaacctggggccagggacccgagaagcaggtggctgaaagacagcaaagcctcttcagtagccctaggaccggagataagaaagacctgaccaaatcttgggtcgacagcagagacccgattaaccaccgccgggcagccctcgaccattcatgcagtccatccaaaggacctgtggactggtcccgggagaattctactagcagcggccctagcccacgagacagtctggccgaaaagccctattgctcacaggtggatttcatttaccgccaggagcgcgggggagggtcatcttttgacctcaggaaggacgcctctcagagcgaggtcagcggggaaaacgaaggcaatttgcccagcccagaagaggatgggtttaccatttctctatcacatgtcgctgtgccgggctcccctgatcagcgggataccgtcacaactcccctgagagaggtgagcgcagatggcccaatacaggtcaccagcactgtgaaaaatgggcatgccgtgcctggtgaggatcctagaggtcaactcggtactcatgccgagtacgccagcggtctgatgtcacccctgacaatgtccctccttgaaaatcccgataatgaagggagcccgccttccgaacagctggttcaggatggtgccacccattctctcgtagcggagagcaccgggggcccggtcgtgtcccacacggtgccaagcggggaccaagaggctgcccttccagtgtcctccgccacccgccacttatggttgtcctcctctccacctgacaataagccaggtggcgatctgccagcccttagcccaagtccaattcggcagcaccccgctgataaactgccctcaagagaagccgacttgggcgaggcgtgtcagtcgagagaaacggtgctgttcagccatgagcacatgggatctgagcagtacgatgctgacgctgaagaaacaggcctggatggatcatgggggttccctggcaagcctttcaccactatccacatgggagtcccacatagcggaccaacgctaactccacggacgggcagcagcgatgttgctgatcaactatgggctcaggaacgaaagcacccaacccggctgggttggcaggagtttggattgtccaccgatcctattaagttgccatgtaatagcgagaacgttacttggcttaagccaaggcctatttcacggtgcctggctagaccatcctccccgttggtgccctcttgcagtcccaagaccgctggtactctgagacaacccacactagagcaggctcagcaggtagttatacgcgctcaccaggagcagctggacgagatggcagagctcggattcaaggaggagacgctgatgtcacaactagcaagcaacgacttcgaggactttgtgacacagttggatgagatcatggtgcttaagagcaagtgtatccagtctcttcgatcacagttgcaactctacctgacctgtcacggccccacggccgcccctgagggaactgtaccatcatag

SEQ ID NO: 121659 - DNA, 3477 bp, synthetic construct
  misc_feature 1..3477: note = Description of Artificial Sequence: Synthetic coding sequence
  source 1..3477: mol_type = other DNA
atggctagctggctgtatgagtgtctgtgtgaggccgagctggctcagtactatagccactttacagcattgggtctccagaaaatcgatgaactggcaaagataacgatgaaggactatagtaaattaggagttcatgacatgaacgacagaaaacgcctcttccaactcattaaaatcattaaaattatgcaagaggaagataaagcagtgtccataccagaacggcatctgcagacctctagtctgagaattaaaagccaagagctgagaagtggtccccgtcgccaacttaactttgacagtcccgcagataacaaagaccgtaatgcaagtaacgatgggtttgagatgtgtagtctgtccgatttctccgcaaatgaacagaagtccacttacctcaaagtactggagcatatgctgcctgacgattcccagtatcatacaaaaaccggcatcttaaatgccaccgccggagatagctacgtccagactgaaataagtacttctctgttctcccctaattacctgtctgccattctgggagactgcgacatacccattatacagcgaatttctcatgtaagtggctacaattacggtatcccacacagctgtatccgtcagaatacaagtgaaaaacagaacccatggacagaaatggagaaaatccgcgtgtgcgttcggaagcggcctctgggtatgcgtgaagtgagaagaggcgagataaacattatcaccgtagaagataaagagaccctgcttgtccacgaaaaaaaagaggcagtcgacctaacgcaatacatcttgcagcacgtgttctactttgacgaggtgtttggcgaagcttgcactaatcaggacgtctacatgaaaactacacacccactgatccaacatatttttaatggaggcaatgccacctgctttgcctatggacagacaggtgcaggtaagacctataccatgataggaacccatgagaatccaggcctttatgctctggctgcaaaggatatattcaggcaactggaggtcagtcaaccccggaaacacctctttgtttggattagcttctatgaaatttactgtggacagctctacgatttgctgaaccgtagaaaacgcctgttcgccagagaggatagcaaacacatggtacagattgtcggtctgcaggagctgcaagtggattccgtggagcttctgctggaggtgattctgaaaggttccaaagagcgctccacaggggcgaccggcgtgaacgcagattctagtcgctcacacgccgttatacagatccagatcaaggatagtgcaaaacggacattcgggaggatttcgttcatcgaccttgctggctcggagcgagctgctgacgcaagggattccgatcggcaaacgaagatggagggggctgagataaaccagtccctgctggcactgaaggaatgtattcgggccctggaccaggaacacactcataccccattccggcaatccaaactaacccaggtacttaaggactcattcattggcaatgccaagacttgcatgatcgcaaacatctccccctctcacgtggccacggagcacaccttgaatacactccgatatgccgatcgggtcaaggagctcaaaaagggcataaaatgctgcacgagcgtcacttctcggaatcgcacttccggtaacagctcgcccaaaaggattcaaagctcgcccggggctttatctgaagacaagtgtagtcccaaaaaggttaaactggggtttcaacagtctcttaccgtggccgccccggggagtacacggggaaaggttcatccgctgacgtctcatccgcctaacatacctttcacttccgctcctaaagtctccggaaagaggggcggtagtcgcgggagccctagtcaggaatgggtgattcacgcaagcccagtgaaaggcaccgtgcgcagcggtcatgtagctaagaaaaagcccgaggaatcagcgcctctgtgttccgagaagaatcgtatgggaaacaaaactgtactgggctgggagtcccgcgctagcggcccaggcgaaggcctagtcagggggaaactgtctacaaagtgcaagaaggttcagaccgtccagcctgtccagaagcaactcgtcagtcgtgtggaactgtccttcggcaatgcgcatcatagggctgaatacagtcaagatagccagagaggcacccccgcacggccggcttcggaagcatggaccaacatccccccacaccagaaagagagggaggaacatctgcgcttctatcaccagcagtttcagcagccacctcttctgcagcagaagttgaagtaccaaccactgaaacggtccctgcggcagtatcgccctcctgagggtcagctgacgaatgagactccacccctgttccatagctattctgagaaccacgatggcgcacaagtcgaagagttggatgatagtgacttttcagaggactctttctctcatatctcctcccaaagagctactaagcagaggaatacgttagagaattcagaggacagcttttttcttcatcagacttggggacaaggcccggagaagcaggtcgctgagaggcagcaaagtttgttcagttctccgaggaccggggataagaaagatctcaccaagtcatgggtcgattcacgggatccaattaatcatcgtcgagccgcactggatcactcctgttccccgtcaaaaggcccagttgattggtcccgcgagaacagtacatcatctggtccatccccacgggactctctcgccgaaaaaccgtactgctcccaggtggattttatttatcgccaggaacgtggaggtgggagtagcttcgatctgaggaaagacgcctctcaatcggaagtgtcgggcgagaacgagggcaatctgccctcccccgaggaagatgggtttacaattagtctgtcgcatgttgccgtgcccggatccccagaccaaagggataccgtcacaactccactccgggaggtctctgcggacggccctatccaggtcactagtactgtcaaaaatgggcacgccgtcccgggggaagatccgaggggccagctgggaacccacgcagaatatgcctccggactgatgagtccgctaaccatgagcctattggaaaaccctgacaacgagggttcaccacctagcgaacagctcgttcaggatggcgcgactcactcgctggtggccgagagtaccggaggacctgtggtctcacatacggtgccttctggagatcaagaagccgccctgcctgttagcagtgcgaccagacatctctggttgagctcctcgccacctgataacaaaccaggcggtgacctgccagccttaggcccaggcgagaagacatcatacaaggcatggctcgccggggtgtggttcgtgcaccgccctcatcaggtggctctgcagcaatag

SEQ ID NO: 121660 - DNA, 999 bp, synthetic construct
  misc_feature 1..999: note = Description of Artificial Sequence: Synthetic coding sequence
  source 1..999: mol_type = other DNA
atgacatggacctcgggtcaattacagcgcgaaaagcaggcccgcccaggtagcggagccgtacttgcctttccagatgacaaggacctccgagtttatgggccagcagagtctcaaagtgctgtttttggcgacgtatgtcctttgttaacctctctgctggacggctacaacgtgtgtgtaatggcatacggtcagactggttcagggaagtcttataccatgctcggccgacattcagatgatgggcctgtcctcccactcgatccccaaagtgaccttggcatcatccctagagtcgccgaagaactctttcgcctgattctggagaatacaagtcgatcccccaaggtcgaggtgtcaatcgttgaagtatacaataacgatatctttgacctgctagcgaaggactcaatcgccgctgtatccggggttaaaagggaagtcgtaactgccaaggatggcagaaccgaagtcgcgctgctagccagcgaagcagtcggttcagccagtaagctgatggaattggtccacggaggcctgcagcttagggcaaagcaccccaccttggttcacgcagatagctcgcgcagccacttaattattacagtaacactgactacagccagctgcagcgattctacagcagaccaagcctgcagcgctactctgccaagggagcagactgaggccgggagagcagggaggtcaagacgggcatctcaaggcgccctggctccacagctcgtgcctggaaacccagccggtcacgcagagcaagtgcaggcgaggctgcagcttgtggactctgctggaagcgagtgtgttggcggcgacgctaaacttctcgttattctctgtatcagcccctcccagagacatctggcccagacactgcagggcttggggttcggcatccgggccagacaggtgcagcgcggacctgcgaggaagaagcctccctcgtctcaaacggagggaaagcgacgaccagattag

SEQ ID NO: 121661 - DNA, 1155 bp, synthetic construct
  misc_feature 1..1155: note = Description of Artificial Sequence: Synthetic coding sequence
  source 1..1155: mol_type = other DNA
atgacatggacgagtggccaattgcagagggaaaaacaggctcgcccaggcagcggcgctgtcttggcatttccagacgacaaggatctgagggtttacggtccggccgagtcacagtcagcagttttcggggacgtttgtcccctcctgacatcacttttggacgggtacaatgtgtgcgtgatggcttatggccagaccgggtctgggaagtcctataccatgctgggtaggcattcagatgatggcccggtcctccccttagatccccagtctgatctaggcatcattccccgggttgccgaagaattgttccgtctgattttggaaaatacaagccggagccctaaggtggaggtgtcaattgtcgaagtttacaataatgatattttcgacctgcttgccaaggatagcattgctgccgtgagtggcgttaaacgagaagtagtcacagccaaagatggtaggaccgaggtagctcttctagcttccgaggctgtcgggtcagcaagcaaattgatggagttagtccatggagggctccagctgcgcgccaagcaccccacacttgtgcacgctgactccagcagaagccacctgattatcactgtcacgctgacaaccgcctcttgttctgactcaacagccgatcaggcatgctccgctacgctgccccgagaacaaactgaagcgggcagagcagggcgcagtcgcagagcaagtcagggcgcgctggctccccagctagtccctggaaacccagccggccacgctgaacaggtacaggcccgtctgcagctggtcgacagtgcgggaagtgaatgtgtcggcgtgtccggcgtaactggcctcgctctccgagagatggcttgcatatccaggagtctcgcagctctcgcgggagtcctcggagcactcctcgaacaccggggccacgccccgtacaggaattcccggctcacacatctgttgcaggattgtctcggaggagacgcaaagctgctcgtgattctatgtatctctccatcgcaaaggcacctggcccagactctgcaaggcctcgggtttggcattcgcgcccgacaggtgcagcgcggaccagccaggaaaaagccaccaagctctcagactgaagggaagagaaggcccgactag

SEQ ID NO: 121662 - DNA, 1155 bp, synthetic construct
  misc_feature 1..1155: note = Description of Artificial Sequence: Synthetic coding sequence
  source 1..1155: mol_type = other DNA
atgacatggacctccggccagctccagagggagaaacaagcgaggcctggctctggagcagtcttggccttccccgacgataaagacttgcgagtgtatggtccggctgagtcccagtcagcagtgttcggcgacgtatgtcccctgctgactagcctgttggatgggtacaacgtttgcgtcatggcgtacggtcagacaggtagtggcaagtcatatactatgttgggaaggcatagcgatgatgggccggtgctgccattggacccgcagtcggacttaggtatcattccacgagtggcagaagagctgttcaggctgatattggagaatacttccagatctccaaaggtcgaggttagcatcgtggaagtttataataacgacatcttcgatttactagcaaaagattccatcgctgctgtgtccggggttaagcgagaagtcgtcaccgccaaggacggcagaaccgaagtcgccctgctggcctctgaggcagtaggcagcgcgtccaagctaatggagcttgttcacggaggcctccagctccgggctaaacatcccactttagtccacgcggactccagccggtcccacttgatcatcactgtgacgctgaccaccgcaagttgctcagactcaactgccgatcaggcctgtagcgccaccttgccccgcgaacagacagaagccgggagagctggccggagtaggagagcaagtcagggagccctggccccacagctagtaccgggaaaccctgccggccatgcggagcaagtccaggcccggctgcagctggtggactccgctggatcagagtgcgtgggggtatcaggcgtcaccggtctggccctgcgcgagatggcgtgtatcagtcgaagtctcgccgctctcgcgggcgtcctcggtgccttgttggaacatcgcggccacgctccttatagaaacagccgccttacgcatttgctgcaggattgcctggggggcgacgcgaaactgctggtgatcctgtgcattagccctagccagcggcacctggcccagacgcttcagggtctaggcttcggtattagggcccggcaggtgcaaagaggcccagcacggaagaaacccccttcctctcagacagaaggcaagcgtcgccctgactag

SEQ ID NO: 121663 - DNA, 5649 bp, synthetic construct
  misc_feature 1..5649: note = Description of Artificial Sequence: Synthetic coding sequence
  source 1..5649: mol_type = other DNA
atggttggtcggggcgtgcccctatgcgctgcacaaccggcagtggcagaggggggcccggctcgtgagccgccgcctcttctcgaggtgtctccccggaagcggctgcccgccggtcctgatcaagacccatgtgggagtcgcccagcgccagaaggggccggcgctggcccggagcagggccactccgctggagggggcggctggtgccggcattgtcacaccaaactggtcgaattgaagaggcaggcttggaagttggtgagtggacctggaacaacattgcgcgacccgtgcctctctgcattgcttcttgacaaactgccagcccctggggctcttccagcgtgccgaccagaagccgaaagacgctgtgatgtctgcgccacccatctgcagcagctcacaagggaggccatgcacctactgcaggctccagcatctcacgaggatctggacgcccctcacggcggtccaagcctggctcctccctctactactacgtccagtcgtgacaccccggggcccgcaggccccgctgggcggcagccgggtcgtgcgggaccagatcgcacaaaggggctggcctggtctccaggccctagtgtgcaggtgagcgtagcacccgccggcctcggaggcgcactatcgacagtaactatccaggcacagcaatgtctcgagggcatgtggagcgtgtcaagggtgaactcatttttgcctcctgcctgcctagccgaggccgctgtggctgcggtcgctgtggccgacaccgtgcgggagtgtccacctgtcgccggcccagatggactctcaaaagcctgggggagaggaggtgtgtgtacatccgccctagtgacacctacacccgggtccgtcggcggctctacgggacccagcgccgccgccagcttctttatccgggccatgcagaaactgagccttgctagcaaaagaaagaagccgcacccgccacctccacctgctacccgaggcacatcgacgtacccaactgacttctcaggcgtgcttcagctgtggcccccgccggccccaccatgtcttcttagggcagccagcaagactaaggacaacccggggtccattggcaaggttaaagtgatgcttcgtatttggcccgcgcagggcgcccagaggagcgctgaagctatgtcctttttaaaagtagatccaaggaaaaagcaagtaatcctgtacgaccccgctgctgggcctcctggatccgccggcccacgcagagccgccacagcggctgtcccaaaaatgtttgctttcgacgctgtctttccccaggacagcgagcaggctgaggtgtgtagtggcacagtggcagatgttctgcaaagcgttgtgtcaggggccgacggctgcatctttagttttggacacatgagcctggggaagtcgtataccatgatcggcaaggattcctcaccgcagagtctgggaatcgtaccatgtgcaattagctggcttttccgattaattgaagaaagaagagaaaggaccgggactagattcagcgtgagggtgagcgcagtagaggtgtgcggcagggaccaatccttgagagacttgcttgccgaggtggctccggggagccttcaggacacccaaagccctggcgtataccttagggaagacccagtgtgcggagctcagctgcagaatcagtctgagctgagggcgccgaccgctgagaaggcggcattttacttggatgctgctctggcggctaggagcacaagccgcgctgggtgtggagaagatgcaaggaggtcctctcatatgttgttcacattacacgtctatcaatatcgcatggagaaatgcggccggggggggatgagtggtggacgcagtaggctgcatctcattgacctgggatcatgtgaggccgccgcaggcagagcgggggaggcggccggcggtccactttgcctgagtctctctgccctgggctccgtcatcctcgctctggtcaacggagccaagcatgttccctacagagatcacagactgaccatgctattgcgggaatcgctcgctactgccgggtgcagaaccaccatgatcgcacatgtttcggacgcgccagctcaacatgcagaaacactgagcaccgtgcagttagccgcccgcatccaccggctcaggcgtaaaaaggctaagtacgccagttctagcagcggcggtgagtcatcgtgtgaagagggcagggctagaaggcccccacacctgcgccctttccacccgaggaccgtggccctggacccagatcggacccccccatgtctacccggggacccggactacagctcctcctctgaacagagctgtgacactgtgatatatgtgggtcccgggggcgcagccctttccgaccgagaactgacagacaacgaagggcccccagactttgtccccattatcccagcgctgtcccgccatcgcccctctaaaggacctagagatgctgatcacttcagatgctccacctttgctgagctccaagaacggctggaatgtatggacggaaacgagggaccctccgggggtcctggaggcacagacggagctcaggcatcccccgcaaggggtgggcgtaagccttccccacccgaagcagcctcacctagaaaagccgtcggcacccctatggcagcctccacaccccgtgggagctcggggcccgacacacatcaggggacacctgaaccttgtaaagccatcgtgtggggggaccagcgcgaagattcttcagcctggccggagctccttgtgccggaaaaggcagccgtatctggaggcagacgcccgctgccaagccccgcaccaccaccaccgcaactgctcgaggcctgtagggccccagaggaacccggtggaggaggcacagatggtgtagcgcgaacaccacccgtcggtatgtcagggcaggtagcagggtctccaatgttgccgggagcaacctgtcccaggcttgctgctggctcaaggtgtccggaacggggtctcctaactaccacagtgaccttgcagaggccggtggagctcaacggcgaggatgaactggtctttaccgtcgtggaggagctgagccttggagctcttgccggcgctggaaggcccactagtctggcatcttttgattctgactgcagcctccgggccttggcttccggatcccgacctgtgagtataattagctctatcaatgacgagtttgatgcgtatacgtctcaggcgcctgagggtggaccgctggaaggggcagcttgggccgggtcttcccacggttcctctatcagcagctggctctccgaagtgtcagtttgcaccgccgactctcgagaccctaccccccaaccccgtttctcacctgatagtctcgccggacttgatccaggtggcccacctgctctggacggaagcctgggtgatggcagttcaggctttctgggcccagatcggcccgactcccctgggcccacatggggcccatgtccaggcgaggtcgcagcggttgcaccaagccgcccaggcagagaaccgcaggctggcccctcgcgatgggcctctgcagctcagacaattcacagttcgctcccacgaaaaccaaggaccgcctcagcgaccacccgggttggttgcgcaaggctcggacagtccccccccgggagggggggactgttcgaggacccttggctactgagagtgggggagtgcgacactcaagcggcatctgccggccgggccccttctccaaccttggggtcaccgcgcctccctgaagctcaggtgatgctggcatgtgcccagcgggttgtagacgggtgcgaagtagccgcccgggctgcgagaaggccggaggcagtggccagaattccgcccctccgacggggagcaaccacactaggtgtcaccacccccgctgtaagctggggcgatgcaccgacggaggtggtggcatgctccggatcgctgaaagcttcaccaacttcaaaaaaaggtctcgctcctaaggccggcttccttccgcgtccctcaggcgcggctcctccagctccacctacccggaaatcaagcctcgagcagaggtccagccccgcatctgcccctccccatgccgtaaaccccgctcgggtaggcgctgcagctgtactcaggggcgaagaggaaccccgcccaagcagtcgggctgatcacagcgtgccaagggctactagctctctgaaggcccgggcctcaaaggtcgaagccgcccatagacttgccggacacgcctccctggaacgctacgaaggcctggcacacagcagcagcaaagggagagaagcaccaggtcggccccctcgggcagttccaaagctgggggtgccaccctcctcacctacacatgggcccgcacccgcttgcagatccggtgccgccaaagcagtcggagctcctaagcctccggtcggcggtggcaaaggcaggggcctggtcgcaggagggtcccgagcactgggaccgtctgtcaagctctctactgctagcgttacgggccggagtcctggcggccccgttgcaggacccagggctgccccacgggccggtccaagtgtaggtgcaaaagctgggcggggcaccgttatgggcacaaaacaggccctgagggccgcccacagtagagttcacgagctgagcgctagtggggcaccgggtcgggggggctctagctggggtagtgctgactcggactccgggcacgacagcggggtgaacgttggcgaagagagaccccctaccgggcctgcactgccgtccccttactccaaagtgaccgccccacgccgcccccagaggtatagctctggacatggatctgacaattcatcagtgttgtctggcgagctgccaccggccatgggcagaactgccctattccaccacagtggcggcagcagcggttatgagagcctacggagagacagcgaagcaactggatctgcttcaagtgcccccgacagcatgtctgagtcgggagcagcgagtcccggggcgcgcacgaggtcactcaagagccctaagaagagggccactgggctgcagcgtcgcaggcttatacccgcaccattgcctgatacaactgctctggggaggaagccatcgcttcccgggcagtgggtcgaccttcccccgccacttgcagggtccctgaaagagcctttcgagatcaaggtttatgagattgatgacgtggagcggcttcaaagaccgcggcccaccccacgggaagctcctacgcaaggattagcgtgtgttagcaccaggttaagactggcagagaggaggcagcagcggcttagagaggtccaagctaaacataaacacctctgcgaggaacttgccgagacccagggaagactaatgttggagcccgggcggtggctggaacagttcgaagtggacccagagcttgaaccagagtccgctgaatatcttgctgccctggagcgagccacagcagcattagagcaatgcgttaacctctgtaaagctcacgtgatgatggtaacctgcttcgatatcagcgtagccgcaagcgccgcaattcccggtcctcaagaagtcgacgtctag

SEQ ID NO: 121664 - DNA, 5184 bp, synthetic construct
  misc_feature 1..5184: note = Description of Artificial Sequence: Synthetic coding sequence
  source 1..5184: mol_type = other DNA
atgatgatggactggaaggcagtcgctgcacagaagctcaacctgtcaagcaaaaagaagaaacaccgccctagtacctcttccgcggcagagccccctctattcgccacctcatttagcggtatcctgcagacatctccaccccctgccccaccttgtctcctacgggctgtgaacaaggttaaagacacccctggcctggggaaggtcaaggtgatgctgcgcatatgtagcacgctggctagagatacctccgagagcagcagcttcctgaaggtagatcctaggaagaaacagataactctgtatgacccactgacatgtggcggccagaacgccttccagaaacgaggaaatcaggtcccccctaagatgttcgccttcgacgccgtctttccacaggacgcttctcaggcagaggtgtgtgctggcactgtggcagaggtgatccagtctgtagtcaatggtgcggacggttgtgtgttctgtttcggacacgccaagctcgggaagtcctacacaatgataggaaaagacgactcaatgcagaacttggggatcattccttgtgcaataagttggctgtttaaattgattaatgaaagaaaagagaagacaggggctcggttcagcgtgcgagtctccgcagtggaggtgtggggcaaggaagaaaatctgagagatttgttatccgaggtagcaaccggatcactccaagacggacagtcaccaggcgtgtacctctgcgaagaccccatatgcgggacgcagttgcaaaaccagtcggaattacgcgctccaaccgcggaaaaggccgccttcttcttagacgctgctatagcatcccggaggtctcaccaacaagactgcgatgaggacgatcatcgaaactctcacgtattctttaccctccatatatatcagtatcgcatggaaaagagtggtaagggcgggatgtccggcgggagaagtaggctgcatctgattgatctggggtcctgcgttaaggctctgtctaagaatcgggagggaggatccggactgtgcttgtcgctgtcagctctgggcaatgtgatactggccctggtcaacggcagcaaacacattccttacaaagagtccaagctggcaatgctcttgcgtgaatcactgggcaacatgaattgtcggaccactatgatagctcacataagcgcggccgtcggatcctatgccgaaaccctttctaccatacaaatcgcttcaagagttctgaggatgaagaaaaagaagacgaagtacacttcgtcctcatccgggggggagtcaagctgtgaggagggcagaatgcgcagaccaacacagcttagaccttttcatacaagagccacagtggacccggacttccctatagcacacctgagctctgaccctgactactcttcctccagcgagcagtcctgcgacacggtaatctacatcgggccaaatggcactgctctgagcgacaaagaacttactgataatgagggaccacctgactttgtgcctattgtgcctgccctccagaagacccgcggggattctcggcccgccgaggccggtgaagccgcggctggcaagtctgagagagactgtttaaagtgtaacacgttcgccgagctgcaggagcgcctggattgcatcgacggttcagaagaaccctcatcctttccatttgaagaactcccagcccagttcggacctgagcaggctagcagaggccctaggctgtctcaggccgccggggcctctccactttccgagtccgacaaagaggataacgggagcgaggggcagctgaccaaccgggaagggcccgaactgccagcctcaaagatgcagcgtagccacagccccgtacctgccgccgcaccagcgcacagcccatccccagcgagtcctaggtcagtacctgggagctcctcgcagcacagtgcaagccccctggtccagtcgccatccctgcaatcctcaagagagagtcttaatagctgtgggttcgttgaaggaaaacccagaccgatggggagtcccagactcgggattgctagcttgtccaagacatccgaatataaacccccgtcttctcccagccaaaggtgcaaagtgtatacccagaagggtgtccttcccagccctgctcctctgcctccttcctctaaggacagtggcgtggcctcccgggagtctctgctgcagcccgaggttcgaacacctcctgtgggaatgtcaccccaggttctgaagaagtcaatgagcgccgggagcgagggctttcctgagacccctgtcgatgatgagcagcaagcagctacacccagcgagtcaaaaaaagaaattctgagcactactatggtgactgtacaacagccccttgagctaaatggtgaggacgaactggtgttcacactggttgaggaactgaccatttccggcgtgctggactctggccgaccaacctccattatatcatttaatagcgactgctcagcacgggccttagcctcaggcagcagacctgtttcaatcatctcctccataagtgaagatcttgagtgctatagctcaaccgcccccgtgtccgaagtgtctataacacagtttctgcctcttcctaagatgagcttagacgaaaaggcacaggatgctggaagtaggaggtcctcgatttcctcctggctctccgagatgtccgccggctccgaaggagaacagtcctgtcactcttttatagcccaaacgtgttttggccacggtgaagccatggccgaaccagttgcttcagaattcgtgtccagtctgcagaatacagccgttgtgtgtagagagaagcccaaagcctcgccagacaacctgctgattctctctgagatgggtgatgactcttttaataaagccgctcctatcaagggttgtaagatctcaaccgtgtctaaggccatggtgacaattagcaatacagccaacttgtcaagttgcgagggctatattcctatgaagactaatattaccgtgtatccctgcatagccatgagccctcgaaatattcaagagccagaggcccccaccgccactccaaaagccgggcccaccttggcccaatctagggaatccaaggaaaactcagcaaagaaagagatgaagtttgaagacccatggcttaagcgggaggaagaagttaaaaaggaaactgcccatcccaacgaagagggcatgatgcggtgcgagacagccacagggccgtcaaacgcagaaacccgcgctgaacaagagcaggacggcaagccatctccaggggatcggctgtcctcatccagcggggaagtgtctgcttcgccagttactgataattttcggagagttgtggatggttgtgaaatggctttaccgggcctggccactcagtccccagtacaccccaataaaagcgtcaaatccagtagcctccctagggccttccagaaagcgtcccggcaggaagagcccgacagcctgagctattattgtgccgcggagacgaacggcgtaggagccgcaagcggcactcctccatccaaggccaccctggaaggcaaggtcgccagccccaaacactgtgttctggcccgacccaaagggaccccccccctgcctcccgtccggaagagctccttagaccagaaaaaccgcgcatctccgcagcattctgccagtgggtctggtacaagcagcccgctcaatcagcctgccgctttccccgctggcttgccagacgagcctagcgggaagacaaaggacgcatcatctagttcaaaactcttctcagcaaagctggaacagctcgccagcaggagcaactcgctagggcgcgccaccgtgtcccattatgagtgcctttccttggaaagggccgagagtctgtcttctgtgagctcccgcctgcatgccgggaaagacggtacaatgcctagggccgggaggagtttgggacgaagcgccggaacctcccccccaagcagtggcgcctctccaaaggccgggcagtcaaaaattagcgctgtgtctagactcctgcttgcttccccccgagctcggggccccagtgccagcaccacgaagaccctcagcttctccacgaaaagcttacctcaggcagtgggccagggcagctctagcccccccgggggaaagcacactccttggtctactcagtccctgtcaagaaacagatcctccggcctggcaagtaagctgccactccgggctgtcagcggccgaatcagtgaactcctgcagggcggtgctggcgcgagaggcttacagctccgggctggccctgaggctgaagctagaggtggggccctggctgaggatgaacctgctgctgcccaccttttaccgagcccctactcaaaaatcactcccccaaggagaccccaccggtgttcctctggtcatggttcagataattctagcgtgctatccggggaacttcctcctgctatgggtaagacagcactgttctatcactcaggcggcagcagcggctatgagtcagttatgcgcgattccgaggctactggctcagctagttctgcgcaggactctacttctgagaactcctcatccgtcggcggaaggtgtaggtctctgaaaacccccaagaagagatccaaccccggatctcagcggcgtagactgatccctgccttgtcactggatacctcatctcctgtacggaagccacctaattctaccggggtccgctgggtggacggccctctcagatcctccccacgcggtctgggggaaccatttgagattaaagtgtacgagattgacgacgtggagaggttacagcgtcgaagggggggtgccagcaaggaggcgatgtgcttcaacgccaagttaaagatactagaacacaggcagcagcggattgccgaggttagagcaaaatacgagtggctcatgaaggagctcgaagctaccaagcagtacctgatgctggaccccaacaagtggctgagcgagttcgacctcgaacaggtttgggaattagacagccttgagtacttggaggcgctcgagtgtgtgacagagaggcttgagagtcgtgtgaacttctgcaaagcccatctcatgatgatcacttgttttgacataacctctcggagaagatag

SEQ ID NO: 121665 - DNA, 6327 bp, synthetic construct
  misc_feature 1..6327: note = Description of Artificial Sequence: Synthetic coding sequence
  source 1..6327: mol_type = other DNA
atgaatagtgtggcaggcaacaaagagcgcctggccgttagtactcgggggaagaagtacggcgtcaacgaggtatgcagcccaaccaagcctgccgcgcctttttctcctgagtcttggtaccgtaaagcatacgaggagtcccgtgccggttctcgccccacccctgaaggtgctgggtccgcgctcggatcctcgggcaccccctctccaggaagtggtacttcctctccgtcctcgttcactggcagtcctggccccgctagccctggaattggaacttcttcacccggcagccttggcggatcaccagggttcggtactgggtcaccagggagcgggtccggcggtggtagttctcctggcagcgaccggggtgtttggtgtgaaaactgcaacgcacggcttgttgaacttaagcgccaagctctgcgtctgcttctcccagggccattcccgggaaaggatcctgcattttcagctgtcatccacgataagctgcaagtacccaacactattcggaaggcgtggaatgacagggataacaggtgcgacatctgcgctacgcatctaaaccagctgaaacaggaagctatacagatggttctgactctggaacaggccgccggatcagagcattacgatgcctccccatgcagcccacctcctctctcaaacatacctactctggtgggaagccgacacgtgggcggcctgcagcagccccgcgactgggctttcgtacctgccccgtgtgcaacgagcaactacactggctttgccaacaaacatggtagcaagccatcttcattgggggtctcaaatggggccgaaaagaagtctggatctccaactcatcaggctaaagtgtccctgcagatggcgacttctccttctaacgggaatattctgaattcggtggcaatccaggcccaccagtacctcgacgggacttggtccctctcacgcacaaacggggtgacattgtacccttaccagatcagccagctgatgacggagagctctagggaagggctcactgaggcagtgctcaacagatataacgccgataaaccatccgcctgcagcgtccctgcatcacaggggtcttgcgtagcgtctgagacaagtactggtacctctgtcgccgccagcttcttcgcacgtgccgcacagaagctgaatttgagttccaagaagaagaagcaccgtccatcgacttcaagcgcagcagaacccccattatttgctacctcattctcaggcatcttacaaaccagtccaccacctgcacccccctgtctgttacgggctgttaataaggtaaaagataccccagggttagggaaagtcaaggttatgctccgtatatgctcgacacttgccagggacacaagcgagtctagttctttcttgaaggtggacccccgcaagaaacagattaccttatacgatccgctcacttgtgggggccagaatgcattccagaaacggggcaaccaggtgccgccaaagatgtttgcattcgatgctgtattcccacaggacgcctcccaggctgaagtctgcgctggcaccgtcgcagaggtgatccagagtgtggttaatggtgccgacgggtgtgtcttttgctttggccacgccaagctggggaagtcttacactatgatcgggaaagatgactcaatgcaaaacctgggtatcattccctgcgccatctcctggttatttaagttgatcaacgaacggaaggagaaaactggcgctcgcttttccgtccgcgtgagtgccgtagaagtttggggaaaagaggagaatctcagagaccttctgtcagaagtcgccactggctcactgcaggatgggcagagtccaggagtgtacctctgtgaggaccccatttgtggcacccagctgcagaaccagtccgagctcagagcgccaacggccgagaaagcggccttttttctagacgcagctatcgcaagcaggcggtctcaccagcaagattgtgatgaagatgatcaccgcaattcccacgtattctttaccctgcacatctatcagtatagaatggagaagtctggaaaaggaggaatgtccggtgggcgttcccgattacacctgatcgacctgggaagctgcgtcaaagccctgtcaaaaaatcgcgagggcggtagcggactgtgcctcagcctcagtgccctcggcaacgtgatcctggccctggtgaatggatcaaagcatattccatataaagaatcaaagctagctatgctgctgagggaatccctcggaaacatgaattgtcgaaccactatgattgcccatatttcagcggcagtcggcagctatgcagagaccctgtccacaatccagattgcctccagagtcctgagaatgaagaaaaaaaagactaaatatactagcagctccagcggcggtgaatcatcctgtgaggagggtcgcatgcggcggcccacgcagcttcgcccctttcacactcgcgcaactgttgatcctgattttcctattgcccacctgtcctcggaccccgattattcttcttcctccgagcaatcctgtgacacggttatatacatcggacctaacggcaccgccctctccgacaaagaactgaccgacaatgaggggcctccagatttcgtcccaattgtacctgctcttcagaagacccggggagactcccggccagctgaagcaggggaagccgcagcaggaaaatcagaacgcgactgtttgaagtgcaatactttcgccgagctgcaggagcgattagattgcatcgacggatccgaggagccatctagctttccttttgaggagctgcctgcacagttcggaccagaacaggcctctcggggtccacggcttagtcaagccgcaggcgcttcacccctgagcgaaagcgacaaggaggataacggctctgagggtcagctcacaaatagggaaggacccgaactgcccgcatcaaagatgcagagaagtcactctcctgtaccagcggccgccccagctcacagcccctcgccagcaagccctcgaagcgtgcccgggtcaagtagccagcattctgcaagtcccctcgtacagtcgccttcacttcaatcgagcagagaaagtctgaactcctgtggctttgtggaaggcaaacctagaccgatgggctctcctcggctcggcatcgctagcttgtctaagaccagcgagtataagccaccctcttcaccatcccagaggtgcaaagtgtatacacagaagggagtgctgcctagccctgcaccgctgcctccatcctctaaagactctggggtcgcgtctagggagtcacttctccaaccagaggtgcgaaccccgcccgtgggtatgagtccccaggtgttgaaaaaatcaatgagtgcagggagcgagggtttccctgaaacccccgtggacgacgagcagcaggccgctacaccgtctgagagcaagaaggaaatcctctctaccaccatggtgaccgtacaacagcctcttgagctcaacggggaagatgagctcgtttttaccctggtcgaggagctgacgatatctggagtgctcgattccggacggccaacgtcaataatcagcttcaatagcgattgcagtgcccgcgcccttgcttcaggatctaggcccgtctcaatcatctcgtccatctcagaagacctggaatgttactcatctacggccccagtgtccgaagtctcaattacccagtttctgcccctccccaaaatgtccttagacgagaaggctcaagacgctgggtcccgtcggtctagcatcagcagttggctgtccgagatgagcgcgggttccgaaggagaacagagctgtcattcatttattgctcaaacttgctttggacacggcgaggccatggccgagcccgtcgcttctgaatttgtgtcttctcttcagaacaccgctgtcgtgtgtagggagaaaccgaaggcaagcccagacaacctgctcattctgagtgaaatgggcgacgattccttcaataaggccgcgccgattaagggttgcaagatcagcactgtgagtaaagctatggtcactatctccaatactgctaacttgtccagctgcgaagggtacatcccaatgaaaaccaatataacagtgtatccatgtatcgctatgtccccacgcaacatccaggagcctgaagcacctacagctacaccgaaggctgggcccacattagcccagagtagggagagtaaggagaactcagcaaaaaaagagatgaaattcgaggacccctggttaaagcgcgaagaggaagtgaagaaggaaaccgcgcaccccaatgaagagggaatgatgagatgtgagacagccactggcccctccaacgccgagacacgggccgaacaggagcaggacggaaaaccgagtccaggcgaccgactaagctccagctcaggagaggtttctgccagcccagttaccgataactttaggcgggtggtcgatggttgcgagatggctctcccaggcctcgccacgcaatcccccgttcacccaaacaagtctgttaagtcctctagtctgcccagagcatttcagaaggcaagcaggcaggaagagcccgactccctgagctactactgtgcagccgagacgaatggtgtgggggcagccagtggcaccccaccaagtaaggccaccctggaggggaaagtggcttcgcccaaacattgtgtgcttgccaggcccaaaggcacgcctcccctccctcccgtgcggaaatccagccttgaccaaaagaaccgagcctctccccaacactctgcaagtgggtcaggaacgagtagccctttgaatcagccagcagccttcccggcagggctgcccgatgagccaagcggcaagactaaagacgcatcatctagctcaaagttattctcagcgaaactggagcagctggcctcacggagtaattccttaggccgagctaccgtgagccactatgagtgcctttccctcgagagggccgaatcattatccagtgtgtcgagcaggctacatgcaggaaaagacgggactatgcccagggccggccgatcactgggtcggtccgccggcacatctcccccatctagtggcgcttctcctaaagctgggcagtcaaagatttctgctgtgtcaagacttcttctcgcctcaccccgagcccgcggcccctctgccagtactaccaaaacactgagtttttccactaagtcgcttccacaggccgttggacagggctcatccagcccacctggtggtaagcatacaccgtggagcacccagagcctgagtaggaaccgtagctccgggttggcctccaagctacctctgcgtgccgtatccggacgtatttccgagttattacagggtggggccggcgccagggggctgcagcttagagctgggccggaagcggaagccaggggcggagccctcgctgaggatgagccagctgcggcacaccttctgccaagcccctacagcaaaataactccacccagacgtccacaccgatgtagctctggacatggaagcgataatagtagcgtgctgtctggcgaactgccccctgcaatgggcaagaccgccttattctaccattctggcggcagtagcggttatgaatctgtgatgcgcgacagcgaggctaccggaagcgcctcctcagcccaggactctacctccgaaaatagtagttcagtcggcggtcggtgtcggtcacttaagaccccaaagaaaaggtccaaccccggatcgcagagacgcagactgataccagctctgagtcttgacacttcctctcccgtgagaaaaccacccaattccaccggtgttcggtgggtcgatggccccctacgcagctctcctcgcggattaggcgagccgtttgagatcaaggtctatgagattgacgacgtggagcgactccagaggcggcgcggcggagcatcaaaggaggcaatgtgtttcaatgcaaaacttaaaatcctcgagcacaggcagcagagaattgcagaagtgagggccaaatatgagtggttgatgaaggaacttgaagccactaagcaatacctgatgttggatcccaacaagtggctgtctgagtttgacctcgaacaagtgtgggaactggattcactggaatacctcgaggctctggaatgcgtgactgaaagactggagagccgtgttaacttttgcaaagcacacctgatgatgatcacctgttttgacatcacttcgaggaggagatag

SEQ ID NO: 121666 - DNA, 5175 bp, synthetic construct
  misc_feature 1..5175: note = Description of Artificial Sequence: Synthetic coding sequence
  source 1..5175: mol_type = other DNA
gactggaagacgaaggccgcccagaaactgaacctgtcctcgaaaaaaaagaaacaccgccccagcacttcaagcgctgcagagccccccttgttcgccacatcttttagtggaatcctgcaaacatccccgccgcctgcgcctccttgtttgctgagggctgtgaataaggtcaaagacaccccaggcctgggtaaggtgaaggtaatgctgcggatctgctctacgcttgcccgggatacgtctgagagctcctcattcctgaaggtggatccaagaaaaaagcaaattacactctacgaccccctgacatgtggtggtcagaacgcattccagaagagaggaaatcaggtcccgcccaagatgtttgccttcgacgctgtcttcccacaggacgcctcacaagcggaagtatgtgccggaacagtcgccgaagttatccagagtgtggtgaatggtgccgatgggtgcgtcttctgttttggccacgcgaaactcggaaaatcatataccatgataggcaaggacgactctatgcagaacctggggattatcccgtgcgccattagctggctctttaagttgattaacgagagaaaagagaaaaccggcgcccgcttttcagtgagggtgtcagcagtggaggtgtggggtaaggaggaaaatttgagagacctactctcagaagtggcgacaggcagcctccaggatggtcagtcccctggagtgtatctgtgcgaagatcccatatgcggaacccagctgcagaaccagagcgaattgcgagcccccacagcggagaaagccgccttctttctggacgccgccatcgcatctaggagaagccaccagcaagattgtgacgaagatgatcatcggaatagtcacgtgttcttcacactacacatttatcaataccggatggaaaagagtgggaaaggaggaatgtctggtggccgtagcaggctccatctgattgacctgggtagctgtgtaaaggctctgtctaaaaatagagaaggaggatcgggactgtgcctgtccctttcagcacttggcaacgtgattctggctctggtgaatggcagtaagcacattccttataaagaatcaaagctggcgatgttactgagggagagcctgggtaacatgaactgtcgcactacaatgatcgcacatatttccgccgctgtgggcagctacgctgaaaccctctccaccatccagatcgccagccgcgttctacgtatgaaaaagaaaaaaaccaaatacacctctagcagctccggcggggagtcgagctgcgaggaagggaggatgcgtcgcccaacccagctgagaccgttccacaccagagccaccgtggatccagatttccctatagcacacctgtctagtgatcctgattacagcagctcgtccgaacaaagttgcgatactgtgatttacatcggacccaatggcaccgccctgagcgataaggagttgacagacaacgagggcccgccagacttcgtccctattgtccccgcactacagaagacgagaggcgattcccgcccagcagaagcaggcgaggctgctgccggtaagtccgagcgtgattgcctgaaatgtaacactttcgctgaactacaggaacgccttgactgtattgacggatccgaggaaccatcaagttttccgttcgaggaactccctgcccagttcggacccgagcaggcatccagaggcccacggctatcccaggcagccggagctagtccactcagcgaatccgacaaggaggataatggctccgagggacaactgacgaaccgggaggggcctgagctgccagcaagcaagatgcagagatcacatagcccagttccggccgcagctcccgcccactccccgagtccggcttcccctcgaagcgtaccagggagttctagtcaacatagcgcatctcccctggtgcagtctccctctttgcagtcctctagggagtcactgaattcctgcgggtttgtcgaaggtaagccacggcccatgggtagtccccggcttggaatcgcaagcttgtctaagacgtcggagtacaagcctcctagttcaccatctcaacgatgcaaggtgtacacccagaaaggcgttctgccgtctcccgccccgcttcctccatcatccaaagatagcggagtggcctctcgggagagtctgctgcaacctgaggttcggacaccgcctgtcggaatgagccctcaagtgttgaagaaatcaatgtctgccgggtctgaaggatttccagagacacctgtggacgacgagcagcaggctgcaactcctagcgaaagcaagaaggagattctctctactaccatggttaccgtgcagcaaccattggagctcaatggcgaggatgaactggtattcaccctcgtcgaagagttgactattagcggcgtactcgacagcggccggccaacctcaatcattagctttaacagcgattgcagcgctcgggccctcgcgagcggatccaggcctgtgtccattattagctccatctcagaggatctggaatgctacagcagtaccgcccccgtttccgaggtttctatcacccagtttctgcctttgcccaaaatgagtttagacgagaaggcccaagatgcggggtccagacgaagttccatttcttcatggctgagcgagatgagcgccgggagcgaaggggaacagtcgtgccattccttcatcgcccaaacctgttttggccatggtgaagccatggccgagcctgtagcctcagagttcgtgtcaagtctccagaacaccgcggtagtgtgcagggagaagcccaaggcctcgcccgataatctgttgatcctgagcgaaatgggggatgattccttcaataaggccgccccaatcaaagggtgtaagatttcaacagtgagcaaggccatggtgacgatctccaacacagccaatctgtcctcctgcgagggctacatcccaatgaaaaccaatattaccgtatatccctgcattgcgatgtcccccaggaacatccaagagccagaggcccccactgccacaccgaaagccggccccaccctcgcacagagtagggaatcaaaggagaacagcgctaagaaagaaatgaaatttgaagacccctggctcaaaagagaagaagaggtgaagaaggagactgcccatccaaacgaggaggggatgatgcgttgcgaaacagcaaccgggccttctaacgcggaaacacgggccgagcaggaacaagacggaaaaccatctcccggggacaggctcagttcatcctcaggcgaagtgagtgcttcaccagtcaccgacaatttccgaagagtggtggatggatgcgagatggccctcccgggcctggccacccagtctccagtacaccccaataagagcgtaaagtcttcctctctaccaagggcctttcagaaggccagccgccaagaggagcccgacagcttgagctattactgtgctgccgaaacaaacggcgtgggggctgctagtggcacacctccatctaaggccaccctggagggtaaggtggcatctcctaagcattgcgtcctcgctcgccccaaaggtacaccacctttgccgcctgtcagaaagtcatccctggatcagaaaaacagagcaagcccccagcactccgccagtggttctggcacttcaagtcctcttaaccagccggccgccttcccagctggactcccggacgagcccagcggtaagacaaaggatgcttcctcaagtagcaagctgtttagcgccaagttggaacagctggcgtcgcgcagcaattctttaggcagggctactgtctctcactacgaatgtctgtcgctcgagcgcgccgagtccctgtctagcgtttccagcaggctgcatgctgggaaggatggaacaatgccacgggctgggcggagcctggggagaagcgccgggactagtccccctagctcgggcgcttcgccaaaggcgggtcagtctaaaattagtgcagtaagtcgactactcctggcaagtcctcgggcgcgcggtccctctgcgtccacaaccaaaaccctctcgtttagtacaaaaagtctcccccaggccgtggggcagggttcatcctcgcccccagggggtaagcacactccttggagcacacagtctctttccaggaatcgatcatctggacttgcctccaagcttccgcttcgcgccgtgtccggccgcataagtgagcttctccaggggggggctggagctaggggactacagttgcgcgcaggaccagaggctgaggcgcgaggcggagctctcgctgaagacgaacctgcagctgcgcacctcttgccctccccatactcaaaaattaccccgccccgaaggcctcatcgctgctcatccggccatggctctgacaatagctccgtgctgtccggggaactacctccggctatggggaaaaccgccctgttttatcattctggcggatccagtggctatgagagtgtgatgcgagattcggaggccaccggctccgccagcagtgcccaggattcaacaagcgaaaatagtagctccgtcggaggtaggtgtcgctcactgaagacacccaaaaaacggagtaatcccgggagtcagagacgccggttgattcctgcccttagcctggatacctcctctcccgtccgcaaaccaccaaactccacaggagtccgctgggtagacggacccctgcgtagtagtccgcgcggactgggcgaaccatttgagattaaagtttacgagatcgatgatgttgaacgactccagcggcgtcggggcggtgcaagtaaggaagcgatgtgcttcaatgcaaagctgaagatattggaacacagacagcaacggatcgccgaggtgcgcgccaaatacgagtggctgatgaaggaactggaggctactaagcagtacctcatgctcgacccgaataagtggctttccgagtttgatctcgagcaagtctgggagttggattccctcgagtatctggaggctctggagtgcgtgaccgagcgtctcgagtcacgagtgaacttttgtaaggctcacctaatgatgatcacctgttttgatattacctctaggcgcagatag

SEQ ID NO: 121667 - DNA, 2016 bp, synthetic construct
  misc_feature 1..2016: note = Description of Artificial Sequence: Synthetic coding sequence
  source 1..2016: mol_type = other DNA
atgattgatttcgacgacgtggccgccattaatccagaactcctgcaattactgccattgcaccccaaggacaacttgcctctccaggagaacgtgacaattcagaaacagaaacgcaggtctgtaaatagcaaaattcctgctccgaaagaaagtcttcgctcccgctccacacgaatgagcactgtgtctgagcttaggatcacagcacaggaaaatgatatggaagttgagttaccagccgccgctaactcacggaagcaattctcagtccctcccgcccccacccggcccagttgccccgccgtggctgaaattcccctgcgcatggtgtcagaggagatggaggaacaagtgcattccattcgcggaagctcgagcgcaaatcccgtaaattcagtacgacggaagtcatgcctcgtgaaggaagtggaaaagatgaaaaacaagagagaagaaaaaaaagcccagaactccgaaatgcggatgaagcgggcccaggaatacgactccagcttccctaactgggaatttgcacgcatgatcaaggagttcagggcgactctggagtgccaccccctcaccatgaccgaccccatagaggagcaccgcatctgcgtttgtgtgaggaaacggcctctgaacaaacaggagcttgccaaaaaagaaatagacgttatttccattcctagcaagtgcttgctcctggtgcacgaaccaaaacttaaggttgatctgactaaatatctcgagaatcaagccttttgtttcgattttgcatttgatgaaactgcttcgaacgaagtggtctaccggttcaccgcgagacctttggtgcagaccatctttgagggaggcaaggccacgtgttttgcatacggacagaccggatccggaaaaactcacacaatgggcggagacctatcaggcaaagctcaaaacgccagcaagggcatttacgccatggctagcagggatgtgttcctcctcaagaaccagccttgttaccggaagctgggtctggaggtctacgtgaccttttttgaaatatataacggcaagttattcgatctccttaacaagaaagccaagctgagagtgttagaggacggcaagcagcaggtgcaagtcgttgggctgcaggagcatctggttaacagcgctgacgacgtgatcaaaatgatagatatggggtcagcatgccgaacgtccgggcagacttttgcaaacagcaattccagccgtagccacgcgtgcttccagattattcttcgggcaaaagggcgtatgcacggcaagttctctttagtcgacctagctggcaacgagcggggagcagacacttcctctgccgaccggcagacaaggatggagggagccgaaataaacaaatctctgctggctctgaaagaatgtatccgcgcacttggacagaataaggcacatacacctttccgagaaagcaaactaactcaagtgctacgcgactcgttcatcggagagaatagccgcacctgcatgatcgccacgatatctcctggtatcagctcctgtgagtatacactgaatacactaagatatgccgaccgggtgaaggaattgtctccccacagtgggccttccggcgaacagctcatacaaatggaaaccgaggagatggaggcctgttcaaacggcgcgctcatccctggaaatctgtccaaagaagaggaggaactgtccagccagatgagttctttcaatgaggctatgactcagataagggagctggaagagaaggcaatggaggagttaaaagagattattcagcagggaccagactggctggagttgtctgaaatgaccgaacagccagattatgatctggaaaccttcgttaacaaggctgagtctgcgcttgcgcaacaggcaaagcactttagcgctcttagggatgttataaaagcactgaggctcgcaatgcagctggaagaacaagcctctcggcagatctctagtaaaaaacgacctcagtag

SEQ ID NO: 121668 - DNA, 2055 bp, synthetic construct
  misc_feature 1..2055: note = Description of Artificial Sequence: Synthetic coding sequence
  source 1..2055: mol_type = other DNA
atggcaatggactcgagtcttcaggcccggctgttccccggacttgcaattaagatacagagatccaacgggttgatacactctgcaaatgtgcgcactgtgaacctggaaaaatcttgcgtatccgttgagtgggccgaaggcggagcgacaaagggtaaagagatcgactttgacgacgttgcagccatcaacccagagctgcttcagctgttacctctgcacccgaaggacaacctgccactgcaagaaaatgtcactattcagaagcaaaaaaggcgctcggtcaattccaagatacccgctcccaaggagtcacttcgctcgcggagcactcgtatgtcaactgttagcgagctgcggattacagcccaggagaatgacatggaggttgaactgcctgctgccgcaaatagccgaaagcagttcagcgtcccactcaggcggaagtcctgccttgtgaaggaagtagagaagatgaaaaacaaaagggaggagaaaaaggcccagaatagtgagatgagaatgaagagggcacaggagtacgattcatcctttccgaactgggaatttgctcggatgatcaaggagtttcgtgcgacccttgaatgccatccgctgactatgacagatccaatcgaggagcatagaatctgcgtctgtgtgcgcaagcgtcccctgaataaacaggagctggcgaaaaaagaaattgatgtgatttcgattccctcaaaatgtctattactggtacatgagcctaaattgaaggtggatctgaccaagtacttggaaaatcaagccttctgttttgatttcgctttcgatgaaacggcctctaatgaggtggtttatcgctttactgctagacctttggttcaaactattttcgaaggggggaaagcaacgtgcttcgcatacggacaaactggcagtggtaagacccatactatgggcggagatctgtccggaaaagcacagaatgcctccaagggaatctacgcgatggcctcacgggatgtctttctactgaagaaccagccctgttatcggaaactcgggctagaagtttacgtcacattttttgaaatttacaatggcaagctctttgacctcctgaataagaaggccaagttgcgggttcttgaagacggtaagcagcaggtgcaagtggtgggcctgcaggaacacctggtgaatagcgcagatgatgtgattaaaatgatcgacatggggtcagcctgcagaacctccgggcagacatttgccaattccaatagctcgagaagccacgcttgtttccaaattatacttcgcgctaagggtcgaatgcacggaaagtttagccttgttgacctggctggaaatgaacgtggtgccgacacatcatctgcggacagacagacacgaatggagggcgccgaaataaataaatcccttctggctctgaaggagtgtattcgggctctcggccagaataaagcacacacgccctttagagagtctaaactgactcaggtactgcgggactcctttattggcgagaattctagaacctgtatgatagcaactatttctccaggtatcagcagctgcgagtacacgttaaacacactgcgttacgcggaccgagtcaaggaattgagtccacattccggaccttcaggggagcaattgatccagatggagactgaggaaatggaagcatgtagcaatggagctctgatacctggcaacctttctaaagaagaggaagaactttcaagccagatgtcgtcatttaatgaagccatgactcagatccgagaattagaggagaaagccatggaagaactcaaagagatcatccaacagggacctgactggttggagttaagtgagatgactgaacaacccgattatgacctcgagacctttgtcaataaggctgagtcagctctggcacagcaagccaaacactttagtgctcttcgggatgtgattaaagctctccgcctggctatgcagcttgaggaacaagccagccgccaaatctcatccaaaaaacgaccccagtag

SEQ ID NO: 121669 - DNA, 1839 bp, synthetic construct
  misc_feature 1..1839: note = Description of Artificial Sequence: Synthetic coding sequence
  source 1..1839: mol_type = other DNA
atgtcaaccgtttcagagctgagaattaccgcccaagagaatgacatggaggtggagctgcccgctgctgccaattctcgcaaacaattcagcgtgccccctgccccgactagaccctcatgcccagccgtcgccgagatacccttacgtatggtgagcgaggaaatggaagaacaggtgcattcaatcagaggatctagctcagcaaaccccgttaactccgtcagacggaagagctgtctcgttaaagaggtggaaaaaatgaagaacaagagggaggaaaaaaaggcgcagaattcagaaatgcggatgaagcgcgctcaggagtatgattccagtttcccaaattgggaatttgccaggatgatcaaagaattccgggctaccttagagtgtcaccctttaaccatgaccgatcccatcgaagagcatcgcatatgcgtctgcgtgaggaagcgacctctgaacaagcaggaattagctaagaaagaaatcgatgtcatctcaattccgtccaaatgcctcctgctcgtccacgagccaaagctgaaagttgacctgacaaaatacctggagaaccaagctttttgtttcgacttcgcctttgacgagactgcctccaatgaagtggtgtaccgcttcaccgcccgaccactcgtccagacaatcttcgagggcggaaaagctacatgcttcgcatatggtcagaccggcagtggaaagacacatacgatgggtggtgatttatctggaaaggctcagaacgctagtaagggaatttacgctatggcctcccgggacgtgttccttcttaagaaccagccttgctacagaaagttgggcttggaggtgtatgttacatttttcgagatctataacggcaaactgtttgatctcctgaataagaaagctaagctccgcgtcctggaggacgggaagcagcaagtccaagtggtgggtttacaagaacatctggtgaactcggcagatgatgttatcaaaatgattgacatgggatccgcgtgcaggacgtcaggccagacgttcgccaattctaacagttcccgatctcacgcctgttttcaaatcattctgagagccaaaggtcgtatgcacggcaagtttagcctggtggacctggcaggcaatgaacggggagcagatacctcaagcgcagaccggcaaacccggatggagggggctgagatcaataagtcactgttagcattgaaggagtgcatcagggccctcggacagaacaaggcacatacgcctttcagagagtccaaactcacccaggttctaagggattcctttataggcgaaaactctaggacatgtatgatcgctacaatttcaccagggattagctcgtgtgaatatacgctgaatacactccgctacgctgacagagtcaaggagctctctccccactcgggccctagcggagaacagctcatccagatggagaccgaagaaatggaggcttgtagcaacggagccctgatcccgggaaacctgagcaaagaggaggaagaactctctagtcagatgtcttccttcaacgaggccatgacccagattagagaactggaggagaaggccatggaggaactgaaagaaatcatacagcagggtccggattggttggagctgagtgagatgacagagcagcccgattacgatttagagacctttgttaacaaggcagagagcgcactggctcagcaagccaagcattttagtgccctgagagacgtgataaaagcactgcgactggccatgcagctggaggagcaggcttccaggcagatcagcagtaaaaagcgccctcagtag

SEQ ID NO: 121670 - DNA, 2178 bp, synthetic construct
  misc_feature 1..2178: note = Description of Artificial Sequence: Synthetic coding sequence
  source 1..2178: mol_type = other DNA
atggctatggattccagcttgcaagccagactgttccctggcctggccattaagatacagaggtccaacggtttaatacactctgctaacgtccgcaccgtcaacctagaaaagtcttgtgtcagcgtggagtgggctgagggcggtgctacaaaagggaaggaaatagacttcgacgatgtcgcagcaataaaccccgaattgctgcagcttcttcccctgcatccaaaagataatcttccacttcaagaaaatgttactattcagaagcagaagaggaggtccgtgaatagtaagatacccgcacccaaggaatccctgcgctcacgctccactaggatgagcacagtgagtgagctgcgcatcactgctcaggagaacgatatggaggttgagttgcccgcagcagcaaacagcagaaagcagttctccgtcccgcctgcccctactcgtcctagctgccccgccgtggccgagatccccctgcggatggtatcagaagaaatggaggagcaggtgcattctattagaggctccagttctgctaacccagtgaacagtgtcagaaggaaatcctgccttgtgaaagaagtggagaaaatgaaaaataaaagagaggagaagaaagcacagaactcagaaatgcggatgaagagggcgcaggagtacgacagcagttttcccaactgggaatttgccaggatgattaaggagttccgcgctacacttgagtgccaccccttgacaatgacagaccccattgaagagcaccgcatttgtgtgtgcgtccgaaagcgaccccttaacaagcaagagctggcaaagaaagaaatagacgtgatctctatccctagcaaatgcctcctactggtccacgagccaaagctaaaggtggacctgacaaagtatttggagaatcaggccttctgcttcgactttgcttttgatgaaaccgctagcaacgaggtcgtataccgatttacggctcgccccctcgtacagaccatcttcgagggcggaaaggcgacctgctttgcatacggtcagacgggatccggtaagacacataccatgggcggggatctctccgggaaggcccagaacgcgtccaagggcatttacgccatggctagtagggacgtgttcctgctgaagaatcagccctgctacagaaaactggggctcgaggtgtatgtgactttttttgaaatctataacggcaagttgttcgatctcctgaataagaaagccaaattacgagtgttagaggacggcaaacagcaggtgcaggtggtcggtcttcaggaacatttagttaatagcgccgatgatgtcataaaaatgattgatatgggcagtgcctgcagaacatcaggacagacctttgctaactcaaatagcagtaggtcgcatgcttgctttcagattatcctgagagccaagggaaggatgcacggcaaatttagcctcgttgatcttgccggtaacgagaggggagccgacacatcctctgcagatcggcagacacgcatggaaggtgcagagataaacaagtccttgctcgcccttaaagaatgcataagggccctagggcagaataaagcacataccccatttagagagtctaagcttacccaggtactgagggatagcttcattggcgaaaactctcgcacatgtatgattgcaactatttcccccggcatctcttcctgtgagtacaccctgaacacactgcgatatgcggacagggtgaaggagctctctccgcacagtggcccctcaggagaacagcttatacagatggagaccgaggagatggaagcttgttccaacggcgcactgattccagggaacctgtcaaaggaggaagaggagctgtcttcacagatgtcgtcatttaatgaagccatgactcaaatcagggagctggaggagaaggccatggaggaactgaaagagattatacagcagggcccagattggctggagctatccgagatgaccgagcagcccgactacgatctcgaaacctttgtcaacaaagccgagagcgctctggcccagcaggctaaacatttttccgccctgagggacgtgatcaaggctctgcgcctggccatgcagctggaggagcaggcgtcccggcagattagcagcaagaagagaccacagtag

SEQ ID NO: 121671 - DNA, 324 bp, synthetic construct
  misc_feature 1..324: note = Description of Artificial Sequence: Synthetic coding sequence
  source 1..324: mol_type = other DNA
taaaaagaatgtattagagcacttggacagaacaaggcacacacccctttcagagagtccaaactgacccaggtgctccgggattccttcatcggcgagaattctaggacgtgcatgattgctaccatctccccgggtatcagctcctgtgaatatacactaaacaccttgagatatgcggaccggcagggatgtcatagtattcccctggaaccacaggcttcaaagccagggcgatgtcacattccactgcttagtaaggaggaagaggagctgtccagccagatgagttctttcaatgaagctatgacacagatcagatag

SEQ ID NO: 121672 - DNA, 1011 bp, synthetic construct
  misc_feature 1..1011: note = Description of Artificial Sequence: Synthetic coding sequence
  source 1..1011: mol_type = other DNA
atggccatggattcctccttgcaggcccggttgttccccgggcttgctatcaagatacaaagatctaatggcctgatacactctgcaaatgtgcggacagttaatttagaaaagagctgtgtgtcagtggagtgggcggaagggggcgcgaccaagggcaaagaaattgacttcgacgatgtggctgcaatcaaccccgaactgctccagctgctaccacttcaccctaaagataaccttcctctgcaagaaaacgtgaccatccaaaagcaaaaacggcgcagcgttaattctaagatccccgcccctaaggagtcgctcaggtcaagatcaactaggatgagtacagtgtcggaactgagaattacagcccaagaaaatgatatggaggtagagttaccagctgcagctaactcaagaaaacaattcagcgtccccctcagaagaaaatcatgcctggtgaaggaggtcgaaaagatgaaaaacaaacgagaagaaaagaaagcccagaattcagagatgaggatgaaaagagcccaggagtatgattcctccttccctaattgggaatttgcaaggatgataaaagaatttcgggctaccctggaatgccatcccctcacgatgaccgaccctatagaagagcacagaatttgcgtgtgtgtacgcaaaagacccttgaataaacaggaacttgcaaaaaaggaaatcgatgtaatcagcattccaagcaagtgtctgcttcttgtccacgagcctaagttgaaggtggacttaaccaagtatctggaaaatcaggctttctgtttcgatttcgccttcgatgaaaccgcgtccaatgaagtcgtttaccgctttaccgcgcggcccctggtgcagaccatctttgagggcggaaaggccacatgcttcgcttatgggcagaccgggagcggcaagacgcataccatgggcggcgacttgagtggcaaagcacaaaacgcctcaaaaggcatttacgctatggcctag

SEQ ID NO: 121673 - DNA, 864 bp, synthetic construct
  misc_feature 1..864: note = Description of Artificial Sequence: Synthetic coding sequence
  source 1..864: mol_type = other DNA
atggtgaggtccggcgtcccccgaagtaggggcttagtatccgggctgattcactcagccaacgttcgaaccgtgaacttagaaaaaagttgcgtctctgtggagtgggctgaaggtggcgccactaagggcaaggagatcgactttgatgacgtcgccgcaattaatcctgagctgttacagttgcttcccttgcaccccaaagataatttgcccctacaagagaatgtaactatccaaaaacagaagagaaggtccgtaaacagcaaaatccctgccccgaaggagtctctcaggtcaaggagcacccgaatgtcgaccgtctcggagctgagaataacggctcaggagaacgacatggaggtggaactgccagctgccgcaaactccagaaaacaatttagtgtccctcctgcaccgaccaggccctcctgccccgcggttgccgagattccccttcggatggtgtccgaggagatggaagagcaggtccactcaatccgcggatcttcctctgccaatccagtgaactcggtcagacggaagtcctgtctcgttaaggaggtggagaaaatgaaaaacaagcgggaggaaaagaaagcacagaactctgagatgagaatgaaaagagcacaggagtacgactccagctttcctaactgggaatttgccaggatgataaaggaatttagggctacactggagtgccaccctctgactatgactgatcctatagaagagcatcgcatctgtgtgtgcgtgaggaaacgtccactgaacaaacaggagctggccaaaaaagagatcgatgtcataagcattccctccaagtgcctcctgctggtccacgaaccaaaactctag

SEQ ID NO: 121674 - DNA, 2244 bp, synthetic construct
  misc_feature 1..2244: note = Description of Artificial Sequence: Synthetic coding sequence
  source 1..2244: mol_type = other DNA
atgtcaaagctaaaaagttctgagagtgtccgtgttgtggttaggtgtagaccgatgaatggcaaagagaaagccgcctcttacgacaaggtcgttgacgtggacgtcaaactcgggcaggtgtccgttaaaaatccaaaaggtacagcccatgagatgccaaaaacattcacctttgacgctgtctacgattggaacgctaagcagttcgagctgtatgatgaaaccttccgacctctcgtcgattcggtgctccaagggtttaacggcacgattttcgcatatgggcagactggaactggaaaaacgtacaccatggaaggaattaggggggacccggaaaagcgtggggtcatccccaatagtttcgatcacatctttacccatatctcgcgctcccagaatcagcagtatctggtacgagcgtcttaccttgaaatctaccaggaggagatccgcgacttactgagcaaggaccagaccaaacgactggaactcaaggagaggcccgacacaggagtgtacgtcaaagatctcagttccttcgttaccaagtctgtgaaggagattgaacatgtcatgaatgttgggaatcaaaatcgctccgttggcgcaaccaacatgaatgagcatagttctcgatcccatgctatcttcgtcatcactatagagtgctccgaggtaggtttagacggggagaaccatatcagggttggcaaactgaatttagttgacctcgcaggcagcgagcgccaagccaagacaggtgcacagggggaacgccttaaagaggctactaaaattaatttatcactgtccgccctgggaaacgtgatttccgcactggtggacggcaaatctactcacatcccttaccgcgatagcaagctgacacgtctgctgcaagactcactgggcggcaacgctaaaacagtcatggtggctaacgttggccctgcaagctataacgtcgaggaaacactgacaaccctcaggtacgccaaccgggccaagaatattaagaataagccccgcgtgaatgaggatcccaaggatgccttgctaagggaattccaggaagaaatcgcacggctcaaggcacagctggaaaagaggagtattggtaggcgtaagcgtagggagaagaggagggaggggggggggtctgggggaggcggcgaagaagaagaagaagagggtgaggagggggaagaagaaggagacgacaaggatgattattggcgtgaacaacaggaaaaattggaaattgagaagcgcgctattgttgaggatcattcactagtagcagaggagaagatgcggctgctgaaagaaaaggaaaaaaagatggaagacctcaggcgagagaaggacgcagcggagatgctcggagccaagatcaaggccatggagagcaagctgttagtagggggcaagaacatcgtagatcacaccaatgagcagcagaagatcttggaacagaagcgccaggaaatcgccgagcaaaaaaggagggaaagggagatccagcaacagatggaatcccgagatgaagagacgttagagctcaaggaaacctacagttccttgcagcaggaggtggacatcaagacaaaaaaactgaagaagcttttcagcaagttgcaggccgttaaggcagagatccacgacctgcaggaagagcatattaaggaaaggcaggagctcgagcaaacgcagaacgagttgacccgagagctaaagctcaagcatctcataattgaaaattttattcccctggaagaaaaatcaaagatcatgaacagagctttcttcgacgaggaggaggaccactggaaattgcacccgataacccgactcgaaaaccagcaaatgatgaagagaccagtgagcgcggtgggttacaagcggcctttgtcccagcatgccagaatgagcatgatgatccgtccagaggcgcggtaccgcgccgagaacattgtgctcctggaacttgacatgccatcacgcactacaagagattatgagggtccagctatagcgccaaaggtgcaagccgcgctggatgccgctttgcaggatgaggatgagatacaggtggacgcctcatcctttgaatcaacagctaataagaagtccaaggccaggcccaaatccggaagaaagagtgggtcttccagcagctcttctggtacgcctgcctctcagctttatccacaaagcagaggactcgtccccaaatag

SEQ ID NO: 121675 - DNA, 1122 bp, synthetic construct
  misc_feature 1..1122: note = Description of Artificial Sequence: Synthetic coding sequence
  source 1..1122: mol_type = other DNA
atggtagctaacgtgggaccagcctcctataacgtcgaagaaacgttgaccacactccgatatgctaacagggctaagaatatcaagaacaaaccccgggtcaacgaggatccaaaggacgcactgttaagggaatttcaggaggagatcgcacgtctgaaagcacagctggaaaaacgatcgatagaagagaagatgcgtctgctgaaggagaaggagaagaaaatggaagatcttcgacgtgaaaaggatgccgccgagatgctgggtgccaagatcaaggcaatggaaagcaaactcctggttggaggaaagaacatcgtcgaccacactaatgagcaacagaagattctcgaacagaagagacaggagatcgcggaacagaaacgcagggagcgcgaaattcaacagcaaatggagagccgagacgaggaaacactggaactcaaagagacgtattcaagcctccagcaggaagtggacatcaagactaagaaactcaagaaactgttctctaaactccaagccgtgaaggccgagatacatgacctgcaggaagagcatatcaaggaacgacaggaactggagcaaacccagaacgagctaactagagaactgaagctgaaacatctaatcatagagaacttcatcccattagaagagaagtcaaaaattatgaatagggctttttttgatgaggaggaggatcattggaaactccaccccatcacaagactggagaaccaacagatgatgaaaaggcccgtgtccgcagttggttataaacggcccctgtcccagcatgctcggatgtcgatgatgattcgtcctgaggctcgatatcgcgctgagaatatagtcctacttgaactggacatgcccagccggactactcgggattatgagggacctgcaatcgcgccaaaagtgcaggccgcccttgacgctgctctgcaggacgaagacgagatccaagttgacgcttcttcctttgagtccacggctaacaaaaaaagtaaagcccgccccaaatccggtagaaagtctgggtctagcagctcttcttccgggactccagcctctcaactgtatccccagtcaaggggtctcgtgccgaagtag

SEQ ID NO: 121676 - DNA, 2382 bp, synthetic construct
  misc_feature 1..2382: note = Description of Artificial Sequence: Synthetic coding sequence
  source 1..2382: mol_type = other DNA
atggccagcaaaactaaggcgtccgaagctctcaaggtggtggctcgctgtagaccccttagcagaaaggaagaggctgcaggtcatgagcaaattcttacaatggatgtcaagttaggacaagttactcttcggaaccccagggctgcccccggcgaattgccaaaaaccttcacatttgacgccgtttatgacgccagttcaaagcaggccgacctatatgacgagactgtcagacccttaatcgactcagtcttacagggattcaatggcacggtgttcgcctacggacagaccggaacaggcaagacatatactatgcaaggcacgtgggtggagcctgaacttaggggcgtcataccaaatgctttcgaacatattttcacgcacatcagtcgctctcagaatcagcaatatctggtccgcgcaagctatttggaaatctatcaagaggagataagggacctcttatcaaaagagccaggcaagaggctggagttgaaggagaaccccgagactggagtatatattaaagacctgtcctcattcgtgacaaagaatgtgaaggagatagagcatgtgatgaacctgggaaatcagacaagagcagttggcagtacacatatgaatgaagttagcagtcgttctcatgccattttcatcatcaccgtagagtgctccgaacgcggctccgatgggcaggatcacattagggtcggtaaactcaacttagtagatctagctgggtctgagaggcagaataaggcaggacctaacaccgctgggggtgccgcaaccccctctagcggcggcggaggtggaggcggtggctccggtggcggggctggcggcgagaggcctaaggaggcgagcaagattaacctttcactgagtgctttggggaacgtaatcgcagccttagcaggaaaccgctctacccatataccgtaccgtgacagcaagctaacccggttgttgcaagatagcttgggtgggaacgccaaaactataatggtggctacactgggcccagccagtcacagctacgacgagagtctgtccacactccgctttgccaacagggccaagaatatcaaaaacaagcctcaggtgaatgaagatccaaaagacaccctgctgcgggagtttcaggaagagatcgcgcgactcaaggcccaactagagaaacgaggcatgctgggaaagcggccacgccggaagtcttcccgacgcaaaaaagctgtgagtgccccgccaggataccctgaaggccccgtgatcgaggcctgggttgccgaagaagaagatgataacaacaacaaccaccgtccacctcagcccatattagagagcgcactcgaaaaaaatatggaaaactatttgcaagagcagaaggagaggctggaggaagaaaaagcagccattcaagacgacaggtccctggtgagcgaggaaaagcagaagctgctcgaagagaaagagaagatgcttgaggatttgagacgagaacaacaggccacagaattgctggccgccaagtacaaagcaatggagtccaagctgctaataggcggaagaaacattatggatcataccaatgagcagcagaagatgctcgaactgaaacgtcaggagatagctgaacagaaacgccgtgagcgtgaaatgcaacaggaaatgatgctacgcgatgaagagactatggagctcaggggaacttacacctccctgcagcaggaggtcgaggtgaagacaaaaaagctcaaaaaactgtacgcaaaactgcaggccgtgaaggccgaaattcaagatcagcacgacgagtacatcagggtaagacaggatctcgaggaagctcagaatgaacagactagggaactgaaactgaaatacctcatcatagaaaactttatccccccggaggaaaaaaataaaatcatgaaccgcctattccttgattgtgaagaggagcagtggaaatttcagccattagtgcctgcaggcgtgtcaagctcacaaatgaaaaagaggcccacaagtgctgtgggatataagcggcccatcagtcagtacgccagagtcgccatggccatgggatcccaccccaggtacagggctgaaaatataatgttcctggaactggacgtgtcaccacccgctgtgttcgaaatggagttctcacacgaccaagaacaggacccgcgagctcttcatatggaacggctgatgaggttggatagctttctggaacggccaagcacttctaaggtacgtaagtctcgttcttggtgtcaatcaccccagcggccaccccccagtaccacacacgcctccctggccagcgcctcattgaggcctgcaaccgtcgccgatcacgagtag

SEQ ID NO: 121677 - DNA, 2382 bp, synthetic construct
  misc_feature 1..2382: note = Description of Artificial Sequence: Synthetic coding sequence
  source 1..2382: mol_type = other DNA
atggcttccaaaacaaaagccagcgaagcactcaaggtcgtggccaggtgtcggcctctgagtaggaaagaggaggccgcgggtcacgaacagatactcacaatggacgttaagttgggccaggttacactcaggaaccccagggctgccccaggggagctgcccaagacttttaccttcgatgcagtttatgatgcctcctccaagcaggccgacctctatgacgagaccgtgagacctctaatcgatagtgtccttcaaggattcaacgggaccgttttcgcctatggtcaaaccgggactggcaagacctatacgatgcagggaacatgggtcgagccagagcttcgtggagtcattcccaatgccttcgaacatatcttcacccacatctcacggtctcaaaaccagcaatacctggtccgagctagctatctcgaaatttatcaggaggagattcgggacctactctccaaggaacctggcaagcggcttgagctcaaagaaaaccctgaaaccggagtctatataaaggacctttctagcttcgtgaccaagaacgtgaaagaaattgagcacgtgatgaatctggggaatcagacccgcgccgtgggctcaacacacatgaacgaggtttctagtcgatcccacgccatcttcatcatcactgttgagtgtagcgaaagagggtccgacggtcaagaccatattagggtcggcaagctgaatctggttgacctcgccgggtctgagcgccagaataaagccgggcccaatactgcgggaggagccgctacccctagtagcgggggagggggaggcggtggcggcagcggcgggggagcggggggagaacgccccaaggaagcatccaagatcaacttatcattgagcgcactgggcaacgtgatcgccgcgcttgccgggaacaggagtacccacatcccttaccgagattctaagctcacacgcctcctccaggattcccttggcggaaacgccaagaccatcatggtagccaccctcggcccagcaagccattcttatgatgaatcgctgtctacattgcgcttcgcaaaccgtgctaaaaacataaagaacaagccacaggttaatgaagatccgaaggacacactcctgagagagttccaagaggagattgcaagactcaaggcccagcttgagaagagagggatgctcggcaaacgcccacgcagaaaaagctccagaagaaagaaggcagtgagtgccccccccggctaccctgagggaccagtaatcgaggcgtgggtggcagaggaggaggacgataataataataatcaccgtccaccccagccaattctcgaatccgctctcgagaaaaacatggagaactacctgcaggaacagaaggagagactagaggaggaaaaagcagctattcaggacgaccggagccttgtgtccgaggagaaacagaagttgctggaagagaaggaaaaaatgctcgaggatctccggcgggagcagcaagctacggagctgttggcggcaaagtacaaggctatggaatcgaaattgttaatcggcggtcgtaacattatggaccacaccaatgaacagcaaaagatgctcgagctcaaaagacaggaaatcgcggaacagaagcgccgtgagagagagatgcagcaggagatgatgctgagggacgaggaaactatggaattaaggggaacttacacatctctccagcaagaggttgaggtgaaaactaagaaacttaagaaactgtacgccaaactgcaggcagtaaaggccgaaatccaggatcaacatgatgagtatatcagggtccggcaggatctggaggaagctcagaatgagcagactagagaacttaagctcaaatatctgatcatcgagaacttcattcctccagaggagaagaataaaataatgaatcgcctgtttctcgactgtgaagaagaacagtggaagttccaacctctggttccggcaggcgtcagctcatcgcagatgaaaaagaggccaacaagtgctgtgggctacaagcggcccatatcacagtatgcaagagtggccatggctatggggagccatcctagatatcgagcagaaaacattatgttcctggagttggacgtctctccccctgccgtgtttgagatggagttttcacacgaccaggaacaggatcccagggcattacacatggaacgcctcatgaggcttgactcattcttggagcggccctcaacctcaaaagtgcggaagagtcgcagttggtgtcaaagcccccaaaggcccccaccatcaaccacccacgctagcctggcctcagcatctctgcgtccagctactgtcgcagatcacgagtag

SEQ ID NO: 121678 - DNA, 1800 bp, synthetic construct
  misc_feature 1..1800: note = Description of Artificial Sequence: Synthetic coding sequence
  source 1..1800: mol_type = other DNA
atgaatttggggaaccagacgagggctgtcgggtccacacacatgaacgaggtcagcagtcgaagccatgctatcttcattataacggtggagtgcagtgaacggggaagcgatggacaagaccatattagagttggcaaactgaacctagtggatctcgccggcagcgagagacaaaacaaggcaggtcctaacaccgctggcggtgcagccaccccttcttccgggggtggaggtgggggagggggcagcggcgggggcgctggcggagagcgcccaaaggaagcaagtaaaattaatctctccctgagtgctttgggaaacgtcattgcagctctcgccggaaatcggtccactcacatcccatatagggacagcaagttaaccaggctactgcaggatagtctggggggaaacgccaaaactatcatggttgccacactcgggcctgcctcccatagttatgacgaaagcctgtcgaccttgaggtttgctaaccgcgcaaagaatattaagaataaacctcaggtcaatgaggatcctaaggacaccctgttgagagagttccaggaagaaattgccaggctaaaggcccagcttgaaaagcgaggcatgctcggaaagcgccctaggcggaaatctagccgtcgaaaaaaggccgtttctgctccaccgggttatcctgaggggccggtcatagaagcttgggttgcagaggaagaagatgataataacaacaaccaccgtcctccccagcccatccttgaaagtgccctggaaaaaaacatggagaattatctgcaggagcagaaggagaggctggaggaagagaaggccgccattcaggacgatagatctctcgtgagcgaagaaaagcagaagctcctagaagaaaaggaaaagatgctggaagacctgcggcgtgagcagcaggccaccgaattacttgctgccaagtacaaggccatggagagtaagctgttgatcggcggacggaacatcatggaccacacaaacgaacagcagaaaatgctagaactcaaacgtcaggagatagccgagcagaaacggcgtgaaagggagatgcagcaggagatgatgctgcgagacgaggaaacaatggagctaaggggcacatacacatcactgcagcaagaggtagaggtgaagactaagaaacttaaaaagctttatgccaagctgcaagctgtgaaagccgagatacaggaccagcatgacgagtacatcagggtacgtcaggatctagaggaagcgcaaaatgagcagacacgcgaacttaagcttaagtacctcatcattgagaacttcattccgcccgaagaaaagaataagatcatgaaccggctctttctagattgtgaggaggagcagtggaaattccaaccactggtcccggctggagtatcatcctctcagatgaagaagcgtccaactagcgctgtgggatacaagagacctatatctcaatatgccagggtggccatggccatggggagccaccctaggtacagagccgagaacatcatgtttttggagctggacgtgagcccgccagccgtgtttgagatggagttcagtcacgatcaggaacaggatccccgggctctccacatggagcgattgatgagactggatagcttcctggaacggcctagtacctcaaaagtacgaaaaagtcgcagctggtgccagtcccctcagcgcccccctccaagtactacacacgcaagcctggccagtgccagcctgcgcccagccacagtagctgaccatgagtag

SEQ ID NO: 121679 - DNA, 3384 bp, synthetic construct
  misc_feature 1..3384: note = Description of Artificial Sequence: Synthetic coding sequence
  source 1..3384: mol_type = other DNA
atgaaagaggaggtgaaggggatccctgtgcgcgtcgctctcagatgtagaccactagttccgaaagagatttcagagggatgccagatgtgcctgagtttcgtccccggggagccacaggtggttgtgggcacagataaatcttttacatacgatttcgtctttgaccccagtaccgagcaggaggaggtctttaacaccgccgtcgcccctctgattaaaggtgtcttcaaaggatataatgcaaccgtcctggcatacggccagactgggagcgggaagacttactctatgggcggcgcctacactgctgagcaggaaaacgaaccaacggtgggcgtcattccaagggtgatacaactcctgtttaaggaaatcgacaagaaaagtgattttgagtttactttgaaggtgagttacttagaaatctacaacgaagaaattctggacttactgtgtccatctcgagaaaaagcgcagattaacataagggaagatccaaaagagggaattaagatcgtaggcctgacggaaaaaacagttttggtggctttggataccgttagctgtctcgaacagggaaacaattcgcggacagtcgcctcaacagctatgaatagccaaagttcgagaagtcatgccatttttactataagtctcgagcaaaggaaaaagagtgataaaaatagttcttttcgctcaaaattgcacctggttgacctggccggctccgagcggcaaaagaaaactaaggccgaaggcgacagactcaaagaaggtattaatatcaataggggcctcttgtgcttgggcaatgtcatcagcgctttaggtgatgataaaaagggcggattcgtcccctaccgagacagtaagctgactcgcctgctgcaggactccctggggggaaacagccataccctcatgatagcgtgtgtatcaccagccgattccaacctggaagagacactcaataccctcaggtatgcggaccgggccaggaagatcaaaaacaagcctattgtgaacatcgacccgcagaccgccgagttaaatcatctgaagcagcaagtgcagcagttgcaagtcttactactgcaggcccacgggggcacccttccgggtagcatcacagtagaaccctctgagaacctccagagcctaatggagaagaaccagtcactggtggaggaaaatgagaaactcagtcggggcctgagcgaggccgcgggccagaccgctcaaatgcttgaaagaatcatcctgacagaacaggctaatgaaaaaatgaatgccaaactggaggaactgaggcagcacgccgcatgtaagctggacttgcagaagttagtggaaaccttggaggaccaggaactcaaagagaatgtcgagatcatctgtaacctacagcaactcatcacgcagctctccgacgaaactgtggcatgtatggctgccgccatcgacacggccgtggaacaggaggcacaggtggaaacctcaccggaaacctcccgctcgtctgacgcttttaccacgcagcacgcgctgcggcaggcgcaaatgagcaaagaacttgtggaactgaacaaggctctggcgctcaaagaagccctggccaggaaaatgactcagaacgattcccagcttcagccaatacagtatcagtatcaagacaatataaaggagctagagctcgaggttattaacctccagaaggagaaagaggagctggtgctggagttgcagactgctaaaaaggacgccaaccaagccaagttgtcggagaggaggcggaaaagacttcaagagttagagggccaaatcgcagaccttaagaaaaaactaaacgagcagagtaagctgctgaagctcaaagaatctacagagcgcacagtctctaaactgaaccaagaaattcgtatgatgaagaaccaaagagtgcagctgatgaggcagatgaaagaggatgccgagaagttccggcagtggaagcagaagaaggacaaggaggtcatacagctgaaggaaagagaccggaagcggcagtacgagcttctgaaactagaacgaaacttccaaaagcagtctaacgttttacgccgcaagacagaggaggcggctgccgcaaacaaacggctcaaagacgccctgcagaagcagagggaggttgccgataagcggaaagagacgcagtcacgggggatggagggcactgctgccagagtgaagaattggttggggaacgagattgaggttatggtttctacagaagaggctaagcgccaccttaacgacctcctcgaggaccggaaaatcttagcccaggatgtagcccaactcaaagaaaaaaaggagtccggcgaaaacccccctcctaagttgcggaggagaactttcagcttaactgaagtgcgcggccaggtgagtgaatcagaagattcgattaccaagcagatcgaatctttagaaacggagatggagttcagatccgctcaaattgcagatctgcagcagaaactgctcgatgcagagtcagaggatcggccgaaacagcgctgggagaacatcgcaacaattcttgaggccaaatgcgctttaaaatatctcattggagaactcgtgtcttccaagatccaggttagcaaattagaaagtagcttgaagcagagtaagaccagctgtgccgatatgcagaagatgctcttcgaagaaaggaatcacttcgctgaaattgagaccgagctgcaagcggagcttgtcaggatggaacagcaacaccaagagaaggtactgtacctgctgagccaactccagcagagtcagatggctgaaaagcaactggaggagtctgtgtccgaaaaagagcaacaactgctgtccaccttgaaatgtcaggacgaagagctggagaaaatgcgggaagtttgcgaacaaaaccaacagctactgcgagagaatgagataatcaagcagaagcttacgttgctacaagtggcatctcgccagaaacatctgccaaaggacacgctcctctcaccagactcgagcttcgaatacgtgccacccaaacccaagccatccagggtcaaagagaagttcctggaacaatcaatggatatcgaggacttgaaatactgttcagagcactctgtgaatgaacacgaagacggcgacggcgatgacgacgaaggagacgacgaagaatggaagcctactaagctggtgaaggtgtcccgcaaaaacatccagggcgtcctcctattaacacctgtgatcagtgctctctgggaggctgaggcaaggggactcctagaggcacgctctagccgtccggcctgggctacgtggcgggatcctgtgtctactaaaccaaaaaactag

SEQ ID NO: 121680 - DNA, 3699 bp, synthetic construct
  misc_feature 1..3699: note = Description of Artificial Sequence: Synthetic coding sequence
  source 1..3699: mol_type = other DNA
atgaaagaggaagttaaagggatacctgttcgggtggccttgcggtgtcgacccctggtgccgaaggagataagcgaggggtgccagatgtgcctttcctttgtgcccggcgagccccaggtggtggtgggcaccgacaagtcatttacttacgattttgtgttcgacccttccactgagcaggaggaagtattcaatactgcagtggcgcctttgattaaaggcgtttttaaagggtataatgccacagtgctcgcttatgggcagacaggttccgggaagacatactctatgggtggcgcctatactgcagagcaggagaatgaacctacggtgggggtgatacctcgggtgattcagcttcttttcaaggagatcgataagaagtctgacttcgaattcaccctgaaagtgtcatacctggaaatatacaacgaggagattctggatctgctgtgtccctcgcgggagaaggcccagataaatattcgagaggaccccaaggaaggcatcaagattgtaggcctcacagagaagactgttctcgtggccttggatactgtctcctgtttggaacagggtaataactcccggaccgtcgccagtaccgccatgaattcccagagcagtcggtcgcatgcaatcttcaccatttcgctggaacagcgcaagaaatcagataagaattccagctttcgcagtaagttgcatcttgtcgacttggccggctccgagaggcaaaaaaagactaaggctgagggagatcgcctgaaagaaggtattaacattaataggggcctattgtgcttagggaatgtgatttcggcacttggtgatgataagaagggaggattcgttccttaccgagacagtaagctgacacggctgctccaagactccctgggtggaaatagccacacactgatgatagcgtgcgtgtctcccgccgatagcaacctggaagagaccctcaatactcttaggtatgccgatcgggctcgcaagataaagaacaagccaattgtgaatattgatccgcagaccgctgaattgaaccatctcaaacagcaggtccaacagctccaagtgctgctgctccaggcgcatgggggaaccctgccaggctcgattactgttgagcccagcgagaacctgcagtccctgatggagaagaatcaatcactcgtggaagaaaacgaaaaattgtcccgcggactgagcgaagctgccggtcagaccgcccagatgctcgagcggattattctcaccgaacaggccaatgagaaaatgaacgcgaagctggaggagttgcgtcagcacgcagcctgcaaacttgacctccaaaaactcgtggagaccctcgaagatcaggaattgaaggaaaacgtggagattatatgcaacctgcaacagttgattacacagcttagcgatgagactgtagcatgtatggccgctgccatcgatactgccgtcgagcaggaagcccaggtggagacctcacctgaaacaagcagatcctcggacgcattcactacgcagcatgccttgcgccaggcccaaatgagtaaagaattggtggagctgaacaaggctttagcactaaaggaggctctggccagaaaaatgacgcagaatgactcccagctacagccaatacaatatcaataccaggacaatattaaagagctcgagctggaagtgatcaatctgcagaaagagaaggaggaactagtccttgagctgcagaccgctaaaaaggacgctaatcaggctaaactgagcgaacgccgtcggaaacgcttacaggagctagaggggcagatcgccgacctgaaaaagaagcttaacgaacagtccaagctgctgaaacttaaagagtccacagagagaactgtgagcaaacttaatcaagagatccggatgatgaaaaaccagcgagtgcagttgatgcggcagatgaaagaggacgctgaaaaattccggcagtggaaacagaagaaagataaggaggtgatccagctgaaggaacgcgatagaaagcgtcagtatgagttgcttaaactggaacgcaattttcagaaacagtccaacgtcctccggaggaaaactgaagaggcagccgctgccaacaagaggctgaaggatgcccttcagaagcaacgagaggtggcggacaaaaggaaagaaacacaatcacgcgggatggaaggcaccgcggccagggtgaaaaattggcttgggaatgaaatcgaagtcatggtgtccacggaggaagctaagaggcatttgaatgatctactcgaggatcgtaaaattctcgcacaagatgtggcgcagctcaaggagaaaaaggagagcggcgaaaatcctccaccaaaactgcgtagaagaacgtttagcctgacagaggtcagaggacaagtgagcgaaagtgaagattcaataacaaaacagatagaaagccttgagacagagatggagtttcggtctgcccaaattgccgacttgcaacagaaactattggatgcggaatccgaggaccggcctaagcagagatgggagaatatcgccacaattctagaggccaaatgcgctcttaaatatcttatcggcgagctagtgagtagcaaaattcaagtgagcaagctagagtcctccttgaaacagagtaagacaagttgcgctgatatgcagaaaatgttgttcgaggagcggaaccatttcgcggaaatagagaccgaattgcaggcggagctcgtcaggatggaacagcagcaccaggagaaggtgctgtatctcctgagccagctgcagcagtctcagatggctgagaagcagctcgaggagagtgttagcgagaaagagcagcagcttctgtccactctcaaatgccaggatgaggagttggagaagatgcgggaagtctgcgagcagaaccagcaactgctgagggaaaatgagattatcaagcaaaagctcaccctgctgcaggttgcgtctcggcagaagcatcttccgaaggacaccctgctgtccccggattcaagcttcgagtatgtacctcctaagcctaaaccttcccgggtcaaggagaagttccttgaacaatcaatggatatcgaggacctaaagtactgtagcgaacacagtgtcaacgaacatgaggatggagatggcgacgatgacgaaggggacgacgaggaatggaaaccaaccaagctagtcaaggtctcaagaaagaacatacaggggtgcagctgtaagggatggtgcggcaacaagcagtgtggttgccggaaacagaaatctgactgcggtgtagattgttgttgcgacccgacaaaatgtagaaaccgtcagcaggggaaggactcgctaggtactgtggagaggacacaagattcggaaggctcattcaagctagaagatcctaccgaagttacgcctggtttgagctttttcaatccagtgtgtgcgactccaaactcaaagattcttaaggagatgtgcgatgtggaacaggtcctgagcaaaaagaccccaccagcaccatccccattcgatctgcctgagctcaaacacgtggcaacagagtatcaagagaacaaggcacctggtaaaaagaagaagagagcactggctagcaacacatcatttttctctggctgctctccaatcgaggaagaggcacactag

SEQ ID NO: 121681 - DNA, 1605 bp, synthetic construct
  misc_feature 1..1605: note = Description of Artificial Sequence: Synthetic coding sequence
  source 1..1605: mol_type = other DNA
atgtgcagcgatgtgaaacgcgaggccgccgcagccaataaacgtctgaaagacgccctgcagaagcagcgcgaagttgccgataagaggaaagaaacccagtccagaggcatggaagggaccgctgctcgtgtaaagaactggctcggtaacgagattgaagtcatggtgagcaccgaggaggccaagaggcatctgaatgaccttctggaagataggaagatactggcccaggatgtcgcccagctgaaagaaaagaaggaaagcggagagaaccctcccccaaaactgcgacgcaggaccttctccttgacagaggtgagaggacaggtgtcagaatccgaagattcaatcactaagcaaattgagtcactagaaaccgaaatggaattcagaagcgcccagatagcggatctgcagcagaaactgctcgacgccgagtccgaagatagaccaaaacagcgatgggagaatatcgcgaccatcctcgaagccaagtgcgcattgaaatatcttattggcgagctcgtgagctctaagatccaagtgagcaagcttgaatccagtttgaagcagagcaagactagttgtgcggacatgcaaaaaatgctttttgaagagcgaaaccactttgcagaaattgagactgagctgcaggctgagttagtgaggatggagcagcaacatcaggagaaggtcctctatctgctatctcagctccaacaatcccagatggccgagaagcaactcgaagaaagcgtttctgaaaaggagcagcagttattgagcaccctcaagtgccaggacgaggaactggaaaagatgagagaagtgtgcgagcaaaaccaacaactgctccgagagaacgaaattatcaaacagaagctcaccctgctccaagtggccagccgtcagaaacatctccctaaagatacccttctcagccctgattcaagtttcgagtacgtgccccctaaacccaaaccgagtcgggtgaaggaaaaatttctggagcagtccatggacatcgaggacctgaaatattgcagcgagcacagcgtgaatgagcacgaagacggcgacggcgatgacgatgagggcgatgacgaggagtggaaaccgactaagcttgttaaggtcagccgcaagaatattcagggatgcagctgcaagggttggtgtggcaataagcagtgtggatgccgcaagcagaaatctgattgcggagtggattgctgttgcgaccctaccaagtgtaggaaccgtcagcagggaaaggactccttaggcaccgtggaacggacccaggactctgagggctcctttaagttggaagaccctaccgaggttacacccgggctgtcgttctttaatccagtgtgcgcaacccccaactcaaagatacttaaagagatgtgtgatgttgaacaggtgctatcaaaaaaaacaccaccagccccctccccttttgacctcccagaactgaagcatgtggccacagagtatcaggagaacaaagccccaggcaagaagaaaaaaagggctctggccagcaacactagttttttctcaggctgctcacccatcgaggaagaagcacactag

SEQ ID NO: 121682 - DNA, 3705 bp, synthetic construct
  misc_feature 1..3705: note = Description of Artificial Sequence: Synthetic coding sequence
  source 1..3705: mol_type = other DNA
atgaaagaagaggtcaaaggtatcccggtgcgagtggcgttgcgctgccggcctctcgtacccaaggaaatctccgagggctgtcagatgtgtctttcctttgtacctggagaaacccaggtcgtggtcggcaccgataagtcatttacatacgacttcgttttcgacccttgtacggagcaagaggaagtatttaataaagctgtcgccccacttattaaggggatctttaaaggttataacgcgacggtgctggcctacggccaaaccggttctgggaaaacctatagcatgggaggggcttacacggccgaacaggaaaatgaaccaacagtgggaattattccaagggttattcagctgctgtttaaggaaatagataagaagtctgatttcgagttcaccctgaaggtctcatacctggagatctacaatgaagagattctggatctgctgtgcccctcgagggaaaaggcccagatcaacattcgagaagatcctaaagaggggatcaagattgtcggcttgacagagaaaaccgttctcgtcgctctggacacggtgtcctgcctggaacagggtaataactcgcgtaccgtggcctctaccgccatgaattcacagtcctctcggagtcacgccattttcaccatatctatcgaacaaagaaaaaaaagtgacaaaaactgtagctttcggtcaaaactgcacctggtcgacctcgctggaagtgagcgtcagaaaaagacaaaggccgagggagaccgcttgaaggaggggatcaacatcaaccgtggacttctctgtctggggaacgtgatcagcgccctaggagacgacaagaaaggcagtttcgtgccctatagagactccaagcttactaggttacttcaggacagcttgggcggcaactcgcacactcttatgatcgcttgtgtctcaccagccgactccaacttggaagagactttgagcacgctgagatatgcagatcgggcccggaagataaagaacaagcctatcgttaatatcgatcctcataccgctgaattgaatcatcttaaacaacaggtccaacagcttcaggtgttactcctgcaggcccatggcggcacccttcctggtagtattaatgcggagcccagtgaaaacctgcaaagtctcatggagaagaatcagtcgctggtggaagaaaacgagaagctaagccgttgtctgtctaaggccgccggccaaacggcccagatgctcgagcggattatcttgaccgagcaggttaacgagaagttgaatgccaagctggaagaactccgccagcacgtggcttgcaaactggaccttcaaaagttggtggagaccctggaggatcaggagttaaaggagaacgtcgagataatttgtaatctgcagcagctcattactcaattaagcgatgagaccgtggcatgcactgcagccgcaatcgatacagccgtggaggaagaggctcaggttgagacttcccctgaaaccagcagatcgtcagatgcattcacaacacagcatgccttgcatcaggcgcaaatgtctaaggaggtggtggaactcaacaacgccctggctttgaaagaggcactggtgcgcaagatgactcagaatgacaaccagctccagccgatacagttccagtatcaagataatattaaaaacctggaactggaggttatcaacctgcagaaagagaaagaagagttagtcagggagttgcagaccgccaagaaaaatgtgaaccaggctaagctcagcgaacaccggcacaaactcctgcaggaactggaaggccagatagcggacctcaaaaaaaagctcaacgaacaaagcaaactgttgaagctgaaggagtccacagagaggacggtgtctaaattaaatcaggaaatctggatgatgaagaatcagagggtccagctgatgaggcagatgaaagaagacgctgagaaatttcgccagtggaaacagaaaaaggacaaagaggttatccagttgaaggagcgcgataggaaacgccaatatgaactacttaagttggagcggaacttccagaaacagagtagcgttctcaggcgtaaaacagaggaggcagccgctgccaataaacgcctgaaagacgccctccagaaacagagagaggtcactgacaagagaaaagagactcaatcccacggtaaagaaggaatcgctgcaagagttagaaattggctaggcaatgagatagaggtgatggtgtcaactgaggaagctaaacgacatcttaacgacctgctggaagatagaaagattttggcacaggacgtggtgcaactgaaggagaagaaggaatcacgagaaaacccaccacctaaattgagaaaatgcacattctccttgtcagaggtgcacggccaggtgttggaatccgaggactgtatcacaaaacagatcgagagtctcgagacagaaatggaactgagatccgcccagatcgctgatctgcaacagaagctcctcgatgccgagagcgaggatcgcccgaaacaatgttgggaaaacatcgcgacaatcctggaagcgaagtgcgcccttaagtatctcattggagaactcgtctcatcgaagattcacgtgaccaagctcgagaatagtctcagacaatcaaaggcgtcatgtgcggatatgcagaagatgctattcgaggagcagaatcatttttcggaaattgagaccgaactccaggccgagttggtgcggatggaacagcaacatcaggagaaggtgttgtaccttgttagccagctgcaggaaagccagatggctgagaaacaactggagaaaagcgcaagcgaaaaagaacagcagttggtgtctacgctgcagtgccaggacgaggaactggagaagatgcgggaggtctgcgaacagaatcagcagcttctccaggagaatgagataataaaacaaaaactcattctcttgcaggtggcaagtcggcagaaacacctccctaatgacactttattgtcccctgactcttctttcgagtacatccctcccaaaccaaagcctagtagagtaaaggagaagttcctggagcaatccatggatatcgaagacctcaaatactgttctgaacattcagtaaacgaacacgaagatggtgatggcgacggcgattcggatgagggcgatgacgaggaatggaaacctactaaactggtcaaggtttcccggaaaaatatccaggggtgttcttgtaaaggttggtgcggcaataagcagtgcggctgtcgtaaacagaagagcgactgtggtgtggattgctcttgtgacccaacgaaatgccgaaaccggcagcagggcaaagattccctcgggaccgtcgagcagacacaggactctgaaggctcattcaagcttgaggatcctacggaggtcactcctggactgtcattcttcaacccagtctgcgccacacctaatagcaagattctgaaggagatgtgtgatatggagcaggtgttatcaaaaaaaacggcccctgcaccttctcccttcgatctaccagaaagcaaacacggtgccactgaataccagcagaacaagccgccgggcaagaagaaaaaacgtgctctagcctccaatactagcttctttagcgggtgtagtccgattgaggaagaagcacactag

SEQ ID NO: 121683 - DNA, 3099 bp, synthetic construct
  misc_feature 1..3099: note = Description of Artificial Sequence: Synthetic coding sequence
  source 1..3099: mol_type = other DNA
atggctgagactaacaatgagtgctctattaaagtgctgtgcagattccgccccctgaatcaggccgagatactcaggggcgataagtttatccccattttccagggcgatgacagcgtggtgatcggaggtaaaccctatgttttcgatagagtgtttccacctaatacaacccaagagcaggtgtaccacgcatgcgctatgcagatcgttaaggatgttctggcagggtacaacggcacaatcttcgcatacggacaaacctcttccggcaagacgcataccatggaggggaaactgcatgaccctcagctgatgggtataatccctagaatcgccagggacatcttcaatcacatttattccatggatgaaaacctggaattccacatcaaggtcagctattttgaaatctacctcgataagatcagagaccttctggatgtgacaaaaaccaacctaagcgtccatgaggacaagaatcgcgtgccgttcgtgaagggctgtaccgagcgctttgtgagttcaccggaagaaattctggacgtcatcgatgagggaaaatccaataggcacgtggctgttactaatatgaacgaacattcttctcggagtcattcaatattcctgatcaacataaagcaggagaacatggagacggagcagaagctcagcggcaaactgtatctagtggatctggcagggtctgaaaaagtatccaagaccggagccgagggcgccgtgcttgatgaggcaaagaacataaataagagtctctccgcccttggcaatgtgatctcggccttggccgagggcaccaaatcttatgtcccttaccgcgacagcaaaatgacccgaatcctgcaggactctctgggggggaactgtcggaccaccatgttcatatgctgcagtccatcttcctacaatgatgctgagacaaagagtacattgatgttcggccagagggccaaaaccatcaaaaacaccgcctctgtaaacctggagcttactgcagagcaatggaaaaagaagtatgagaaagagaaagagaaaacaaaggctcaaaaggaaaccattgccaagttagaggcagaactctcacgctggaggaacggggaaaacgtgccagaaaccgaaaggctggctggggaggaggcagctttaggagcggagctgtgtgaggaaactcctgttaacgataactcttcaattgtggtccgcatcgctcccgaggaaaggcagaagtacgaagaggagattaggcgcctgtataaacagctggatgataaagatgacgaaattaatcagcagtctcagcttatcgaaaagctgaaacagcagatgttagatcaggaggagctgttggtatcaacacggggagacaacgaaaaggtgcagcgggagctgagtcaccttcagagcgaaaacgatgccgcaaaggatgaagttaaggaggtactgcaggctcttgaggagcttgctgtcaattacgaccagaaatcgcaagaggtggaagagaaaagtcagcagaaccagctgttagtggatgagctttcacagaaagtggcgacaatgctcagcctggagtctgagttgcagcgccttcaagaagttagtggccaccagagaaagcggatcgctgaagtcttgaatgggcttatgaaagacctgagcgaattttccgtgattgtcggcaacggcgaaattaagctgccagtggaaatttcgggagcaatcgaagaagagttcaccgttgcaaggctgtacatatctaagataaaatccgaagtcaagtcagtggtgaaaagatgccgccagctagaaaacttgcaggtcgagtgtcaccggaaaatggaggtgaccgggagggagctcagctcatgtcaactgttaatttcgcagcatgaagcgaaaattcggtcactcaccgagtatatgcagagtgtggaactaaagaaacggcatctagaagagtcatacgactctctgtccgatgagctggccaagctgcaggctcaggagactgtgcatgaagtggccctaaaggataaggagcctgatacccaagatgctgatgaagtcaaaaaagccttggagcttcaaatggagagtcacagagaggcacatcaccggcaactggcacgactgcgagatgagatcaacgaaaagcagaagaccatagatgagctgaaggatctgaatcagaagctgcagttggaactggaaaagctccaagctgattatgagaagctcaaaagtgaggagcatgagaaaagcaccaagctccaggagctaacatttctctacgagcgacacgagcagagcaaacaagacctgaagggtctggaagagacggtggcacgcgaattgcagacattacacaatcttcgcaagctcttcgtgcaggatgttactacgagggtgaaaaagtctgctgagatggaacccgaagactctggcggtattcatagtcagaaacagaaaattagcttcctagagaataaccttgaacagctcacgaaggtgcataaacaactggttcgcgacaatgccgatcttagatgtgaactcccaaaacttgaaaagaggctgcgagccaccgccgaaagggttaaagccctcgagggagccctgaaggaggcgaaggaaggggccatgaaggataaacgaaggtaccagcaagaggtggatcggatcaaagaggccgtgcgttataaatcatctggaaaacggggacatagcgcccagatcgcaaagcctgtgcgaccagggcactacccggcaagcagtcccaccaatccctatggcacacgttcacccgagtgcattagctatacaaatagcctatttcagaactaccaaaatctctacctgcaggcaacgccatctagtactagtgacatgtactttgctaatagctgcaccagcagcggagccacctcttcaggcggcccccttgccagctaccaaaaggccaatatggataacggaaacgctaccgacataaacgacaatcgctccgacctgccttgcggatacgaggcagaggaccaggccaagctgttcccactgcaccaagaaaccgccgcaagctag

SEQ ID NO: 121684 - DNA, 381 bp, synthetic construct
  misc_feature 1..381: note = Description of Artificial Sequence: Synthetic coding sequence
  source 1..381: mol_type = other DNA
aagtcttctggcaagcgcggacactctgcacaaatcgccaagccagtcagaccaggccattacccggcgtcttctcccacaaatccctatggtacaaggtcgcctgagtgcatttcctacacaaattccctgtttcagaactatcagaatctctatctgcaggcgaccccctcttctacatctgacatgtactttgccaactcttgtaccagctctggggctacgtcaagtggcggacctctcgctagctatcagaaggccaatatggataatggtaacgcaaccgacattaacgataataggtccgacctcccctgcggttacgaagcagaagatcaagcgaagttgtttcccctgcaccaggagactgctgcgagttag

SEQ ID NO: 121685 - DNA, 2892 bp, synthetic construct
  misc_feature 1..2892: note = Description of Artificial Sequence: Synthetic coding sequence
  source 1..2892: mol_type = other DNA
atggctgatctggccgaatgcaatatcaaagtcatgtgccggtttcggccacttaacgagagcgaggttaatagaggagacaagtacatcgcaaagtttcagggcgaggacaccgtggtgatagcttcaaagccctatgcctttgaccgcgtgtttcagtcctccaccagccaggaacaagtttataacgattgcgccaaaaaaatagtgaaagacgtcttggaaggatacaatggcaccatcttcgcctatggccagacttcatcaggaaaaacccataccatggaggggaaacttcacgatcccgagggcatggggatcattcctcgcatagtacaagacatatttaactacatttactccatggacgagaaccttgagttccatattaaggtgagctatttcgagatttacttagacaagatccgggatctgctggacgtttcaaagaccaacttgtctgtgcacgaagacaaaaatcgagtgccatatgttaaaggttgcactgagagatttgtgtgttctcctgatgaagtgatggacaccattgatgagggcaagtccaatagacacgttgctgtaactaatatgaatgagcacagcagtcggtcacacagcatttttctcatcaatgtgaaacaggaaaatacgcaaactgaacaaaagctatcaggaaaattatatcttgtggaccttgctggttctgagaaggtaagcaaaactggggccgagggggctgtgttagatgaagcaaagaatattaacaagagcctgagtgccctcggtaatgtcatctccgccctagcggagggctcaacctatgtcccctaccgagactcaaagatgacccgaatcctgcaggattcccttggcggcaactgtcggacgacaatcgtcatctgctgctcaccatcgtcctacaatgagagcgagacaaaatcaaccttgttgttcggccagagagctaaaaccattaagaacactgtctgtgttaacgtggaattgactgcggaacagtggaaaaagaaatatgagaaggagaaggaaaaaaataagatactgcgcaacactatccagtggcttgagaatgagcttaatcggtggagaaatggcgagaccgtccccattgacgaacagtttgataaggagaaagctaaccttgaggcttttacggtagacaaagacataaccttgacaaacgacaaacctgcaaccgctattggggtgatcggcaatttcacggacgccgagcgtcgcaaatgtgaggaggagattgccaaactttataagcagctcgacgacaaagacgaggagattaaccaacagtcacagctggttgagaagttaaaaacgcagatgctggatcaggaggagcttttagcgagcaccagacgcgaccaggataacatgcaagctgagctgaaccgtctccaggccgagaacgatgcctcgaaagaggaagtgaaagaagtgctgcaggctctcgaagaattggctgtgaactatgaccaaaagagtcaagaagtggaagataagaccaaagagtacgaactgttgtcagatgagctgaaccaaaaatctgcgacgctcgcaagcatcgacgccgagttgcagaaattgaaagagatgacgaatcaccagaagaaacgggccgccgagatgatggcttccctgctgaaagacctggcggagatcggaatagccgtggggaataacgatgtgaaacagcccgaaggtacggggatgatcgacgaagaattcactgttgctcgcctctacattagcaagatgaaaagcgaggtcaaaaccatggtgaagcgatgcaagcagctggagagtacccaaacggagtcgaataaaaagatggaggaaaatgagaaagagttagcggcttgtcagctgcggatctcccagcacgaagccaaaataaagtccctgaccgaatacctgcaaaacgttgagcagaagaagcgccagcttgaggagagcgtggacgccctgagtgaggaactggttcagcttagagctcaggaaaaggtccatgaaatggagaaagaacacttgaacaaagtgcagaccgcaaatgaggtgaagcaggctgtggaacagcagatacagtcacatcgagagacacatcagaagcagatctctagtcttcgagacgaggtggaggccaaggctaagctgattaccgatctgcaggatcaaaatcaaaagatgatgctggagcaggaacggctgagggtagaacatgaaaagctcaaagccaccgaccaggagaaatcacgcaaacttcacgagctgactgtgatgcaggacagacgagagcaggcccgacaggatctgaagggactggaggagaccgttgctaaggaactccagaccctgcataatctgcggaagctcttcgtgcaggacctggccacccgggtcaaaaaatccgcagagatcgattcagacgacaccggcggttcggcagcccagaagcagaagataagttttcttgaaaataatctggaacaactgactaaggtccacaaacagctggtgcgcgataacgctgacttaaggtgcgagctgcctaaactcgagaaaaggctgcgcgccaccgctgaaagggtgaaggccctggaaagcgctctcaaggaggccaaagaaaacgctagtagggatcggaaacgatatcagcaggaggtcgaccgcatcaaagaagccgttcgctccaaaaatatggccagaagggggcactctgcacagatcgctaagcctataagacccgggcagcaccccgccgcaagccccacccacccaagcgcaataagaggaggcggcgcctttgtgcaaaattcgcaaccagtggcagtccgaggaggcggcggaaaacaggtatag

SEQ ID NO: 121686 - DNA, 2583 bp, synthetic construct
  misc_feature 1..2583: note = Description of Artificial Sequence: Synthetic coding sequence
  source 1..2583: mol_type = other DNA
ggaaaactccacgaccctcaactgatgggcattatccctcgcatcgcccacgatatttttgatcatatctactctatggatgaaaacttagagtttcatataaaggtgtcctatttcgaaatttacttggataagatcagggacctgctggatgtgtccaaaacaaatctcgccgtacacgaggataagaaccgggtcccttacgttaaaggctgcaccgaacgctttgtctcatctcctgaagaggtcatggatgttatcgatgagggtaaagctaatagacatgtcgctgtaacgaacatgaatgaacacagctccaggagccactccatatttctgatcaatattaaacaggagaatgtggagaccgagaagaagctttcgggcaaactgtacctggtggatctggcaggctctgaaaaagtgagcaagaccggagccgagggagcagtccttgacgaagcaaagaacatcaacaagagcttgagcgccctcggaaatgtgatttccgccctggctgaagggaccaagactcatgtgccttatagggattctaagatgacacggattttgcaggatagcctcggcgggaactgtcggaccacgatagtgatttgctgttctcccagtgttttcaatgaggcggaaacaaaaagcacactgatgtttgggcaacgggccaagacaattaagaacaccgttagcgttaacttagaactgaccgcggaggagtggaagaaaaagtacgagaaggagaaggagaagaacaagacccttaagaacgtgatccaacatcttgagatggagctgaatcgctggagaaacggcgaagccgttcctgaagatgagcagatcagtgctaaagatcagaaaaacctggaaccttgtgacaatacaccaatcatcgacaatatcgcgcctgtggtggcaggaatcagcaccgaggaaaaagagaagtacgatgaagaaatatcttcactgtataggcagttagacgataaagatgatgagattaaccagcagagtcagcttgccgaaaagcttaagcagcagatgttagaccaagatgagttgctggcttctacacggagagactacgaaaagatacaagaagaattaacacggttgcagattgaaaatgaggcagccaaggacgaggtcaaagaggttctgcaggcgctggaggaactggccgtgaattatgatcaaaaatctcaggaggtagaagataagacaagggctaacgagcaactgaccgacgaactggcccagaagaccactactctgacaactacccagcgggaactgtcacaactccaggagctatcaaaccaccagaaaaagagggccaccgagattttaaatcttcttcttaaggatcttggcgaaattggagggattatcgggaccaacgacgttaaaacactggcagacgtcaatggtgtcatcgaggaagaattcaccatggctagactgtacatctcaaagatgaaaagtgaggtgaagtccctcgtgaatcggtcaaagcagttggagtctgctcagatggactccaaccgcaagatgaacgccagtgagagagaattggccgcttgtcagctgctgataagccagcatgaggccaaaatcaagagcttgacggactacatgcagaacatggagcagaagaggcgccaactggaagaatcgcaggatagcttgtcagaggagctggctaagttgcgcgcccaggaaaagatgcacgaggtctcctttcaggacaaggagaaggaacacctgacacgcctccaagacgcagaggagatgaagaaagctttggaacaacagatggagtcacatcgcgaggcgcatcagaaacagctgagcagactccgcgatgagatcgaagagaagcaaaaaattatagatgagatcagggacctcaatcagaaactccagttggagcaggagaaactttcgagcgattacaataaactgaagatcgaagatcaggagcgtgagatgaaactggagaaactactgttactcaatgacaagagagaacaggcccgggaagatttgaagggattggaggaaacagtttctcgcgagctacagacgctgcacaacctgaggaaattgttcgtccaagaccttactacccgagttaaaaagtctgtggagttggacaatgacgacgggggtggatccgctgcgcagaaacagaagatctctttcctggaaaataatttggagcagttgaccaaagtgcacaagcaactagttagagacaacgcagaccttaggtgtgaattgcccaaactggaaaaacgccttcgcgccacggctgagcgggtgaaggctctggaatctgcactcaaggaggccaaggaaaacgctatgcgggaccgaaagcgctaccagcaagaagtcgacaggattaaggaggcagtacgagccaaaaacatggctcgacgcgcacattctgcacagatcgctaagcccatcaggccgggccactaccccgcaagctctcctacagcagtgcacgcaattaggggagggggaggaagttcctccaacagcacccactatcaaaagtag

SEQ ID NO: 121687 - DNA, 2178 bp, synthetic construct
  misc_feature 1..2178: note = Description of Artificial Sequence: Synthetic coding sequence
  source 1..2178: mol_type = other DNA
atggccacctacatccacgtctcaaagacaggcgccgagggtgctgtactggatgaggcaaaaaacattaacaagtccctttcagcgctggggaacgtgatttctgccttagccgaaggaacaaagacccatgtgccctatagggactctaagatgacacggattctccaggacagtctgggaggaaactgccgcactaccattgtgatctgctgttcccctagtgtcttcaacgaggctgaaactaaatcaacactcatgttcggacagcgcgccaagacaattaaaaacaccgtgagtgtgaacttagagcttactgctgaggaatggaagaaaaaatacgagaaggagaaggagaaaaataaaactcttaagaatgtgatccaacacttggaaatggagctgaatagatggcggaacggtgaagctgtcccagaagatgagcagatctctgccaaagatcaaaagaacctggagccttgcgacaatacacctataatcgataacattgcccccgtcgtcgccggaatatccacggaggagaaagaaaagtacgacgaggaaatcagcagcctctacagacaactggatgacaaggatgacgagatcaaccagcaaagccagttggctgaaaagctgaagcaacagatgctggaccaagacgaattgcttgcttcaacccgtagggactacgaaaaaattcaggaggagctcacacgcctgcagattgaaaacgaggccgctaaggatgaggtgaaggaggtgctgcaagccctggaagaattggccgtcaactatgaccagaagtcacaggaagtggaggacaagactagagcgaatgaacagctcactgacgaactggctcagaaaactaccactctcacgactacccagcgcgagcttagccagcttcaagagctgagcaatcatcaaaaaaagagggccaccgagattctaaatctcctacttaaggatttaggcgagattggcgggattatcggtacaaatgatgtgaaaacactggccgacgtcaatggcgtcattgaggaggagttcactatggcacgcctctatatcagcaaaatgaaatccgaagtgaagtcactcgtcaacagatccaaacagctagaatccgctcagatggatagtaataggaagatgaacgcctcagaacgcgagctggccgcctgccagttactgatttcccagcatgaagctaaaattaagtctctgaccgactacatgcaaaatatggaacagaagaggagacaactggaggagtcacaggatagtctgtctgaggagctggcaaagctgcgggctcaggagaagatgcacgaggtgagcttccaggacaaggaaaaagaacacttaacccgtctccaagacgccgaagaaatgaagaaggctctcgagcaacagatggaatcgcatagagaggcccaccagaagcagctctcccgactaagagacgagatagaggaaaagcagaaaattattgacgagattcgcgatctcaaccaaaaactgcagctggagcaagagaagctctcttctgattataacaaactgaagatcgaggaccaagaaagagaaatgaagctcgaaaagctgctgctgcttaatgacaagagggagcaagcaagagaggatctcaaagggctcgaagagaccgtgagcagagagctgcagacccttcacaatctgcgaaaattgttcgtgcaagacctgacaaccagggtcaaaaaaagcgtggagcttgacaatgatgatggagggggcagtgccgcacagaagcagaagatctcttttttagaaaacaatctcgagcagttgacaaaggtccacaagcagctcgtgcgggacaatgccgacctgcgctgcgaactgcctaaactggagaagaggctgcgcgccactgccgagcgggtgaaagcactggagtccgctttgaaggaggctaaggagaacgccatgagggatcgtaagcggtaccagcaggaagtggatcggataaaggaggccgtgagagcaaaaaacatggctcgacgcgcacacagcgcacagatcgctaagccgatccggcccgggcactacccagcttcctcccccacagccgtacacgccattcgcggcggcggggggtcatcatccaacagtacgcattatcaaaaatag

SEQ ID NO: 121688 - DNA, 2589 bp, synthetic construct
  misc_feature 1..2589: note = Description of Artificial Sequence: Synthetic coding sequence
  source 1..2589: mol_type = other DNA
atgtggggaaaattgcacgatcctcaactcatgggtatcattcccaggatcgcacatgatatctttgatcacatttatagcatggatgagaatttagagtttcacattaaggtgagctactttgagatttacctcgacaaaataagggacctgctagatgtctccaagaccaacctggccgtgcatgaggacaaaaacagagttccttatgtcaagggctgcacagagagatttgtttcctcccccgaggaagtcatggacgttattgacgaaggaaaggctaacaggcacgtcgccgtgaccaacatgaacgagcacagctccaggagtcatagcatttttcttatcaacattaagcaggaaaacgtggagacggagaagaaactctccggcaaactgtatttagtggacctggctggttctgagaaagtgagcaaaaccggcgccgaaggagcagtgctagatgaagctaagaacatcaataagagcctctcagctttgggaaatgttatctctgcacttgccgaaggtaccaaaacccacgtaccatatagagatagcaagatgaccaggatcctgcaggacagcttaggcggtaattgtagaacgactatcgtgatctgttgttctccttctgtgttcaacgaggctgagacaaaatccaccttaatgtttgggcagagagccaagaccattaagaacactgtcagtgtgaacctagaactgaccgccgaggagtggaagaaaaagtacgaaaaagagaaagaaaagaataaaaccctcaaaaatgtgatacagcatctggaaatggaactgaaccgctggcgtaacggagaggccgtccctgaggatgagcagatttcagctaaggatcaaaagaatttggagccatgcgacaacacacccatcatcgacaacatcgccccggttgtggccgggataagcactgaagaaaaggaaaaatacgacgaggagatctcttcactctatcggcagctggacgataaggatgacgagatcaatcagcagagccagctggctgagaagttaaagcagcagatgctagatcaagatgaactgcttgctagcactcgccgcgactacgagaagatccaggaagagctgacaagactacagatcgagaacgaggctgccaaagacgaggtaaaagaagttttgcaggctttggaagaactggcggtgaattatgaccagaagagccaagaagtcgaggacaagaccagagccaacgagcagctgactgatgaactagcacaaaagacaacgaccctcactaccacccagagagagttgtcgcagctgcaggagctgagtaaccatcagaagaaacgggccactgagatcctgaatcttctgctcaaggaccttggtgagatcggaggcatcatcggcacgaatgacgtgaagacactggccgatgtgaatggtgtcattgaagaggagttcaccatggcccgcctctatattagcaagatgaagagcgaagtcaagtcactggtgaacaggtctaagcaactagaaagtgcccagatggatagcaatagaaaaatgaatgcttctgaaagagagctggcggcatgtcagttacttatcagccaacacgaagctaagataaagtctctcacagactatatgcagaatatggagcaaaaaaggagacagcttgaggagagtcaggattcactgtcggaagaactggcaaagctccgggcacaagagaaaatgcatgaagtgagtttccaggacaaggagaaagagcacttgactcgactgcaggacgccgaagaaatgaagaaggccttggaacaacaaatggaatcgcatcgcgaagctcaccagaagcagctctcccgactccgggatgagatcgaggaaaaacagaagattatagatgaaataagagatctaaaccagaagctgcaacttgagcaggaaaaactcagctcggattacaacaagctcaaaattgaggatcaggagcgcgagatgaaactagagaaactgcttctcctgaacgataagcgcgagcaagccagagaagatttgaaagggctcgaggagaccgttagcagggagcttcaaactctacataacctgcggaaactgttcgtgcaggacctgactacccgagtaaagaaatcagtggagctggataacgatgacggtgggggatccgcagcacagaaacagaagatttcattcttggagaacaatctggagcagctgaccaaggtgcacaaacagctggtccgagacaacgctgatcttcggtgtgaactgcccaaacttgagaaacgtctgcgggccactgcagagcgcgtgaaagcccttgagtcagcacttaaggaggctaaggagaatgcgatgagggatcgtaaacggtaccagcaggaagttgaccgcatcaaagaagccgtgcgcgcaaaaaacatggcaagaagggctcacagtgcccaaatcgctaaacccattcggcccggccactatccagcatcgagtccgacggccgtacatgcgattcgcggaggcggcggaagcagtagtaattccactcattatcagaaatag

SEQ ID NO: 121689 - DNA, 2874 bp, synthetic construct
  misc_feature 1..2874: note = Description of Artificial Sequence: Synthetic coding sequence
  source 1..2874: mol_type = other DNA
atggccgaccctgccgaatgtagcattaaggttatgtgccggtttagaccactcaatgaggccgagattctacggggagacaagtttattcctaagtttaagggggacgagacagtggtgattggccagggaaagccctacgtatttgaccgggtgctgccacccaacacgacccaggagcaggtctacaacgcgtgcgccaaacagatcgtgaaggacgtgcttgagggatacaatggcacaatcttcgcttatggccagaccagttctggcaaaactcatactatggagggaaaactccatgaccctcagcttatgggtattatccctaggatagcccacgatatcttcgatcatatctactctatggatgaaaatctggaattccacattaaggtctcatactttgagatctacttggataaaattcgggacctgctggatgtgagtaaaacaaacttagcagtccacgaagataagaatagagtgccctacgtcaaggggtgtacggaacgatttgtgagttcacctgaggaagtgatggacgtaatcgacgaggggaaggcaaaccggcatgtcgctgtgacaaatatgaatgagcacagctcgaggagccactcaatctttttgattaatattaagcaggaaaatgtagagaccgaaaaaaaactgagtggcaaactctacctcgtggacttggccggaagtgaaaaagttagcaaaaccggggccgagggggccgtgttggacgaagcaaagaacatcaacaagagtctgtcagctctagggaacgtgatctctgctttggcagagggaaccaagacgcatgttccctatcgcgacagcaagatgacaaggatactgcaagactcactcggtgggaattgcagaacaaccattgtgatatgctgctcccccagtgtcttcaatgaagcagagactaaaagtactctgatgtttggacagcgggctaagactattaagaatacagtatcagtaaaccttgaactcactgcggaggagtggaagaagaagtatgaaaaagaaaaggagaagaacaaaacgttgaagaacgttatccagcatttagagatggagctgaatagatggcgcaacggcgaggcagttcccgaagatgagcaaattagcgctaaggatcaaaagaatctggagccttgcgataataccccaatcattgataacatcgcaccggtcgtcgccggcatttcaaccgaggagaaggagaagtacgatgaggaaattagctccctctaccggcagttagatgataaggacgatgagattaaccagcagagtcagttagcagagaagcttaagcagcagatgctggaccaggacgagctcctggcttctacccggagggactatgagaaaatccaggaggagctgactaggctccagattgaaaatgaagctgccaaggacgaggttaaagaggtactacaagctctcgaggagcttgcagtcaactacgatcaaaaaagtcaggaggtcgaagacaagacacgtgctaatgagcagctgactgatgagcttgcgcaaaagacaacgaccctgaccactactcagcgagaattgtcccagctgcaggaactaagtaatcaccagaagaagcgtgctactgagattctcaacctcctgctaaaggacctgggcgaaattggaggtattatcgggactaacgatgtgaaaactcttgctgatgttaacggcgtcatcgaggaggaattcactatggcaaggctctacatttctaaaatgaagtccgaagtcaaaagcctggtaaacagatctaaacaactggagtcagcccaaatggatagtaataggaagatgaatgcttctgagcgggagctagcagcatgtcaattattgatctcacagcacgaggcgaagattaaaagcctcactgactacatgcagaacatggagcaaaaacgaagacagctcgaggagagtcaggattccttgtccgaagaactcgctaaattacgagctcaagagaagatgcacgaggtatccttccaggataaagaaaaggagcatctaaccaggcttcaggatgctgaagaaatgaagaaggctctcgagcagcaaatggaatcgcacagggaggcccatcagaaacagctgtcccgactacgggatgaaatcgaggagaagcagaagatcatcgacgaaataagggacctaaaccagaaactacagctggagcaagagaagttgtcttcagattataacaagctcaaaatcgaagaccaagagcgggaaatgaagctcgaaaaactcctccttctcaatgataaaagagagcaggctcgcgaggatctgaaaggcctagaagagactgtgtcccgggagctccagaccttgcacaatctaaggaaactcttcgttcaggatcttacgacccgggtaaaaaagtccgtggaactcgacaatgacgacggcggcggctccgcagcccagaagcaaaagattagtttcctggagaataatcttgagcagctgaccaaggtacacaaacaactagtaagagacaacgccgacttgcggtgcgagttgcccaagttagaaaagcggctgcgagccacagccgaaagggtgaaagctctcgaatctgccctgaaagaggctaaggaaaacgctatgagagatcgcaagagatatcagcaggaagtggaccgaataaaagaggctgtgagggctaaaaatatggctcgacgggcccatagtgcacagatcgcaaaacccattcgaccaggccattatcccgcgtcctcccccactgccgtgcacgctatacgcgggggagggggctcttctagcaactccacgcactaccaaaagtag

SEQ ID NO: 121690 - DNA, 219 bp, synthetic construct
  misc_feature 1..219: note = Description of Artificial Sequence: Synthetic coding sequence
  source 1..219: mol_type = other DNA
atggccgaccctgcagagtgtagcatcaaggtgatgtgccggtttaggccactaaatgaagcagagattcttcgtggcgataaattcatccccaagtttaagggagatgaaacagtagttatcggccagggtaagccctacgtgtttgaccgcgtgcttccgcccaacacgacacaagagcaggtttacaatgcttgtgccaaacagattgtgaaatag

SEQ ID NO: 121691 - DNA, 552 bp, synthetic construct
  misc_feature 1..552: note = Description of Artificial Sequence: Synthetic coding sequence
  source 1..552: mol_type = other DNA
atggaacagaggttggccgaattccgcgcagctcgtaagagggctgggctcgccgctcagccacccgctgcatcacagggcgcacagactcctggagaaaaagcagaggccgctgcaacacttaaggctgcacccgggtggctaaagcggttcctcgtatggaagccgcggccagcctccgcccgcgcacagcctggcctcgtgcaggaagcggcccagcctcaggggagcaccagtgaaaccccttggaacaccgctattcctctgccaagctgctgggatcagtccttcctaaccaatatcacatttctgaaggtgttactatggctcgtgctcctgggcttgttcgtggaacttgagttcggcttggcttattttgtgctctctctcttctattggatgtatgtgggcacccgcggtccagaggagaagaaggagggagagaagtcagcttactccgtgttcaaccctggctgcgaagccattcagggtactttaactgccgagcaattggaacgcgagctgcaactgaggcctttggctggcaggtag

SEQ ID NO: 121692 - DNA, 2445 bp, synthetic construct
  misc_feature 1..2445: note = Description of Artificial Sequence: Synthetic coding sequence
  source 1..2445: mol_type = other DNA
atggtcaagcaaacgatacagattttcgcaagggtgaaacctcctgtaagaaaacatcaacagggtatatatagtatcgatgaggacgaaaaactcattcccagtctggagatcatcctgcctcgtgacctggctgatggcttcgtcaataacaaacgtgaatcttacaaatttaagttccagcggatcttcgaccaggatgctaatcaggagactgtgtttgagaacattgccaaacccgtcgccggatccgtgctggccggctacaatggcacaatctttgcgtacgggcaaactgggtctggtaaaactttcacgattacaggaggagcagagagatacagtgaccggggcattattccacgcaccctgtcctacattttcgaacagcttcaaaaggattcgtccaaaatctacacaacgcacatttcatacctagaaatctataatgagtgcgggtacgacctgcttgaccccaggcacgaagccagcagtctcgaagacctacctaaggtgacaatcctggaggacccagaccagaacatccacctcaagaatctgactctgcaccaggccacaacagaagaagaggcccttaatcttctcttcttgggggacacgaaccggatgattgctgagaccccgatgaatcaggccagcaccaggagtcattgcatctttacaatacacctatccagtaaggaacctggatcggccacagtgcgccacgccaagctgcacctggtagatctggctggctctgagcgggttgctaaaactggagtgggggggcaccttctcacagaggccaagtacattaatctgtcgttgcactatcttgaacaggtcatcatcgccttgtcagagaaacaccggtcacatattccttatcgaaacagtatgatgaccagcgtactgcgtgattctcttgggggaaactgcatgactactatgattgcgacactgtccctggaaaaaagaaacctggatgagtccatatccacctgccgctttgctcaacgggtcgcgcttatcaagaacgaggcggttttaaatgaagagataaatcctcgactcgtaatcaaacggctgcagaaagagatccaggagcttaaagacgaactggcaatggtgacaggcgaacaacgaaccgaagccctgaccgaggcagaactgcttcagctcgagaagctcataacctccttcttagaggaccaagatagcgactcccggctggaggtgggcgccgacatgagaaaagtgcaccactgcttccaccacttgaagaagttgctcaacgacaaaaagatccttgagaataacaccgtctccagcgaatcgaaagatcaggactgccaggaaccgctcaaagaggaggagtaccggaaactgcgagatattctcaaacagcgtgataatgaaattaacattctggtaaatatgctgaaaaaggaaaaaaagaaagcccaggaagccctgcatctggccggcatggatagacgagagtttcgtcagtcccagtcaccccccttcaggttgggaaatcccgaggaaggccagcgcatgcgcttaagtagcgctccgagccaggctcaggacttttcaatcctcggaaagcgtagttcactgcttcataaaaagattggtatgcgcgaggaaatgagcttggggtgccaggaagcattcgagatatttaaacgggaccacgccgattctgtgactatcgacgacaataagcagatcctgaaacagcggtttagcgaggcaaaggcactgggcgagtccattaacgaggcccgcagcaagatagggcatttgaaggaggagatcacccagagacatattcagcaagttgccctgggcatcagcgaaaatatggctgtcccattaatgcccgaccagcaggaggagaagctccgatctcagctggaagaggagaagcgtcgctacaagaccatgtttacccgtctgaaggcactgaaggttgaaattgagcacctgcagctcctgatggataaagcaaaagtgaagctgcagaaagaatttgaggtttggtgggccgaagaggcgaccaacctgcaggtgaattccccagctgtcaactcactggaccacaccaaaccctttttgcagacttccgacagtcagcacgagtggtctcaattgctctcaaacaagtcttcgggcggctgggaggtccaggatcaggggacaggcagattcgatgtgtgcgatgtcaatgcacggaagatcctgcctagtccttgcccctcaccccattcccagaagcagtccagtacctcaacacctctggaggacagcattccaaaaaggcccgtatcttcaatccccctgacaggggatagtcagaccgacagcgatatcattgccttcattaaagccaggcagagcatcttgcagaagcagtgtctggggtccaattag

SEQ ID NO: 121693 - DNA, 498 bp, synthetic construct
  misc_feature 1..498: note = Description of Artificial Sequence: Synthetic coding sequence
  source 1..498: mol_type = other DNA
atgatcgcagaaactcccatgaatcaggcaagcacgcgctcgcactgtatttttactatccatctctctagtaaggagccggggtccgcaacagtaagacacgcaaaactccacctggtcgatctggccggttctgaaagagtcgccaagaccggagtcggcgggcacttactgacggaagccaagtacataaacctcagcctgcactacctggagcaggttattatcgctctttccgaaaagcatcgtagtcacattccatacaggaattccatgatgaccagtgtgctaagagattccttgggagggaactgcatgaccacaatgatcgcaaccctgtcattggagaaacggaacctagacgaaagtattagtacatgtcggtttgcacagcgggtagcgctgatcaagaatgaagcggtgttaaacgaagagatcaacccacgcctgaaagctccatcgagctctgatggcgtgttgttttgccggaaccagtag

SEQ ID NO: 121694 - DNA, 1962 bp, synthetic construct
  misc_feature 1..1962: note = Description of Artificial Sequence: Synthetic coding sequence
  source 1..1962: mol_type = other DNA
atggcgagcagcctttatgacctcaagaaagttacaattctcgaggaccctgaccagaacattcatcttaagaatcttacgctgcaccaggccaccaccgaagaagaggcccttaacctgctctttttaggagacacaaatagaatgatcgctgaaacccccatgaatcaggcaagcacccggagccattgtatattcactatacatctctcatccaaagaaccgggctcagcaacagtgcggcatgcaaaactccacctagtcgatctggctgggagtgagagagtcgctaagaccggtgtcggaggacatcttctgacggaggccaaatacatcaatttatcgctccattacctggaacaggtgatcatagcactgtccgagaagcatcgatctcatattccttacagaaattcgatgatgacttctgtgctgcgtgatagcctcggaggcaactgtatgacaaccatgattgccaccctgagcctggagaagcggaatttagatgagtctatatcaacttgcagattcgcccagcgtgttgccttgataaagaacgaagccgttctgaacgaagaaatcaatcccagattggtaattaaaagactccaaaaggagatccaggagcttaaggacgagctggctatggtgacaggcgagcagcgcacagaggctttgactgaggctgagctgttgcagctggagaagttaatcactagttttctcgaggaccaggacagcgatagtagactagaggtgggggctgatatgaggaaggttcaccattgttttcatcacctgaaaaagctgctgaatgataagaagatcctagaaaacaacacagtaagtagcgagagcaaggaccaagattgtcaggaaccactgaaagaagaagagtacagaaagctgagagacatccttaaacagagggataacgagattaacattctggttaatatgctcaaaaaggagaagaagaaggcgcaggaagcattacatctcgccgggatggacagacgagagtttcgccaaagccagagccccccctttcgcctaggcaatcctgaggaaggccagcgaatgcggctcagctctgctccgtcacaggcacaggacttttctattttgggtaagcggtctagcctcctccataagaagatcgggatgcgtgaggagatgtcccttggatgccaagaggctttcgaaattttcaaacgggaccatgctgatagcgtgaccatcgatgacaacaagcagattctaaaacagaggttttccgaggccaaagccctcggggagtctattaacgaagccaggagcaaaattggccatttgaaagaggagatcactcaacggcatattcagcaagtggctctgggaatatccgaaaatatggcagtacccctcatgcctgaccagcaggaagaaaagcttcgctcgcagctcgaagaggaaaagcgcagatacaagactatgttcacccgcctgaaggcgctcaaagtagaaatcgagcacttgcaactacttatggataaggcaaaagtaaaacttcagaaagagttcgaggtctggtgggccgaggaagccacaaacctccaggtgaactcacctgccgttaactcactcgaccacacgaagccttttctgcagacctctgattcgcagcacgagtggtctcagctactctccaacaagtccagtggaggttgggaagttcaggaccaaggcacggggaggttcgatgtgtgcgacgtgaacgccagaaagatcttaccttccccatgcccgtcccctcatagccagaagcaatcgagcacttccacacctttggaggactccattccaaagcgccccgtcagttcaatcccactgacaggtgattcacaaacggattccgacataatagcattcataaaggcacgccagtccatcctacagaagcagtgtctgggaagtaattag

SEQ ID NO: 121695 - DNA, 2394 bp, synthetic construct
  misc_feature 1..2394: note = Description of Artificial Sequence: Synthetic coding sequence
  source 1..2394: mol_type = other DNA
atggtcaaacaaactatccagatatttgcaagggtcaaaccgccggtgcgcaagcaccaacaggggatttattcaattgacgaagatgaaaaactaatcccatccttagagatcattcttccccgcgatctggccgatggattcgtgaacaataaacgcgaatcgtataagtttaaattccagagaatcttcgatcaagacgctaatcaagagacagtgttcgaaaacattgccaagcctgttgcaggctcagtgcttgctggctacaatggaaccatctttgcctacggtcagacaggatccggcaaaacatttactattaccggcggggccgaacgatacagcgatcgaggaattattcctcgcactctgtcctacatttttgaacagcttcagaaagatagttctaagatctacaccacccatatcagctacctggagatctataatgaatgcggctacgacctgctggatcctagacacgaggcaagctcgctggaagatctgccaaaggtgacaatattggaggatccagaccagaatattcacctgaaaaatctgacactgcaccaagcgacaactgaggaagaggccctcaacttattgtttttaggggacactaatcgtatgatcgctgaaactcccatgaatcaggccagtacccggagtcactgtatttttacgatccatctgtcaagcaaagagccaggcagtgccacggttaggcatgcaaaattgcacctggttgatcttgctggatctgagagagtggcaaaaacgggtgtggggggtcacctgctgactgaggcgaaatatatcaatctatcactgcactatttggagcaggtcatcattgcactgtctgagaaacaccgatcccacataccataccgcaattctatgatgacctcggtactgagggattcactgggcggcaattgcatgacaacgatgattgcaaccctgagtctggaaaagagaaacttagatgagtcaattagcacatgccgatttgcgcagcgggtggcgctgatcaagaacgaggccgtattgaacgaggaaattaatcctcgcttagtaatcaaacggctacagaaagagattcaagaactcaaggatgagttagctatggtcacaggtgaacagcgcaccgaagctctgactgaagctgagttactgcagctggagaaattaattacatcttttcttgaggaccaagacagtgactccagactggaggtgggcgcagacatgcggaaggtgcaccactgctttcatcacttaaaaaagcttcttaatgacaagaaaattctagagaataacacagtgtccagcgagagcaaggatcaagattgccaagaacctcttaaggaagaagagtaccgaaaacttcgagacattctgaagcagcgagacaatgaaatcaatattctggtaaatatgcttaaaaaagagaagaaaaaggcccaggaggccctgcatctcgcaggcatggacaggcgcgagttcagacaaagccagagccctcccttccgcctcggaaatcctgaggaggggcagcgaatgcggctttcttccgctccatcccaagcgcaggatttcagcattctcggtaagagaagttcactgctacacaaaaaaatcgggatgcgagaggaaatgagccttggatgtcaagaggcctttgaaattttcaaaagagatcacgccgatagcgtcaccattgacgataacaagcagatattgaagcagcggttcagcgaggccaaagctttaggggagagcattaacgaagcccggtctaaaattggcatttccgagaacatggccgtgcccctgatgcctgatcagcaagaagaaaagcttcgcagtcaactcgaggaggagaagcggcggtacaaaacaatgtttactcgcctcaaagccctgaaagtggagattgagcacctgcaattgttaatggataaagccaaggttaaactgcagaaagaattcgaggtttggtgggctgaagaggccactaacttacaggtgaatagtcccgcggtgaattccctggatcatactaagccttttcttcagacttctgattcacaacacgagtggtcccaactgctgtcaaataagtcttctggcggctgggaggtacaggatcagggaaccggacgattcgatgtgtgcgatgtgaatgcaaggaagattctgccatccccatgtccttcgccacactctcaaaaacagtcctccaccagtaccccactggaggactctattccaaagagacctgtctcctctatccccctgacaggagactctcagacagatagcgacatcatcgcgttcatcaaggcccggcaatcaatcctacagaaacagtgtttaggcagcaattag

SEQ ID NO: 121696 - DNA, 2394 bp, synthetic construct
  misc_feature 1..2394: note = Description of Artificial Sequence: Synthetic coding sequence
  source 1..2394: mol_type = other DNA
atggttaaacagaccatccaaatctttgcacgggtgaagccccccgtgcggaagcatcagcagggcatatactcgatcgatgaggatgaaaagctgattccgtcactagaaattatacttccccgagatcttgcagatgggtttgtgaacaataagagagagagctacaagttcaagttccaaagaatatttgatcaggacgcaaaccaggagactgtcttcgagaatatagcaaaaccagtggcagggagcgtccttgccggttataatggtacaatctttgcatacgggcagaccggttcgggcaagacatttaccattacagggggcgctgaacgatatagcgatcgcgggattattccacggaccctctcttatatctttgaacaactccaaaaagactcatctaagatttacacaacacatatctcctatctagagatatacaatgagtgcggctacgaccttcttgatccccggcacgaggccagttctttggaagacctgcctaaagtaactatcttggaggatccagaccaaaacattcatttaaagaacctgacccttcatcaggccacaacggaggaggaagcactgaacctccttttcctgggcgacacgaaccgtatgatcgctgaaactccaatgaaccaagcctctacccggtcacattgtattttcactattcaccttagctctaaggaacccgggtccgccaccgtgaggcacgccaaattacatcttgtggacttggccggcagcgaaagggtcgcgaagacaggagtcggtggacatctcctaactgaggccaagtatatcaacctcagcctgcactacctagagcaggtcataatagccctgtctgaaaaacacaggagtcacataccatatcgcaattcaatgatgacttccgtgctgagagacagcctcggcggcaattgcatgaccactatgatcgcgacgctaagcctggaaaaaaggaatcttgacgaaagcattagcacctgccgcttcgcccagcgagtggcacttatcaaaaacgaggctgtgctcaacgaggaaatcaatcctagattggtgatcaagcgccttcagaaagaaatacaggagttgaaggacgaactagctatggtcacaggagagcagcggaccgaggcattgacagaggccgaacttttgcaactggagaagctaatcacctcgtttctggaagatcaggatagtgattcccgattggaagtaggcgcggatatgaggaaagtccaccattgctttcaccatctcaagaaactcttgaatgacaagaaaattctggagaacaatacagtaagttcagagtcgaaagaccaagactgtcaggaacctctgaaagaggaagagtatagaaagctacgcgatatcttgaaacaacgggacaacgaaattaacattctggtgaatatgctcaagaaagagaaaaaaaaagcacaggaggccctgcacttggcgggcatggaccgcagggaatttagacaaagccagagcccacccttccgccttggaaatccagaagaaggccagcgcatgcggctctcctccgctccaagccaagcgcaagattttagcatactgggcaagcgcagtagtcttctacacaagaaaatcggaatgcgggaagaaatgtcccttgggtgtcaagaagccttcgagattttcaagcgggaccacgctgattccgttacaattgacgataacaagcagatattgaaacagaggttctctgaggcaaaggctctcggagaaagcataaatgaggcaaggtcaaaaatcggtcatctcaaagaggagattacacaacgccatatccaacaggtggcccttgggataagcgagaacatggctgtaccgcttatgcctgaccagcaggaggagaaactgagaagccagttggaagaagagaagcgcaggtacaaaaccatgttcacgaggctgaaagcacttaaagtggaaatcgaacacttgcagctgctgatggacaaagccaaagtaaagctgcagaaggaatttgaggtatggtgggccgaagaggccactaacctgcaagtgaactctccggccgttaatagtctcgaccatactaaaccgttcctgcaaacgtccgatagtcagcacgaatggtcccaactgttgtctaataagtcggacgtgaacgctcgcaaaatactcccctctccctgccctagcccacactctcaaaagcaaagctcaaccagtaccccgctggaggactccatacctaagagaccagtctcgtctatccctctcacgggtgacagccaaacagattcagacatcattgccttcattaaggcaaggcagtccatcttacagaagcagtgccttggaagcaattag

SEQ ID NO: 121697 - DNA, 747 bp, synthetic construct
  misc_feature 1..747: note = Description of Artificial Sequence: Synthetic coding sequence
  source 1..747: mol_type = other DNA
atgagagaggaaatgagcctcggctgtcaggaggccttcgagatctttaagagggatcatgccgactcggttaccatcgacgataataagcaaattttgaagcaaagattctcagaagctaaagccctgggggaatctatcaacgaggcacggagtaagatcggccatcttaaggaagaaataacacagcgtcacatacagcaggtggccctcggaatttccgagaacatggctgtcccccttatgcctgatcagcaggaagagaaactgcgcagccagcttgaggaggaaaaaaggaggtacaaaacgatgtttacacggttaaaggctctgaaagtggagatagagcacctccaattactgatggataaagcgaaggtgaagctgcagaaggaatttgaggtttggtgggccgaggaggctaccaacttacaagtgaactcccctgccgttaattcactggaccacactaagcccttcctacagacctccgacagccaacacgagtggtctcagctgttgtcgaataaatcggacgtaaacgctaggaagatcttgccttccccatgtcctagcccacacagccagaaacagtcttcaacctctacacctttagaggattctattccgaagcgacccgtttcaagcatacctcttacaggtgattctcagacagacagcgacattatagcttttattaaagccagacagtcgatactccagaaacagtgtttaggctcaaactag

SEQ ID NO: 121698 - DNA, 486 bp, synthetic construct
  misc_feature 1..486: note = Description of Artificial Sequence: Synthetic coding sequence
  source 1..486: mol_type = other DNA
acaccaatgaatcaagcttcaactcggtcgcattgcattttcaccattcaccttagtagtaaagaacccggctcagctacagtgagacatgctaagctgcatttagttgatttggccggtagcgaacgggttgcgaagactggcgtgggaggacacctcctcacggaggctaagtacataaatctcagtcttcattatctcgagcaggtgattatcgccctgtctgagaaacatcggtcccatatcccatacaggaacagcatgatgacatcagtcctgcgagacagtctgggcggcaactgtatgaccaccatgatcgctactctcagtctcgagaaacggaatctggatgagagtatttcaacctgtcggtttgcccagcgcgtcgcgctcatcaaaaatgaagcagtgctaaatgaagagatcaacccccggctgaaagcaccttcctcctctgacggcgtgcttttctgcagaaatcagtag

SEQ ID NO: 121699 - DNA, 2070 bp, synthetic construct
  misc_feature 1..2070: note = Description of Artificial Sequence: Synthetic coding sequence
  source 1..2070: mol_type = other DNA
tgaggagcagaaaggtattccgatcgcggtattataccccgcactctcagttacatctttgaacaattacaaaaagactcctctaaaatttacaccactcacatttcttacctggaaatctataatgagtgtgggtatgatcttttagatcccaggcatgaagcatccagcctggaggacttgcctaaggtgacaatccttgaagacccagatcagaacatccacctgaagaacctcaccctgcaccaggctactacagaagaagaagcactgaaccttcttttcttgggggataccaataggatgattgctgagacccccatgaaccaggcgagcacacgctctcattgtatattcactatccacctaagctcaaaggagcccggcagtgctaccgtgcggcatgccaaactccatttggtggatctggccggctcagagcgggtggccaaaactggggtgggggggcaccttctcaccgaggccaaatacattaacctcagccttcattatctcgagcaggtgataatcgctctatctgagaaacacaggagccacatcccttacaggaatagtatgatgaccagtgtgctgcgggactccctcggtggcaactgtatgaccacaatgattgcaaccctgtctttagaaaaacgaaatctcgacgagtccatctccacttgcagatttgcccaacgagtagccctcatcaagaatgaagccgtgcttaatgaagagatcaacccgagattagttattaagcgactgcagaaagagatccaggaattaaaggatgagctggctatggtgactggcgaacagcgaaccgaggccctcactgaagcagagctcctgcagctggagaaactgattacgtcttttctcgaggatcaggactctgacagccggcttgaggtgggcgcagacatgcgaaaggtgcaccattgctttcaccaccttaaaaagctgctgaacgacaagaagatcttggaaaacaacactgtgtcctccgagagtaaggaccaggactgccaggagccgctcaaagaggaggagtacagaaaacttcgggatattttgaaacagagagataacgagatcaacatcctcgtgaatatgctgaagaaagagaaaaagaaggctcaggaggcgttgcatctggctgggatggataggagagagtttagacagagtcaatcccctccgtttcggttgggtaaccctgaagagggacagcgcatgcgactttcctcagcaccttcccaggcccaagacttcagcatcctgggtaagagaagtagcctgctacacaagaagataggtatgagggaggagatgagcttaggatgtcaggaggccttcgagattttcaaacgcgaccatgcagattcagtcaccattgacgacaataagcaaatactcaagcaaagattttcagaggcgaaggccctgggtgagagcatcaacgaagctcggagtaaaattggtcatctgaaggaagaaatcacccagcgtcatatccagcaggtagctcttggcatctctgagaacatggcggtgcctctgatgccagatcaacaggaggagaagctcaggagccagctcgaagaagaaaaaagacggtacaaaactatgtttacccggttaaaggccctaaaagtcgagatagagcacctccaactcctgatggacaaggcaaaggtgaaactgcagaaagagttcgaagtctggtgggcagaagaggcaacaaatttgcaggtcaactctcccgcagtgaatagtctggatcatacaaagcccttcttgcagacttctgactcccaacacgaatggagccagttgctgtctaacaagtcagacgttaacgctaggaaaattttgccttctccctgcccgtctccccattcacagaaacaatccagtacctctactccattggaggattctatccccaagcgacccgtcagctccatccccctcaccggtgactcacaaacagatagtgatatcattgcttttatcaaagcacgccagtccattctgcagaaacagtgcttggggtcgaattag

SEQ ID NO: 121700 - DNA, 2277 bp, synthetic construct
  misc_feature 1..2277: note = Description of Artificial Sequence: Synthetic coding sequence
  source 1..2277: mol_type = other DNA
atggtgaagcagactattcaaatttttgctagggtaaaaccccctgtgcgtaagcaccaacaaggcatttactccatcgacgaagacgagaagctcatcccaagtctcgaaattatcctcccaagagacctcgcagacggcttcgtaaataacaagcgagaatcctataagtttaagttccagaggatatttgaccaagatgccaaccaggaaactgtgttcgaaaatatcgctaagcccgtggccggatcggtgttagcaggttacaatggaacaatcttcgcctacgggcagaccggtagtggaaagacttttacgattaccggcggtgctgaacggtattccgatcggggaatcatcccacgcaccctgagttatatctttgagcaactccagaaagacagcagcaagatctacaccacccacatttcatatcttgaaatctataacgaatgtggctacgatctgcttgatcccaggcacgaagctagcagtctggaggatctgcccaaggtcaccatcctcgaggatccagaccagaatatccacctgaagaatctgactctgcaccaggccacgaccgaggaagaagctttaaacctgctgttcctaggtgatacaaatagaatgatcgcagagactcctatgaaccaggcatccactcggtcccactgtatttttacaatacatctgtcttccaaggagcccgggtcagcaacagtcagacatgccaaattacacttggtggacctggctgggtcagagcgcgttgcgaagaccggagtgggcggtcacttgctcaccgaggccaagtatataaacctctccctccactacctggagcaggtaataattgctctgtctgagaaacaccgaagccacattccttataggaacagcatgatgaccagcgttctacgcgattcacttggtggcaattgtatgaccacaatgatcgccacgctgagcctggagaaaagaaacctcgatgaatctatcagcacctgtcgcttcgcccagcgcgtggctttgattaaaaacgaggcagtgctgaatgaagagatcaaccctaggctcgttataaaacggctacagaaagagattcaagaactaaaagacgaattggccatggtgactggcgaacagagaacagaagctttgacagaagccgaactcctccagctggagaaactgattaccagctttctggaggaccaggatagcgacagtagactcgaagtgggcgcagacatgcgaaaggtccaccattgcttccaccacttgaaaaagttgttgaatgacaagaagatcttggaaaataacaccgtgtcatctgagtcgaaagatcaggactgtcaggagccactaaaagaggaagaatacagaaaactgcgtgacatactgaagcagagagataatgaaattagcattcttagcgaggtgatgaaaaagctcccactctcctggttcgaacgcgggatgcgcgaagaaatgagcctgggctgccaggaagccttcgagatctttaaaagggaccacgccgattcggtgaccattgacgacaacaagcagatcctgaagcagagattctcagaggctaaagctttgggggaatctatcaacgaagctcgtagcaagatcggccacctcaaagaggagattactcagaggcatattcaacaggtggcgctgggtatcagtgagaatatggcggttcctctaatgcccgatcagcaagaggagaagctgcgctcccagctggaggaggaaaagcgaaggtataaaaccatgttcacccggctaaaggctctcaaagttgaaatagagcacctccaattgttgatggataaggccaaagttaagctgcagaaggagttcgaggtgtggtgggctgaggaggctaccaacctccaggttaactcacccgcggttaattccttagatcacactaagccctttttacagaccagtgatagtcagcacgagtggagccagcttctttccaataaatcatcaggtgggtgggaggtgcaggatcagggcaccggccgcttcgatgtttgtgatgtcaacgctcgaaagatccttccttccccttgcccttcaccccactcccaaaagcagtcttcgacttccacgccactggaagatagtatccccaaaagaccggtcagcagtatccctttgaccggagattcccagactgacagcgacatcatagccttcatcaaggcacgacagtccattttacagaaacagtgcctcggcagtaattag

SEQ ID NO: 121701 - DNA, 516 bp, synthetic construct
  misc_feature 1..516: note = Description of Artificial Sequence: Synthetic coding sequence
  source 1..516: mol_type = other DNA
atgcgagaggaaatgagcctaggctgccaggaggccttcgagatttttaagcgagatcatgctgattcggtcaccatcgatgataacaagcagatactcaagcagagattttctgaagctaaagccctgggggaatcgatcaacgaggcccgaagcaagatcggccatttgaaagaggaaatcacacagcggcacattcagcaggttgctcttggcatttccgagaacatggccgtgccgctgatgcctgaccagcaggaggagaaattaaggagccaacttgaagaagaaaagcgcagatacaagacaatgtttacccgcctcaaggctcttaaggtggaaatagagcacctccaacttcttatggacaaagccaaggtcaagctacagaaagaatttgaggtgtggtgggccgaggaggccaccaatcttcaggtaaatagtcctgccgtgaatagtctcgatcacaccaaaagcaaaatcaaagcactggccgacagcatgtccgggttatag

SEQ ID NO: 121702 - DNA, 882 bp, synthetic construct
  misc_feature 1..882: note = Description of Artificial Sequence: Synthetic coding sequence
  source 1..882: mol_type = other DNA
atgcgggaagagatgagcctggggtgtcaggaggcattcgaaatcttcaaaagggatcatgctgattcagttacgattgatgataacaaacagatactgaagcaaaggttttcagaagccaaagctcttggcgagtccatcaacgaagcccggagcaagataggtcatctcaaagaggagatcactcagcggcacattcaacaggtggccctgggcatctcagaaaacatggctgttccattaatgccagaccaacaggaagagaagctccggagtcagctggaagaagaaaaaaggaggtacaaaacaatgtttacaagactaaaggctctcaaggttgagatagagcacctgcaactattaatggacaaagctaaagtgaagctgcagaaagaatttgaggtgtggtgggccgaggaagccacaaacctgcaggtaaacagcccggccgtcaacagtctggaccacaccaagcctttccttcagacttcagactcccaacacgaatggagccagctgctgagtaacaagtcttcgggcggttgggaggtacaagaccaggggacaggcagatttgacgtgtgcgacgtgaacgctcggaagatccttccgtctccctgcccgagtccccacagtcagaagcagagttccacgtctactcccttggaagactctattccaaagcgtccggtgagttctattcctctcaccggggacagtcagacagattcagacatcatcgcctttattaaggcacgacaatccatcctccaaaaacagtatctgcagctcctctgcagcctttttcccaaatctgcagtgtcctctgctcaggcctccacaaaccggaaaggcctttctgacgtgctcgtcacacggtag

SEQ ID NO: 121703 - DNA, 4032 bp, synthetic construct
  misc_feature 1..4032: note = Description of Artificial Sequence: Synthetic coding sequence
  source 1..4032: mol_type = other DNA
atgggcctggaagctcaacgactgcctggcgctgaagaagccccagttagggtcgccctgcgcgtgcggcctctgttgccaaaagaactcctgcacggccaccagagctgcctgcaagtagaacctggcttggggcgggtaacattgggcagagaccgtcacttcggatttcacgttgtgctcgcggaggatgccgggcaggaggctgtttaccaggcctgtgtccagcctctgctggaggctttcttcgaaggatttaatgccacagtgttcgcatatggccaaaccgggagcggaaagacctacacaatgggtgaagcgtccgtggcctcccttctggaagacgagcaaggtatcgtcccccgagccatggctgaggctttcaaactgatcgacgagaacgatcttctggattgtctggttcacgtgtcttacctggaagtctataaagaggaattccgggacctgcttgaggtaggcacagcatctcgcgacatccagcttcgcgaggatgagcggggaaatgtggtcctttgtggggtgaaagaagtagatgtcgaaggcctcgatgaggtgctgtccctgctggaaatggggaacgctgcgcggcataccggcgcaacgcatctgaatcacctgtctagtagaagtcatactgtttttaccgtgactctcgagcaacgcggccgggcaccatctcgcctcccacggccagcaccgggccaactcctggtatccaagttccactttgttgacctcgctggtagcgagcgggtgttgaagaccggatcaactggagaaaggctgaaggaaagcatacagataaacagttctctcttagccctgggcaacgtaatctccgccctcggggatccacagcggcggggtagtcatattccctaccgagattctaagataaccagaatcctcaaggacagcttaggaggtaatgctaagactgtcatgatcgcttgtgtctctccaagcagcagcgattttgacgaaaccctcaataccctcaactatgcctccagagcccagaacattagaaatcgcgccaccgttaactggaggccagaggcagaaaggcctcccgaggagacggctagcggcgcaagagggccacccagacatcggtcagaaaccagaatcatccacagaggtagaagggccccagggcccgcaacagctagtgctgctgcagccatgcggcttggggctgagtgcgctcggtacagagcgtgcaccgatgctgcgtacagtctcttgcgagagctacaagcagagccgggacttccaggcgcggccgcgagaaaggttcgggactggctatgtgccgtagagggggaacggagcgcactgtccagtgcctcaggcccggactcagggatagagagcgcctccgtagaggatcaagcagcacaaggcgcaggtgggcgtaaagaggatgaaggcgcccagcagcttctgacgctgcagaaccaggtggctcgtctggaagaagaaaaccgcgactttcttgccgcccttgaggacgctatggagcagtacaagctacagtctgaccgtctgcgggagcagcaggaggagatggtggagcttcgccttaggctagaactcgtgcggcccggatggggtggtcccaggcttctaaacggactgcctcccggctcgtttgttccgcggccccacacggcccccctggggggggcccatgcccatgtgctgggtatggtgccacccgcttgtctgccgggcgacgaggtggggtccgaacagaggggggagcaggtgacgaacggtagggaagcaggtgcagaactattaaccgaagtgaaccgtttaggctccggctcttcagctgcctccgaagaagaagaagaggaggaagaacctcctagacgcactttgcatctgcggcgcaatcggatcagcaactgtagccaacgcgcaggcgcgcgtcctggttcccttccggaacgcaaggggcctgaactctgcctcgaggagttagacgccgcaattccaggtagtagagctgtaggcgggagcaaggcacgcgtgcaagctagacaggtcccaccggcaaccgcctctgagtggagattggctcaggcacagcagaagattcgagaactggccatcaacattagaatgaaagaagaacttatcggcgaattagtcagaacaggaaaggcagcccaggctctgaaccgccaacactcccagcgcatccgtgagctggagcaggaagctgagcaggtcagagcagagctttcagagggccagcgccagctgcgcgagctggagggaaaagagctacaggacgccggcgaacgaagtcgtttgcaagagttcaggagacgagtggccgctgctcagagccaggtgcaggtgttgaaggagaaaaagcaggctaccgaacggctggtttcactgagcgcgcagtccgagaagaggctgcaggagttagagcggaatgtgcagctcatgcgacaacagcagggacaattacagagacgtctccgggaggagaccgagcaaaagaggcggctagaggcggagatgtcgaagcggcagcaccgggtcaaggaactggagctcaagcatgaacagcaacagaaaatcttaaaaataaagacagaggagatcgctgcattccagcggaagcggagatcaggaagcaacggatccgtggtgagcctggaacagcagcagaaaatcgaggagcagaaaaaatggctggaccaggaaatggaaaaagttctgcagcagaggcgtgcacttgaagagctgggagaagagctgcataagcgggaggctattctagctaagaaagaagccctgatgcaagagaagaccggcttagaaagcaaacgcctgagaagctcccaagccttaaacgaagacatcgtgcgcgtttccagtcggctggagcacctggaaaaggagctgtcggaaaagagtggccagctacgacaggggagtgctcaaagccagcagcagatccgcggggagatcgattctcttaggcaggagaaagattccttgcttaaacagcgcttggagattgatggcaagctgagacaaggctctttgctgagtcctgaagaggagaggactctgttccagctagatgaagccatcgaggccctggacgccgctatcgagtacaagaatgaggctataacttgtaggcaaagagtgttgcgcgctagcgcctcccttctttctcagtgtgagatgaacctgatggctaagctcagttacctgtccagttctgaaacccgggccctgctatgcaagtattttgacaaggtggttactttgcgcgaggaacagcaccagcagcaaatcgccttctcagaactggaaatgcaactcgaggaacagcagagacttgtgtactggttggaggtggcgctggagagacagagactggaaatggaccggcagctcacccttcagcaaaaagagcacgagcaaaatatgcagttgctactgcagcagtctagagatcatctgggcgaagggttggctgactcccggagacaatacgaggctaggatccaggcactggagaaagaactgggaaggtacatgtggattaaccaggagctgaagcagaagctaggcggagtcaatgcagtcggacactcaaggggaggcgaaaagagaagcctgtgcagcgagggccggcaagcccctgggaacgaggatgagcttcatctggcaccagagttgctgtggctgtcccccctgacagagggcgctccacgaactcgggaagagacccgtgacctggtgcatgcaccccttccattaacctggaagagaagcagtctgtgcggcgaagaacaggggagccccgaagaactgaggcagcgcgaggccgctgagccgcttgtggggagagtgctgccggttggcgaggctggattgccatggaatttcggacccctgtccaaaccccggagagaactgcgcagggcaagcccaggtatgatagatgttcgaaaaaaccccctgtag

SEQ ID NO: 121704 - DNA, 2022 bp, synthetic construct
  misc_feature 1..2022: note = Description of Artificial Sequence: Synthetic coding sequence
  source 1..2022: mol_type = other DNA
atggacccacagcgcagccctctgctcgaagtgaaggggaacattgagcttaagcgcccgttgataaaggccccctcccagttaccactatctggaagtcggcttaaaagacggcctgaccagatggaagacggcctggaacctgagaaaaaaaggacacgaggactcggagccacaactaaaatcaccacaagccaccctagagtgccttccctcacaactgtccctcagacgcagggccaaactacagcacagaaagtcagcaagaagacaggacccagatgttccaccgccatcgcaactgggttgaaaaatcagaagccagtgcccgccgttcccgtgcagaaatcaggcaccagcggggtcccacctatggcgggaggaaagaaaccaagtaaaagaccagcctgggacctgaagggtcagctgtgcgatttgaatgctgaactgaagcgctgtcgcgagagaacccaaactctggaccaggagaaccagcagctgcaggaccagctgcgggacgcgcagcagcaagtgaaggccctgggcacagagcggaccactcttgagggccatctcgctaaggtacaggcccaggctgagcaggggcagcaggaacttaagaatcttcgggcctgtgtgctggaattagaggagcgattgagtacgcaggaaggattggtgcaagagctgcagaagaaacaagtcgaactccaagaggagaggcgggggctgatgagccagctggaggaaaaggagcggcggctccaaacctctgaggcagcactctcctcaagccaggccgaggtggcgtccctaagacaggaaacagtggctcaagcagcattgctcaccgaacgtgaagagcggctacatggactggagatggaacgcaggcgcttgcacaaccaattacaggagctcaaaggaaatattcgcgtgttttgcagggtgcgccccgtgctgccgggggagccaactcctccaccaggactgttgctgttccccagtggaccggggggcccaagcgaccctcccacgcgcttgtccttgtccagaagcgatgaacgcaggggcactctgtcaggtgcaccagccccccctacccgtcatgactttagcttcgatcgggtatttccccctggatctggccaggacgaggtattcgaagaaattgcgatgttagtccagtccgcgcttgatggataccccgtgtgcatctttgcctacggccagacgggctcgggtaaaactttcacaatggaagggggccctggaggcgacccccagctcgagggcctaatccccagggctctccgtcacctgtttagtgtcgcacaggagttgtctggccaaggatggacttattcctttgttgccagttacgtcgaaatctataacgagaccgtccgcgatctactggccactggcactcgtaaagggcaaggtggagaatgtgagatccggcgggcaggaccaggttccgaagaactgacagtgactaacgctaggtacgtaccggtaagttgcgaaaaagaggtggatgccctcttgcacctggcccgccagaatagagctgtggccaggacggctcagaacgaacgcagttcccgttctcactctgtcttccaactgcaaatctctggggaacacagcagccggggactgcagtgcggggcacctctgagccttgtggaccttgcagggtccgaaaggcttgacccaggactggcactgggtcctggggaacgagaaaggcttcgcgaaactcaggctatcaattccagtttatctactctgggtctcgtgattatggccctttcaaacaaagaatcacatgtcccctatagaaattccaagctgacatatctgctccaaaactccctagggggttcagcaaaaatgttaatgtttgtcaatatttcacccctagaagaaaacgtctcagagtctctcaactctctaaggtttgctagtaaggtgaatcagtgtgtgattggtaccgcccaagcaaacaggaagtag

SEQ ID NO: 121705 - DNA, 612 bp, synthetic construct
  misc_feature 1..612: note = Description of Artificial Sequence: Synthetic coding sequence
  source 1..612: mol_type = other DNA
atggatccccaacgcagtccccttctggaagtgaaagggaatatcgagctgaagcgccctctgatcaaggctccttcccagttgccgctgagcggaagccggttgaaaaggcgtccagatcagatggaagacgggctcgaacccgaaaagaagagaacacgcggactgggcgctaccactaagatcacaacaagtcatcccagggtgccgagcctgactaccgtaccccagacacagggccagacaactggcccaagctcccatccactcccatggcagtgccatcaccaacctttcttagtcacagatccaggcggtaggagctggggtcccggccagaagtggcacaggctccatctgtggtgtacctccgcccagaaagtgtctaaaaagacaggcccccgatgttctactgcaattgctacaggactgaagaatcagaaacctgtgccagccgtgccagtacagaagtctgggacgtcaggagtgccaccaatggctggaggcaaaaagccatccaaaagacctgcttgggacctcaaaggccaactctgcgatctgaatgcggaactgaagcggtgtcgggagagaactcaaacgttagatcaatag

SEQ ID NO: 121706 - DNA, 612 bp, synthetic construct
  misc_feature 1..612: note = Description of Artificial Sequence: Synthetic coding sequence
  source 1..612: mol_type = other DNA
atggacccccagcggagccctctgctggaagttaagggcaatattgaactgaagcggcccctgatcaaggctccatcccagttaccacttagcggcagtcgcctaaagcgccgacccgaccagatggaagatggcctcgagcccgaaaagaaacgtacccggggactcggtgctaccactaagatcacaaccagtcaccctcgtgtgccctctctgactactgtgcctcaaacacaaggtcagacaaccggaccctcttcacacccccttccttggcagtgtcaccaccagcccttccttgagacagatccaggcggaagatcctggggtccaggccagaaatggcatcgtctgcatctatggtgcacgtctgcccagaaggtgagcaaaaaaactggaccgcgctgcagtacagctatcgcaacaggcctcaagaatcaaaagcccgttccggcagtcccagtacagaaaagtggaaccagcggagtgcccccaatggcgggcggcaaaaaaccaagcaaaaggccagcttgggatcttaagggccagttgtgcgacctgaacgcggaattaaagagatgcagggagcgcacccaaacccttgaccagtag

SEQ ID NO: 121707 - DNA, 2022 bp, synthetic construct
  misc_feature 1..2022: note = Description of Artificial Sequence: Synthetic coding sequence
  source 1..2022: mol_type = other DNA
atggacccacaacggagccctttgctcgaggtgaaggggaacatcgaattaaagagacctctcatcaaagcccctagccagctgcccctgtctgggagcagactgaagagacgtcctgaccagatggaagacggcttggagcccgagaagaagcggaccagggggctcggcgccacaactaaaattacaacctctcacccaagggttccctctctgacaacagtgcctcagacgcagggacagactacagcacagaaagtgagtaagaagactggccccaggtgttcgaccgctatcgccaccggcctgaagaatcagaaacccgtgcctgccgtgccagtgcagaaaagtggcactagcggagtcccaccgatggccggtgggaaaaaaccatcaaagaggcccgcctgggatttaaaaggtcagctgtgcgacctgaacgcggagctgaagcgctgcagggagcggacccagacactggaccaagaaaatcaacaactccaggaccaactgcgcgatgcccagcagcaggtcaaagccctcggcacagaaaggacgactcttgaaggccatctggcaaaggtgcaagcccaggcagagcagggacagcaggaactgaagaatctgcgcgcctgtgttttagagctggaggaacgcctgagcactcaagagggcctcgtccaagagttacagaaaaaacaggtcgagctccaggaggagaggcgcggccttatgagtcagctagaggagaaggaacggagactgcagacctccgaagccgccctcagttcgtcacaggctgaggttgcaagcctgaggcaagagaccgtcgcacaggcagcattgctcactgagcgcgaggagcgcctgcacggcctggagatggagcgtaggaggctccacaatcaattgcaggagctgaaaggaaatatcagggtgttttgcagggtccgccccgtgctgcctggtgagccaacccctccccccggcctgctgttattcccgtctgggcccggcggcccttcagatcctccaacccggctaagcctttctcggagtgacgagcgtcgaggaacattgagtggagcccctgctccgcccacacgtcacgatttttccttcgacagggtttttcccccgggctccggccaagacgaggtcttcgaggaaattgccatgctagtccaaagcgccctggatgggtaccccgtctgcattttcgcctatggacagacgggctcaggcaagacctttaccatggaggggggaccaggcggtgaccctcagctggaggggctaatccccagagccctccggcacctcttttccgtggcgcaggaattgtccgggcagggatggacgtattctttcgtcgcttcctacgtggaaatttataacgagacggtgagagacctcctcgccactggtacgcgcaagggccaaggcggcgagtgcgagatccgtagggcaggtccgggcagcgaggagttgactgtgacaaatgcacggtacgtgcctgtcagttgcgaaaaagaggtcgatgctctgctgcatctggcgaggcagaacagagccgtggccaggacggctcagaacgaacgctcttcacgctcccattccgtcttccaattgcaaataagcggggagcacagctcccggggtcttcagtgtggtgcacccctctcgctagtagatttggccgggagtgagcgccttgatcctggcctcgcgcttgggcctggcgagcgcgaaaggctcagggagacccaagctatcaattctagtttaagcacattgggactagtcattatggccctatctaataaggaatcccatgttccgtacagaaattctaagttgacgtatctacttcagaactcgctggggggctccgcgaagatgctcatgttcgtgaacatatccccactggaagaaaatgtgagtgagtcactcaactctctgaggtttgcttcgaaggtcaatcagtgtgtcatcggtacagctcaggcaaaccggaaatag

SEQ ID NO: 121708 - DNA, 2022 bp, synthetic construct
  misc_feature 1..2022: note = Description of Artificial Sequence: Synthetic coding sequence
  source 1..2022: mol_type = other DNA
atggatccccagagaagccctctgctggaagttaagggcaacatcgaactgaaacgtcccctgattaaggctcccagccagctgcctctttcggggagccggctgaagcgccgacctgaccagatggaagacggcctcgaaccagagaaaaagagaacccgcgggcttggagccactaccaagattaccacatctcatcctagagtgccaagcttaaccaccgtgccccaaacacagggccagacaacggcgcagaaagtcagcaagaagaccggccctaggtgctctactgctattgctaccggtcttaagaatcagaaaccagtgccagctgtgccagtgcagaagagcgggacctctggagttccaccaatggctggaggcaagaagcccagcaagcgccccgcgtgggaccttaaggggcagctgtgcgacttaaatgccgaactgaagagatgtcgcgagcgaactcagactctggaccaggaaaatcagcagctgcaagaccagttacgggacgctcagcagcaggtgaaagctctggggaccgaacggaccaccctggagggccaccttgcgaaagtgcaagcccaggcagaacagggccagcaggagctgaagaacctgagggcctgtgtgcttgagctggaggagagattgtccacgcaagagggcctggttcaggagctccaaaaaaagcaggtagaactgcaggaagaacgcaggggactgatgtctcagcttgaggaaaaagaacgtaggctccagaccagcgaggctgccctctcatctagccaggcggaagtggcttctctgaggcaagagaccgtggcccaggcggccctactgacggagcgagaggagaggctgcatggactcgaaatggagcgacgtaggctgcacaaccagctccaagagctgaagggaaatatacgggtgttttgcagggtgcgtccagtacttcccggcgagcccaccccccctccaggcctcctgctgtttccctcgggcccgggaggcccatctgaccccccaacgcgcctgtcactgagccggtccgatgaacggcgcggcaccctatccggcgcaccagcccctcctactcgacacgatttcagttttgaccgtgttttccctcctggcagtggccaagacgaagtcttcgaggaaatcgccatgctggtgcagtctgcgctcgacggctatcccgtctgcatatttgcatacggccagacgggcagtgggaaaaccttcacaatggaaggaggtcctggcggcgatccacagctggaggggctgatccccagggctctgcgccatctcttctccgtggcccaggagctttccggtcagggatggacgtacagtttcgtcgcatcatacgtcgagatttataatgagacagtccgcgatctgctagcaacagggaccaggaaaggtcaggggggagagtgcgagatccggcgcgccgggccgggtagcgaagagttgaccgtaacaaacgcaagatacgtgcccgtctcctgcgaaaaagaagtggatgcgttacttcacctggctagacagaatcgggctgtagcgcggacagcgcagaacgagagaagtagcagatcgcatagtgttttccagttacagattagtggggaacattccagcagaggcctccagtgcggagctcctctgtccctggtggacctggcaggatccgaacgtctggacccaggcctcgcactggggcccggagagagagagaggctgagagaaacccaggcaattaattcatcactatcaacacttggtctcgtcattatggcactgtcgaataaggagtcacacgttccatacaggaacagtaagctgacttatcttcttcagaatagcctgggggggtccgcgaaaatgctgatgttcgtaaacatctcaccactcgaagaaaatgtttctgaatctctgaacagccttcggtttgcctctaaggtgaaccagtgcgtgattggaacggcccaggccaataggaagtag

SEQ ID NO: 121709 - DNA, 612 bp, synthetic construct
  misc_feature 1..612: note = Description of Artificial Sequence: Synthetic coding sequence
  source 1..612: mol_type = other DNA
atggacccacagcgcagccctctgttggaggttaaaggaaatatagagctcaagaggccgctgatcaaagccccctcccaactgcctctgagcggcagccggctaaagcgccgccctgatcagatggaagacggtttagaaccagagaagaaacgcacaagaggtttaggtgccaccaccaaaatcaccaccagccatcctcgggtacccagccttacaacggtcccacaaacgcaaggacagaccacgggaccctcctctcatccccttccttggcagtgtcaccatcagcctttcctcgagaccgaccccggaggaagaagctgggggccaggacagaagtggcaccgtctgcacctctggtgcactagcgcacagaaggtcagcaaaaaaactggaccgcgctgtagcacagccattgctacggggcttaagaaccaaaagcccgtgcccgccgtccctgtgcagaaatctgggacttccggcgtgcctcctatggcaggtggcaaaaagcccagcaagagaccagcttgggatttgaaaggtcaactgtgcgacctgaatgctgagcttaagcggtgtcgtgaaagaacccaaacgctggatcagtag

SEQ ID NO: 121710 - DNA, 2502 bp, synthetic construct
  misc_feature 1..2502: note = Description of Artificial Sequence: Synthetic coding sequence
  source 1..2502: mol_type = other DNA
atggtaccttcgagacgaacttggaatttgggcgcgactccgagtttgaggggactgtggcgtgtgggcagagctcctgagcccgagccgggaatggccaggccagcccccgccccagcctcacctgccgcccgcccctttccccatactggacccgggaggctgagaacaggaaggggaaaggacacccctgtttgcggggatgaggattcttctgcgagatcggcggcccgaccagcacttgcccagtgcagggcattgtctgtcgactgggctggacccgggtctccccatggcctctatcttacactacaggtagagcatcttaaagaaaaactaatctcccaagcccaggaagtatcacggcttcggagcgaattaggcgggaccgatttggaaaagcaccgcgacctcctgatggtggagaacgaaagattgaggcaggaaatgcgcaggtgtgaggcagagttgcaggaattacggactaagcctgctggaccttgccccgggtgtgagcattctcaggaatcagcgcagcttcgtgataaactgtctcagctgcagctggagatggccgaatccaaaggtatgctctccgagctgaatctggaggtgcagcagaagacagaccgcctggcggaggtggaacttagactcaaggattgcctggcagagaaggcacaggaggaggagagactttcccgacggctgcgggactctcacgaaacaattgccagcctcagagctcagagccctcccgtaaagtatgtgataaagacagtggaagttgagtctagtaaaaccaaacaagcgctgtccgagtcacaagcgagaaaccagcatctgcaggagcaagtcgctatgcagcgtcaggtcttgaaggagatggaacagcagctccaaagctctcatcagctgaccgctagactccgggctcaaatagctatgtacgagagtgagctcgaacgcgcgcacggacagatgctcgaggaaatgcaaagtttggaagaggacaagaacagggctatcgaggaggcgttcgccagagcacaagtggaaatgaaggccgtgcatgagaacttagcaggggtcagaaccaacttactgacgttgcaacccgccctcagaaccttgacaaacgactataatggccttaaacgacaggtgcggggattcccattattgctgcaggaagccctgcgaagtgtgaaggctgagattggccaggctattgaagaggttaatagtaacaaccaggaactgttgaggaagtacaggagggagcttcaacttcgtaaaaaatgtcataacgaactcgtgaggctgaagggtaatataagagttattgcgcgggtgagacctgtgactaaagaagatggagaaggacccgaagctaccaacgccgtgacttttgatgctgatgacgactccatcatccacctcctacacaaaggtaaaccagtgtcgtttgaactcgacaaggtgtttagtcctcaagctagccagcaagatgtgttccaggaggtgcaggccctggtgaccagttgtatcgatggtttcaatgtgtgtatctttgcctatggtcaaacaggtgctgggaagacatataccatggaaggcactgcggagaatccaggtattaatcagagagccctacaactgcttttctctgaagttcaggagaaagcctctgactgggagtacactatcactgtgtctgcggcagagatctacaacgaagtcctcagagacctgctgggtaaagaaccgcaggagaaactggagattaggctctgcccggacggatctgggcagctgtacgtgccaggactgacagagtttcaggttcaaagtgtggacgatattaacaaggtctttgagtttgggcacaccaatcggacaaccgagtttactaatttaaacgaacacagctccaggagtcacgccctccttatcgtgaccgtgcgtggcgtagattgttcaactggactgcgtaccactggaaaactcaacctcgtggatctggctggctccgagcgtgtcggcaaatctggtgccgaaggctcccgcctgagggaggcccagcacatcaacaaatctcttagtgctctaggcgatgtgatagcagcactgaggtctaggcagggtcacgtgccttttagaaacagtaagctgacatacctgctgcaggattccctatcaggcgattccaagacgcttatggttgtgcaagtatcaccggtcgagaaaaatacatccgagaccctgtacagtctgaaattcgcagaacgcgtccggtcagtggagctgggacctggacttagaagagccgagcttggcagttggagtagtcaagagcacttagaatgggagccagcttgccaaactccacagccctcagctcgggctcattctgcccccagtagcggaacaagcagtagacccggttccatccggaggaaactccagcccagtggcaagtcacgaccgctgccagtgtag

SEQ ID NO: 121711 - DNA, 2064 bp, synthetic construct
  misc_feature 1..2064: note = Description of Artificial Sequence: Synthetic coding sequence
  source 1..2064: mol_type = other DNA
atggtggagaatgagcgactccgtcaggaaatgagacgatgcgaggctgaactccaggaactcaggactaagcctgctggaccatgtccgggttgtgaacactctcaggaaagcgcccagctgcgcgataaactctcccagctccagttggagatggccgaaagtaaaggcatgctcagcgagctgaatttagaggttcagcagaaaactgaccggctggccgaagtggagctgcggctgaaagactgtctggccgagaaggcccaagaggaagagcgactaagccggaggctccgggactcacatgaaaccattgcatccttgagagctcagagtcctcccgtgaagtacgtcatcaagactgttgaggtggagtcctctaagaccaagcaggccttgagtgaaagccaggccagaaaccaacatctgcaagagcaggtggctatgcagcgacaagtactgaaggagatggagcaacagttacagagctcccatcagctcaccgctcggcttcgtgcgcagatagctatgtatgagtctgagctggaacgggcacatgggcagatgctggaagagatgcagtcactggaggaagataaaaatagggctatcgaggaggcgttcgcacgtgctcaggtagaaatgaaggctgttcatgagaacctggcaggtgtgcgcacaaacctgctgacccttcagccagccctgcggactctgaccaatgactacaatggtttgaaaagacaggtgaggggcttccccctgcttctgcaggaggcactgagaagcgtcaaagccgagatcggccaagccattgaagaggtcaattccaacaaccaggaacttctccgcaaatatagaagagaactgcagctcagaaaaaagtgtcacaacgagctggtcagattaaaaggcaacatacgagtcattgctcgggtccggcccgtcaccaaggaggacggcgagggcccagaagcaacgaatgctgtcacgttcgacgcggacgacgacagcatcatccatctgctgcataagggtaaacccgtgagctttgaactggacaaagtgttttctcctcaggccagtcagcaggacgtgttccaggaggttcaagcccttgtgacctcttgtattgatggtttcaatgtttgtatttttgcctacggtcagacaggggcgggtaagacctataccatggagggcacagccgagaatccagggattaatcagagggctctacagctcttgttctcagaggtccaggagaaggcatccgactgggaatacactatcactgtttccgcagcagagatttacaatgaggtcctcagagacttactggggaaggagccccaggaaaagttagaaatccggctatgtccggatggaagtggccagttgtacgtgcccggcttgaccgagttccaggtgcaatcagtggatgacattaacaaggtgttcgagtttggacacacaaaccggacaaccgagttcacgaacctaaatgaacacagctctagatctcacgcactgctgatagttaccgtgaggggcgtagactgctcgactggactgcgtacgacaggtaagctgaatcttgtcgacttagcagggtctgaaagagtgggaaagtcaggggctgaagggtcccggcttagagaagctcagcacatcaataagagcctgagtgctctgggagatgtcatcgctgcactgaggtcgagacaaggccacgtgccttttcggaattcaaagctcacatacctgctgcaggactctctttctggcgattcgaagactttgatggtcgttcaggtgtcaccagtcgagaaaaatactagcgagacactctacagccttaagttcgccgaacgcgtgcgatcagtggaactcggtcccggcctgcggcgcgccgagttgggctcatggtcgtcacaggagcatctcgagtgggagcccgcttgccagactccacagcccagtgcgagagcacactctgccccaagttccgggaccagcagtcgcccgggctccattcggcgcaaacttcaaccaagtgcctag

SEQ ID NO: 121712 - DNA, 2481 bp, synthetic construct
  misc_feature 1..2481: note = Description of Artificial Sequence: Synthetic coding sequence
  source 1..2481: mol_type = other DNA
atggttcctagtcgcagaacctggaacctgggggctactccttcgctccgcggcttatggcgggtgggccgggcgccagagcccgaacccggaatggccaggccggcaccagccccagcgagccccgctgctcgccctttcccccacacaggccccggccgactgagaaccggtcggggcaaagatacacccgtgtgcggagatgaggattcaagtgctaggtctgcagcccgaccggctctggcacagtgccgcgccctttctgtagactgggcaggccccggttccccacacggattgtatctcacgctgcaggtcgagcatctgaaggagaaactgatctcgcaagcccaagaagtcagtagattaaggagcgagctcgggggaacggatctcgagaaacaccgggacttactcatggtagagaatgagcgcctgcgtcaagagatgagacggtgtgaggccgagcttcaggagctgcggacaaagccagcagggccttgcccgggttgtgaacattcgcaggagagcgcacaacttagggataaactgtctcaactgcagctcgagatggctgaaagcaagggcatgttgagtgagctgaacctcgaagttcaacagaaaaccgaccgcctggccgaggtagaactgcgactgaaagattgtttggctgaaaaggctcaggaagaagaaagactcagtcgccgcctgcgagactcgcacgaaaccatagcctccctgcgggcgcagagcccaccagtgaaatatgtgattaagaccgtcgaggtggagtcaagcaaaaccaaacaggccctgtctgagtcccaggcacggaatcagcacctccaggaacaggtcgcgatgcagagacaggtgctgaaagagatggagcagcagctgcagtcctctcatcagctgaccgcaaggctccgcgcccagatcgccatgtacgaatcagaactcgaacgagcccacggacagatgcttgaggagatgcagtccctggaagaagacaagaacagggcaatcgaggaagcattcgctagggcccaggtcgaaatgaaagctgtgcacgagaatctcgccggagtgcgaaccaatcttcttacacttcagccggccctgcgcaccctcacgaacgattacaatggcttaaagcgacaggtgagaggtttccccctgctgctgcaggaagctctcagaagcgttaaagccgaaatcggtcaagccatcgaggaagtgaatagcaacaatcaggagttactaaggaaataccgacgggaactccagctccgcaaaaagtgccacaatgaactagttagacttaaaggtaatatacgagtaatagccagggttaggccagtgaccaaggaggacggggagggtccagaagctacaaacgcagtaacattcgatgccgatgatgactcgatcatccacctgctgcataaaggcaagcccgtgtccttcgaactggacaaggtgttttctcctcaagcctctcagcaagatgtcttccaagaagtccaggcgctcgttacgagctgtattgatgggtttaacgtctgcatatttgcctacggtcagaccggcgctgggaagacatataccatggaaggcacagccgagaatccaggtatcaatcagcgggccctccagctgttattctcagaagtacaggagaaggcaagcgactgggaatacacaattactgtgtctgccgccgaaatttataatgaagtcctgcgcgacctcctgggaaaggagccacaggagaaactggaaatacggctctgtccagatgggtctgggcagctgtacgtgcctggattaactgaatttcaggtgcagagtgtagacgatattaacaaggtatttgagttcgggcataccaacagaactacagagtttacaaatctcaacgagcactcatccaggtcccacgccctgctcattgttaccgtcaggggcgtggattgtagtacaggcctccgaacaaccggcaaactcaacctggtggaccttgccggctccgagagagtgggaaaatcaggagctgagggatctcggctgcgagaggcgcagcacataaacaagtctctctctgcacttggtgatgtgatagcggctttgcggtccaggcagggccatgttccattccgtaattccaagctcacctatctgctacaggactctttgagcggggattccaagactctgatggtggtccaggtctctcccgtggagaaaaatacctcagagacactctactcactcaagttcgccgagcgtgtgaggtctgtggagcttgggccaggtctgaggcgagcagagcttggctcctggtcctctcaggagcacttggaatgggagcccgcgtgtcagactccgcagccctccgcccgtgcccattcggcaccttcaagtggtacaagcagcaggccagggagtatccgacgtaagctgcaaccctcagcctag

SEQ ID NO: 121713 - DNA, 2307 bp, synthetic construct
  misc_feature 1..2307: note = Description of Artificial Sequence: Synthetic coding sequence
  source 1..2307: mol_type = other DNA
atggttttaaggatggtggaggcaatgtcccaactgcaggacgagaagactcaactgcaggaggagctggtcgtgcttcaagagcggctcgccctgagagactccgatcaacaggccacgtccactcagctgcagaatcaggtggagcaccttaaagaaaagcttataagtcaagctcaggaggtttcaagactgaggtcggagctagggggaacagatctagagaagcatcgggacttattgatggtcgaaaatgagagactgagacaggagatgcggcgctgcgaggccgaactccaagagcttcgaactaaacccgcaggaccctgcccaggctgcgagcactcgcaggagagcgctcagctgagagataaactaagccagctacaactcgaaatggccgaaagcaaaggaatgctttctgagcttaacctcgaagtgcagcagaagaccgatcggttggctgaagttgagctgagactcaaagattgcctggccgaaaaggcacaggaagaggagcgactgagccggcgcctacgagactctcacgaaaccatagctagccttagggcacagagcccaccagttaaatatgttataaaaaccgtagaagtggagagttcaaagacaaaacaggccctgtccgaaagccaggctcgcaatcagcacctccaggagcaggtggcgatgcagcgacaggtactgaaagagatggaacagcagctgcagtcaagtcatcagctgactgcccgattaagagcccagattgctatgtatgagtccgaattggagcgggcacatggacaaatgctggaagagatgcaatccctagaggaggacaagaaccgtgccatcgaggaggcctttgcacgtgcccaggtggagatgaaggccgtccatgagaatctggctggagtcaggaccaacctgctgacgctccagcccgcactccggacgttgaccaacgactacaatggcctcaaacgtcaggtccggggctttccattgctgctccaagaggctttaagaagcgtgaaagctgaaattgggcaggccatcgaggaagttaatagtaataatcaggaactgctccgaaagtataggcgcgagctccagctgcgcaagaagtgtcataacgaattggtgcgcttgaagggcaatattcgagtcatcgccagagtgcgacctgtgactaaagaagacggagaggggccagaagccacgaatgcggtgacattcgacgcagacgacgattcaataattcacctgttacacaaaggcaagcctgtgagctttgaactagataaggtattcagtcctcaggccagtcagcaagacgtctttcaggaggtccaagccctcgtgacctcttgtatcgacgggttcaacgtgtgtatctttgcctacgggcaaacaggggcagggaagacctacaccatggaaggcactgctgaaaatcctggcattaatcagcgtgcgctgcagcttctgttttccgaggtccaggaaaaggcctcagactgggaatatacaatcaccgtgagtgctgcagaaatctacaatgaggtgttgagagatctgctcgggaaagagccacaggagaagctggagatccgcctatgcccggacggaagtggacagttgtatgtgccaggcctgacagaatttcaggtgcagtccgtagatgacattaataaggtgttcgagttcggacacaccaatagaaccaccgaattcacaaatctcaatgaacatagctcccggtctcatgcgctgctaatcgtaaccgttagaggggtggattgtagcacaggtcttcggaccaccgggaaactgaacctggttgacctggcaggctctgagagggttgggaagtcaggcgctgaaggctcccgcctgagagaggcccagcatattaacaagtccttgtctgctcttggggacgtgatcgcagccctccgctcccgacagggccacgtgccgtttcgcaactccaagctgacatacctgttgcaggatagtctgagcggagactctaagacgttaatggttgtgcaggtgagccctgttgagaaaaacacctctgagacactgtacagcctgaaattcgccgagcgagtgagatcagtggaattgggacctggcctgcgacgcgccgaactgggcagctggtctagtcaggaacacttagagtgggagcccgcatgccaaaccccccagccctccgcccgggcccattcagctccttctagcggcacctcttctagacccgggtctatcagacgaaaactgcagccatcagcctag

SEQ ID NO: 121714 - DNA, 2175 bp, synthetic construct
  misc_feature 1..2175: note = Description of Artificial Sequence: Synthetic coding sequence
  source 1..2175: mol_type = other DNA
atgataaaagttgaacatctgaaggaaaaactgatcagtcaggctcaggaggtcagcagactgcggtccgaactgggtggaaccgacctcgaaaagcacagagatctgctcatggtcgagaacgagaggctgagacaagagatgcgcaggtgtgaagccgaactccaggaactccggacaaagcctgcggggccctgtcctggttgtgagcatagtcaagagtctgcccagcttagggacaaactgtctcaacttcaactcgaaatggccgagtcgaaaggcatgctttccgaactgaacctggaggtccagcagaaaaccgatcggctggcagaggtagagctccggctaaaagattgccttgctgagaaagcccaagaggaggaaagattgtctagacgacttcgggattctcatgaaacgatcgcctcactgagggcccagagcccccccgtcaaatacgttattaagaccgtggaggttgagagctcaaagacgaaacaggcactttcagaatcccaggcccggaaccagcacctgcaagagcaggttgctatgcagcgccaggtgctgaaagaaatggaacagcagctgcagtcgtcacaccagctcacagctcgcctacgagctcaaattgccatgtacgagagtgagttagagagggcgcacgggcaaatgcttgaagaaatgcagtccctcgaagaggacaagaaccgggccattgaggaggccttcgctcgagctcaggttgagatgaaggccgtacacgaaaacttggccggtgtccgtacaaatttgctgaccctacagccagccctgcgcaccctgacaaatgattataatggtttaaagcgccaggtgcgaggatttcctctcctcctgcaggaggcgctgagaagcgtcaaagctgagatcgggcaggcgatagaagaggttaattcaaataaccaggaacttcttcgcaagtacaggcgcgaacttcagttacggaaaaaatgtcacaatgaactagtacgtctgaagggaaatatccgggtgatagccagagtacgcccagttactaaggaggacggagagggccccgaagcgactaacgccgtgacatttgacgccgacgacgactctattatacatctgttgcacaaaggaaagcccgtgagtttcgagttggacaaggtctttagcccccaggcatcccaacaggacgtctttcaagaggtacaggcccttgtcacctcttgcatcgatggattcaacgtctgcatcttcgcttatggacagaccggagccggtaagacctataccatggagggaaccgccgaaaacccaggcataaatcagcgcgcacttcagttgcttttctctgaagtacaggagaaggcctcagattgggagtataccatcaccgtgagtgctgctgaaatctataacgaggtactgagggatttattagggaaagaaccccaggaaaagcttgaaatcagactgtgcccagatgggtcaggccagctgtatgtgccaggcctcactgaattccaggtgcaaagcgtggacgacataaacaaggtctttgaattcgggcatactaaccggactaccgaatttacaaacctaaacgagcactcttctcggtcacacgccctcttgatcgtgacagtgcggggagtcgactgctccacaggtctccgcaccaccggtaagttaaatctagtggatctggccggttcagaaagggttgggaaatcaggagctgaaggcagccgcctgagagaagcccagcacataaacaaaagtctcagcgctttaggagacgtgatagccgctctaaggagccgccaaggtcatgtgcccttccggaactccaaactgacgtatttactgcaggattcgctctccggggattcaaaaacacttatggtcgttcaagtctctcctgttgaaaagaacacctccgagaccctgtactctctaaagttcgccgagcgggttaggtccgtggaacttggacccggcctgaggcgtgcagagctggggagctggtcctcacaggagcaccttgaatgggaacccgcctgccaaaccccccagcccagcgccagggcccattctgcgccgagcagcggcaccagtagtcgtcctggtagcatcaggagaaaactccagccttccgcgtag

SEQ ID NO: 121715 - DNA, 2547 bp, synthetic construct
  misc_feature 1..2547: note = Description of Artificial Sequence: Synthetic coding sequence
  source 1..2547: mol_type = other DNA
atgtgtgcttcagcatgtaaagacacagctgcatggtgtcccgaggaagctgcagaaccccaggccatggtgccatcccggagaacttggaatctgggtgctacgccttcgcttcgggggctttggagggtcggacgggcccctgaacccgagcctggaatggctaggcccgcccctgcccctgctagcccggcagcgagaccttttccccacacaggtcccggtagactccggaccggtcgggggaaggacacaccggtatgcggggacgaagatagctccgccaggtccgctgcacgccccgcgctggctcagtgccgggctctgtctgtagactgggcgggacctggctcccctcatggactttacctcacactccaggtcgagcaccttaaggaaaaattgatcagccaagcccaggaggtcagccggttaaggtccgaactgggaggaacagatctggagaaacaccgggacctgctaatggtggaaaacgaaaggttgcgccaagagatgcgaagatgcgaagccgagcttcaagagcttcgcacaaagcctgccggcccctgtccaggttgcgagcactctcaggagagcgcccaactcagggacaagcttagccaactgcagttggaaatggcagagagcaagggtatgttaagtgagctgaatctggaggtgcaacagaagacagacaggctcgcagaggtcgagctgcgcctgaaagactgtctggccgaaaaggcacaggaggaggagcgcctctcccgccggctgagggacagccacgaaaccatcgcttcccttagggctcagtccccccccgtgaaatatgtcattaagacagtggaagtggagagtagcaagaccaagcaagccctgtcggagtcccaggcacggaatcagcatctgcaagagcaagtggccatgcagaggcaagtgctgaaagaaatggaacaacaacttcagtcatcacatcagttgacagccagactgagagcccagatagcgatgtacgaatctgaactggagcgggcccacgggcaaatgctggaggaaatgcaatctttggaggaagacaagaaccgggcaatcgaggaagcattcgccagagcgcaggtggagatgaaagctgtccatgaaaacctcgccggcgtgagaaccaatctgctcacactgcagcctgctctgaggactttaacaaacgactataacggcttaaaaagacaggtgagaggattcccactactgctccaggaagcgctccgtagtgtgaaggccgagatcgggcaggccattgaggaggtcaattccaacaatcaagaacttttgcggaagtacagaagggaactgcaactcaggaagaaatgccacaatgaattggtccgcctcaaagggaatatacgcgtcatagcccgggtgcgccctgtaactaaggaggacggggaaggacccgaagccaccaacgccgttacttttgacgccgatgatgacagcatcattcatctgctccacaaggggaagcccgtgagcttcgaactcgacaaagtgttctcccctcaggcctcacagcaggacgtatttcaagaggtccaggccttagtgaccagttgcatcgatggattcaatgtgtgcattttcgcatatgggcagaccggcgctggcaagacatacacgatggaggggaccgctgaaaacccgggaattaaccaacgggccctgcagcttttgttttccgaggtgcaggagaaggctagtgactgggagtatactatcaccgtttctgcagcagagatctacaacgaagttttacgggatctgctgggcaaggaaccccaggagaaactggagatcaggttatgcccagacggatctgggcaactgtatgttccagggctgacggagtttcaggtgcagagcgtcgatgatattaataaagtgtttgaattcggtcacaccaacaggactacagaattcaccaaccttaacgagcactcttcgaggtcccacgctctgctcatcgtgacagtgcgcggggtcgattgcagcactggactgcggacaacagggaagctcaatctagtggatctggccgggagtgaacgtgtcgggaagtccggagctgaggggtcccgactgagagaggcccagcacattaacaaaagtctctctgctctcggcgatgttattgccgctttacggtcccgccaaggtcacgtgccattcaggaatagcaagctcacatacctgttgcaggactcattatcaggggattcgaagactctgatggttgtgcaggtttctcccgtagagaaaaacacaagcgagactctttactccttaaagtttgccgaacgcgttcgttccgtggagctggggcctgggctgcggcgcgcagaactgggcagttggtccagtcaggagcacctggagtgggagcctgcctgtcagacgccccaaccatcagctagagcccacagtgcgcccagctccggcacctcaagtcggcccggctcaattcgaagaaaactacagccctccgcgtag

SEQ ID NO: 121716 - DNA, 2055 bp, synthetic construct
  misc_feature 1..2055: note = Description of Artificial Sequence: Synthetic coding sequence
  source 1..2055: mol_type = other DNA
atggtagaaaatgagcggctgcgccaggagatgcggaggtgcgaagccgaactccaggaactgagaactaagcccgccggtccctgccctggctgcgaacactctcaggaatccgcccaactgcgagataaactctcgcagctacagttggagatggctgaatcaaagggaatgctaagtgagcttaatctggaggttcaacagaagacagacaggctcgcagaagtcgagcttagattgaaggattgtctcgccgaaaaagcgcaagaggaggaacgactctcccggaggctgagggactctcacgaaaccatcgcctccctgcgtgcgcaatctcctccagtaaaatacgtcataaaaaccgttgaagtcgagtcttctaagacaaaacaagcgttatcagaaagtcaggccagaaaccagcatctgcaggaacaggtagccatgcaaaggcaggtgttgaaggaaatggaacagcagcttcaatcctcacatcaactgactgcgagattgagggctcagatcgcgatgtacgagtcggagctcgaacgcgcccacgggcagatgctggaggaaatgcaaagtctcgaagaagacaagaacagggcaatcgaggaggccttcgcccgcgctcaggtggaaatgaaagctgttcatgagaaccttgcaggtgtccggaccaatttactgactcttcagcctgcactgaggacacttaccaatgactacaacggacttaagagacaagttagggggtttccccttctcctccaggaggctctcagaagtgttaaagccgagataggacaggccatcgaggaagtgaactcaaacaaccaagagctgctgcgcaagtaccgcagggaactccagctccgaaagaaatgtcataacgagttggtcaggctgaagggtaatatacgggtgatagccagagttagaccagtcaccaaggaggacggggaaggtccggaagccacgaatgcagtgacatttgacgccgatgacgactctatcattcacttgctacacaaaggcaaacctgttagtttcgagctggacaaagtattctcacctcaggcatcacagcaggacgaggtgcaggcactggtgactagttgcattgatggttttaatgtttgcattttcgcctatggccaaacaggcgctggaaagacctataccatggaaggcacggccgaaaatccaggcatcaaccaaagagctctgcagctgctcttcagcgaagtacaggagaaagcttccgactgggagtatacaattacggtgtccgctgccgagatttataacgaggtgctgagagacctgctggggaaggagccccaggaaaaacttgagatcaggttgtgccctgatggctctggccaactgtatgtgcccgggttaacagagtttcaggtacagtctgtcgacgacatcaataaagtctttgaatttggccatacgaacaggaccacagagttcactaacctgaatgaacactccagcagatcgcatgccttactgattgtgacagtgcggggagtcgattgctccactggcttgcggacgactggtaaattgaacctagtggacctcgccggatccgagcgggtgggtaagtccggtgctgagggcagtaggctgcgcgaggctcagcacattaacaaatccttgtcagccctgggggacgtgattgctgccctgcggagtaggcagggtcacgtcccgttcagaaactcaaagctaacttacctgcttcaagactcactgtccggggactccaagactcttatggtagtacaagtttctcccgtggagaaaaacacgagcgaaaccttatactctttgaaattcgcagaacgcgtgcggagtgtcgagctaggaccaggactgagacgcgcagagttgggatcttggtcctctcaagagcaccttgaatgggagcctgcatgtcagaccccccagccctcggcccgtgctcactctgctccttctagcgggacgtcttcaaggccaggctccattcgccgcaaactccagcctagcgcttag

SEQ ID NO: 121717 - DNA, 1914 bp, synthetic construct
  misc_feature 1..1914: note = Description of Artificial Sequence: Synthetic coding sequence
  source 1..1914: mol_type = other DNA
atgtacgacaatatgtcgacaatggtgtatattaaagaggataaactggagaagcttacacaggatgaaattatcagtaagaccaagcaggttattcagggactggaggcactaaaaaatgagcataactcaatcctccaatcattgttagaaacgctgaagtgtctgaagaaggatgacgaatctaatctagttgaggaaaaatcaaatatgatccgcaagtccttggaaatgctcgagctgggcctgtccgaagctcaggtaatgatggctctctcaaatcacctgaacgccgtggagagcgagaagcagaagttgcgcgcacaggtacggcgcttgtgtcaggaaaatcagtggctacgggacgagctcgctaacacgcagcaaaaactgcagaagagtgagcagtctgtagcacagcttgaagaagagaaaaagcatctggaattcatgaatcagctcaagaaatatgatgacgacatatctccctctgaggataaagacacagatagcaccaaggagcccctggatgacctattccccaacgacgaagacgaccctggtcagggaattcagcagcagcactctagcgcagccgctgccgcacagcaaggcgggtatgaaattccggctaggctgaggaccctccacaacctggtcatccagtacgcatcgcagggacgatatgaagtggccgtacccctgtgtaaacaggccctggaagatctggagaagactagcgggcatgatcaccccgacgtcgccactatgctgaatatcctggcattggtataccgtgatcagaacaagtacaaagacgccgccaacctgctcaacgatgcacttgccattagagaaaagactcttggaaaggaccaccccgccgttgcagccaccctcaacaatctggccgtgttgtacggcaagagagggaagtacaaagaggccgaaccactgtgtaagcgggcacttgagataagggagaaggttctcggcaaggaccatcctgatgtggcgaagcagcttaataacctagccttgctctgccagaaccaaggaaagtatgaggaggtggaatactattaccaacgagctctggaaatctatcaaactaagctgggacctgacgatcccaatgtcgctaaaaccaagaacaaccttgctagttgttacctcaaacaaggcaagtttaagcaagcagagacattgtacaaggaaattctcactagagcgcacgaaagagaattcggtagcgtggatgatgagaacaaacctatctggatgcacgccgaagaacgggaagaatgtaagggtaaacagaaggatgggactagtttcggtgaatatggtggttggtataaggcatgcaaggtggactcccccacagtgaccactactcttaagaacctcggcgctctttatagaagacaaggaaagttcgaggccgcagaaactcttgaagaagctgccatgagaagcaggaaacaagggttagataacgtccataagcagcgggttgccgaagtattgaatgatcccgaaaacatggaaaaaagacgctctcgggagagcctcaatgtggacgtggtgaaatacgaatcagggcctgatggcggtgaagaagttagcatgtcggtagaatggaacggcgatggcacaggctccctgaaacgctctggatcctttagcaagctgcgggcatcaattcgcaggtcttccgaaaaacttgtcaggaaactaaaaggagggtcttcacgggagtccgaacccaagaatccagggatgaagcgagctagctcgttgaacgttttgaacgtgggtggaaaggccgccgaggatcgttttcaggagcgaaacaattgtttggcagactcacgggccctgtcagcttcccacactgatttggcacactag

SEQ ID NO: 121718 - DNA, 1920 bp, synthetic construct
  misc_feature 1..1920: note = Description of Artificial Sequence: Synthetic coding sequence
  source 1..1920: mol_type = other DNA
atgtatgacaatatgagcactatggtatatattaaggaggacaaactagagaagttgactcaggatgagatcatcagcaagaccaaacaagtgattcagggcctggaagcgcttaagaatgaacacaactcaatcctccagtcgttactggagaccttgaaatgcttgaagaaagatgatgaatctaacttggtggaagagaagtcaaacatgatcagaaaaagccttgagatgctcgaacttggactgagcgaagcacaggtgatgatggccctcagcaaccaccttaacgccgtcgaaagtgagaaacagaagctgcgagcccaggttcgaaggctgtgccaggagaaccagtggctgagggacgagctggccaacactcagcagaagctgcaaaagtccgaacagtcagtcgcccagctggaggaggaaaaaaagcacctcgagttcatgaaccaattgaagaagtatgacgacgatatatctccaagtgaggataaagacaccgattccactaaggagccacttgacgacctcttcccgaacgatgaggacgatccagggcagggcatccagcagcagcattcctccgccgccgccgccgcgcagcagggcggctatgaaatcccagcccgactccggaccttgcataatctggtgattcagtatgccagtcagggacggtatgaggtcgccgtgccgctctgtaagcaggctctcgaagacctggagaagacatcaggccacgaccatcccgacgtcgccacaatgttgaacatcttggccctggtctatcgcgatcagaacaaatacaaggatgccgcgaacctgctgaacgacgcccttgccattcgcgagaagaccctgggcaaggaccaccccgccgtggcggccacgctgaacaatttggctgtgctatatggcaagcgaggtaagtacaaagaggccgaacccttgtgcaaaagggcacttgagataagggaaaaggttctgggaaaggaccaccctgacgttgctaaacaactcaacaacttggccctcctgtgccaaaatcagggaaaatacgaagaggttgagtattattaccagcgcgctcttgagatatatcagacaaagctcgggcccgacgaccctaacgtggccaagaccaaaaacaatctggccagctgctatctgaagcaaggaaagtttaagcaggcagagacgctgtacaaggagatcctcacacgggcgcacgagcgagagttcggctcagtggatgacgagaacaagccaatctggatgcacgccgaggagcgcgaagagtgtaagggcaaacaaaaggacgggacatcctttggagaatatggcggctggtacaaagcctgcaaggtggattcaccgacagtcactacaaccctgaagaacttaggagccctttatagacggcaaggaaagtttgaagctgccgaaactctggaagaagccgcgatgcgtagcaggaaacagggactagacaacgtacacaagcagcgggtcgcagaggtgttgaacgaccccgagaacatggaaaagaggaggagtagagagtccctaaacgtcgatgtggtgaaatatgagtcagggccagacggcggtgaggaagtgagtatgagtgtagaatggaacggggatggcactgggtctctcaaacggagcggttctttttcaaagttacgggctagcatccgcaggagcagtgaaaaactggtgaggaagctgaaaggcggcagctcaagggagagtgagcccaaaaaccccggaatgaaaagagccagctctctgaatgtgcttaacgtgggtggaaaggcagcagaggatcggtttcagggcgtctcagggcgtgcctccttctgcggcaaaagacaacagcagcagtggcccggccgcagacatcggtag

SEQ ID NO: 121719 - DNA, 1887 bp, synthetic construct
  misc_feature 1..1887: note = Description of Artificial Sequence: Synthetic coding sequence
  source 1..1887: mol_type = other DNA
atgtacgataatatgtctacaatggtctatattaaggaggacaagctcgagaagttaacgcaagacgaaatcatctccaagactaaacaggttatccagggtctggaggctctgaaaaacgagcacaattcaatcctccagtcactgttggaaacactgaaatgcctgaagaaggacgatgagagcaatctggtagaagagaagtcaaatatgattagaaagtctttagagatgcttgaactgggtctcagtgaggctcaggttatgatggcacttagtaaccaccttaacgctgtcgaatctgagaagcagaagctcagagcgcaggtgaggcggctgtgccaagagaatcaatggctgcgggacgaacttgccaacactcaacagaaactgcagaaaagcgaacagagcgtggcccagcttgaagaggaaaagaagcacttagagttcatgaaccagcttaagaagtatgatgacgatataagtccctctgaggacaaggacaccgatagtacaaaagagccactcgatgatctgttcccgaacgatgaggacgatcctggtcaggggattcaacagcagcacagctccgctgccgccgcggcccagcagggtggctacgagatccccgctagattacgaacacttcacaatctggtgattcaatatgcatcacagggtagatacgaggtggcagtgcccttgtgcaaacaagcgctggaagatctggaaaagacgagtggtcacgatcaccccgatgtggccaccatgctgaacattctcgctttagtgtatagggaccagaacaaatacaaggacgcggccaatttgctgaatgacgcccttgccattcgggaaaagaccctgggcaaagaccatcctgcggtggctgccaccttaaacaatctggccgtgctgtatggcaaaaggggcaagtacaaggaggccgagccgctctgtaagcgggcactggagatacgtgaaaaggtgctgggaaaggatcaccccgatgttgctaagcaactaaacaatctagccctgctttgtcaaaatcaggggaagtatgaggaggtcgaatactattatcaacgggcccttgaaatttaccaaactaaactgggcccagacgatcccaacgtggcaaagactaagaacaatctggcctcctgttacttgaagcaaggcaaatttaagcaggcggaaactctgtataaggaaatactgacacgtgcccacgagagggagtttggatctgtcgatgacgagaataaaccaatttggatgcatgcagaagagagggaagagtgcaagggcaagcaaaaagacgggacgtcattcggcgaatacggaggctggtacaaagcatgcaaggtcgatagtcccactgtgactaccactttgaagaatctcggggccctttaccgtcgccagggcaagttcgaggccgccgaaaccctggaggaggcggccatgaggtcacgcaaacagggccttgataatgttcacaaacagcgtgtggcagaggttttgaatgatcctgaaaacatggaaaaaagaagaagcagggagtccctgaacgtggacgtcgtcaagtatgagtcagggccggacggcggcgaggaagacggaaccggatccctgaagcggtcaggcagtttttccaaacttcgggcctctatccgacggagcagcgagaaattagtgagaaagctgaagggtggtagctctcgggaatctgaaccgaaaaacccggggatgaaacgggccagttcacttaatgtgctcaacgttgggggcaaagcagctgaggaccggttccaagaacggaacaattgtttagccgacagccgggcgctttcagcgagccataccgacctagcccactag

SEQ ID NO: 121720 - DNA, 1722 bp, synthetic construct
  misc_feature 1..1722: note = Description of Artificial Sequence: Synthetic coding sequence
  source 1..1722: mol_type = other DNA
atgtacgacaatatgagcacaatggtctacattaaagaagacaaattggagaagttaacgcaggacgagattattagtaaaacgaaacaagtaatccagggcctagaggcgcttaaaaatgagcacaatagcatcctgcaatccctcctggagacgcttaagtgcctgaagaaagacgacgagtcgaatttggtggaggagaagtctaatatgataagaaaaagtttagaaatgctcgagctcggtttgtcagaggcgcaggtgatgatggccctaagcaaccacctaaatgccgtagagtccgaaaaacaaaagttgagggcccaggtccgccgcctttgccaggaaaaccaatggctgcgcgacgagctggcgaatacacagcagaagttgcagaaaagtgagcaatcagtggctcaactagaggaagagaaaaaacatttggaatttatgaaccaactgaagaagtatgatgacgatatctctccctccgaggataaagataccgacagcacaaaggagccactcgacgatctgtttccgaacgacgaagacgaccccggccaggggattcagcagcagcactcttcagctgctgctgcagctcagcaaggcggctatgaaatccctgcgaggttgcggacacttcacaacctggtgatacaatacgcatctcaggggagatacgaagtcgctgtccctctgtgtaaacaggccctggaggatctcgagaaaacaagtggccatgatcatccggacgtcgccaccatgcttaatatattggctcttgtctatcgcgaccagaacaagtataaagatgccgccaacctgctgaatgacgccttggctatccgcgaaaaaactcttggcaaagatcacccagcagtcgcggccacactgaataacctggccgttttgtatggaaaacgaggtaaatacaaggaagctgagcctctttgcaagcgcgctcttgagattagagaaaaggtcctcggcaaggatcatccagatgtcgctaagcagctcaataatctggccttgctgtgccaaaaccagggaaaatacgaggaggtggaatactactaccagcgggccctggaaatttaccagaccaaattaggcccagatgatccaaatgtggccaaaacaaaaaataacctggcctcttgctacttgaaacaggggaagttcaaacaggctgaaaccctctacaaggaaatcctaaccagggcacacgagagggagttcggaagcgtggacgatgaaaacaaaccaatttggatgcatgctgaggagcgggaagagtgcaagggtaagcagaaggacggcacctcatttggggagtacggaggctggtacaaggcttgcaaggtcgactccccgaccgtcaccacaacgctcaagaacctcggggctctttaccgtcggcaggggaagtttgaagccgcagagaccctcgaggaggcagctatgaggtctcgcaagcaagggctggacaacgtacataagcagcgggtcgctgaggtgctcaatgatcccgagaacatggaaaagaggcgatctagagagtccctgaacgtagacgtcgtaaaatatgagtccggcccagacggcggtgaagaggtgtccatgtccgtggaatggaatgggggggtgagtgggagagcttcgttctgtggcaaaagacagcagcagcagtggccaggccggaggcaccgttag

SEQ ID NO: 121721 - DNA, 1731 bp, synthetic construct
  misc_feature 1..1731: note = Description of Artificial Sequence: Synthetic coding sequence
  source 1..1731: mol_type = other DNA
atgtatgacaatatgagtaccatggtgtacattaaagaagataaactggaaaagctaacacaggatgagatcatttcaaagacgaagcaggttatacaaggccttgaagctctaaagaacgaacacaatagcatcctgcagtcgttactggagacattgaagtgccttaaaaaggatgatgagtccaacctcgtagaagaaaagtccaacatgatcaggaagtctttggagatgctggaactcgggttgtctgaagcccaggtcatgatggcgctctctaaccatctgaacgcggtggagagcgaaaagcagaaactgcgggctcaggtgaggaggttgtgccaggaaaatcagtggctaagggacgaattggctaacacacagcagaagttgcaaaagtcagaacagtctgtggctcagctcgaagaggagaagaaacacctggaatttatgaaccagttaaaaaagtacgacgatgacatctctccatcagaggataaagataccgacagcactaaagagcccctcgatgatttatttcccaacgacgaagatgatcccgggcaaggaatccagcagcaacattcatctgcggcggcggctgcacagcagggcggttacgagatccccgcccgtctgcgtacactgcataacttagttatccagtatgcatcccagggcaggtatgaggtggcagtacccttgtgtaagcaggccctggaggatctcgaaaagacttcaggacacgatcaccccgatgtcgctaccatgctaaatatcctggccctcgtgtatagggaccagaataaatacaaggatgccgcaaacctgctgaacgacgccctagcaataagggaaaagactctgggcaaagatcacccagcagtggccgctaccctaaacaacttggccgtgctctatggaaagcggggcaaatacaaggaggcagaaccactttgtaaacgagcactggagatccgggagaaggtgttaggaaaagaccaccccgatgtcgccaagcagttaaataatcttgcattactctgtcagaatcaaggaaagtacgaagaggtagagtactattatcagagggcgttagagatctaccagactaaactcggtcccgacgatccaaacgtggccaagacgaagaataatctggcatcatgttatcttaagcagggaaaattcaaacaggccgagactttgtacaaggagattctgacccgtgcgcatgaacgcgaatttggatctgtggatgatgagaataagccgatttggatgcatgcggaggagcgcgaagagtgcaaggggaaacagaaagacggcacctccttcggggaatatgggggatggtacaaggcatgcaaggtcgattctccaaccgtgactaccacattgaagaaccttggggccttgtatagaaggcaggggaagttcgaagcagcggagacactcgaggaggccgccatgcgttcccgcaagcagcgcagcattagtgaaattccaaaaaagatactgtctgcgaatggttcaaatcactttccattgcccggttcccaggggctcgataatgtacacaagcagcgggtggctgaagtactgaatgaccctgagaacatggagaagcggcggagcagagagagcctcaacgtcgatgtggtaaaatacgagtctggccctgacgggggggaagagatgcgcaagatgaagctcggcctggtgaactag

SEQ ID NO: 121722 - DNA, 1683 bp, synthetic construct
  misc_feature 1..1683: note = Description of Artificial Sequence: Synthetic coding sequence
  source 1..1683: mol_type = other DNA
atgtacgataacatgagcaccatggtatatattaaagaggataagctggagaagctcacacaggatgagatcatctctaaaacgaaacaggttatccagggactcgaagccctgaagaatgaacacaattcaattcttcagtccttgttagaaactctgaagtgtctgaaaaaggatgacgagtccaatttggtggaagaaaaatctaatatgattagaaagtccttagagatgctcgagcttggcctgagcgaagcccaagtcatgatggccctctctaaccacctgaacgccgttgagtctgaaaagcagaagctgcgggctcaggtgagaagattgtgccaggaaaaccaatggctgcgagacgagcttgccaacacccagcaaaaactgcagaaaagcgagcaaagtgtggcacagctagaggaggagaagaaacacctagaatttatgaatcagctcaagaagtacgatgatgatatatcaccttcagaggataaggacacagactcgaccaaggaaccccttgatgacctgtttcccaatgatgaggatgaccctggtcaggggattcaacagcagcattcatccgcagcagctgctgcccaacaaggcgggtacgagatccccgcccgcctcagaactttgcacaacctggtgatccagtatgcctctcagggacgttatgaagtcgccgtgccactctgcaagcaggctctcgaggatctggaaaagactagcgggcatgatcatcctgatgtggcaacaatgctcaacatcctcgctcttgtctatagggaccagaacaagtacaaggacgctgccaatctgctgaacgatgcactggcaataagggaaaaaacactagggaaggaccatcctgcagttgccgccaccctaaacaatctggccgttctgtacgggaaacgcggaaagtataaagaagccgagcccctttgcaagagggctttggagattcgtgagaaggtcttgggaaaggatcatccagacgtcgccaaacagcttaataatcttgccttgctgtgccagaaccaaggtaaatatgaggaggtggagtactattaccagcgggctttagaaatctaccagactaaattagggcctgacgaccctaacgtggctaagaccaagaataatcttgccagttgctatttgaagcagggcaagtttaagcaggcagagacgctctataaggagatcttgacaagagcccacgagcgtgaattcggtagcgtggatgatgaaaataagcccatctggatgcatgcggaagagcgggaagagtgcaagggcaagcagaaggatggtacatcttttggagagtacggagggtggtacaaggcatgtaaggtggacagtcctaccgtaactacaacgcttaagaatttgggggctctgtaccggagacaggggaaatttgaggccgccgaaaccttggaggaggccgctatgcggtcccggaagcagggcctggacaatgttcacaagcaacgcgtcgcagaagtgctgaacgaccccgagaatatggagaaaaggaggagtcgcgagtcgctcaatgtggacgtagtcaagtatgaatctgggcccgatggaggagaagaagtaagcatgtctgttgagtggaacggaatgcgtaagatgaaactgggactggttaattag

SEQ ID NO: 121723 - DNA, 1755 bp, synthetic construct
  misc_feature 1..1755: note = Description of Artificial Sequence: Synthetic coding sequence
  source 1..1755: mol_type = other DNA
atgtacgataacatgagcaccatggtgtacatcaaggaggacaagctcgagaaactgactcaggacgagattatttccaagaccaaacaggtcatacagggtctggaggcattgaaaaatgagcacaattcaatactacagagcttgttagagacgttgaaatgtctaaagaaggatgatgaaagcaacctggtggaagaaaagtctaacatgatcaggaagagcttggaaatgctggaactgggccttagcgaagcacaagtgatgatggccctatccaatcacctcaacgccgtggagagtgagaagcagaagctgcgggctcaggtcagaagactgtgccaggagaaccagtggctccgcgatgagcttgcaaacacacagcagaaattacagaagagcgagcagagtgtcgcgcagctggaagaggagaaaaaacatctggagttcatgaaccagctgaagaagtatgacgacgatatctccccgagtgaggacaaggacaccgatagcacaaaagaacccctggacgatctgtttccaaatgacgaggatgatccagggcagggtattcaacagcagcacagctcggctgccgccgcagcacagcaggggggttacgagattcctgcccgtctccgaactctgcataacctggtgattcagtacgcatcgcagggtaggtatgaagtggcagtccctctgtgtaaacaagccctagaagatctcgagaaaactagcgggcacgatcacccggatgtggccaccatgctaaacattcttgcacttgtttacagagaccagaacaaatacaaagatgctgctaatcttctcaacgatgcccttgcgattagggaaaaaacgctgggaaaagaccaccctgctgtcgcagccaccctgaataatctcgctgtcttgtatggcaaaaggggaaagtacaaggaagcggagcccttatgtaagagggcactggagatccgggaaaaggtgctgggcaaggaccacccagacgtggcgaaacaactgaataatcttgctctcctttgccagaaccaagggaagtatgaggaagttgaatattactatcagcgggcgcttgaaatctaccagactaaactgggccccgacgaccccaatgtcgcaaaaacaaaaaacaacctggcctcatgctatctgaagcagggcaagtttaagcaggcagaaacactatataaggaaattctgacccgggcacacgagagagaattcggctcggtcgacgatgagaacaaaccaatttggatgcacgcggaggagcgagaggaatgtaagggtaagcaaaaagatggcacatctttcggagagtacggcggttggtataaagcttgtaaggttgactccccgaccgtgacaacgacccttaaaaatctgggagccctctaccgcagacagggcaagttcgaggctgccgagacgctggaagaggcagcaatgcggtcaaggaaacagggccttgacaatgtgcacaagcagagggtcgccgaggtgctaaatgatccagaaaacatggaaaaaagacgctctagagaatccctcaatgtggacgtggtaaaatatgagtcaggccccgatggcggagaagaaatgaagagagcatccagtctgaatgtactgaatgtcggcgggaaggctgcagaagacagatttcaggagagaaacaactgtctggccgactcgagggctcttagcgcaagccataccgatctagcacactag

SEQ ID NO: 121724 - DNA, 1857 bp, synthetic construct
  misc_feature 1..1857: note = Description of Artificial Sequence: Synthetic coding sequence
  source 1..1857: mol_type = other DNA
atgtacgacaacatgagcaccatggtgtacattaaggaagataaactggaaaagctgacacaggacgagattatttccaagactaaacaagtcattcagggactggaggccctgaagaacgaacataactccatactgcaatccttactggaaacattgaaatgtctgaaaaaagatgacgagagcaacctcgtggaagaaaagtctaacatgataaggaagagtctcgaaatgctcgagctgggcctcagtgaggcccaggtgatgatggccctgtcaaaccacctcaatgcagtcgaatccgaaaagcaaaagctgcgagcacaagtgaggcgtctgtgtcaggaaaaccagtggctgcgcgacgagctagcaaatacacaacagaagttgcagaaaagtgaacagtccgttgcccagctggaagaagaaaaaaagcatctggaatttatgaatcaactgaaaaagtacgacgatgacatatccccctccgaggataaggacacagatagtacaaaggaaccgctcgatgacctgttcccaaatgatgaagatgacccaggacaaggaattcagcagcagcactcatctgctgccgcagctgcccagcagggcgggtatgagatacctgctaggctccgcacactgcacaaccttgtaattcagtatgcttcccagggacggtatgaagtcgccgtgcccctgtgcaaacaagcgttggaagatctcgagaagactagcgggcacgatcatccagatgtcgctactatgctgaatatcctcgcactcgtgtacagggaccagaataaatacaaggatgcagccaacctgctgaatgatgctcttgctataagagaaaagaccctgggaaaagaccaccctgctgtggctgccacgctcaataatctcgccgtcttgtacggtaaacggggcaaatataaagaagctgaacccctgtgtaaacgcgctctggaaattagggagaaggtcctcggaaaggatcacccggatgtcgcaaagcagttgaataacctggcactgctgtgccagaatcagggcaagtacgaggaggttgagtattactaccagagggccctggaaatttatcagaccaagcttgggccagatgatcctaacgtagcaaaaactaaaaataatttagcctcttgctatcttaaacagggaaagtttaaacaggcagagaccctctacaaggagatactaacaagagctcatgaacgcgagttcggttccgtagacgacgagaataaacccatctggatgcacgccgaggagagggaagagtgtaagggaaaacagaaggatggcacgtcatttggagagtatgggggctggtataaggcttgcaaggtggactcgcccacagttacaacgacattgaaaaacctgggagcactgtatcggaggcagggtaaattcgaagctgccgagacgctggaagaggctgctatgcgctctcggaagcaaggcctcgacaatgtacataagcaaagggtggccgaagttttaaacgacccagagaatatggaaaagcgacggtcaagggagagcctcaacgtggacgtggtgaagtacgaatcggggcccgacggcggtgaggaagtaagcatgtcagtcgaatggaatggtgatggaactggctccctcaaacggtctgggtctttctccaaactcagagcttccatacgtcgctcaagcgagaagctcgttcgcaaactcaagggtggcagttcaagagagagcgagccgaaaaaccccggcgcttctctggcggagccactcttcgtggagaacgactctagttcatcagggctggaagatgccacagccaattag

SEQ ID NO: 121725 - DNA, 1683 bp, synthetic construct
  misc_feature 1..1683: note = Description of Artificial Sequence: Synthetic coding sequence
  source 1..1683: mol_type = other DNA
atgtacgataatatgagtaccatggtctacatcaaagaggataagctcgaaaagctgacacaggacgaaattattagcaagacgaagcaagtgattcagggcctggaggccctgaaaaacgaacacaattctattctgcagtcgttattagaaacccttaagtgcctgaaaaaagatgacgaaagcaatctggttgaagagaagtccaacatgatcaggaagtcactggagatgctggaactgggccttagcgaagctcaggttatgatggctctttccaatcatttaaatgctgtagaatccgagaagcaaaagctgcgcgctcaggtgcgtcggctgtgtcaagaaaaccaatggttacgagatgagctcgccaacactcaacagaagttgcaaaagtctgagcaatctgtcgcacagctggaggaggaaaagaaacatctggagtttatgaatcaactcaagaagtatgatgatgacattagcccatcagaggataaggacacagactccacaaaggaaccactcgacgacttgttcccaaatgacgaagatgatccaggtcaagggattcaacagcagcacagctccgctgcggcagccgcccagcaagggggatacgaaatccccgctaggcttcgaacactccacaacctggtcattcaatacgccagccaaggcagatacgaagtagcagtgcctctttgtaagcaggctttggaagatttggagaaaacgagcggacacgatcaccctgacgtcgcgaccatgctaaacatactagccctggtgtaccgcgatcagaataagtacaaagacgccgccaatctgcttaacgacgcactggcaatccgagagaagactctagggaaagatcacccggcagtcgcagccactctgaacaatctggctgtgttatacggtaaaagaggaaaatacaaggaggctgaacctttgtgtaagcgcgctctcgagattagggaaaaggtgctcggcaaagatcaccccgacgtggccaagcaattaaataatcttgccctgctgtgtcagaaccagggaaaatatgaagaggtggaatattactatcagagagccctggagatataccagaccaagctcggcccagacgacccaaatgtcgctaagacaaaaaacaacctcgcctcatgttatctcaagcagggcaaatttaaacaggccgagaccctgtataaggaaattctgaccagagcgcacgagcgggaattcggaagcgtggatgacgagaataagcctatttggatgcacgcagaagagagagaggagtgcaaaggcaagcagaaggacgggacatcctttggcgaatatggcgggtggtataaggcttgtaaggtcgactccccaacggtcactacaactctcaagaacctgggcgctctgtatagacgtcagggcaagttcgaggccgccgaaaccctggaagaggcggccatgcggagtaggaaacaaggtctagacaatgtacacaagcagcgcgtggctgaagtactcaacgatcctgaaaatatggaaaagaggcggagtcgggaaagccttaatgtcgacgttgtgaagtatgaatcagggcctgatgggggtgaggaggttagcatgtctgtggagtggaatggcatgagaaaaatgaagctcggcctggtgaattag

SEQ ID NO: 121726 - DNA, 396 bp, synthetic construct
  misc_feature 1..396: note = Description of Artificial Sequence: Synthetic coding sequence
  source 1..396: mol_type = other DNA
tgagaaaacaaacctatatggatgcacgccgaagagcgcgaagaatgtaagggaaaacagaaggatgggacaagcttcggcgagtacgggggatggtataaagcgtgtaaggttgattctccaacagtgactaccacattaaagaacctcggtgcactgtatcgacgacaggggaaatttgaggcagcagaaacactcgaggaagccgcaatgcggagccgcaagcaaggtttggacaacgtgcacaaacagcgggttgcagaggtgcttaatgatccagaaaacatggagaaaaggcgctcccgggaatcactgaacgtggacgtggttaagtatgagtcaggccctgatggtggggaggagatgaggaagatgaagttgggactggtgaactag

SEQ ID NO: 121727 - DNA, 1893 bp, synthetic construct
  misc_feature 1..1893: note = Description of Artificial Sequence: Synthetic coding sequence
  source 1..1893: mol_type = other DNA
atgtatgataacatgtccactatggtgtatatcaaggaagacaaactcgaaaaactgacgcaggacgaaattattagtaagacaaagcaggtgatccaaggtctcgaggctttgaaaaatgaacacaattccattctgcagagcctgctggaaactctcaagtgtctgaagaaggatgatgaatccaacctcgtcgaagaaaagagtaatatgatcaggaaaagccttgaaatgctcgagctgggactctctgaagcacaggttatgatggcattaagcaaccatcttaatgccgtcgaatcggaaaaacagaaacttagggcgcaggttcggcgactatgccaagagaaccaatggctcagagacgagctggcgaacacacaacagaaactgcagaaaagcgagcagtccgtggcccaattggaggaagaaaagaagcacttagagtttatgaatcaactcaaaaagtatgacgacgatatttcaccgagcgaagacaaggacactgattctacaaaggaaccactagacgacctctttccaaacgacgaagatgaccctgggcagggcattcagcaacagcacagctcagcggccgccgcagcccagcagggggggtacgagatacccgcccgtctccgcacgttacataaccttgtaattcagtacgcctcacaaggtagatacgaggtggcagtccctctgtgcaaacaggctctggaagatttggagaagacaagtgggcatgatcacccagatgtcgccaccatgttgaacatcttggcgctggtttatcgcgatcagaataagtataaggatgcagccaatttgttaaatgacgccctcgcaattcgtgagaagaccctgggaaaggaccacccagcagttgctgctaccctgaataacctggcagtgttgtatggcaagcgcggaaaatacaaagaagcggaaccgctctgtaagcgggcgttagaaatcagagagaaggttctggggaaggaccacccagatgtagcgaaacagttaaataatttggcacttctctgtcagaatcaagggaagtacgaggaagtggagtattactatcaacgcgccctcgagatttatcaaaccaagcttgggccagacgacccgaacgtcgcaaaaaccaagaataaccttgcgagttgctaccttaagcaaggcaagttcaagcaggccgagactctttacaaagagatactcaccagggctcacgagcgcgaattcggatctgtagacgatgaaaataagcctatctggatgcacgctgaggaaagggaagaatgcaagggcaaacagaaggacggaacctcattcggagaatacggagggtggtacaaggcctgcaaagttgattcccccaccgtcacgacgacactgaagaatcttggcgctctgtacaggaggcaggggaaatttgaggctgctgaaactctggaagaggctgcgatgagaagcaggaaacaggggctagacaatgtgcataaacagagggtggctgaagttcttaatgatccagagaatatggagaagcgaagatctagggagagtctgaatgtggacgtcgtcaagtatgaatctggccctgacggaggagaggaggacggaactgggtcgctgaagcgctctgggagtttttctaaacttcgggcatctatcagacgcagttctgaaaagctcgtgcgtaaattgaaaggaggaagcagtcgggagtcagagccaaagaaccctggcatgaaacgcgcgagctccctgaacgtgttgaatgtggggggaaaagccgcagaagacagattccagggggtttccggaagagcttccttttgcggaaaacgccagcaacagcaatggcctggcagacgccacagatag

SEQ ID NO: 121728 - DNA, 453 bp, synthetic construct
  misc_feature 1..453: note = Description of Artificial Sequence: Synthetic coding sequence
  source 1..453: mol_type = other DNA
atgtacgacaatatgtcaaccatggtttacataaaggaagacaaacttgagaaactgacccaggacgaaattatttcaaagactaagcaggtaattcagggtctggaggcacttaagaatgagcacaactctatcttgcagtccctgctggagactttgaagtgtttaaagaaggacgatgagagcaatctggtggaggaaaagtctaatatgatccggaagagtctcgaaatgctagaactcggactgagcgaggcccaggtgatgatggccctgtccaaccatctcaacgccgtcgaatccgagaagcagaaactacgtgcgcaggtgcggcggctctgccaggaaaatcagtggcttcgcgacgagcttgccaatacacaacaaaaactgcaaaaatccgaacagtcagtcgctcagcttgaagaggaaaaaaaacatctagaattctag

SEQ ID NO: 121729 - DNA, 1695 bp, synthetic construct
  misc_feature 1..1695: note = Description of Artificial Sequence: Synthetic coding sequence
  source 1..1695: mol_type = other DNA
atgtatgataacatgtcaaccatggtgtacatcaaggaggacaagctagaaaaacttactcaggatgagatcatatccaaaaccaagcaagtcatccagggcctggaggcactcaagaatgaacataattctattctgcagtccctgctggagaccttgaaatgtctgaagaaagacgacgagtccaacctcgtggaagagaaaagtaatatgatccgaaaatcacttgagatgctcgagctggggttaagcgaagctcaggtgatgatggcattgagtaaccaccttaacgcggtggagtcggagaagcaaaagctgagggctcaagttcggcggctctgccaggagaaccagtggctgagggacgagctggctaacacccaacagaagctgcagaaatccgagcaatccgttgcccagcttgaagaagagaagaagcatctggagtttatgaatcaactgaaaaagtatgacgatgatataagcccctccgaggacaaagacaccgacagcactaaggaaccgttagacgacctgtttcctaacgatgaggatgatccagggcagggcattcagcagcaacattcatctgctgcagccgcagctcagcagggcggttacgaaatcccggcccggctgcgaactttgcacaatctggtaatccagtacgcctcccagggtcgctacgaagtcgccgtgcccctttgtaagcaggcgctcgaggacttggaaaagacttctggccacgatcatcctgacgttgcaaccatgcttaacatcctcgccttggtttaccgcgatcagaataaatataaggatgccgctaatcttctgaacgatgctctggccattcgcgagaagactctcggcaaggatcatccagcagtcgccgcgacattgaataacctggccgtcctgtacgggaagagaggaaagtacaaagaggcagagcccctgtgtaagcgtgcccttgagatcagggagaaggtgctcggaaaagatcaccctgatgtcgcgaagcagttgaacaatctcgcactgctttgccaaaaccagggcaagtatgaggaggtggaatactattatcagcgtgctctggaaatataccaaactaagctgggacctgacgacccaaacgttgcaaagaccaaaaataatctcgcctcatgctacctcaagcaagggaagtttaaacaagccgagactttgtataaggagatcctgacacgcgcccacgaacgcgagtttggatcagtcgatgatgagaataagccaatctggatgcatgctgaagaaagagaggagtgcaagggaaaacagaaagatggtacctcattcggcgagtatggcggttggtacaaggcgtgcaaggttgactctcccacagtcaccacaacactcaagaatctgggtgctctctacaggagacagggaaagtttgaggctgcagagacacttgaggaggcagccatgcgatcacggaagcagggcctcgacaatgtgcacaagcagcgtgtggcagaagtgctcaatgaccccgaaaacatggagaagcggcggtcacgtgagagcctcaacgtagacgtggtgaaatacgagtctggtcctgacggtggggaagaaggagtcagcggacgagctagcttctgtggtaagaggcagcagcagcagtggccagggcgtcgccacagatag

SEQ ID NO: 121730 - DNA, 1869 bp, synthetic construct
  misc_feature 1..1869: note = Description of Artificial Sequence: Synthetic coding sequence
  source 1..1869: mol_type = other DNA
atggcaatgatggtgttccctcgcgaagagaaactaagtcaggatgaaatcgtgctaggcacaaaagctgtgattcaaggtctcgaaaccctcagaggcgagcacagggccctgctggctcccctggtagcaccagaggcaggggaggccgaacccggtagtcaggaacggtgcatcctactcagacgttccttggaagcaattgaacttggactcggggaggcccaagtcatcctggccctttcatcccacctcggggctgtcgagtccgaaaaacagaagctgcgcgcccaggtgcggaggctcgtgcaggagaaccagtggctccgggaagagcttgccggcacacagcagaaactgcagagatctgagcaggctgtcgcgcagctggaagaagagaagcagcacctcctgttcatgtcacaaatacggaagctagacgaagatgccagtccgaatgaggaaaaaggtgacgtcccaaaagacactctggatgacctgtttcccaatgaagatgaacagtctcccgcgcctagcccgggcgggggagatgtttcaggtcagcacggcggctacgagattcccgccagactgcgaactttacacaacctggtcatccagtacgcgtctcaagggagatacgaagttgcagtacccttgtgtaagcaggcgcttgaagatctcgaaaagacctccgggcatgatcaccctgatgtggccaccatgctgaatatcttggctctggtgtatagagatcagaataaatacaaggaggctgcccatctgcttaatgacgcactcgccatacgcgagaagacactcggaaaggatcaccccgcagtagcagcgacgttgaacaatctggccgtcctttatggtaaaaggggcaagtataaagaagccgagcctctctgtaagcgtgccctcgaaattagagagaaagtgctcggtaagttccacccagatgtggccaagcagctgtctaacctggcactactgtgccagaatcaaggcaaggccgaggaagtcgagtactactatcgcagagccctggagatatacgctacgcgcctgggccctgatgatcccaatgtggccaagaccaagaataacctcgctagttgctatctgaagcaaggcaaataccaggatgctgaaactttatataaggagatcctgacacgcgcccatgagaaggaattcggaagcgtgaacggcgacaataagcctatatggatgcacgctgaggaaagagaagaaagtaaagacaaaaggcgggactccgccccatacggcgaatatgggtcatggtacaaggcttgtaaggtggactcaccaacggtaaacactacactccgttctctcggggctctatatagaagacagggcaaattggaagccgcacacacattagaggattgcgcttctcgtaatcggaaacagggcctcgatccagcatcgcagaccaaagttgtggaactgctcaaggatggcagcgggcgtcgaggtgacagaaggtcgagccgagacatggctggcggagccggacccaggagcgaatctgacctggaagatgttggccccactgccgagtggaatggagacggcagtggcagtcttaggcgtagtgggtccttcggcaagcttcgagatgccctgagaagatcatctgaaatgctggtgaagaagttgcaaggcggcacaccccaagagccccctaaccctaggatgaaacgcgcctcaagcctgaatttcttgaacaaaagcgtggaggaacccactcagccaggcggtactggcctgagtgatagtcgtaccctgtcaagcagcagcatggatctgagccgccgctcctcattggtcggctag

SEQ ID NO: 121731 - DNA, 1638 bp, synthetic construct
  misc_feature 1..1638: note = Description of Artificial Sequence: Synthetic coding sequence
  source 1..1638: mol_type = other DNA
atggccatgatggtttttccccgcgaggagaagttaagccaggacgagattgtgctgggtaccaaagcagtgattcagggcctcgagaccctgagaggagagcaccgggccctgctggcacccctggtggcaccagaggccggtgaggcagagcccggtagtcaggaaaggtgtatcctccttagaaggtccttagaagcgatagagttgggattgggtgaggcccaggaagagaagggagatgttcctaaggataccctcgatgacctgttccccaacgaggatgagcaatcccccgcaccttctccggggggcggagacgttagcggccagcacggcgggtatgagattcccgccaggctccgaaccttgcacaacttggttatccaatatgcgtcccaggggcgctacgaggtggccgtgcctctttgcaaacaggccttggaagatttggagaaaacgtccgggcacgaccatccagatgtggccaccatgctgaacattctggctctggtgtatcgcgatcagaacaaatataaagaggccgcccatctgcttaacgacgcccttgctattagggagaaaacgcttggcaaggatcacccggctgtcgcggctacactgaataacctcgcagtgttgtatgggaagcgcgggaagtacaaggaggctgagccactgtgcaaaagggccctggaaattagagagaaggttctgggaaagtttcacccagatgtggcaaagcagctctccaacctagctctactgtgtcagaaccaagggaaagccgaggaggtggaatattattaccgaagagcgctggagatttacgccacccggctgggtcctgacgaccccaacgtcgccaaaacgaaaaacaacttggcaagctgttatctgaaacagggcaaataccaggatgcggaaacgctgtacaaggaaattctgaccagggcccacgagaaagaattcggttccgttaacggggataacaagcctatctggatgcatgccgaggaaagagaagaaagcaaggataaaagacgggacagcgcaccatacggagaatatggctcttggtataaagcctgcaaggtggattctccaacagtcaatacgactttgagatcattgggcgcactctaccggcgtcagggtaagttggaagccgcccacactcttgaagattgcgcctccagaaaccggaaacagggcctggaccccgccagccagaccaaagtcgtcgagctgctgaaagacggctctgggcgacggggagacaggcggtcaagccgtgatatggcaggaggcgcaggccctcgatctgaaagcgatttggaggatgtcgggcccactgcggaatggaacggagatggaagcggatcacttcggaggtctggatccttcgggaagctgcgggatgcccttagacggtccagcgaaatgctggtgaagaagttacaagggggcactccacaggagcctcctaatccaagaatgaaacgagccagcagccttaacttcctgaacaagtctgttgaagagcccacacagcctggcggcacaggactgagtgatagccgcaccctttcatcttcttctatggatctctccaggcggtcctccctagtgggatag

SEQ ID NO: 121732 - DNA, 1869 bp, synthetic construct
  misc_feature 1..1869: note = Description of Artificial Sequence: Synthetic coding sequence
  source 1..1869: mol_type = other DNA
atggctatgatggtctttcctcgggaagaaaagctatcccaggatgagattgtcctggggacaaaggccgtgatacaggggctcgaaaccttgagaggcgaacaccgcgcacttttagctcctctggtggcccccgaagccggagaggctgaaccagggagccaagagcgctgcatactcctcaggcgatcgttggaggctatcgaactcggcttgggggaagcacaggttatcttggcattaagcagccatctgggtgcggtcgaatcagaaaagcaaaaactccgagcacaagtgcgcaggctagtacaagaaaaccaatggctgagagaggaactggctggcacccagcaaaaactgcagagatcagagcaagcagtagcacagctcgaggaggagaagcagcatctgctgttcatgagtcaaatcaggaaattggatgaagacgccagccctaacgaagaaaaaggcgacgtgccgaaggacactcttgacgacctgttcccgaacgaagacgagcagtcacctgctccctcaccaggaggaggggacgtcagtggccagcacggggggtatgaaatacccgcacgacttaggacccttcacaacctggtgattcagtacgcgagtcaagggcggtacgaggttgctgtgcctctgtgtaaacaagcccttgaggacctggaaaagaccagtggacacgatcacccagatgtcgccaccatgctcaacatactggctcttgtctatagggaccagaacaagtacaaagaggcagcccaccttctgaacgatgccctggctatccgagagaagacgctggggaaggaccaccccgcggtcgcagccaccctgaataatttggcagtattgtacggtaagcggggaaagtataaagaagcagaacccctctgcaagagggccttggagattcgcgaaaaggttctgggcaaatttcacccagacgtagccaaacagcttagcaacctcgccctgctttgtcaaaatcagggcaaggccgaagaggtcgagtattactaccgccgagcgttggaaatctacgcgaccagactggggcccgacgatcccaacgtagccaaaaccaaaaacaaccttgcctcctgctatcttaagcaggggaaataccaggatgcagagaccttatataaggaaatacttaccagagcccatgagaaggagttcgggtccgtaaacggtgataataagcctatttggatgcacgcagaagagcgagaagaaagcaaagataaaaggcgtgattcagccccctacggggagtacgggagttggtataaagcgtgcaaggtagacagcccaacagtcaacacaacgctgagatcactgggggcactctacaggaggcaaggaaaactggaggccgctcacaccctcgaagattgcgcgtctcggaatcggaagcagggattggatccggccagtcagacgaaggtggttgaacttctgaaggatggaagtgggcgaagaggagatagacgctcctcccgggatatggctggcggggctgggcctcgctccgagagcgatctggaggatgttggacctaccgctgagtggaatggagatggtagcggatccttacggcggtccggctccttcggtaaattaagagatgccctgcgcagaagctccgagatgctggtaaagaaactccaggggggcaccccccaggagcctcctaatccacgaatgaagcgggcttccagcttgaacttcttgaacaagtcagtggaggagccaacacaacctggtggtacaggtctttccgacagtcgtacattgtctagctcctccatggatttatctagacgcagttctctggtgggttag

SEQ ID NO: 121733 - DNA, 1869 bp, synthetic construct
  misc_feature 1..1869: note = Description of Artificial Sequence: Synthetic coding sequence
  source 1..1869: mol_type = other DNA
atggccatgatggttttcccccgcgaggagaaattaagtcaggatgaaattgtgttaggcacaaaagccgtcatccagggactagagaccctcagaggggagcatcgagcactgcttgcacctcttgtggcccctgaagccggtgaagcggagcccggttcacaagagaggtgtattcttctaaggcgctccttggaagccatcgagctgggcctgggtgaagcccaagtgattctggccctgtcgtcacacctaggcgccgtggagtccgagaaacagaaactacgggcacaggtcagacggctggtgcaggaaaatcagtggctgagggaggagctggcagggacccaacaaaaactgcaaagaagcgagcaggctgtggcgcagcttgaagaagaaaagcagcacttattgttcatgtcgcagatccgcaaattagacgaagatgccagcccaaatgaggaaaagggtgatgtgccaaaggacaccctggatgatctgttccccaacgaggacgagcaatcccctgccccaagtcccggcggaggcgatgtgagtggtcagcatggagggtacgagatcccagcccgactccggacactgcacaacctcgtgatacaatatgcctcccaagggagatatgaagttgccgttcctctgtgcaagcaggcgctggaggacctggagaaaaccagcgggcacgatcacccagatgtggcaactatgctgaacatactggccctcgtgtaccgggatcagaacaagtacaaggaggcagcccaccttctgaatgatgcacttgctatcagagagaaaacactcggaaaggaccatccagcagtggctgctacactgaataatttggccgtattatacgggaaacgtggcaagtataaggaggccgaacccctgtgcaaaagagcgctggagatcagagaaaaggtactcggcaagtttcacccagacgtggcgaaacaactgtcgaatttggctctcctttgtcagaatcagggaaaggctgaagaggtcgagtactactacagacgagccctggaaatttacgctaccaggctcggcccagacgatccaaacgtggccaaaacaaagaacaacttagcatcctgctaccttaaacagggaaagtaccaagacgcagaaacgttatataaggaaattttgactagggcccatgagaaagagttcggctctgtgaatggggacaacaagcctatctggatgcatgcggaggaaagggaggaatcaaaagacaaaaggagagactccgcaccatacggcgagtacggtagctggtacaaagcctgtaaagtagattccccaaccgtgaacacaacactacggtcccttggtgctctgtatcgtaggcaggggaaactggaggcagctcatacgctcgaggactgtgcgtcacgcaaccgaaagcaggggctcgaccccgctagccagacgaaggtagtggaactgctaaaggacgggagcggcaggcggggtgataggcgttcatctagagacatggccggtggcgcaggccccaggtctgaaagcgatctcgaagacgtgggccccaccgcagagtggaatggcgatgggtctggttccctccgcagatccggctcattcggaaagctaagagacgctctcaggagaagctcagagatgctggtgaagaagctccagggcggcaccccccaggaacccccaaatcctcggatgaagcgcgcttctagtttaaatttcctgaacaagtcggtggaggaacccacccagcccgggggcacagggttatctgatagcagaaccctttccagttcatcaatggatctcagtcgccgcagttccctggtggggtag

SEQ ID NO: 121734 - DNA, 1638 bp, synthetic construct
  misc_feature 1..1638: note = Description of Artificial Sequence: Synthetic coding sequence
  source 1..1638: mol_type = other DNA
atggcgatgatggtgttccccagagaggaaaaactgtcacaagacgagattgttctggggactaaggcggttatccaaggccttgagacgctgcgcggggagcaccgagcactgcttgcaccactggtggccccagaggccggagaggctgaaccaggctctcaagaacgatgtattctgctgcgccgctcactggaagccatcgagctgggcttaggagaggcccaggaggaaaaaggggatgttcccaaagacacgcttgacgaccttttccctaacgaggacgaacaaagtcctgcaccgagcccgggaggtggcgacgtctctggccagcatggcggctatgaaatcccagctcgcctgcggacgttacacaatctggtgatccagtacgctagtcagggcagatacgaggtggcggttccactgtgcaagcaggctctcgaggacctggaaaagactagtggtcacgaccatccggatgtggcgacaatgttgaacatcttggctcttgtgtacagggaccaaaacaagtacaaagaagccgctcatttgctcaacgatgccttggcgattagagaaaagactctggggaaggaccatccagccgttgctgccactctgaacaacctcgcagtactctacgggaagagggggaagtataaggaggctgaacccctgtgcaaaagggctctagagattcgtgagaaggtcctcgggaagtttcaccccgacgtggcaaaacagctgtctaatctggctctgctgtgtcaaaatcagggcaaggccgaggaagtcgagtactactaccgacgcgcattggaaatttatgctactaggctgggcccagacgaccccaacgtggcaaagacaaagaataatctggctagttgctaccttaagcagggaaaatatcaggatgctgagaccttgtacaaggaaatcctgacacgtgcgcacgagaaagagtttggttcagttaacggcgataataaacctatctggatgcacgctgaagagagggaagagtctaaggacaaacgtagagactctgccccctacggcgaatatgggtcctggtataaagcctgcaaggtggactcacctacggtaaataccacgctgcgatctctgggagccttataccgcagacagggaaagttggaagccgcacacactcttgaggactgtgcctcgagaaacagaaaacagggcctggatcctgcatctcagaccaaagtcgtggaactgctgaaagacgggtcaggtcgaaggggtgatagacgctcttcccgggacatggccggcggtgcaggccctcgtagcgagtcagacctggaggacgtgggtcccaccgctgaatggaacggggacggttccggcagtctgcggcggtccggatcctttggaaagctgagggatgccttaagacgatccagcgaaatgctcgtgaaaaagctgcagggaggcacacctcaggagcctccaaacccacgtatgaaacgggctagttcactcaatttcctcaacaaaagcgttgaggaacctacgcagcccggcggcactggcctcagcgactctaggacgctaagctctagcagtatggacctgtcacgccggagctctctggttggttag

SEQ ID NO: 121735 - DNA, 501 bp, synthetic construct
  misc_feature 1..501: note = Description of Artificial Sequence: Synthetic coding sequence
  source 1..501: mol_type = other DNA
atggcgatgatggtctttcctcgggaggaaaaactgtcccaggatgagattgtcctgggcactaaagcagtcatacaaggactagaaaccctcagaggggagcaccgcgcactgctggcccctctggttgcccccgaggcaggtgaggccgagcccggaagtcaggagcggtgcatcttattgcgaagaagcttagaagctatcgaactgggtctcggcgaggctcaggtgatcttggccctgtctagccacctgggagcagtggagtcagaaaagcagaaattacgagcgcaggttcgaaggttggtccaggaaaatcaatggctgcgagaggaactcgctggcacccagcaaaaactgcaacgctctgagcaggctgtggctcaacttgaggaggagaaacaacacctcttgtttatgtctcagatacgtaagctggatgaagatgcttcacctaatgaggagaagggggatgttcccaaagacactctggatgactag

SEQ ID NO: 121736 - DNA, 570 bp, synthetic construct
  misc_feature 1..570: note = Description of Artificial Sequence: Synthetic coding sequence
  source 1..570: mol_type = other DNA
atggccatgatggtcttccccagagaggagaagttatcacaggacgagatcgtgctcggaaccaaagccgtgatacagggactcgagaccctccgcggagaacatagggccctgctcgcccctcttgtggctcccgaggcaggtgaagccgaacctggtagccaagagcgctgcatcttgctcaggcgctctctagaagccattgaactgggattaggagaggcccaggaagaaaagggcgacgtgccaaaggacacgctggacgacctgttcccaaatgaggacgagcagtcccccgcacctagtccaggcggaggcgacgtatcaggccagcacggtggctatgagatacctgcaagattacggaccctccacaatctcgttattcagtacgcttcacagggacgctatgaggtcgctgtccctctgtgtaaacaggccctcgaagatttggaaaagacgtctggtcatgaccaccccgacgtagccactatgctgaacattctggcgctggtttaccgtgaccaaaacaagtataaagaagctgcacatctgctgaacgacgcatag

SEQ ID NO: 121737 - DNA, 516 bp, synthetic construct
  misc_feature 1..516: note = Description of Artificial Sequence: Synthetic coding sequence
  source 1..516: mol_type = other DNA
atggcgatgatggtatttccccgggaagagaaactgtctcaggatgagatcgttctgggcacaaaggcagtcattcagggattagaaacacttcgcggtgaacacagggcccttctggcgccactggtggctccggaagccggtgaggcagaacctggctcacaggaacgatgtattctgttacgccggtccctggaagccatcgagcttgggttgggtgaggcccaagtgattctcgccctgtcaagccacctcggcgctgtggagtctgaaaagcagaagctgagagcacaagtgcgtagattggtgcaagagaatcaatggctgagagaggagctggccggaacccagcagaaactacaaagaagcgagcaggccgttgcccaattggaggaagagaaacagcacctcttatttatgtctcagatacgcaaactggacgaggacgcctctcctaacgaagagaaaggagatgtcccaaaggatacgctcgatgatctgttcccgaatgagtag

SEQ ID NO: 121738 - DNA, 438 bp, synthetic construct
  misc_feature 1..438: note = Description of Artificial Sequence: Synthetic coding sequence
  source 1..438: mol_type = other DNA
atggcgatgatggtgtttcccagggaagaaaagttgagtcaggatgagatagtgttgggaacaaaggcagtgatccaggggctggagactctgcgtggagagcaccgcgccctgctggcaccactggtagctccggaagcaggtgaggccgagccgggctcccaggagagatgcatcctgctacgccgctctctcgaagcgatcgagcttgggctaggcgaagctcaggtcatacttgctttaagctctcatctcggagctgtagagagcgaaaaacagaaattacgcgcacaagtcaggagactggtgcaggagaatcagtggttgagggaggaacttgccggtacacagcagaagttacaaagatcggagcaagccgtggcccagctggaagaggagaagcagcacttgctgtttatgagtcagattaggaagtag

SEQ ID NO: 121739 - DNA, 318 bp, synthetic construct
  misc_feature 1..318: note = Description of Artificial Sequence: Synthetic coding sequence
  source 1..318: mol_type = other DNA
atggccatgatggtgtttcctcgggaggaaaaattgtctcaggacgagatagtgctcggaactaaagctgtgattcagggcctcgaaaccctgaggggcgaacaccgcgcattgttagcgcctttggtggccccggaagccggcgaggccgaacccggaagtcaagagcgctgtatcttgctgcggaggagtctggaagccattgaactggggctgggcgaggcccaagtgatccttgctctatctagtcacttgggtgccgtcgaatctgaaaagcagaagcttcgtgcacaggtacgccgactggtgcaggaatag

SEQ ID NO: 121740 - DNA, 1515 bp, synthetic construct
  misc_feature 1..1515: note = Description of Artificial Sequence: Synthetic coding sequence
  source 1..1515: mol_type = other DNA
atgtctgttcaggtcgcagcaccgggatctgccggactaggacctgaacggctgtctcccgaggaactggtcagacagacacgccaggtggttcagggcttggaggctcttagagcagaacaccacggcttagcagggcatcttgccgaagcgctggctgggcagggccctgccgctggtctggaaatgcttgaggaaaaacagcaagtagtctcacactccctagaagccattgagcttggtctgggtgaggctcaggttttgctggctttatctgcacatgttggggcattggaggccgagaagcagcggttgaggagtcaggcccgcaggctcgctcaggagaatgtgtggctgagagaggagctggaggagacacaaaggcgcctgagagcgtcggaggagtccgtcgcccagctcgaggaagagaagcgccacctggagttcctggggcaattaaggcagtatgacccccccgctgagtcccagcagtcggagtctccccctaggagagattccttagcgagtttatttccgtccgaagaggaagagaggaaggggccggaggccgctggggccgccgcagctcaacaggggggttacgaaatacctgcaaggctaagaacccttcataacttggtgatccagtacgctggacaaggacgatatgaggttgccgtacccctgtgtcgccaggccctcgaggatctcgaaaggtcgtctggacactgtcacccagacgtggctacgatgttaaatattttggctctggtataccgcgaccagaacaaatataaagaggcgactgacttgctgcatgatgccctgcagatacgcgaacagacattgggtccagagcacccagccgtggcggccactttaaacaatcttgcagtgctctacgggaaaaggggaagataccgggaagctgaaccgctgtgccagcgcgctttggaaattagagagaaagtgcttggcgctgatcaccccgatgttgctaagcagctcaataacttagcccttttgtgtcaaaatcaggggaaattcgaagatgtcgagcggcactatgctcgcgccctatcgatttatgaagcacttggcggaccccacgaccccaacgtggcgaaaacaaaaaataacctcgcgagtgcgtatctgaagcagaacaagtatcagcaagcggaagagctctataaagagattctgcacaaggaggacttgccagcacctctcggagcacccaacaccggcactgcgggcgatgccgagcaggccctgcggcggagcagcagcctgtcgaaaatccgtgagagcatccggagaggtagcgagaagctggtgagccgtcttcggggcgaggctgccgcgggcgcagctggtatgaagagagcaatgagtctgaatactctgaatgtggacgcgccaagagctccaggtacacagttcccctcgtggcacctagataaggctcctcggactttgtcagcttcgacccaggatctgagtccccactag

SEQ ID NO: 121741 - DNA, 1557 bp, synthetic construct
  misc_feature 1..1557: note = Description of Artificial Sequence: Synthetic coding sequence
  source 1..1557: mol_type = other DNA
atgatcccacagacgcctcatcattgcagtcccggggcggccatgagcgttcaagtggcagccccaggcagcgctgggcttggcccagagcgactgtccccggaggagttggttcgccaaacacgtcaggtcgttcaaggactggaggcactaagagctgagcaccatgggttggctgggcacctcgcggaggcactggccggacagggcccagccgcggggctcgaaatgctggaggaaaagcagcaggtcgtgagtcactctttagaagctattgagttgggactgggtgaggctcaggtgctgcttgccctatcagctcacgtgggcgctctggaggccgagaagcagaggctgcgctcccaggcccgcagattagcacaagagaatgtgtggctacgagaagaacttgaagagacgcagcggcggttacgcgcctctgaagagtccgtggctcagctggaggaggagaaaaggcatctggagttccttggtcaactccggcagtatgacccaccagcagagagccagcagtccgagtcgccaccacggcgggactccctcgcctcactctttccgagcgaagaagaggagaggaagggacccgaggcagcaggcgccgcagctgctcagcagggagggtacgagataccagctagacttagaaccctccataacctggttattcagtacgccggccaggggaggtacgaggtggccgtcccgttgtgcagacaggcgctcgaagacctcgagagatcttctggacactgtcatccagatgtcgccaccatgcttaatattctggccctggtatatcgggatcagaataagtataaagaggcgactgacttgctccatgatgctcttcagatccgagagcagaccctaggtcctgaacaccctgcagtggctgctacccttaacaacttggctgtcctgtacgggaaacggggccgctaccgggaggcagagcctctgtgccaaagggccctggaaatccgagagaaggtcctgggcgcggatcacccagatgtcgccaagcagctcaacaacttagcactcctctgtcagaatcaaggcaagttcgaagatgtcgaacgccactatgccagagcccttagtatttacgaagcgcttggagggcctcacgacccaaacgtggctaagacgaaaaataacctagcctctgcatacttgaagcaaaacaagtatcaacaggccgaggaactgtataaggagatcttgcacaaagaggatttgcccgcccccttgggagcgccaaatacaggaacggccggtgatgccgagcaggcccttcgacgatcatcttcattatctaagattcgtgaatccattcggcgcggcagcgagaagctcgtcagtaggttacgtggagaagccgcagccggagcagcgggcatgaagcgcgccatgtctctgaataccctgaacgtggatgctccccgcgctccgggcacccagttcccctcctggcacctggacaaagcccccaggaccctctcagctagtacacaggacctttccccccactag

SEQ ID NO: 121742 - DNA, 2379 bp, synthetic construct
  misc_feature 1..2379: note = Description of Artificial Sequence: Synthetic coding sequence
  source 1..2379: mol_type = other DNA
atgcaaggagaggatgcccggtatcttaagaggaaagttaaggggggaaatatcgacgttcatccttccgaaaaagctctgatcgttcactatgaagttgaggctaccatcttgggtgaaatgggcgaccctatgttgggcgagcgcaaagaatgtcagaagatcatcagattaaagtccctgaatgcgaacaccgatatcactagtcttgcccgaaaggtcgtggaagaatgtaagctgattcacccttcgaagctgaatgaagtggagcagcttttgtactacttgcagaataggagagattccctgtcaggcaaggaaaagaaagagaagtccagcaagcctaaggaccccccgccttttgaaggcatggagatagacgaggtggctaacataaacgacatggacgaatacatagagttgttgtatgaagacattccagacaaggtgcgggggagcgccctaattctgcagctggctcgcaatccggacaatctcgaggaattgctgctcaacgaaacagccctcggcgccctcgcgcgggttctccgagaggactggaagcaaagcgtggaacttgcaacgaacatcatctacatcttcttctgtttcagctccttctcccagttccatgggctcattacccactacaaaatcggcgcgctctgcatgaatataatcgaccacgaactcaaaaggcacgagctctggcaggaggaattgagtaaaaaaaagaaggccgtcgacgaggatccagagaaccagactctgaggaaagactatgaaaaaacctttaaaaagtaccaggggctggtggtcaaacaggaacagcttctgagggtggccttgtaccttttgctcaatctggctgaggatacccgtactgaactgaaaatgcggaacaaaaatatcgttcacatgctggtcaaagctttagaccgcgacaacttcgagctgctgatcttggtcgtgagcttcctcaaaaagctctcaatttttatggagaataagaatgacatggtagagatggatattgtggaaaagcttgtgaagatgattccctgcgaacacgaggacctacttaatatcacactacgcctcctgttaaatctctctttcgacacagggctcagaaataagatggtccaggtgggactgcttcccaaactgacagcgcttctgggaaatgataactacaaacagatcgccatgtgtgtgttgtaccatatttcgatggatgatcgatttaaatctatgtttgcctataccgattgcatcccgcagctgatgaagatgttgtttgagtgtagcgatgaaaggatcgacctggagcttatttcattctgtattaacctagccgccaataagaggaatgtccagctcatatgcgaggggaatggcctgaagatgctgatgaagcgggccttgaagttcaaagatccactcctaatgaagatgatccggaacatctcccagcacgatgggccaaccaagaacctattcattgattacgtgggcgacctcgcggcccagatttcaaacgacgaggaggaagagttcgtcatcgaatgcctagggacactggccaacctgaccattcccgacctagactgggaactggtcctgaaggagtataaactcgtcccttacctcaaggataagctgaaacccggggcagcagaggatgacctggtgcttgaggtcgttatcatgatcggaaccgtgagcatggatgactcgtgcgcggccttgctagccaaaagtgggattattcctgcgctaatagagctcttgaacgcacagcaagaagatgatgagttcgtgtgccaaattatctacgtattctatcagatggtattccaccaggctactcgcgacgtcatcatcaaagaaacccaggcccctgcgtatctaatcgacctgatgcacgacaaaaacaatgaaattagaaaggtgtgtgacaacaccctggacatcatagctgaatatgacgaagaatgggccaagaagattcagtccgagaagttcagatggcacaacagccagtggctggagatggtcgagtctaggcaaatggatgagtcagagcaatatctgtatggggacgacagaatagagccctacatccacgaaggagacattcttgagcgtcccgacctgttctataactccgatggacttatcgctagtgagggtgccatctccccggacttttttaatgattatcatttgcagaacggagacgtcgtcggccagcattcattcccaggatctctaggcatggacggatttggccagcccgtgggcattcttggccggccagctacagcttatggatttagaccagacgaaccatattattatggatacggatcttag

SEQ ID NO: 121743 - DNA, 2259 bp, synthetic construct
  misc_feature 1..2259: note = Description of Artificial Sequence: Synthetic coding sequence
  source 1..2259: mol_type = other DNA
atgggcgatccaatgctcggggagagaaaagaatgccagaagataatccgcctcaagtcgctcaacgctaacaccgatatcacatccctcgcacggaaagtggtcgaggagtgcaagctcattcacccgagcaaactcaacgaggtggaacagctgttgtactatctccagaatcggcgagatagcctttcagggaaggagaaaaaagaaaagtcttccaaacctaaagacccaccaccattcgaggggatggagattgatgaagtagcaaatattaacgacatggacgagtatattgaacttttgtatgaggacatacctgacaaagtgcgcggtagtgctctgattctccagttggcaagaaatcccgataatctggaagaacttctgcttaatgagacggccttgggcgctcttgcccgcgttctgagagaagactggaagcaaagcgtcgagctggccacgaacattatctacatttttttctgtttctcctctttttcgcaattccacggacttatcacgcattacaagatcggagcactgtgcatgaacattatcgatcatgagcttaaacggcatgagctctggcaggaagagctgtctaaaaaaaaaaaagccgtcgatgaagatcccgaaaaccagactctacgaaaggactatgaaaaaacctttaaaaaataccaggggctcgtggtgaaacaggagcagctgttacgtgttgccttatacctcctgctaaacctggcagaggacactcgcactgagttaaagatgcgaaacaaaaatatcgttcacatgctagttaaggccttagaccgcgacaacttcgagctgctgatccttgtggtcagttttcttaaaaagcttagcatttttatggaaaataaaaatgatatggtggagatggacatcgtggagaagctcgtgaagatgattccttgcgagcacgaggacctgctgaatattacactcaggttactcctcaacctatcctttgatacgggtctgagaaataaaatggtgcaggtgggcctgctacctaagctgacagctctgctggggaatgataactataagcagatagccatgtgtgtgctatatcacatttccatggacgaccgctttaaaagtatgtttgcttatacagactgcattccccagctcatgaagatgttattcgaatgttcggacgagaggatagatttggaattaataagcttttgtatcaacctggccgctaataaaagaaatgtgcaactgatatgcgaggggaatggattgaagatgctcatgaaaagagcgctgaagtttaaggatcctttactaatgaagatgatccgcaatatttcgcagcacgatggaccaaccaagaacctcttcatcgattacgtcggagacctcgccgcacaaataagcaatgacgaggaagaggaattcgtcatcgaatgccttgggacgctcgccaatctcacaataccagaccttgactgggagctggtcctcaaagagtataaactggtcccatacctgaaagacaaactgaagcctggagcagccgaggatgatctggtgctagaggtggtgatcatgatcgggaccgtgtctatggatgactcttgtgcagcgctcctggccaagtctggaattatcccagctctaatcgagctcttaaacgcccaacaggaggatgacgaattcgtttgccagatcatctatgttttttatcaaatggtttttcaccaagccacacgggatgtgatcatcaaggaaacgcaagcgcccgcctacctcattgatctaatgcacgacaaaaataacgagattaggaaggtgtgcgataacacccttgacatcatcgctgaatatgatgaggagtgggccaaaaagattcaaagcgagaagtttagatggcacaactcccaatggctggagatggtggagtctcggcagatggatgagagcgagcagtatttgtatggggacgatcgcatagaaccgtatattcatgagggcgacatcctggaaagaccggatctgttctacaatagcgatggcctgatagccagcgaaggcgccatctccccggactttttcaatgactaccacttacagaacggtgatgttgtgggccaacactcgttcccaggaagtctggggatggatggcttcggccagcctgtgggcattctggggcgccctgccacagcctatggcttcagaccagatgaaccatattactatggttatggttcttag

SEQ ID NO: 121744 - DNA, 2247 bp, synthetic construct
  misc_feature 1..2247: note = Description of Artificial Sequence: Synthetic coding sequence
  source 1..2247: mol_type = other DNA
atgcagggagaggatgccagatatttgaagagtatcaggttaaaatccctgaatgctaacacggacatcacgtctctcgcgagaaaagtggtggaagaatgcaagttaattcaccccagcaaactgaatgaggtggagcaactgctttactacctgcagaacaggagggactctctcagcggcaaggagaaaaaagaaaaaagttcaaagccaaaagacccaccacctttcgaaggcatggaaattgacgaggtcgctaatattaacgatatggatgagtacattgaactgctgtacgaggacatcccagacaaggtcaggggcagcgccctcatattgcagctggccagaaacccagataatctggaggagttactgctgaatgagacggcactcggggctctggctcgggtcctgcgcgaggattggaagcagagcgtcgagctcgcgaccaacattatctatatatttttttgtttcagcagcttctcacagtttcacggactgataacccattacaagataggggccctatgtatgaacatcattgaccatgaattaaagcgccacgagctctggcaggaggagctcagcaaaaagaagaaagcagtggatgaggaccctgaaaatcaaactttgagaaaggactacgagaagaccttcaaaaagtatcagggactcgtcgtgaagcaagagcagctgttgagggttgccctctatctgctgctgaacctggctgaggacaccaggaccgagctgaaaatgcgaaacaaaaatatcgtgcatatgctggttaaggcactcgaccgagataacttcgagctacttatcctggttgtgtcattcctgaagaaactgtccatcttcatggaaaataaaaatgacatggtagagatggacatagttgaaaagcttgtgaagatgatcccctgtgagcacgaggacctcctgaatattacactgagactgctgctgaacctgtcctttgacacaggacttaggaataagatggtccaggttggactcctgcccaagctgactgcactgttgggaaacgacaactacaaacagatagccatgtgtgtcttgtaccatatctctatggacgacagatttaaaagtatgtttgcttacacagattgtatcccccagctaatgaaaatgctgttcgagtgttcagacgagcgcatcgaccttgagttgattagcttctgcattaaccttgctgccaacaagaggaatgtgcagctgatctgcgagggaaatggcctcaagatgctcatgaagagagcacttaagttcaaggacccacttctgatgaagatgatccggaacattagccaacacgatgggccaacaaagaatctattcatagattatgtcggcgacctggctgcacaaatctccaacgatgaggaggaagaattcgtcattgagtgtctgggcactctggccaacctgactatcccagatctggattgggagctggttctcaaagagtataaactcgttccctatttaaaagataaactaaaacctggcgccgcggaagatgaccttgtacttgaagtggtgataatgataggaactgtgagcatggacgattcctgcgccgccctgctggctaaatccgggataattccggcgctgattgaactcttgaatgcgcagcaggaagatgacgaattcgtctgtcagattatatacgttttctatcaaatggtgtttcatcaagccactagagacgtcattatcaaagaaacacaggctccagcctatctgatcgacctaatgcatgataaaaataacgagatcaggaaggtgtgcgataatacactggatattatcgccgagtatgacgaggagtgggccaaaaaaatccagtccgaaaagttccggtggcacaacagtcagtggctggagatggtggaatctagacagatggatgagtcagaacagtatctctatggagacgataggatcgaaccatatatccatgaaggtgacatcctcgagcgtcctgacttattttataattcagatgggttaattgcaagtgagggcgctatatccccagacttctttaatgattaccaccttcagaacggagatgtggttggccaacacagcttccctgggtctctcgggatggatgggttcggccagcccgtgggaatcctaggacgaccggcaacggcctacggttttcgtcctgacgagccgtactattacgggtacggatcttag

SEQ ID NO: 121745 - DNA, 2145 bp, synthetic construct
  misc_feature 1..2145: note = Description of Artificial Sequence: Synthetic coding sequence
  source 1..2145: mol_type = other DNA
atgtctattgccctaggcaatacataccgaagaagtctcagtgatagtgaaactgtctctgttctgcaggcgtccctgtgcgaagagaagaaggagaagagtagcaaaccaaaagaccctccgccctttgaagggatggagatagacgaagtggccaatatcaacgacatggacgagtacatagagctgctatatgaggacattcctgacaaagtgcggggtagcgcacttattctgcagctggcccgtaaccctgataacctggaagagctgctgctgaacgagacggctctaggggctctggcgagggtcctgcgtgaggattggaagcaatctgttgagttggcaacaaatatcatctacatatttttctgtttctcctcatttagccagtttcacggactgattacccactataagatcggcgcactatgcatgaacatcatagaccacgagctcaagcgacacgagctgtggcaggaagaactgtcaaagaagaagaaggctgtggatgaggacccggaaaaccagacccttcgaaaagactacgagaaaacgtttaagaagtaccagggcctggtggtcaagcaggagcagctattgagggtagccctctacctgcttctcaacctggcggaggacacccggaccgagttaaaaatgcgcaacaagaatattgtccatatgttggttaaggcactagacagggataacttcgagctgttgattcttgtcgtgtcttttctgaagaagctcagcatttttatggaaaacaagaacgatatggttgaaatggacattgtggaaaagctcgtgaagatgataccatgtgaacacgaagatttgctgaacatcactttgcgcttactgctgaacctcagtttcgatacagggttaaggaacaaaatggtgcaggtgggcctgcttccaaaactaacggcactacttggtaacgacaactataagcagatagcgatgtgtgtgttataccacatttcaatggatgacagattcaaatccatgttcgcctatactgactgtatcccacagctgatgaaaatgctgtttgagtgctctgatgagcgtatcgacctcgaattaatctccttttgtatcaatcttgccgccaacaaaaggaatgtacaattaatttgtgagggtaacggcttgaagatgctgatgaaaagggcgctcaagttcaaggatcctctgctgatgaagatgattcggaatatctcacagcacgacggacctaccaaaaacctgtttattgactatgtcggcgacctcgcagcccaaatctcaaatgacgaggaggaggagtttgtgattgaatgccttggaacgttagccaatctcacaatcccagatctggattgggagctggtcctcaaagagtataaacttgtcccttatttgaaagataaactcaagccaggtgccgccgaggacgacctcgttttagaggtagttatcatgatcggaacggtcagcatggatgactcttgtgctgcattgctggcaaagtcagggattatcccggccctgatcgagcttttaaatgcacaacaggaggacgatgaatttgtgtgccagataatttatgtgttttaccaaatggtgtttcaccaagccacccgagatgtgatcattaaggaaacacaagcgccagcctatctcatcgatctgatgcatgataagaataacgagatacggaaagtttgtgataataccttggacatcatagcagaatatgacgaggagtgggcgaaaaaaatacagtccgaaaaattcagatggcacaattctcagtggctggaaatggtggagtcgcgacagatggacgaatctgaacagtacctctatggcgacgacaggattgaaccatatattcacgaaggtgatatcttggagaggcccgacttgttttacaactctgatggtctgattgcctccgaaggggccatcagccccgactttttcaatgattaccacctacaaaatggggatgtggttggccagcactctttccctgggtcactaggcatggatggcttcggtcagcctgtcggaattctaggcagacccgctactgcttacggattccgccccgatgagccttactattatggttatgggtcctag

SEQ ID NO: 121746 - DNA, 1485 bp, synthetic construct
  misc_feature 1..1485: note = Description of Artificial Sequence: Synthetic coding sequence
  source 1..1485: mol_type = other DNA
atgaggaataaaaacattgtgcacatgctcgtcaaagccttggatcgcgataattttgagcttttaatattagtggtgtcgtttcttaaaaagctttccatttttatggaaaataaaaatgatatggttgagatggacattgtggaaaagctggtgaagatgatcccgtgtgagcacgaggatttactgaatatcacactgcgtcttctgctgaacctgtcattcgacaccggcctgagaaacaagatggttcaggttggactgctgcccaaattaacagcactattggggaatgacaattacaaacagattgcaatgtgtgtgctgtaccatatatctatggacgaccgattcaaatcgatgtttgcgtataccgattgcattcctcagctcatgaaaatgctgttcgaatgctctgatgagcggatcgatctggagctcataagcttctgtataaatctcgccgcaaataaaagaaatgtgcagctgatctgtgagggaaacggtttgaagatgctaatgaagagggcgctgaaattcaaagatcccctactgatgaaaatgatccggaatatcagccagcacgacggtcccactaaaaacctttttattgattacgtaggggatctggcagcacagatctctaatgacgaggaggaagagttcgtgatcgaatgcctgggtacattggccaacctaactatccctgatctcgactgggagctcgttctcaaggagtataagcttgtgccctacctcaaggacaaactgaagcctggagcagctgaggatgacttggttctggaggttgtgatcatgattgggaccgtgtccatggacgactcatgtgcagccctgctcgccaaatccggcattatacctgctcttatcgagttactgaacgcccagcaggaagatgacgaatttgtgtgtcagataatttacgtgttctaccagatggtctttcatcaggccacaagagatgtgattattaaagaaactcaggcccctgcctacctgatcgacctgatgcatgataagaataatgaaattcgaaaagtctgtgataacacactcgatataattgcagaatacgatgaagagtgggccaaaaagattcagtccgagaaatttcgctggcataattctcaatggttggaaatggtagaatcaagacaaatggacgagtctgagcagtacttatatggggacgaccgtatcgaaccgtacatccatgaaggtgatattttagagcggccagatttgttctataactccgacggcctgatcgcctcagagggggcgatctcaccagattttttcaacgactaccacctgcagaatggggatgtggtaggtcagcatagctttcccggaagcttagggatggacggcttcggccaaccagtaggcatcctgggccgaccagcaacggcctatggatttaggccagacgagccctattactacggctacgggagctag

SEQ ID NO: 121747 - DNA, 1935 bp, synthetic construct
  misc_feature 1..1935: note = Description of Artificial Sequence: Synthetic coding sequence
  source 1..1935: mol_type = other DNA
atgaagttaataactatcctgttcctgtgttcaaggctcctgctgtctttaacacaggagtctcagtcagaggaaatcgactgtaacgataaggacttgttcaaagctgttgacgcagcgctcaagaagtacaactcacaaaatcagtcaaataaccagtttgtgctgtaccggattaccgaggccactaaaactgtaggatccgacacattttactccttcaaatatgagataaaggaaggcgactgtcctgtgcaatcaggaaaaacttggcaggattgtgaatacaaggatgccgcaaaggccgctaccggcgagtgcacagccactgtcggaaaacgatcctcaaccaaattctcagttgctacacagacatgccagatcacccctgccgagggccctgttgttaccgcacagtatgattgcttgggatgcgtgcaccccatcagtactcagtccccagacctggagcccattctccgtcatggaatccaatattttaacaataacacccagcacagctctctttttatgttgaacgaagtcaagcgtgctcagcgtcaggttgttgcaggcctgaacttcaggattacgtattctatagttcagaccaattgtagtaaggagaatttcctctttctcaccccagactgcaagtccctgtggaatggggacactggcgaatgcactgacaacgcctacattgatattcagctcaggatcgcaagcttctctcagaattgtgacatttaccccggaaaagatttcgtccagccacccacaaaaatctgcgtgggttgtccgcgggacatacccaccaacagtccagaactcgaggaaacgctgacccacaccattacgaagctaaacgctgaaaacaatgctaccttttattttaagatagacaacgtaaaaaaggcccgggtccaggtggtggctggtaagaaatatttcattgacttcgtggcccgcgagactacctgttcaaaggaatcaaacgaagagcttaccgaaagctgcgaaacaaaaaagctcggtcagagcctggattgcaatgctgaagtgtacgtagtcccctgggagaagaaaatctatccaaccgtcaactgccagccgctgggcatgatctcgttaatgaagaggcccccgggtttcagcccatttcggtcctctcgtatcggggagataaaagaagagacaactgtatccccaccccatacttccatggctccagcccaagatgaggagagagactctggtaaggaacagggtcataccaggcggcacgattggggtcacgagaagcagcggaaacacaacctagggcacggccacaaacacgaacgcgaccagggacatggacatcagagagggcacggtcttgggcacggtcacgaacagcaacacggcttgggccacggacacaaattcaagcttgatgatgatctggagcatcagggtggacatgttctcgaccatggccataagcacaagcatggtcatggacatggcaagcataaaaataaaggtaaaaaaaacggtaagcataacggatggaagaccgagcacttggcgtctagctccgaggattctactacaccatccgctcaaacccaggaaaagactgagggtcccacacctatcccttctctggcgaagcctggtgtcaccgtaacattcagtgattttcaggacagtgacctgattgcgacaatgatgcccccaatatcacccgccccaattcagtctgatgatgactggattccggacatacagattgacccgaacgggctctccttcaacccaattagcgactttcctgatacgacgtcccccaaatgccctggtcgtccatggaaatcagtcagcgagattaaccccactactcagatgaaagagagctactattttgatctcacagacggattgtcctag

SEQ ID NO: 121748 - DNA, 1284 bp, synthetic construct
  misc_feature 1..1284: note = Description of Artificial Sequence: Synthetic coding sequence
  source 1..1284: mol_type = other DNA
atgaaactgatcacaatactgtttttatgttctcgtttattgctgagtcttacccaggagtctcaatcggaagagatcgactgcaacgataaagatctgtttaaagcagtggatgctgccctgaaaaagtacaattctcagaatcagagcaacaatcagtttgtactgtatagaatcactgaggcaaccaaaactgtaggctccgatacgttttactcttttaaatatgagataaaagagggcgattgcccagtgcagagcggaaaaacttggcaagactgcgagtacaaagatgcagcaaaagcagcgacaggtgagtgcaccgctaccgtgggaaagcgtagtagtacaaagttcagcgtggcaacccagacatgccagatcactccagctgaaggccccgtggtgactgcccagtatgattgccttgggtgtgttcaccccatctcaacccagtccccagatctggaacctatactccgccacgggatccagtatttcaacaataatacacagcacagctctttgtttatgctgaacgaagttaagagggcacagcgacaggttgtagcggggctcaatttccggatcacatactctatcgtgcagacaaattgtagcaaagagaatttcctgtttctgaccccagactgcaagagtctgtggaacggtgataccggcgagtgtactgacaatgcctacatcgacatccaactgcgcatagcttccttcagccagaattgcgacatttatcctggcaaggacttcgtgcaacccccaaccaaaatctgcgtagggtgtcctcgggacatccccacaaattctccagagctggaggagactctgactcataccatcacaaaactgaacgccgaaaataatgctaccttctacttcaagattgataatgtgaaaaaggctagggttcaggtcgtggcaggcaagaaatacttcatcgactttgttgcgcgggaaacaacttgctccaaagagagcaatgaggagttgacagaatcctgtgaaacgaagaagctgggccagtccctggattgcaatgccgaggtgtatgtggttccatgggagaaaaagatctacccaaccgtcaactgccagcctctgggaatgatctctttaatgaaacgtccccccggcttctcccccttccgctcatctcgcataggtgagatcaaagaagagaccacttcacatctgcgtagctgtgagtataagggcagaccaccaaaagcaggcgctgagcccgcttccgagagagaggtctcatag

SEQ ID NO: 121749 - DNA, 1248 bp, synthetic construct
  misc_feature 1..1248: note = Description of Artificial Sequence: Synthetic coding sequence
  source 1..1248: mol_type = other DNA
atgaagttatccctgactcaggagtctcagtctgaagagatagactgcaacgacaaggatctatttaaagcagttgacgctgccctcaaaaagtataactcacagaaccaatccaacaatcagttcgtgctttaccgcataaccgaagccacgaagacagtgggcagcgataccttctattcttttaagtatgaaatcaaagagggagactgtcccgtccagtcaggcaaaacatggcaggattgtgaatacaaagacgctgcaaaagccgcaaccggcgaatgtaccgccactgtgggcaagcgctcatccactaaatttagtgtagctacacaaacatgtcagataacacccgccgaaggtcccgtggtcaccgctcagtacgactgccttggctgtgtgcacccaatctcaacccaatcacctgacctcgaacctatactccgacacggcatacagtattttaacaataatacacagcatagtagtctgtttatgctcaatgaagtaaaaagggcccagaggcaggtggtggctggcttaaacttccgtattacttactctatcgtacagaccaactgttccaaagagaattttctattcctcacgccggattgtaaatctttgtggaatggagacacaggagaatgtacagacaacgcgtacatcgatatccaattaagaatagcctcatttagtcaaaattgcgatatctacccggggaaggacttcgtgcagcctcccacaaagatctgcgtgggctgcccccgtgatataccaactaacagtccagagcttgaggagacactgacacacactatcaccaaactaaacgccgagaacaacgctactttctacttcaagatcgataatgtcaaaaaagcccgagtgcaagtggtcgctgggaaaaagtatttcattgactttgtggcccgggaaaccacatgttccaaggaaagcaacgaagaactcaccgagtcctgcgagaccaagaaacttggacagtcattagactgcaatgctgaggtgtacgttgtcccctgggagaagaagatttatcctactgtgaactgccagcccctcggcatgatatcactcatgaagcgacccccgggcttcagtcccttcaggagctcccggatcggagaaattaaggaggaaacaactagtcacctcagatcctgcgagtataaggggcgtccaccgaaagctggcgcagagcccgcgtccgaacgtgaagtatcctag

SEQ ID NO: 121750 - DNA, 1176 bp, synthetic construct
  misc_feature 1..1176: note = Description of Artificial Sequence: Synthetic coding sequence
  source 1..1176: mol_type = other DNA
atgaagctgattacaatattgtttctgtgctcacgcttactcctgtcactcactcaagaaagccagtctgaagaaattgactgtaacgataaggacctctttaaagccgtggatgcagctctgaagaagtataactcgcagaatcagtcaaataaccagttcgtgctatatcgcatcaccgaagccacaaaaaccgttggttccgatactttctatagttttaagtacgagatcaaggagggggactgcccagttcagtccggaaagacttggcaggactgtgagtacaaggatgcagccaaggccgctactggggagtgtaccgccacagttggtaaacgtagctctacaaagttctcagtcgcaacacagacttgtcagattactcccgcagagggacctgtggtcacggcacaatatgactgtctgggatgcgtgcacccaatctcgacgcagtctcctgacctcgagcctatccttaggcacgggatccaatacttcaataacaatacacaacattcctctctgttcatgctgaatgaggttaaaagggcccaacgccaggataccggagaatgtactgacaatgcttatatagacattcagctgcgcattgctagtttcagccagaactgcgatatttacccgggaaaagactttgtgcagcctcctactaaaatatgcgtagggtgtccccgcgatattcccactaacagtccagagctggaagagaccctgacccacacgattactaagttgaacgccgagaacaatgcaaccttttactttaaaatcgataatgttaaaaaggcacgtgtgcaggttgtagcgggcaaaaaatacttcatcgacttcgtggcacgagagactacgtgttctaaagagagcaatgaagagctaacggagagctgtgagaccaagaagttaggccagagtctggattgtaatgcagaggtttacgtggtgccctgggagaagaagatctatccaacggtgaactgccagccattggggatgatctctttaatgaagcgcccccccggcttcagtccgttcaggagtagcagaattggggagatcaaggaagaaacaacctcccacctgagatcatgcgagtataagggtaggccacctaaagcaggtgcggagcctgcctctgagcgagaggtatcctag

SEQ ID NO: 121751 - DNA, 306 bp, synthetic construct
  misc_feature 1..306: note = Description of Artificial Sequence: Synthetic coding sequence
  source 1..306: mol_type = other DNA
atggacatcccaatttcatccagagattttagaggcctccagcttgcctgcgtggccttggggctggtggccggcagtattatcattggtatctctgttagtaaggccgcggctgcgatggggggggtcttcataggcgctgccgtgcttggaagtttacgcatccacccacacccaggagcagatcacggggagggtaggtcctccacaaacgggaataaggaaggcgcaagatctagcctgtccacagtgagccggacattggagaaattgaagccagggactaggggggcagaggagtgctag

SEQ ID NO: 121752 - DNA, 375 bp, synthetic construct
  misc_feature 1..375: note = Description of Artificial Sequence: Synthetic coding sequence
  source 1..375: mol_type = other DNA
atggatatccccatatctagccgcgacttcaggggcctgcagcttgcctgcgtagcactgggcctggtggcaggcagcattattatcggaatctcagtgtctaaggccgccgcagctatgggaggggtttttattggtgctgccgtgttaggactgttaatcctcgcatatcctttccttaaggcccggttcaacttggaccatatacttcctacgatcggatctctgcggatacacccacatcccggcgcagatcatggcgagggccggagttctacaaacgggaataaggagggtgctcgctcatctctgtctactgtgtcacgcaccctggaaaagctcaaacccggcacccggggggctgaggaatgctag

SEQ ID NO: 121753 - DNA, 3135 bp, synthetic construct
  misc_feature 1..3135: note = Description of Artificial Sequence: Synthetic coding sequence
  source 1..3135: mol_type = other DNA
atgaagcctggctgcgcagccggctctcccggtaacgaatggatcttcttctctacggatgaaataactactagatatcggaacaccatgtcgaatggcggactacagcgctcggtcattctcagtgccttaattctgttaagagctgtgaccggttttagtggggacgggcgggccatatggtccaagaatcccaacttcacacctgttaatgagtcccagttgtttctttacgacactttcccgaagaacttcttctggggtatcgggaccggcgccctgcaagtcgagggaagctggaaaaaagacgggaagggaccaagcatttgggaccactttatccacacgcatctgaagaatgtcagctccacgaacgggtcgagcgacagttacatttttctcgagaaggatctgagcgctctggactttattggcgtctctttctaccagttttcgattagctggcctcgcctttttcccgatggtatcgttaccgtcgctaacgctaaaggattacaatactactcaacactgctggatgccctggtcctaaggaacatcgagcccatcgtgaccttgtaccactgggacctgccccttgcccttcaggaaaagtacggtgggtggaagaacgacacgattattgacatattcaacgactacgcaacttactgctttcagatgttcggtgatcgggttaagtactggatcacaattcataatccttacctggtggcctggcacggatacggaactggcatgcacgccccaggagagaagggcaaccttgccgcggtgtacaccgtaggccataacttgatcaaggcccacagcaaggtgtggcacaactacaacacccactttcgcccccaccagaaggggtggttaagtattactctgggaagtcattggatagagccgaaccgaagtgaaaacactatggacatattcaagtgccagcagtctatggttagcgttctagggtggttcgcaaacccgattcatggggatggagattaccccgaaggtatgcggaagaaattgttctccgttctgccaatcttctctgaggctgaaaaacatgagatgaggggcaccgctgatttttttgcattttccttcggaccaaataactttaagcccctgaataccatggctaaaatgggtcagaacgtgtctcttaacctgcgcgaggcactgaactggattaaactagagtataacaacccacggatccttatcgcagagaatgggtggtttactgatagccgcgttaaaacagaggatactacggccatctacatgatgaagaactttctgtcacaggtactgcaggccatacgtctggacgaaattagggtctttggatacaccgcctggtctctgctggacggattcgagtggcaggatgcctacactatcaggcgtggattattttacgtcgacttcaacagcaagcaaaaagagagaaaacctaaatcctcagcccactattacaagcaaattattcgcgaaaacggattctctctcaaagaatctacgcccgacgtccagggacagtttccctgcgattttagctggggagtcaccgaaagcgtgctgaaaccagagagcgtggcctcatcccctcagttcagtgatccccacctgtatgtctggaacgctaccggtaaccggctgctgcatagggttgaaggggttcgtctaaagacccggccagcccaatgcacagacttcgttaatattaaaaaacagctggaaatgttagccaggatgaaagtgacccactataggttcgctttggactgggctagcgtgctccctaccggcaacctgtcagctgttaaccgacaggcactgcgatactatcggtgcgtggtctctgaagggcttaaactgggcatttcggcaatggtgacgttgtactatcccacccacgcccacctcggcctacctgaaccccttttgcatgcagacggctggctgaacccaagtacagccgaagcttttcaagcatatgccggcctgtgtttccaggaattgggcgatctggtcaagctatggattaccatcaatgagcctaaccgactgagcgacatatacaatcgctctgggaacgatacatacggcgcagcccacaatctgctcgttgcccatgctctggcttggcgcctttatgacagacagttccggcccagccagagaggggccgtctcactgtctttacatgctgactgggctgagcccgccaatccctacgccgatagccattggagagcggcagaacggtttctacaattcgaaatcgcctggttcgcggagcctctgtttaagacgggcgattaccccgccgcaatgagggagtatatcgcctcgaaacatcgccgtggtctgagcagctccgcccttccccgcctgactgaggccgagcgtcgcctgcttaagggcactgtggatttctgcgctctgaatcatttcactacccgctttgtgatgcacgagcagctggcgggctcccggtacgatagtgatagagatatccagttcctccaagacattacccgcctgagcagccccactcgtcttgccgtgattccttggggcgtcagaaaactgttacgctgggtgcggagaaattatggcgatatggacatctatattacggccagcggaatcgatgatcaggcacttgaggatgataggctgagaaagtactatctgggcaagtacctccaggaggtgctaaaggcttatctgattgataaggttcgcatcaaaggatattacgcgtttaaattggccgaggaaaagtcaaagccacgttttggattcttcacctccgactttaaagccaaatcctccatccagttttataacaaagttatttccagccgggggttcccattcgagaacagctctagccggtgctcccagacacaggaaaacactgaatgcacagtgtgtctgtttttggtgcagaaaaagcctctgatattccttgggtgctgctttttcagcaccttggtcctgctgctttccatagcaatatttcaacgccagaagcgaaggaagttttggaaagccaagaatttacagcatatccccctgaagaagggaaagcgggtcgtcagctag

SEQ ID NO: 121754 - DNA, 1389 bp, synthetic construct
  misc_feature 1..1389: note = Description of Artificial Sequence: Synthetic coding sequence
  source 1..1389: mol_type = other DNA
atgggcactcaggctttgcaggggttcctgtttcttctgtttcttccactgttacagccgcggggtgcctctgccggctccctgcactctccaggcttgtccgaatgttttcaggttaacggagctgactaccgcggccaccagaacaggactggtccacgcggtgctggccgaccctgtttgttctgggaccagacacaacaacattcctactcttccgctagcgacccccacggtagatggggcctcggtgctcacaatttttgccgcaatcccgacggagatgtgcagccttggtgttacgtggccgagactgaggaagggatttattggcgctactgtgacatccccagttgccatatgccaggctacttgggatgtttcgtggactcaggtgcgcctcctgccttaagcgggccctctggaacctcaactaaattaacagtccaggtatgccttaggttctgtcggatgaaaggctaccagctcgccggggtggaggccggatatgcgtgcttctgcggtagtgagtccgacttagcccgcggccgcctggctccagccaccgactgcgaccagatctgtttcgggcaccccggccaattatgcggcggggacggccgcctgggggtttatgaggtatccgttgggagctgccaggggaattggactgcgccacagggcgtaatctactctcctgattttccggatgaatatgggcctgaccggaattgcagctgggcactgggcccgcccggagccgccctagaactcacctttagacttttcgaactggctgaccccagagaccgccttgaactgcgagatgctgcctctggcagtctgctccgtgctttcgacggcgctagaccgcctcctagtggccctctgaggctgggcacagcggccctgcttctgacgttccggagtgatgctcgtggacacgctcaaggtttcgcactcacctatagagggttgcaagacgcagccgaggaccccgaggcccctgaagggtccgcgcagacccctgcggcgcccctggatggcgccaacgtgtcctgcagtcctagacctggcgcacctcccgccgcaatcggcgccagggtcttctccacagtgaccgctgtctcagtgttattgctgctgctcctaggactcctgcggccactgcgaaggaggtcttgtttgctggctcccgggaagggccctcccgctctgggcgcatcgcgcgggccaagacgcagttgggccgtgtggtatcaacagcccaggggtgtggcacttccatgttcccctggagatcctcaggcagagggttctgctgctggctatcggcctttatcggcctcctcacagtcctcactcagaagcctgatctctgccctctag

SEQ ID NO: 121755 - DNA, 1263 bp, synthetic construct
  misc_feature 1..1263: note = Description of Artificial Sequence: Synthetic coding sequence
  source 1..1263: mol_type = other DNA
atgggcactcaggcactgcagggcttcctttttctcctgttcttgcctctgttacagcccagaggggcttccgcaggctctctccatagtcctgggctgagcgaatgcttccaggtaaatggagctgattataggggccaccagaaccgaactgggccaaggggcgctggtcgcccctgcttgttttgggaccaaactcagcagcacagctacagctctgcctccgatcctcatggtcgctggggactgggagcccacaatttctgtagaaatccagatggggacgtgcaaccctggtgttacgtggcggagacagaggagggcatttattggaggtattgcgacattccatcctgccatatgccaggatatctgggctgttttgtagactccggagctccccccgccttgtcaggcccaagtggcacttccactaaattgactgtgcaggtgtgcttgcgcttttgtcggatgaaaggctaccagttagctggcgtggaggcaggctatgcctgcttctgtggcagcgagtccgatcttgcaaggggacggctagcgccagctacagattgtgaccaaatctgctttggacaccccggtcagctttgcggaggggacgggcgcctcggggtgtatgaggtttctgtcggaagctgtcagggcaactggacagcaccccagggagtgatctatagcccagactttcccgatgaatacggccctgacaggaactgctcatgggctcttggccccccaggggccgcactcgagttgaccttcagactctttgagctagctgatcctcgcgatagactggaactcagagatgccgcctccggatctctgctgagggcatttgatggcgcccgcccacccccatcagggcccctccggctcggtactgccgccttgctgctgaccttccggagtgatgcacggggccatgcacaaggtttcgctttaacttaccgcgggctccaggacgccgccgaggacccagaagccccagaagggagtgcccaaactcccgccgctcctctggacggtgctaatgtcagctgcagccccagacctggggcccctccagcggctataggaggagcagtttgttggctgagggagaagggccctaggcgctgggggcttcccggtgcgccaggtgaagctggattgtgcgggactaattctcctgaaggttggccatgcccggccccaccagggacaccacggctaagggtgctcccgagggccacagggttatag

SEQ ID NO: 121756 - DNA, 1272 bp, synthetic construct
  misc_feature 1..1272: note = Description of Artificial Sequence: Synthetic coding sequence
  source 1..1272: mol_type = other DNA
atgggaacgcaggccctccagggtttcttatttttactgtttcttccgctgttacaacctcgtggtgcctctgcggggtccctgcattcgccaggactctctgagtgcttccaggtgaacggcgccgattatcggggccaccagaacaggacaggaccacggggcgcaggcaggccatgcctgttttgggaccagactcagcagcattcttatagctctgctagcgacccccatgggagatggggccttggagcccacaatttttgtagaaatcctgacggggacgtgcagccatggtgctacgtcgcagagactgaagagggcatttactggaggtattgtgacatcccaagctgtcacatgcctggatatcttgggtgcttcgtggattccggagcaccaccggctctcagcggaccatccggcacatcgacaaaattaaccgtgcaggtatgtttaaggttttgtcgcatgaagggttaccaactgtgtggtggagatggcagactgggcgtgtacgaagtgagcgtggggtcctgtcagggaaactggacagcgccacagggagtcatatactccccagatttcccagacgaatacgggcccgaccgtaattgttcctgggccctggggccacccggggccgccctcgagctgacatttcgcttgttcgagttagccgaccctcgtgatcgcctggagttgagagacgccgctagtgggtccctgctcagagcctttgatggtgctcggccaccaccgtccgggccattgagactcggtacagctgccctgctcctgacctttcgatctgacgctagaggccatgcccagggattcgctctgacatatcgcggactccaggatgccgccgaagatccggaagcacctgaaggatctgcccagacccccgccgctccgttagacggcgccaacgtatcctgttcaccaagaccaggtgcgccaccagcagccattggcgcccgcgtattctccaccgtcactgccgtttctgtgctattactcctcctcctcgggctcttgaggcctctccgacggcggtcatgcctcctggcaccagggaaggggcctcccgccctgggcgcatcacgggggccccgcaggagctgggcagtctggtatcagcagccccggggcgtagctctgccgtgcagcccgggcgatccacaggcagagggctcagcagctggatatcgccctctatctgcaagctctcagagtagcctgaggagcctgatttcagcgctgtag

SEQ ID NO: 121757 - DNA, 1146 bp, synthetic construct
  misc_feature 1..1146: note = Description of Artificial Sequence: Synthetic coding sequence
  source 1..1146: mol_type = other DNA
atgggtacccaggctctgcagggcttcctatttttactgtttttgccccttctccagcctagaggggcctccgctggtagcctgcatagtcctgggctctccgagtgcttccaggtcaacggggcagactaccgtgggcaccaaaatagaaccggccccagaggtgccgggaggccttgcctgttctgggatcaaacgcagcagcattcctactcaagcgcttcagatccacacggacgttggggcctgggtgcacacaacttttgcaggaaccccgatggggacgtgcagccttggtgctatgtagccgagacggaggaaggcatctattggcggtactgtgatattcccagctgccacatgcccggctacttgggatgttttgtggactctggcgctcctcccgcattgtcggggccttcaggtacctctaccaagctcactgtgcaagtgtgcctgaggttctgcagaatgaaaggttaccaactgtgcggcggcgatggtaggctaggcgtctacgaggtgtccgtgggcagctgtcaggggaactggacagcccctcagggcgtgatctattcgcccgattttccagatgaatatgggccggaccggaattgttcttgggcacttggacccccaggggccgccctggagctcacttttcgattgttcgagctcgcggaccctcgtgacagactggaattgcgggatgcggcgagcgggagcctgctgcgtgcctttgacggagcccggccgccgccgagcgggccgctccggttgggaaccgctgccttattgttaacttttcgctcagacgccagaggtcatgcccagggattcgcacttacgtatcgggggttgcaggatgctgcagaggacccagaggcccctgaaggtagtgcccagacccccgctgccccattagatggagcaaacgtttcatgctcacctagacccggagctcccccagccgctattggtggagcagtgtgctggttgcgggagaaaggacctcgccgctggggcctgcctggcgccccaggtgaggcggggctgtgcggcaccaactcgcctgagggctggccctgccctgcccctcctggaacgccccgccttagggtgctccccagggccacaggcctgtag

SEQ ID NO: 121758 - DNA, 2211 bp, synthetic construct
  misc_feature 1..2211: note = Description of Artificial Sequence: Synthetic coding sequence
  source 1..2211: mol_type = other DNA
atggggaaccctgaaaacattgaggacgcatacgtggctgtcatccggcctaaaaacactgcctccttaaatagccgcgaatatcgtgccaaatcctatgagattctcctccatgaagtgccgattgaaggccagaagaagaagcgtaaaaaagtcctcctcgagactaagctccaggggaattccgagatcacacaagggatcctggactatgtcgtcgaaactactaaacccatctcgcccgccaatcagggaattcgagggaaaagagtagtcctcatgaagaaattccccctggatggcgaaaaaatgggacgggaggcgagcttgtttatcgtgcccagcgtcgtcaaggacaacacgaaatacacgtacacgcctggttgccccatcttttattgtctccaagatataatgagggtgtgttccgagtcctctacccacttcgcgaccctgacagcgaggatgttaattgctctggataaatggctggacgaacgccatgcacagtcacacttcatcccagctctgttccgcccctctcctttagagcggattaagactaacgttattaatcctgcatatgcaacagagagtggacaaacagaaaatagtctacacatgggatactccgccctcgagattaaatctaagatgttagcactcgaaaaagccgacacatgcatctacaatcccctgtttggttcagatctgcagtacaccaatagggtggataaggtggtaatcaatccatactttggcctgggggctcctgattactccaaaatccagatccctaaacaggagaagtggcagcggtccatgtcttcagttaccgaagataaagagagacaatgggttgacgactttccccttcatcgatcagcttgcgaaggagattctgaactgctgagcagactcttgagcgagcgtttctcagtgaatcagctcgactccgatcactgggctcctatacactacgcatgttggtacggcaaggtcgaggcaacgaggattttactggaaaaagggaagtgcaatcccaaccttctgaacggccagctgagctcaccactccacttcgccgcaggaggcggtcacgctgagattgtgcaaattctattgaatcatccggagacggatcggcacatcaccgatcaacaaggaagaagcccactgaacatctgcgaagagaacaaacagaacaactgggaagaggccgcaaaactgctgaaggaggcgatcaacaaaccgtacgagaaagttcgaatctatcgcatggacgggtcttaccgctccgtcgagttgaaacatggtaacaatacaacagtgcagcaaatcatggagggcatgcgacttagtcaagaaacccaacagtatttcactatttggatctgttcggaaaatttatctctccaactcaaaccataccacaaaccattacagcacgtgcgagactggccggaaattttggcagagctcacgaatctggatcctcagagagaaacccctcagctattcctcagaagggacgtccggctccctttggaggtcgaaaaacagatcgaagatccattagcgattctgatcctgttcgacgaggctcgttataatctcctgaagggcttttataccgccccagacgccaaattaatcacacttgcatcgctcctgctccagatcgtgtacggaaactatgagtcgaagaagcataagcaggggtttctgaacgaggagaatctcaagagcatcgtccccgtgaccaagctgaagtccaaggctccacactggacaaatcgaatcttacacgaatataagaacttatcaacatcggaaggcgtcagcaaggaaatgcaccaccttcaaaggatgttcctgcagaactgctgggagatccccacttacggcgcagctttctttacagggcagatctttaccaaggcgtctcctagtaaccacaaggtgatcccggtatatgtgggcgttaatatcaaagggctgcacttgctgaacatggagacgaaggccctgcttatttcgttgaagtatggatgcttcatgtggcaacttggggatacagatacatgcttccaaatccacagcatggagaataagatgagttttatagtccacactaagcaagctggactggtcgtgaaattgttgatgaagctcaatggccagctcatgcctacggaacggaattcgtag

SEQ ID NO: 121759 - DNA, 3624 bp, synthetic construct
  misc_feature 1..3624: note = Description of Artificial Sequence: Synthetic coding sequence
  source 1..3624: mol_type = other DNA
atggaccttcatatgatgaactgcgagctgctggctacatgctccgcacttggatatttggagggcgatacttaccacaaagagccggattgcttggagagcgtgaaggacctcatccgctatcttcgccacgaggatgaaactcgcgacgtgaggcaacagcttggtgccgctcaaatcttacagtctgacttgttgccgatcctaacacagcatcatcaagataaacccctgtttgatgcagtcattaggttgatggtgaacctaacacagcctgccctgctctgcttcggcaacctccccaaagagccctctttcagacatcatttcctccaggtcctgacttacctccaagcatataaggaagcatttgcctccgagaaggccttcggagtcctcagcgagacgctgtacgaactactccagcttggatgggaagaaaggcaggaggaagacaatctgctcattgaaagaatcctgctgctcgtgagaaacattttacacgtcccggccgatctagaccaggagaagattgacgacgatgccagcgctcacgaccaactgttatgggcaattcacctctctggcctggatgacctgttactgtttctcgcatccagttctgccgaggagcagtggagtctccatgtgctcgagattgtgagtctgatgttccgcgatcagaatcccgaacagctcgccggcgtcggtcaggggcgcctcgcacaagaacgcagcgccgattttgcagagctggaggttctccggcagcgcgagatggccgaaaagaaaacacgggcgctgcagaggggaaatagacacagtagatttggaggaagctacattgtacagggcttgaaatcaattggcgagagagacctgatctttcataaagggctgcacaatctgcgaaattactcaagtgatctggggaagcagcccaaaaaagtcccaaagcggcgacaggccgcccgagaattatcgatacagcgtcgttctgcattgaatgttcgattattcctccgcgatttttgcagcgagtttttggagaattgttataaccgactcatgggatcagtgaaggatcatctgctgagggagaaggcccagcaacacgacgagacatattatatgtgggccctggccttctttatggcgtttaaccgtgccgcttcatttagaccgggcctagtctctgaaacactgagtgtcagaaccttccactttattgagcagaacctcacaaattattacgaaatgatgctgactgatcgaaaggaggccgcgtcgtgggccaggagaatgcacctagctctcaaagcttatcaggagctccttgcaaccgttaatgaaatggatattagtccagatgaagcagtgagagagtcctcaaggataatcaaaaacaacattttctacgtaatggagtacagagagctattcctggcactgtttagaaaattcgacgagagatgccagccacgctctttcctgagggacctagtggagacaacccatctatttctgaagatgctggaaagattttgtcgatcgcggggcaatctagtggtgcagaacaagcagaaaaagcgcaggaagaaaaagaagaaagtgctcgatcaggccattgtgtctggcaacgtgcctagctccccagaggaggtcgaggcagtgtggccagctctggcagaacaactccaatgctgcgctcagaatagcgagttgagcatggacagcgtcgtcccctttgatgcggccagcgaagttccggtggaggagcagcgcgccgaagcaatggtccgcatccaggattgtctgctcgccgggcaggcacctcaagcccttactctgctgaggtctgcgcgagaagtgtggccggaaggagacgtgtttgggtcacaggacatcagcccagaagaggaaattcaactgctcaaacagattttgtccgctcccctgccacgacagcagggtccggaggaaagaggggctgaggaggaagaggaggaggaagaagaagaggaagaagaactccaagtggtgcaggtttctgagaaggaattcaactttctggactatctgaagaggttcgcttgtagcaccgtggtccgagcatacgtgcttctcctacgttcctatcagcagaattccgcccacacaaaccactgtatcgtcaagatgctacatagactggctcacgaccttaaaatggaggcactgctgtttcagctgtctgtcttctgtctgtttaaccgactgctgtccgaccccgccgcaggtgcatacaaagagttagtaacatttgcaaagtatatcctggggaaattctttgcgcttgctgcagtgaatcagaaagcgttcgtggaactgctcttttggaagaataccgcggtggtccgggagatgaccgagggctacggctccctggacgacagaagtagctctcgccgcgccccaacttggtcccctgaggaagaggctcatctgagagaactctacttagctaacaaagatgttgagggccaggacgtcgtcgaggccatcctggcccacctgaatacagtgccacgaacccgcaagcagattatccatcaccttgttcagatgggactggcagattccgtgaaggacttccagcggaagggtacacacattgtgctgtggacaggagatcaggagcttgagttacagcgcctcttcgaggagttccgtgacagcgacgacgtcttgggtcacattatgaagaacatcacagccaagcgctctagggccagaattgtggacaagctcctcgcacttggtctcgtcgcagagcgcagggaactttataagaaacgccagaaaaaattggcaagctcaatactccccaatggagctgagagcctgaaagatttctgtcaagaagacctggaggaagaggaaaacttaccagaggaagactcagaggaagaggaggaaggcggctctgaagccgaacaagttcagggaagcctcgtcttgagcaacgaaaacctcggacagtctcttcaccaagagggcttcagtattcctttactgtggctgcaaaactgcctaatcagggccgcagacgaccgcgaagaggatgggtgtagccaagctgtacctttggttccactgactgaggaaaatgaagaagccatggagaatgagcagttccagcagctgctccggaagctgggggtcaggccaccggcgtctgggcaggaaaccttttggagaattcctgcaaaactcagtcccactcaattacgcagagccgccgcgagtctctcccagcctgaggaagaacaaaagctacagcccgaactccaaccaaaagttcccggggaacagggaagtgacgaagagcattgcaaagagcaccgggcgcaggccctgcgcgctctgctcctggcccataagaaaaaagctggactggctagtccagaagaagaggatgcagtgggaaaggagcccctcaaggcagcaccaaagaaacggcagctcctggatagcgatgaagagcaggaggaggatgagggccgcaatagagctccagagttgggagccccagggattcagaaaaagaagcgataccagattgaggatgacgaggacgattag

SEQ ID NO: 121760 - DNA, 1539 bp, synthetic construct
  misc_feature 1..1539: note = Description of Artificial Sequence: Synthetic coding sequence
  source 1..1539: mol_type = other DNA
atgcacaccccagatttcgcgggccccgatgacgccagagcagtcgatataatggatatttgtgagtctatccttgagcgcaagagacacgactcagaacgttctacatgtagcattctagaacagaccgacatggaggcagttgaagccctcgtctgcatgtccagctggggccagcgctcccaaaagggcgacttgctgaggattcgcccgcttactcctgtgtctgattccggcgatgtgaccaccaccgtccatatggacgcagccaccccagagctacccaaagattttcatagcttgagcacactgtgcatcacaccaccacaatcaccagacttggtggagccttctacacggacccccgtatcaccgcaagtgactgactccaaggcctgtaccgcgacagacgtcctacagagcagtgcagtggttgctcgggctctctctgggggagcagaacggggattgctcggcctggaacccgtgcctagttcaccttgcagagccaaaggcaccagtgtgattcgccataccggagagtctcctgccgcctgcttccccacaattcagacacccgattgtaggctctcagatagtcgcgaaggggaggagcagcttctgggacattttgagacactacaagatacgcacctgactgactccctgctgtccactaatctggtcagctgccagccttgcctccacaagtcaggaggcctgctgctgacggataagggacagcaggctggctggccaggggccgtgcagacctgctcccctaagaactatgagaacgatcttccaagaaagacgaccccacttatttccgtgagcgtgcccgcaccacctgtcctatgccagatgatccctgtcactggccagagcagcatgctccccgcattcttaaagccgcctccacaactgtcagttggaactgtgcgccccatcctggctcaggccgccccggctccacagccagtatttgttggcccagcagtcccccagggggcagtcatgctggttcttccccagggggcgctacctcctccggcaccgtgcgcagctaacgtcatggccgccgggaacactaaactgcttccacttgccccagctccagtattcattacctcttcgcagaattgtgtgccccaggtggacttctctcgccgtcggaactatgtgtgctcttttcctggatgtcgcaagacctattttaaaagttcacatctaaaggcacacctgaggactcacacaggcgagaaacccttcaactgtagctgggatgggtgtgacaaaaaattcgcacgcagcgatgaactaagccgacatcgcaggacccacacgggggagaaaaagtttgtttgtccagtctgtgatagaaggtttatgaggagtgaccacttgacaaaacatgccagaaggcacatgacgacaaaaaaaatccctggatggcaagctgaggtcggaaagcttaaccgcattgcctccgctgagagcccaggcagtccgttggtaagcatgccggccagtgcctag

SEQ ID NO: 121761 - DNA, 1488 bp, synthetic construct
  misc_feature 1..1488: note = Description of Artificial Sequence: Synthetic coding sequence
  source 1..1488: mol_type = other DNA
atggatatttgtgagagcatcttggagcgtaaacgtcacgacagtgaacggtctacatgttctatattggaacagaccgacatggaggctgttgaagctttggtgtgcatgagctcttggggtcagaggagccaaaagggcgacctccttcggatccgtccgctcacgcccgtttctgattctggcgatgtcacaactactgtgcacatggacgctgcgaccccggaattgcccaaagatttccatagcctcagtacactttgcatcacacccccccaatcccctgatctggtcgagccatccactcgcacccctgtgagcccacaggttactgattctaaggcctgcactgctacggacgtgctccaaagttctgctgttgtggcacgagcgctttcaggcggcgccgaacggggattactgggactggagccagtgccctcttccccatgccgtgccaagggaaccagtgtgatcaggcatactggcgagagccctgctgcttgttttcctacaattcagacacccgactgtaggctgtccgactctcgcgagggcgaggagcagcttctagggcactttgagaccttgcaggatacgcacctgacagactcactattgagtacgaatctcgtatcctgccagccatgccttcacaaaagtgggggtctcctgctgaccgacaagggacaacaagccgggtggccgggggcagtacaaacatgttccccaaagaactatgagaacgacttgcctcggaaaacaacacccttaatttcagtatccgtgcctgccccacctgtgctgtgtcagatgattcctgtaacaggtcaatctagtatgctgccagccttcttaaaacctcctccacagctgtcagtcggtacagtccgacccattctcgcacaggcagcccccgccccgcaacctgtgtttgtcggaccagcggtaccccagggtgccgtcatgttagtacttcctcagggagccctgccaccccctgctccatgcgcggcaaatgtgatggctgccgggaacacaaagctcctgccactagcgcccgctccagttttcattacatcctctcagaactgtgtcccgcaggtggacttctcccggagacgcaattatgtctgcagctttcccggctgtcgcaagacgtattttaaatctagccacctgaaagcacacctgaggacccatacaggcgaaaagccctttaactgctcatgggacgggtgcgacaagaagtttgctcggtcagacgagctcagcagacaccgcaggacacacaccggggagaaaaaattcgtgtgccccgtttgtgaccgccgattcatgagaagcgaccacctcacaaagcacgctcggaggcacatgacgacaaaaaaaatccccggctggcaagctgaggttggaaagctgaatcgaatcgccagcgccgagtcacccggatcccctctcgtgagcatgcccgccagtgcctag

SEQ ID NO: 121762 - DNA, 1488 bp, synthetic construct
  misc_feature 1..1488: note = Description of Artificial Sequence: Synthetic coding sequence
  source 1..1488: mol_type = other DNA
atggatatttgtgaatcaatcctggaaagaaagcggcatgattctgaacgatcaacatgtagcattcttgagcagacagatatggaagccgtggaggccctggtgtgcatgagttcttgggggcagagatcacagaagggtgacctgctccgcattcggccccttacgcctgttagcgacagtggggacgtcacaactaccgtccacatggatgccgcaactccagaattgccaaaggattttcatagcctctccacactgtgtatcacgccgccccagagtccagacctagtggaaccctccacacgcacacctgtgtccccccaggttaccgacagcaaggcttgcacagctactgatgtcctgcagtcttccgccgtggttgccagagctcttagcggcggcgccgagagaggcctgttgggcctcgagcctgtgcccagttcaccttgccgtgctaaaggaacctcggtcattcgccatactggcgaaagccctgcggcatgttttcccacaattcagacccctgactgtagattatcagactcccgcgaaggagaagagcagctcctgggccattttgaaacccttcaggacacgcaccttactgactcactcctctcaaccaacctggtctcttgccagccctgcctgcacaagtcaggcggcttgctcctcaccgacaaggggcagcaagcgggatggcctggtgccgtgcagacctgctcccccaagaattacgagaacgacctaccgaggaaaactaccccgctgataagtgtcagcgttcccgccccccctgtgctctgtcagatgatccctgtgacaggccaatccagtatgctccccgcctttctgaaacctcctcctcaactatcggtgggcactgtacgaccaatacttgcacaggccgctcccgccccacaacctgtgtttgttggccctgcggtaccacagggagccgtaatgctcgtcctcccccaaggggccttaccaccccccgctccatgtgctgctaacgtcatggccgctggaaacaccaaactcctaccgttagcccctgctcctgtttttataaccagttctcagaactgtgtccctcaggtcgacttttctcgtaggagaaactatgtgtgttcattcccaggctgcagaaagacctattttaaatctagtcacctgaaagcccacctgcgcactcataccggcgagaaaccattcaattgctcctgggacggttgcgataagaagttcgcaagatccgacgagctgagccggcatcggagaactcacaccggggaaaagaaatttgtctgtccagtgtgcgatcggcgatttatgcgttcagaccatctgactaaacatgcacgtaggcatatgacaaccaagaagatccccggctggcaggccgaggttgggaagttgaacaggatcgcctcagccgaatcacctggatctcctttagtgtcaatgccggcctcagcgtag

SEQ ID NO: 121763 - DNA, 1209 bp, synthetic construct
  misc_feature 1..1209: note = Description of Artificial Sequence: Synthetic coding sequence
  source 1..1209: mol_type = other DNA
atttcggttcaccttatgcggaagcacgtgaagaatattaatactttcgaaaacagaatgctgatgctggacgggatgcccgcagttagggtgaagacggagcttctggagagtgagcagggttcaccgaacgtgcataactacccagacatggaggctgtccccctgctacttaataacgtcaaaggagagccacctgaagattctctttcggttgatcattttcagacccaaaccgagcccgtggacctgagcatcaataaggctcggacctcccccacggccgttagctcctcacccgtcagtatgacagcgtctgcctctagcccaagcagtacttccacttcttcatctagctcatcgcgacttgcgagctctcctactgtcatcaccagtgtctcctccgcctcctcgtcatctactgtactgacccccgggccgctggtggcttcagcgagtggggtgggcggccagcagttccttcatataatacatcccgtgccgcctagcagcccaatgaatcttcaaagtaataaattgagccatgtccatagaatccctgtagtcgttcagtccgtaccagtggtctataccgctgtgagatccccgggcaatgtgaacaatacaattgtcgtcccactcctggaagacggacgcggccacggtaaggcccagatggacccgcgcggcttgagtccccgccagtccaagtcagactccgatgatgacgatttacctaacgtaactctggattcagtgaatgagacgggttcgaccgccctcagtatagctcgtgcggtgcaggaggtccatccatcccccgtgtccagggtccggggcaatagaatgaataatcagaagttcccctgtagcatttccccattctctattgagagcaccaggcggcagcgtcgctccgaatctccagacagccggaagcgacgtatacacagatgcgatttcgagggctgtaacaaggtttacaccaagtcctcacacctgaaggcacaccggcggacccacacgggcgagaagccctacaagtgcacgtgggaagggtgtacgtggaagtttgcccgcagcgacgagttgacaaggcactatcggaaacacacaggggtgaagccctttaagtgtgccgactgtgatcggtcattctcacgctcagaccatctggcattacacaggagacgccacatgcttgtgtag

SEQ ID NO: 121764 - DNA, 1209 bp, synthetic construct
  misc_feature 1..1209: note = Description of Artificial Sequence: Synthetic coding sequence
  source 1..1209: mol_type = other DNA
atgaacatacatatgaagaggaagacgattaagaacattaatacattcgaaaaccgaatgttaatgttggatggaatgcctgcggttcgcgtgaagacagagctgctagaaagcgagcaggggagccctaacgtgcataactatccagatatggaagccgtccccttactgttgaataatgtaaagggggagcctccagaagattctctgtcagttgatcactttcagacccagactgaaccagtagacctttccataaataaagcgaggacctcccccactgccgtgtcctccagcccggtctctatgaccgcatctgccagcagcccttcgtccaccagtacctcaagctcatcctccagccgactagcctcatcgcctacagtaataacaagcgtgagctctgctagttcgtcctccactgtgctgactcctggccctttggtggcatcggcctccggagtcggcgggcagcaattcctgcacataatccacccagtaccaccttcttctccaatgaatctccaaagtaacaaactctcccacgtgcatcgcatccccgtggttgtccagagtgtgcctgtagtctacacggccgtgagaagtccaggaaacgtcaataacacaattgtggtacctttgctcgaggacggtcgcggccacggtaaagcccagatggacccacggggtctcagtccaaggcagtccaagtccgactcagatgacgacgacctgcctaacgtgaccttagatagcgtgaacgaaacgggctccacagctttgtcaatcgcccgggcggtccaagaagtgcatccgagccccgtctcacgggtgcggggcaatcgcatgaataatcaaaaatttccttgttctatcagcccattttccatcgagtccacccggcggcagagaagatccgagtcccctgatagccgcaagaggagaatacataggtgcgactttgaggggtgtaataaagtgtatacaaaatcctcacacctgaaggcccaccgcaggacgcacaccggagaaaagccatacaagtgcacttgggaaggctgtacatggaaattcgcacggagcgacgagctcacaagacactacaggaagcacacaggagtaaaaccgtttaagtgtgccgactgtgaccgatccttcagcaggtctgaccatcttgctcttcaccggaggcgccatatgctggtctag

SEQ ID NO: 121765 - DNA, 1209 bp, synthetic construct
  misc_feature 1..1209: note = Description of Artificial Sequence: Synthetic coding sequence
  source 1..1209: mol_type = other DNA
atgaacatccacatgaagaggaaaactatcaaaaacatcaacacgttcgagaatcggatgcttatgctggatggcatgcctgcagttcgagtgaagactgaacttctggagagtgaacagggatctcccaatgtgcacaattatcccgacatggaggctgtaccactgctgctgaataatgtgaagggggagcccccagaagacagtttaagcgtagaccatttccagactcaaaccgaacctgtggacctaagcatcaacaaggctcgaacgtctcctacggcagtgtcctctagccctgtttccatgaccgcatctgcaagctcgcccagttctacttcaactagttcctcctcttcctcccgtcttgccagttcgccgactgtaatcacttctgtgtcctcagctagcagctcgtccacagtactgactccggggcccttggtcgcttcagccagtggcgtggggggccagcagtttttgcatattatccaccctgtccctccttcctcaccgatgaacctgcagtccaacaagctgtcccacgtgcatagaatcccagttgtggtgcagagcgttcctgtagtctacaccgctgtccggtcccccgggaatgtcaacaatacaatcgtggtacccctgcttgaggatggtagaggacacgggaaggcacagatggaccccagaggcctgagccccaggcaatctaagtccgattccgatgatgacgacctacccaatgtcactctggattcagtaaatgagacaggaagcacagccctatccattgctagagctgtacaggaagtgcaccctagccccgtgagcagggtccgaggaaaccgcatgaacaatcagaaattcccgtgcagtatatctcccttctccatcgagagcacaaggagacagcgccgatctgaaagtcccgactcccgcaagcgcaggattcacagatgcgattttgaaggctgtaataaggtctatactaaatcctcacatctaaaggcccacaggagaacacatacgggagaaaaaccctacaagtgcacctgggaaggctgtacatggaaatttgcaagatctgacgaattgacacgtcactatcgcaaacacactggcgtgaaaccattcaagtgcgctgattgcgacaggagcttctcgagatccgaccatttggccttgcaccgcagaaggcatatgctggtctag

SEQ ID NO: 121766 - DNA, 867 bp, synthetic construct
  misc_feature 1..867: note = Description of Artificial Sequence: Synthetic coding sequence
  source 1..867: mol_type = other DNA
atggcagcagctgcttacgtggaccactttgccgctgagtgcctcgtgtctatgagcagcagagccgtagtgcatggaccgagggaaggtcctgagtctagacctgaaggagccgcagtagcggccacgccaactcttccacgagtggaagaacgaagggacggtaaggacagcgcatccctgtttgtcgttgccaggattctggctgatctaaatcagcaggccccagcccctgctccggccgagcgtcgagagggagccgcagctcggaaggcccggaccccctgccgcctccctccccccgcgccagaaccgaccagcccaggagccgaaggcgcagctgcagcccccccaagccccgcttggagcgaacctgagccagaggctggtctcgagcctgagagagagcctggccctgccggctcgggcgagccaggcttaagacagagggtgaggcggggcagaagcagagctgacctggaatctccccagcgcaaacacaagtgtcattacgctgggtgcgagaaggtctatgggaagagttctcacctgaaagcgcatctgaggactcacacgggagagcggcccttcgcttgctcctggcaggactgtaacaaaaagtttgctcgcagcgacgaacttgcccgccattatcggacacataccggggagaagaagttcagctgccctatatgcgaaaagcgattcatgaggtccgatcatctgactaaacacgcaaggcgccatgccaattttcaccccgggatgctgcagaggcggggggggggaagccgcacagggtctctttctgactactctaggtcagacgcgtcgagcccaaccatctctcccgcttcctcaccttag

SEQ ID NO: 121767 - DNA, 1251 bp, synthetic construct
  misc_feature 1..1251: note = Description of Artificial Sequence: Synthetic coding sequence
  source 1..1251: mol_type = other DNA
atggtggaccatctcctcccagtagacgagaacttctcctcccctaaatgtcctgtgggctacctcggagaccggctggtgggaagaagggcctaccacatgctcccaagcccagtctcggaggacgacagtgacgccagcagcccgtgcagctgctctagtccagatagccaggcgctttgcagctgttacggtgggggattaggaacagagagtcaggatagcattctggacttcctgctgtctcaagctacacttggttccggcggaggcagtgggagctctatcggcgcatcgtccggccctgtcgcatgggggccttggcggagagccgctgcccctgttaagggggaacacttctgtcttcccgaattccctcttggagatcctgatgatgtgcccaggcccttccaacccacgcttgaggaaattgaggaattcctcgaagagaatatggagcccggagtgaaagaagtgcctgaaggtaattcaaaagatttggatgcctgcagtcaactcagcgccgggcctcataagagccatttgcacccagggtcctccggaagagagcgttgttccccacctccaggtggagcttccgccggcggtgcacagggacccggaggggggcctaccccggacgggccaatcccagtgttacttcagattcaaccggtgcctgtgaaacaagaatccggcactgggcccgcctctcccggccaggcgccagagaacgtgaaagtagcccagctgctcgttaacatccagggacagacatttgcattagtcccacaggttgttccatcctcaaacctgaacctgccctcaaagttcgtgcgcatagcccccgtacctatcgctgccaagccagtgggtagtgggccactgggaccaggccctgctggcctgttaatgggacagaagttccccaaaaaccctgccgccgagctcataaaaatgcataaatgcactttcccggggtgctcgaagatgtacacgaaaagctctcacctgaaggcccatcttagacggcatactggggagaaaccctttgcctgtacttggccgggatgtgggtggcggttctcccgaagcgatgagctgtccagacatcgtagaagtcactccggcgtgaagccctaccagtgccctgtgtgtgagaaaaaatttgctcgctctgatcatctgtccaaacatatcaaggtgcatcggttcccacgatcctctcgatccgtgcgatctgtgaactag

SEQ ID NO: 121768 - DNA, 1068 bp, synthetic construct
  misc_feature 1..1068: note = Description of Artificial Sequence: Synthetic coding sequence
  source 1..1068: mol_type = other DNA
atggcactgagcgagccaatcctgccttcttttagtacatttgcttcaccgtgtcgtgagagaggattacaagaaagatggccacgcgcagaacccgagtccggcgggaccgacgatgatcttaatagcgtgctggactttatcctgtctatgggtctggacggcttaggcgccgaagccgcaccggaacctcctcctccacccccacctccagcattttactacccagaacccggcgcacctcctccatactctgcaccggcaggtggtctggtttctgaactcctacggcctgaactggatgctccgctgggacctgcattgcacggtcgatttttactggccccacccgggaggcttgtaaaagcagagcccccagaggcagatggaggtggggggtatggttgtgcgccggggctgacccgcggaccacgtggacttaaacgagagggggctcctggccccgcagcgtcttgcatgcggggccccggcgggcgtccgcctccaccacctgacacccctcccctgagccccgacggccccgccagactccccgcacctgggcccagagcctcttttccacccccatttgggggccccggcttcggcgccccgggcccgggattgcattacgcccctccggcacccccagcttttggtctgttcgacgatgccgctgccgctgccgcggctctaggattggctcctccagccgcacgcggactgctcacccctccagcatcacccctggaactactcgaggcgaaacctaagagaggaaggcgcagctggccgcggaagcgcactgcaacccatacttgctcttacgcgggctgcggaaagacctacaccaagtctagccatctgaaggcgcatctcaggacccatacaggggagaagccataccactgtaactgggacggctgtggatggaagttcgcccgctctgatgaattgacacgccactacaggaaacacaccgggcacaggccattccagtgccatctgtgcgaccgagcttttagtcgtagtgatcacctggccctccatatgaagagacatatgtag

SEQ ID NO: 121769 - DNA, 234 bp, synthetic construct
  misc_feature 1..234: note = Description of Artificial Sequence: Synthetic coding sequence
  source 1..234: mol_type = other DNA
atggatgtgctacccatgtgtagtatattccaggaactccagatcgtgcatgagacaggatacttctcggcgctcccctctctggaagagtactggcaacagacctgcttagagctagagagatacctgcagtctgagccctgctatgtaagcgcgagcgagattaaattcgacagccaagagagtgtcgatcagaaccactggctgggccgcaaacgccgcaaccctaattag

SEQ ID NO: 121770 - DNA, 846 bp, synthetic construct
  misc_feature 1..846: note = Description of Artificial Sequence: Synthetic coding sequence
  source 1..846: mol_type = other DNA
atggatgtactgccgatgtgcagcatcttccaggaactacagattgtccatgaaactggctactttagtgccctgccaagcctggaggaatactggcagcagacttgcctagagctagaacgctacctacaatcagaaccgtgttacgtgtcagctagtgaaatcaagttcgacagccaggaagatctgtggactaaaattatactggctcgtgaaaaaaaggaagagtcagagttaaagataagctcgtcacccccagaagacaccttgatcagtccatcattctgctacaacctagagactaatagcttaaacagcgacgtgagctctgagtcatccgacagctcagaggaactatcccctacagcgaagtttacctccgaccctatcggcgaggtgctggtttcctcagggaagctaagcagctctgtaacgtctacgccaccttcctctcccgaactttcacgagaaccctcgcagctctggggttgcgtgcctggcgagctgccctctcctgggaaagttagatcaggcactagcggaaaacccggagacaaaggtaacggcgatgccagtcccgatggtcgaagaagggtgcataggtgccattttaatggctgtaggaaagtgtatacgaagtcctctcacttaaaagcccaccagcgcactcatacaggacagtgtccacggggccctagaagagcagctgcaggaggccggcattgtattgctcctgccctggagggggctggaccaggttgcactggctgcggccagggccgtcaaatcctgacttcatctgacgtcttccaccagtctatacgctccttctggtcaagcgagtag

SEQ ID NO: 121771 - DNA, 852 bp, synthetic construct
  misc_feature 1..852: note = Description of Artificial Sequence: Synthetic coding sequence
  source 1..852: mol_type = other DNA
atggatgtccttccaatgtgttccatctttcaggagctgcaaatcgttcacgagactgggtacttctctgctctacccagcctggaggagtactggcagcagacctgcctcgaactggaacgctatctgcaatctgagccatgctatgttagtgcatcggaaattaaatttgactctcaggaggacctgtggaccaagatcattctcgcgagagaaaagaaggaggagtccgagctgaaaatctcttcctctccccctgaggacactctgatctcgcccagcttctgttacaacctggaaaccaacagtttaaactccgatgtgtccagcgaatcatctgactcttccgaggagctctcgcctactgcaaaattcacatccgaccccattggcgaagttctggtgtcttctggcaagctctccagtagcgtgacgagcactcctccttcttcccccgagctttcccgcgagccttcccagctgtggggctgcgtgcccggcgagctgccgtcccccggcaaggtgagatcagggactagtgggaagcccggtgacaagggtaacggcgatgcctcaccagacgggcgcaggcgtgtgcatagatgccacttcaacgggtgcaggaaagtctatactaaatcatcgcatctgaaagcccaccaacgcacgcataccggtgaaaagccctaccgctgcagctgggaaggatgtgagtggcgcttcgctcggtcagacgagctgacgcgccactttcggaagcataccggtgctaagccattcaagtgttctcattgtgacagatgcttctctcggtctgatcacctggctctacatatgaagaggcatctgtag

SEQ ID NO: 121772 - DNA, 714 bp, synthetic construct
  misc_feature 1..714: note = Description of Artificial Sequence: Synthetic coding sequence
  source 1..714: mol_type = other DNA
atggatgtcttacctatgtgcagcatctttcaagagctgcaaattgtccatgaaaccggatacttctcagccctgcccagcctcgaagaatactggcagcagacctgcctggagctggagaggtatctgcaatctgagccatgttacgtgtctgctagcgaaattaaattcgactcacaggaggatctctggacaaaaattatactcgctcgggagaagaaggaggagagtgaactcaaaatctctagcagccccccggaggacaccctgatctccccttccttttgttataatctggagaccaattcacttaactcagatgtcagctcagagtccagcgacagcagcgaggagctttccccaactgccaaatttacgtcagatcctataggcgaggttctcgtctctagtgggaaattgagttcgagcgtgacttccacacctccatcatcaccagagctgagtcgcgaacccagtcagctctggggttgcgtcccgggggaactccctagccccggtaaagtgcggtccggtacgtctggcaagccaggcgataaaggtaatggtgacgcaagtcccgatggtaggcggcgcgtacatcggtgccacttcaacggctgcaggaaagtgtacactaagagcagccatctaaaggcccaccagcgaacccacacaggagtgtttcctggtcttactacatggccatgcacctag

SEQ ID NO: 121773 - DNA, 909 bp, synthetic construct
  misc_feature 1..909: note = Description of Artificial Sequence: Synthetic coding sequence
  source 1..909: mol_type = other DNA
atggacgttctggcctcatactcaatcttccaggaacttcaactggtacatgacaccggttatttttcagccctgccctcactcgaagagacctggcagcagacctgcctagagctggagcggtatctccaaacagagccacggagaatatccgagacattcggtgaggacttggactgttttctgcatgcctccccacccccttgcatagaggaatcctttagacgtcttgacccactgcttctgccggtggaggccgccatttgcgagaagtcctcagccgtggacatcttgttgtcccgcgacaagctgttgtcagaaacctgcttatcccttcagccagcctctagtagcctggactcctacaccgcggttaatcaggctcagctgaatgcggtgacctccctgacaccaccttcctctccagagttgagtcgccacctcgttaagacctcacaaactctgtcagctgtcgatggtactgtcaccctgaagttagtggctaaaaaagccgccctttctagtgttaaagtcgggggcgttgcaaccgccgccgccgccgttacagctgctggagcagttaaaagtggccaatctgactctgatcaaggggggcttggagcagaagcatgcccggagaacaaaaaacgggtgcaccggtgtcaattcaacgggtgtaggaaagtgtatactaaaagtagccatctgaaggcccatcaacgaacccacactggcgaaaagccgtacaaatgttcctgggaaggttgcgagtggcggttcgccaggtctgatgaactgactcgtcattatcgcaagcataccggcgccaagccttttaagtgcaaccactgcgatagatgcttctcaaggtccgaccaccttgcacttcacatgaagcggcacatttag

SEQ ID NO: 121774 - DNA, 825 bp, synthetic construct
  misc_feature 1..825: note = Description of Artificial Sequence: Synthetic coding sequence
  source 1..825: mol_type = other DNA
atgttcccaagttggccaacatgcctggaactggaaagataccttcagacggagcctcgacgaatctccgagactttcggggaggaccttgattgtttcttacatgcttctcccccgccctgcatcgaggaaagtttccgcaggttggaccctttactgttacctgtcgaggccgcaatatgtgagaaaagctctgcagtggacatcctgctgagcagggataagctgctgtccgagacatgtctgtctctgcagccggcctcctctagcctagattcttacaccgcagttaatcaagcgcagttgaacgccgtgacttccttgacccctccaagctcacccgaactaagcaggcacttggtgaagacatcacagactcttagtgcagtcgatgggaccgtcactctgaagctggttgccaaaaaagctgctcttagctctgtcaaagtcggcggcgtcgccaccgccgcagccgccgtcactgcagccggagcggtcaagagcggacagtctgattctgatcagggagggctcggagctgaagcttgtcccgagaacaaaaaaagagttcatcgatgccagtttaatggctgtcggaaagtgtatacaaaatcttcccatttaaaggcgcaccagcgaactcatactggagagaagccctacaagtgttcttgggaaggctgtgaatggcgttttgctcgaagtgacgaactgactaggcattaccgtaagcacaccggtgcgaagccattcaagtgtaatcattgtgaccggtgcttctctcgctccgaccacctggctcttcatatgaaacggcacatctag

SEQ ID NO: 121775 - DNA, 810 bp, synthetic construct
  misc_feature 1..810: note = Description of Artificial Sequence: Synthetic coding sequence
  source 1..810: mol_type = other DNA
atgacctgtctggaactcgagcggtacctgcaaactgaaccccgcaggatatccgagacgttcggcgaggatttggactgttttcttcacgcttcacctcctccctgcatcgaggaatcctttaggagactagatcctctcctgctgcctgtggaggccgcgatctgcgagaagtcaagcgctgtggatatcttgctctctcgcgacaagttattgagtgaaacttgcctgtcccttcagccggcctcctcatctcttgacagttacactgccgtgaatcaggcgcagctcaatgccgttacctccctgacaccaccgtcttctccagaacttagtagacatctcgtcaagacgtcccagactctcagcgctgtcgatggcaccgttaccctgaaactcgttgcaaaaaaagctgccctaagcagcgtgaaggttggcggcgtcgcgactgctgctgcagccgtgacagctgccggagctgttaaatcaggccagagcgacagcgaccagggaggcctcggcgcagaggcatgtccagagaacaaaaaacgggtccacaggtgccagttcaacggatgccgcaaggtgtataccaagagtagccacctgaaagcgcaccagcggacgcatacgggagaaaaaccatataagtgctcctgggagggatgcgagtggagattcgcgaggtcagacgagctgacacgtcactatcgaaagcacacaggtgccaagccgtttaagtgtaaccactgcgacaggtgtttctctcgaagcgaccatctggcactgcatatgaagaggcatatctag

SEQ ID NO: 121776 - DNA, 339 bp, synthetic construct
  misc_feature 1..339: note = Description of Artificial Sequence: Synthetic coding sequence
  source 1..339: mol_type = other DNA
atggatgttctggcatcctactctatattccaggagttacagctggtgcatgacacaggctactttagcgctttgccaagcttagaagagacttggcaacaaacctgcctagaactggagcggtatcttcagactgagccccgccgcatttctgagacttttggagaggacctggactgctttcttcacgcttccccccccccttgcattgaagagtcatttagaaggctggatccactgctactcccggtagaggccgccatctgcgaaaagagctcagccgtggatattctcctctctagagacaaactgctatccgagacctgtctaagcctgtag

SEQ ID NO: 121777 - DNA, 183 bp, synthetic construct
  misc_feature 1..183: note = Description of Artificial Sequence: Synthetic coding sequence
  source 1..183: mol_type = other DNA
atggacgtgctggctagctactctatatttcaggagctgcaactagtgcacgacacgggctacttttccgccctaccctccctggaagagacctggcagcaaacttgcctggagttagaacggtatctccagacagagccgcgtcgcatttccgagacttttggcgaggatctggactgttag

SEQ ID NO: 121778 - DNA, 339 bp, synthetic construct
  misc_feature 1..339: note = Description of Artificial Sequence: Synthetic coding sequence
  source 1..339: mol_type = other DNA
atggatgtgttggcctcatacagcatttttcaagagctacaattggtgcacgatacaggctatttctctgcccttccatcacttgaggaaacctggcagcagacgtgcctcgaactggaacggtatctgcagaccgagccgcgccgcatttccgagaccttcggcgagaaaccatacaagtgctcatgggagggatgcgagtggcgcttcgccagatccgatgagttaacaagacattacaggaaacatactggggctaaaccattcaaatgcaatcactgtgaccgatgtttctccaggtctgaccatctggcccttcatatgaagcgccacatttag

SEQ ID NO: 121779 - DNA, 774 bp, synthetic construct
  misc_feature 1..774: note = Description of Artificial Sequence: Synthetic coding sequence
  source 1..774: mol_type = other DNA
atggtggacatggataagctgattaacaatttggaggtacagctaaattcggagggtgggagcatgcaggtgttcaagcaggtgacagcttcggtgcgtaaccgcgatcctccagagatagagtatcggtcaaacatgacaagccccaccctgttggacgcaaacccaatggaaaaccccgccctgtttaatgacataaagatcgagcctcctgaggaattgttagcctctgattttagcctgccacaggtggagcccgtagacttgtccttccataaacccaaagctcctctgcagcccgccagtatgttacaggcgcctattagacctcccaaaccccaaagcagtccgcagacgttagttgtcagtacctccaccagtgacatgagtacaagtgcgaatattcccaccgtcttgacaccaggctccgtgttgacaagttcgcagtcaactggcagtcagcagatcctccatgtgatccacaccattcctagcgtttctctgcccaacaagatgggagggttaaagaccattcccgtcgttgtgcagtctctgcccatggtgtataccacgctccctgccgacggcggccccgcggcaattactgtacccctgattgggggtgatggtaagaacgcggggtccgttaaagtggaccctacctcaatgagcccccttgagattccatctgatagtgaggaaagcaccattgaatctggtagctcagcactccagtccttgcaaggtctccagcaggagagagaggcactctag

SEQ ID NO: 121780 - DNA, 1080 bp, synthetic construct
  misc_feature 1..1080: note = Description of Artificial Sequence: Synthetic coding sequence
  source 1..1080: mol_type = other DNA
atggtagacatggacaaactcatcaataatctggaggttcagctaaacagtgaggggggctccatgcaggtttttaaacaggtgacagcgtccgtcaggaaccgggacccaccagaaatagagtaccgatcaaatatgacatctcctacacttctggatgctaaccctatggagaaccctgcattatttaacgatataaaaattgagccccccgaggagctgcttgccagcgacttcagtttgccacaggtcgaaccggtggatttgagcttccacaagcctaaagcgccccttcagcccgctagcatgctgcaagcacctatacgaccccccaaacctcagtcgtctccccagacactcgtggtgtcgacttccaccagcgacatgagcacatcagcaaatatcccaacagtgctgacaccgggcagcgtactaactagctctcagtccactggatcccagcagatcttacatgtaatccacacaataccctctgtgagcctgcctaacaagatgggaggccttaagaccatcccagtggttgtgcagagccttcctatggtctataccaccctgccagccgacgggggccccgccgccatcaccgtgcctcttatcggtggtgatggaaaaaatgcagggtccgtcaaggtggaccctacaagtatgtcccctctcgaaatcccatccgactcagaagagagcactattgaaagcggaagtagtgccctgcagtccctccaggggctgcaacaggagccggctgcgatggcccagatgcaaggcgaggagagtctggacctgaaaaggcgtcgcatccatcagtgcgacttcgccggatgttccaaagtgtatacgaaatcctctcacctgaaagcacatcggagaattcataccggggaaaagccttacaaatgtacttgggacgggtgctcttggaagtttgctagatccgatgagctcactcgacacttccgtaagcacactggtatcaagccctttcgatgcaccgactgtaacaggagtttttccaggagcgaccacctgtcgctgcatcgccgccggcacgacacaatgtag

SEQ ID NO: 121781 - DNA, 771 bp, synthetic construct
  misc_feature 1..771: note = Description of Artificial Sequence: Synthetic coding sequence
  source 1..771: mol_type = other DNA
atgcagcctgccaaggaggtgacaaaagctagtgatggttctctgcttggggatctcgggcacactcctctgagcaagaaggaaggaataaagtggcagcgccctcgactgtcccgacaggcgttgatgcggtgctgcctggtgaaatggattctgagttccacagcaccccaaggctcagacagcagcgacagcgagcttgaactttccaccgttcgccatcagccggaaggattagaccagttacaagcgcaaactaagttcacaaaaaaggaactccagtcattgtatcggggtttcaaaaatgaatgtcccaccggtctagttgacgaggacacttttaaactcatttatgcccagttcttcccacagggtgacgcaaccacgtatgcccatttcctgttcaatgctttcgacgccgacggtaatggagccatccactttgaagacttcgtcgtgggcctgagtatcctgctcaggggtacggtgcatgagaagctcaagtgggccttcaacttgtacgatataaataaagacggttacattactaaagaggagatgctggccatcatgaagtcaatctacgacatgatgggaagacatacctacccaattctccgcgaggacgctccagccgagcatgtcgaacgctttttcgagaagatggaccgcaaccaggacggtgtcgttactatcgaagaattccttgaggcttgccagaaagacgaaaatatcatgagctcaatgcagctgtttgagaatgttatctag

SEQ ID NO: 121782 - DNA, 705 bp, synthetic construct
  misc_feature 1..705: note = Description of Artificial Sequence: Synthetic coding sequence
  source 1..705: mol_type = other DNA
atgcaacccagaaaagaagtgacaaaggcttcagatggatcacttctcggggatctcggacatacgccgttgagtaagaaggaagggatcaaatggcagaggcctaggctgtctagacaagccctaatgcgttgctgcttggtgaaatggattttgagcagtactgctccacaggggagtgactcctccgactctgagctggagctctccacggttcggcaccagcctgaggggctggaccaactgcaggctcagaccaagtttaccaagaaagagctccagtccctgtacaggggttttaagaacggggacgccacaacttatgcccacttcctgttcaacgccttcgacgccgatgggaatggcgccatacactttgaagactttgtggtgggcctgtcgattctgttacgagggacggtgcatgagaagcttaagtgggcctttaacttgtacgatataaataaggacggctatataaccaaagaagaaatgctggctatcatgaaatctatctacgatatgatgggcaggcacacataccccatcctgcgggaggacgcgccagctgagcatgtggagaggttttttgaaaagatggacagaaatcaggacggagttgttaccatcgaagagttcctggaggcttgtcagaaggatgaaaacatcatgtcctccatgcaactgttcgagaacgtcatctag

SEQ ID NO: 121783 - DNA, 693 bp, synthetic construct
  misc_feature 1..693: note = Description of Artificial Sequence: Synthetic coding sequence
  source 1..693: mol_type = other DNA
atggggattcaggggatggaactgtgcgcgatggcagtggtggtcctcctctttatagccgtgcttaagcagttcgggatcctcgaacccatcagcatggaagattcaagtgacagtgagctggagctgagcacggtccggcatcagccggaggggctggatcagctgcaggcccaaaccaaatttactaagaaagaactccagagcctgtaccgaggttttaagaacgaatgcccaaccggtctggtcgacgaggataccttcaagctgatctatgcacaattttttccacagggtgacgcaaccacctacgcgcactttcttttcaacgccttcgacgcagacggaaatggtgcaatccactttgaagactttgttgttggcctgagtatcttacttcgaggtaccgtccacgaaaagctaaaatgggcgtttaacttgtacgatattaacaaagatggctatataacgaaggaggaaatgctcgccattatgaaaagtatttacgatatgatgggtcggcatacttatcctatcctgcgcgaagacgcaccggcagagcacgttgagcggttttttgaaaagatggatcgaaatcaggatggcgtggttacaatcgaggaattcttggaggcatgccaaaaagatgaaaacatcatgagttctatgcaactgttcgagaacgtgatctag

SEQ ID NO: 121784 - DNA, 567 bp, synthetic construct
  misc_feature 1..567: note = Description of Artificial Sequence: Synthetic coding sequence
  source 1..567: mol_type = other DNA
atggccaccgtgaggcaccgccccgaagccctggagctgttggaggcccagagcaagttcacaaagaaggagctccagatcctgtacaggggatttaaaaatgaatgtccctcgggagtggttaacgaggagacatttaaagagatttattcccaattcttccctcagggagatagcactacctatgcgcactttctgttcaacgcattcgataccgatcacaacggagccgtatcatttgaggatttcatcaagggattgagcatactgttaaggggcactgtgcaggagaagctgaattgggcatttaatctttacgacattaataaggatggatacattacaaaggaagaaatgcttgatatcatgaaggccatttacgacatgatgggcaaatgcacctacccggtgctcaaagaggatgcacctagacagcatgtcgagactttctttcagaaaatggataaaaacaaagacggagttgtaactatcgacgagttcattgagagttgccagaaggacgaaaacattatgagatcaatgcaattgttcgagaatgtaatttag

SEQ ID NO: 121785 - DNA, 678 bp, synthetic construct
  misc_feature 1..678: note = Description of Artificial Sequence: Synthetic coding sequence
  source 1..678: mol_type = other DNA
atgtcgggttgtaggaaaaggtgtaaacgggaaattcttaagtttgcccaatacctgctgcgacttttaactgggagtctgcacaccgattccgtcgaggacgagctcgagatggccactgtgcgccaccggccggaggcactagagttgctggaggcccaatccaagttcaccaaaaaggaactccagatcctctacagaggatttaaaaacgagtgtcctagcggagtcgtcaacgaggagacgtttaaagaaatttatagccagttcttccctcaaggagattctaccacgtacgctcactttctgtttaatgctttcgatacagaccacaacggtgccgtgtcttttgaagattttatcaaggggttaagtatattgcttaggggaacggtccaggagaagctgaattgggcattcaacctgtacgacattaataaggacggctatatcaccaaggaagaaatgctggatataatgaaggccatttatgatatgatgggcaaatgtacgtaccccgtcctgaaagaagacgctccaagacagcacgttgaaaccttttttcagaaaatggacaagaataaggatggagtagtcactatcgacgaattcatagagagctgccaaaaggatgagaacatcatgagatccatgcagctgttcgaaaacgtcatttag

SEQ ID NO: 121786 - DNA, 690 bp, synthetic construct
  misc_feature 1..690: note = Description of Artificial Sequence: Synthetic coding sequence
  source 1..690: mol_type = other DNA
atgaatttagaggggttagaaatgatcgctgtgctcatcgtaatcgtattgtttgtcaaactcctggaacaatttggcctgattgaggcaggcttggaggattctgtggaggacgaactggaaatggctacggtcaggcatagacctgaagctctggaacttctggaagcacagtctaaattcaccaaaaaggagctccagattttgtaccgcgggtttaaaaatgagtgcccatctggggtggtgaacgaggaaacattcaaagagatctacagccagtttttccctcagggtgatagcaccacgtacgcacatttcctgttcaatgcctttgacaccgatcacaatggcgctgtgagctttgaggatttcataaaggggttaagtatccttctgcggggcaccgtacaggagaagttgaactgggcctttaacctctacgatattaacaaagacggttacatcacgaaagaagagatgcttgacattatgaaggcaatttacgacatgatgggaaagtgcacatatcctgtcctgaaggaggacgcaccccgccagcacgtagagaccttttttcaaaaaatggataaaaataaagacggcgtagtcaccatcgacgagttcatcgaaagttgccagaaggatgaaaacataatgagaagcatgcagctgtttgagaacgtgatttag

SEQ ID NO: 121787 - DNA, 753 bp, synthetic construct
  misc_feature 1..753: note = Description of Artificial Sequence: Synthetic coding sequence
  source 1..753: mol_type = other DNA
atgaacgtgcggcgcgtcgagtctatcagtgcccagctggaagaggcctcatcgacgggcggcttcctgtacgcccagaacagcaccaaacgctccattaaggaacggctgatgaaactactcccatgttctgcagctaaaacaagtagtccagcgattcagaattccgtcgaggatgaactggaaatggcaacagttcggcataggccggaggcgctggaactcttagaggcacagagtaaattcacaaagaaagaactgcagatattgtacaggggattcaaaaatgagtgccctagtggagtggtcaacgaggaaaccttcaaagagatttacagccagtttttcccacagggggatagtacaacttacgcccacttcctcttcaacgcgtttgatacagaccacaacggggccgtgagctttgaggactttataaaagggctgagcatactgctgcggggaacagtccaagagaagcttaactgggcattcaacctgtatgacattaataaggacgggtatattaccaaagaggaaatgttggatattatgaaagcaatctacgacatgatgggcaagtgcacttaccctgtgcttaaggaggacgcccctcgccagcacgtggaaaccttcttccaaaagatggacaagaataaagatggcgtggtaactatagacgagttcattgagtcctgccaaaaagatgaaaatattatgagatctatgcagttgttcgagaacgtgatttag

SEQ ID NO: 121788 - DNA, 567 bp, synthetic construct
  misc_feature 1..567: note = Description of Artificial Sequence: Synthetic coding sequence
  source 1..567: mol_type = other DNA
atggccactgtgaggcatagaccagaggccctggagctgctggaagcacaatcaaaattcacaaagaaggagctacagatcctttacagaggttttaagaatgagtgcccatccggggttgtgaacgaggaaaccttcaaagaaatctactcccagtttttccctcagggagattccactacctacgctcattttctcttcaatgcgttcgataccgaccataacggtgctgtttcatttgaggattttataaaaggactgagcatcctactgcgtggaaccgtacaggagaagctgaattgggcgtttaatctgtatgacattaataaggatggatacatcaccaaggaagagatgctcgacatcatgaaggctatctacgacatgatgggtaagtgtacctatccggtgctgaaagaggacgccccaaggcagcacgttgaaacatttttccagaaaatggacaaaaataaagatggcgttgtgacaattgatgagttcattgagagctgccagaaagacgaaaacataatgcgatcaatgcagctgttcgagaatgtgatctag

SEQ ID NO: 121789 - DNA, 651 bp, synthetic construct
  misc_feature 1..651: note = Description of Artificial Sequence: Synthetic coding sequence
  source 1..651: mol_type = other DNA
atgaacgtgcgcagggtcgagtcaataagtgcacagttggaagaggctagcagcacgggcgactctgtggaggatgagttggagatggctaccgttcgtcatcgcccggaagccctcgaactactggaagcacagagcaaatttacaaagaaagagctccagatcctctacagaggtttcaagaatgagtgtcctagtggcgtggtgaatgaagaaaccttcaaggaaatatactcacaattttttccacagggtgattccaccacatacgctcatttcttatttaatgcattcgacaccgatcataacggagcagtgagcttcgaagatttcatcaaaggactgtcaattttgctccgcgggacagttcaggagaagttgaattgggcattcaatctctacgacataaataaggatggttacattacaaaagaagaaatgctcgatataatgaaagcaatttatgacatgatgggaaaatgcacttatcctgtgctcaaggaggatgctccgcgtcagcacgtggagactttttttcagaagatggacaaaaataaggacggagttgttaccattgatgaattcatcgagtcttgtcagaaagacgaaaacatcatgcgaagcatgcaattgtttgagaacgtgatttag

SEQ ID NO: 121790 - DNA, 567 bp, synthetic construct
  misc_feature 1..567: note = Description of Artificial Sequence: Synthetic coding sequence
  source 1..567: mol_type = other DNA
atggccactgtgaggcaccgccctgaggccttagagttactggaagcccagtccaagtttactaaaaaggagctgcaaatcctgtacaggggattcaagaatgagtgtccgtctggggtggtaaatgaggagactttcaaggaaatctacagccagtttttcccacagggagattctaccacatacgctcatttcttgtttaacgcattcgacacggatcacaatggagccgtatccttcgaggatttcattaaagggctctcaatactcctgagaggaacggtgcaagagaagctgaactgggccttcaatttgtacgatattaacaaggatggctacattactaaagaggaaatgttagacattatgaaagcgatctatgatatgatgggcaagtgtacttaccccgtgctgaaagaggatgccccgcgtcagcatgtggaaactttctttcagaaaatggacaagaataaagacggcgtggtgaccatagatgagtttattgagtcctgccagaaggacgagaatatcatgcgctcaatgcaattattcgaaaacgtcatatag

SEQ ID NO: 121791 - DNA, 549 bp, synthetic construct
  misc_feature 1..549: note = Description of Artificial Sequence: Synthetic coding sequence
  source 1..549: mol_type = other DNA
taaggaatgaacgcaggattcgaagattgtttagtttttgacgaactcatggataagttctctaatgacctgtctctgtgtttgccggtgttttctcgcctacgtattccggatgaccatgctattagcgacctgagcatgtataattatattgagatgagagctcatgtgaacagctcttggtttatcttccaaaagaatatggagcggttccttcatgccattatgccctccaccttcattcctctctatacgatggtcaccttttcaagaattcgctaccatgaggcagtgcagcggtggcactggcagaagaaagtgattaacaaaggacttttttttctgggaagcctcattgctatctcgtccacctacctacttatccattacatgagcccacgttcctttttaagattaaggaggccctggaattggattgcccattttaggaacacgacctgcttccctgctaaagccgtcgacagcttggagcagatttcaaatttgatcagccggttattaagccactccgaaattcttcagacttag

SEQ ID NO: 121792 - DNA, 1359 bp, synthetic construct
  misc_feature 1..1359: note = Description of Artificial Sequence: Synthetic coding sequence
  source 1..1359: mol_type = other DNA
atggatagttctgtgattcagcggaaaaaggtcgccgtcattggcggtggattagttggctcactccaggcgtgcttccttgccaaaaggaattttcagattgatgtgtacgaggccagggaagatacccgcgtggctactttcacacgcggcagaagtataaaccttgccctttcacatcggggtcgccaagccctgaaggcagtgggactggaagaccagattgtgtcccaaggaatcccaatgagggcccgtatgattcattctctgtcggggaaaaaatccgccattccgtacggaacaaaatcccaatacattttgtctgtaagcagggagaacttgaacaaagatcttctcactgcagcagagaaatacccgaatgtcaagatgcatttcaaccaccggctgctcaaatgcaaccctgaagagggcatgatcacggttctcgggagcgacaaagtgcccaaggacgtgacatgtgatctgatcgtgggatgtgacggcgcctacagcaccgtaagaagccaccttatgaagaaacctaggtttgattattctcaacagtacatcccccacgggtatatggagttaaccatcccaccaaagaacggcgactatgccatggagcccaattatctccacatatggcctagaaatacatttatgatgatagccctcccaaacatgaataaaagtttcacatgcactttgttcatgccgttcgaggagttcgagaagctcctgacctcaaatgacgttgtcgattttttccagaaatactttccagacgccattccgctgatcggagaaaagctgctcgtgcaggatttctttttgttgcccgcccaacctatgatctcagtcaagtgctctagttttcacttcaaatcccactgtgtattgctcggagatgcggcccatgccatcgtgccattcttcggacagggcatgaacgccggattcgaagattgcctggtgttcgatgaattgatggataagttttctaacgacctcagtctttgtcttcccgtgttctcgcgtctgcggatcccagacgatcacgctattagtgatctttctatgtacaactatattgaggtgactttctcacgcatcaggtaccacgaggccgtgcagaggtggcactggcagaagaaggtgatcaataaaggcctcttctttctcggtagcctgatagccatctcgtccacctacctgctgattcactatatgtcgcccaggtccttcttgagactccgccgtccttggaactggatcgctcattttaggaatactacctgcttccccgctaaggctgtggattcccttgaacagatctctaatttgatttcaagatag

SEQ ID NO: 121793 - DNA, 1422 bp, synthetic construct
  misc_feature 1..1422: note = Description of Artificial Sequence: Synthetic coding sequence
  source 1..1422: mol_type = other DNA
atggattctagcgttatccagcgaaaaaaagtcgccgtgataggtggggggctggtaggtagcctccaggcctgtttcctggccaagagaaacttccagatcgacgtatatgaagccagagaagatactagggtggctacgttcacgcgcggacggtccatcaatctcgccctaagccataggggccgtcaggcactcaaggcagtgggcttagaggatcaaattgtgtctcaagggattcctatgagagccaggatgatccactcactctctggaaagaaatccgccattccctacgggactaagtctcagtatatcctttctgtcagtcgggagaaccttaacaaagatctgctgacagccgcagaaaagtatcctaacgtgaagatgcacttcaaccacagactacttaagtgtaacccagaggaaggcatgattaccgtactcggctccgacaaggtacctaaagatgtcacctgcgacctgattgttgggtgcgacggcgcctatagtaccgttcgaagccatttgatgaagaaaccccgttttgactactcccagcaatacatcccacatggttacatggaacttaccataccccctaagaatggggattacgccatggagcctaactacctgcatatctggcccaggaataccttcatgatgattgctttgcctaacatgaataaaagcttcacgtgtacgctttttatgccttttgaagaattcgaaaaattgctgacaagcaatgacgttgtggacttctttcagaagtacttccccgacgcgatccccctcattggcgagaagctgctggtgcaagacttctttctcctgcccgctcagcccatgatttctgtgaagtgttcttccttccactttaaatctcactgcgtgctgctcggagatgccgcccatgcaattgtcccatttttcggccagggtatgaacgctgggtttgaagactgtctggtttttgacgagctcatggataagtttagcaacgacttgtccctgtgtttgccagtgttctcccggttaagaatacccgacgaccacgctatttctgacctgtctatgtacaactatatcgagaagaacatggaacggttccttcatgcgatcatgcctagtacattcataccactctacacaatggtgacatttagccgaatcaggtatcatgaggccgtacagagatggcactggcagaagaaggtcatcaataaaggactttttttcctgggtagcttaatcgctatctcttctacctaccttctcatacactacatgtccccacgctccttcctcaggctccggaggccttggaactggatcgctcacttccgaaacacaacttgtttcccggctaaggccgtcgacagcctggagcaaatcagcaacctgatctccaggtag

SEQ ID NO: 121794 - DNA, 1461 bp, synthetic construct
  misc_feature 1..1461: note = Description of Artificial Sequence: Synthetic coding sequence
  source 1..1461: mol_type = other DNA
atggattccagcgtgattcagcggaaaaaagtggccgtgattggaggaggtctggtgggctccctccaggcttgctttctggccaaacggaattttcaaatcgatgtttacgaggcaagagaggacaccagagtggccacattcacccggggacggtccataaaccttgctttatcgcatcggggccggcaggccctgaaagccgtgggcctggaggaccagattgtctcgcaggggatacctatgagggcacggatgattcattctttatcaggcaaaaagagcgccattccctatggtaccaagtcccagtacattttgtccgtttctcgcgagaatctgaacaaagacctgctgactgccgccgagaaatacccgaacgtgaaaatgcattttaatcacaggctgttaaagtgtaaccccgaagagggcatgatcactgtccttgggtccgataaggtccctaaggacgtcacatgcgatctcatcgtggggtgtgatggtgcctactctaccgtgaggtcacacctgatgaaaaaacccaggtttgattatagccagcagtacattccacacggatacatggagctgacgattccaccaaagaatggagactacgccatggagcctaattatctgcatatttggcccaggaatacattcatgatgatcgctctcccgaacatgaacaagtccttcacgtgcaccctgttcatgccattcgaagaattcgaaaaattgctcacctcaaacgatgtcgttgacttcttccaaaaatatttccccgacgccatccctcttattggagagaagttgctggtgcaggattttttcctgctgcccgcccagccaatgatcagtgttaaatgctccagttttcactttaaaagtcactgcgttctcctgggagacgccgcccacgcgattgtgcctttttttggacaggggatgaatgcggggttcgaggactgcctggtgttcgacgagctgatggacaagttctccaacgacctcagcctctgtctgcctgtattctcacgactcagaatccctgacgatcacgccatttcagatctgagtatgtacaactacatcgaaatgcgggcccatgtcaacagttcatggtttatctttcagaagaatatggaaaggttccttcatgccattatgccaagcacattcattcccctatatacaatggtgacattttcgagaatccggtatcatgaggccgttcaaaggtggcactggcaaaaaaaggtgattaacaaggggctgttctttctcggaagcctcatcgctatctcctccacctatctgctaatccactacatgagtccacgaagctttctcagacttagaaggccctggaactggattgcacatttccgtaacacgacttgcttccctgcaaaggccgtcgattccctcgaacagatcagcaacctcatcagccgctag

SEQ ID NO: 121795 - DNA, 1689 bp, synthetic construct
  misc_feature 1..1689: note = Description of Artificial Sequence: Synthetic coding sequence
  source 1..1689: mol_type = other DNA
atggagcttaagaaggatattaacgctgtctccatcgatatgctgctgatcgtacattcagagaaaagacgggcagcccagggtaccctgagcgatcaacaagccaaccctagtagcctgctgcagaggggcggcggcttccagggcgtcggaaacggggttcgtaggtggcaaaaactggagggcaatgatttccacgaaaatctcgtggagaagcagcatccacagcagcctcaggtaatcacatcctacaattcacagggcacacagttaactgttgaggtgcaccccagggatgcaatgcctcagctcctgaagaagtttagtttagccaaaaggttgcagggtgacaagaacggaaataccagacctcgccagcccggcggaaaggacgctcacgcctatccatgggaccggtccagtttgaaatccatgtcactcgatctccagcagttcgagaagctggacatctatgcctctcaggtgacagcgaaatcggggctagacgagttggtgagcgacctcctgcaggaagcccatacagatctagagcgcgttagagccatctggatctggatctgccatcacattgaatatgacattgctgctgcccaggagaaagatcgccaggccttcaaaccgacggatatcctgcgtactcagaaaactaactgcgatggctatgccggcctgtttgagcgaatgtgcaggctagcgggcgtacagtgcatgacagttcctggctacagcaaaggcttcgggtaccagaccggccaaagttttagtggtgaattcgatcatgcttggaacgcagtctatcttgagggccggtggcacctggtggattccacatggggatctggcttggttgacacgataactagcaagttcacattcctgtacaacgagttttactttctgacacaccctgccttgtttattgaggatcacttccctgacaataagaactggcagctgctgaaaccaccgcaaagtctgagacagtttgaaaacaatatgtaccacaaaagcgagttttacaataagggaatgctcagcgcccacccggagacctcaatgatccggaccgtaaatggcaaggccacagttaccattgagagctgcgccccgactttatttatgttcatgctgaacgggaaacaggagcacgggctgctgtctctgcgtaaaaatggtatgaaactggaagtgtacccccccacgatggggactcataagctgcagatctttgcgaagggtaattctgacatatattctagtgtcctggagtataccctgaaatgtaactacgtcgacatgggtgttcagctgcccgccgaactccatcaacccgttgggccctcttggttttccgagcagatggggattatgaagccttcacacccggaccctataatccatacctccgatggaaggtgctccatctcattctcggtggaggaaggaatcaatgtcctggcctctctgcacggcgacgatgggcccatcactgaggaaacacagagaagatatatattccagttgcacagagaaaagcaaacagagctgaaggtacagctcccccacgcaggaaagtttgcactgaaggaagtgtacgtcatggtgttggagaacgccaatcacaatttctattcttatatcctcaaatacaaggtaaatgcccaatag

SEQ ID NO: 121796 - DNA, 1986 bp, synthetic construct
  misc_feature 1..1986: note = Description of Artificial Sequence: Synthetic coding sequence
  source 1..1986: mol_type = other DNA
atggaattaaaaaaggacatcaatgcagtgtcgatcgatatgctgctcattgtccacagcgagaaacgaagagccgcccagggaaccctaagcgaccaacaggcaaacccctcctccttactacagagggggggcggctttcagggggttggcaacggcgtgcgtcgctggcagaagcttgaaggcaacgattttcatgaaaatttggtcgagaaacagcatccacagcagccacaggtcatcacctcgtacaactcccaggggactcaactcacagtcgaagtccatccccgtgacgcgatgccgcagctgctgaagaaattcagcctggccaagcggttgcagggagataagaacgggaacaccagaccccgccagcccggaggtaaggatgcccacgcttatccatgggatcggtcgagcctgaaatcaatgagtctggatctccagcaattcgagaagcttgacatttacgcttcacaggtgaccgccaagtctggacttgacgaactggtcagtgacctcctgcaggaagcccacaccgatctggaacgcgtccgagctatctggatttggatttgccaccacatcgagtacgatatcgccgccgctcaagagaaagatcgtcaagcatttaaaccgactgatatattacgtacccagaagacaaattgcgacggttatgccggcctgttcgaacgaatgtgtagattggccggcgtgcaatgtatgactgtgccaggatactcaaagggattcggctaccagacaggtcagtccttctctggcgaattcgatcatgcatggaacgccgtgtaccttgagggacgctggcatcttgtggactccacgtggggatccgggctcgtcgataccattactagcaaattcacctttctttataatgagttttatttcctcacccaccctgccctgtttattgaagaccactttcccgacaacaaaaattggcaactgttaaagcctccgcaatcattacgccagtttgagaacaatatgtatcataagtctgagttctacaacaaagggatgctgtcggcacacccggaaacctccatgatccgaactgtgaacggaaaagcaaccgtcaccatcgaaagctgcgcacccacactcttcatgttcatgctcaacggtaaacaagagcacggactgttgtccttacggaaaaatggtatgaaattggaggtgtacccaccaactatgggcactcataaacttcagatctttgccaagggtaactctgatatttacagttcagttctcgaatacacactgaaatgtaactacgtcgatatgggagtgcagcttcccgcagaactccatcaacctgtcgggcccagctggttctctgaacagatgggcatcatgaaaccaagtcacccagatccaatcatacatactagtgatggaagatgctcgataagcttttccgtcgaggaaggcattaatgtcctggctagtctgcatggagacgacggaccaatcactgaagagactcagcggcggtatatcttccagttgcaccgcgaaaaacagaccgaactgaaagtgcaactcccccatgccgggaagtttgccttgaagattttcgttaaaaaacggcaggagccaggtaactatattttcgtgtttaactacctggtgtgttgcgccaacacgaaagtaaattggccgatgttcccagagtctttcgggaattggggacaggataacgaattgttagagcccctctcaggggtgctccctgcgaaccgtaacgtgccattcaaactcaagctgcacggcattgctaaggtcctagtcaagggccaggacacatggccactcacactgaaccacgagggttattgggagggctcctgctccacagctggatgccaggaagtttacgtcatggtgctggaaaacgctaaccataacttttactcttacatcttaaaatacaaggtgaacgctcagtag

SEQ ID NO: 121797 - DNA, 1173 bp, synthetic construct
  misc_feature 1..1173: note = Description of Artificial Sequence: Synthetic coding sequence
  source 1..1173: mol_type = other DNA
atgaagctggaagccgtggaccggatgaacccatcccttgtttgcgtcgcctctgtgactgacgtggtggactcccggtttctggtccatttcgacaattgggatgacacgtatgattattggtgcgatccttcttctccttacatccacccagttggctggtgccagaagcaggggaagcctctcaccccccctcaggattatcctgaccctgacaacttttgttgggaaaagtatcttgaagagaccggagcatctgccgtgccaacatgggcatttaaggtccgaccgccgcacagcttcttggtcaatatgaagttagaggcagtggacagaaggaatcccgctctgattcgcgtggcctccgtggaggacgtggaagatcaccgcattaagatacatttcgacggatggtcccatgggtacgatttctggatcgacgctgaccatcctgacattcatcctgctggctggtgttctaaaacggggcatccgctacagcccccactgggaccgagagagccctcaagcgcttcaccgggcggctgtccccccctctcctatcggagcctcccgcacactagaacaagtaagtattctttccaccataggaaatgtcctacacctggttgtgatgggtccgggcacgttacgggcaagttcaccgcccaccactgtctgtctggatgcccgctggcggagcgtaatcaaagtcgcctcaaggccgagctttctgattcagaggctagcgctagaaaaaaaaacctttcaggtttctcgcctagaaagaaaccgcgccaccatggcagaataggtcggccaccaaaataccgaaagattcctcaggaagacttccagacattaaccccagacgttgtccaccagtccctgttcatgtccgccctgtctgcccatcctgataggagtctgtccgtttgctgggaacagcactgtaagcttctacctggagtggctggaatcagcgccagcaccgtggctaagtggaccatcgatgaggtgtttggatttgtccagaccctaacgggctgtgaggatcaagcgcggttgtttaaagacgaagtaaggtgtaagtgccgagtaggcgacagagccggggttaccgtgctgaagactgctggctcccggtgcccgccacagagacatttctgctag

SEQ ID NO: 121798 - DNA, 2232 bp, synthetic construct
  misc_feature 1..2232: note = Description of Artificial Sequence: Synthetic coding sequence
  source 1..2232: mol_type = other DNA
atgcgcagacgagagggccatggcaccgactccgagatgggacagggccccgtgcgagagtcacaatcttctgatccaccagccctccaattcaggattagtgaatataaacccctgaacatggccggagtggagcagcccccgtctccagagctccggcaggagggcgttacagaatatgaggacgggggggcccccgcaggtgatggcgaggcaggaccacaacaggccgaagaccatccccagaatccacccgaagaccccaaccaggatccaccagaggatgactcaacctgtcagtgccaggcatgtggcccacaccaggcagccgggcccgatttgggaagctccaatgacggctgtcctcagctgttccaggaaaggtcagtgattgttgaaaatagcagcggaagcaccagtgcttcagaactgttgaaacctatgaaaaaacggaaacgaagggagtaccagagtccgtctgaggaagaatccgaacccgaggcaatggagaaacaagaagaaggcaaggacccagagggccagccaaccgctagcaccccagagtccgaggagtggagctcatcccagcctgccacaggcgaaaaaaaagagtgttggagctgggagagctacctcgaggagcagaaggctataacggccccagtgagtctctttcaggactcgcaggcagtaacacataacaaaaatggattcaagctcggaatgaagctggagggcatagaccctcaacacccctctatgtatttcatcctgactgtggccgaggtatgcgggtatagactgagacttcattttgatggatacagtgagtgccatgatttctgggtcaacgctaacagcccagatatccatccagctgggtggtttgagaagactggccacaaactgcaacctcctaaaggatacaaggaagaggagttttcgtggtcccagtatctacgttctacacgggcccaggccgccccaaagcacctgtttgtttcacagagtcattcacccccacccctggggtttcaggtcggcatgaaacttgaagcggttgatcgtatgaatccatccttagtgtgcgtcgcatcagtgaccgacgttgtggatagtcggttcctcgtccatttcgacaactgggatgatacctacgactattggtgtgatccctcttccccgtacatccaccccgtgggatggtgccagaagcaaggtaagccactcacacctccacaggactaccccgatcctgataatttttgttgggagaagtatcttgaggagactggcgcgtccgcagtgccaacctgggcatttaaggttcggccgccccattccttcttggtgaatatgaaactggaggccgtggatcggagaaatcctgctcttattagagtggctagcgtggaggacgtggaagatcaccgtattaaaatccacttcgatgggtggtcccatggatatgacttttggatagatgccgaccacccagatatacacccggccgggtggtgttctaagacagggcatccactccagcccccactgggaccccgggagccatcatccgcaagccccgggggatgtcctcctctgagctaccgctcactgcctcacacgagaacgtctaaatacagctttcaccacaggctgttctttcctaggaagtgtcctacaccagggtgtgacggaagcggccatgtcaccggcaaattcactgcccaccattgccttagcgggtgtcctctggcagagaggaatcagtcaagacttaaggcggaactgtccgatagcgaagcttcagctaggaagaagaatttgtcaggtttttctcctcgcaagaaaccccgacaccacggccgaatcggtcggccccccaagtatcggaagatcccacaggaagacttccagaccctgacaccagacgtggtgcaccagtccttgtttatgtctgccttgtctgcccatcccgatcggtccctttcagtttgctgggagcaacactgtaagctgctgcctggagtggccggtatatctgcatctactgtggcgaagtggacaatcgacgaggtatttggcttcgtgcaaactttgaccggctgtgaggatcaggccaggctgttcaaggacgaagtgagatgcaaatgcagggtgggggatagagccggtgtgacagtgctcaaaaccgcaggtagtcggtgtccacctcagcggcacttctgttag

SEQ ID NO: 121799 - DNA, 2319 bp, synthetic construct
  misc_feature 1..2319: note = Description of Artificial Sequence: Synthetic coding sequence
  source 1..2319: mol_type = other DNA
atgcggaggagggagggccacggaacagactccgagatggggcagggcccagtgcgtgagtcccagagctccgatccccccgcactccagttccgtattagtgagtacaagccactcaatatggcaggtgttgagcaaccaccctcacccgagttaagacaggagggcgtgactgagtacgaagatgggggagctccagcaggggatggggaggccggaccccagcaggcagaggatcaccctcagaatccccctgaagaccccaaccaagaccccccagaagacgattctacctgccagtgtcaggcatgcggaccgcatcaggccgcagggccggacctcggatcttccaatgatgggtgcccgcaactgttccaagaacgctcggtgatcgtcgaaaatagcagtggctccacctccgcaagtgagctccttaaacctatgaaaaagcggaagagaagggaataccaatccccgagcgaggaagagtcagaacccgaagcgatggaaaagcaggaggagggaaaagacccagaaggccaaccaaccgcatcgactccggaatccgaggaatggagcagcagccagccagccaccggtgaaaaaaaagaatgctggtcctgggaatcttacctggaggagcagaaggcaatcacagcacccgtaagcctcttccaagacagccaagccgtaacacataataagaatggcttcaaactgggaatgaaattagagggtatcgatccccagcaccctagcatgtactttattctcaccgtggctgaggtgtgtgggtaccgactccgactgcattttgatggatattccgagtgtcacgatttctgggttaacgcgaactcgcctgacatccaccccgccggatggtttgagaagacagggcataagctgcagcctccaaaaggatataaggaggaagaatttagctggagccaatatctaagatccacacgggcgcaggcagcccccaagcacctgtttgtctctcaatctcacagtccaccccccctggggttccaggtgggcatgaaattggaagccgttgaccggatgaaccccagcctggtctgcgtggcgagcgtaactgatgtggtggattcacggtttctggtacatttcgacaactgggatgacacatatgattattggtgtgacccatcgtcgccctatatccatcctgttggatggtgtcagaagcagggaaagcccctgacacctccacaagattaccccgacccagacaatttctgttgggagaaatatctggaagagacgggcgcttctgccgtgcccacctgggcctttaaggtgcgtcccccccattcctttctcgtaaatatgaaactcgaagccgtggataggagaaaccctgcattgattcgcgtggcttcagtggaggacgtggaagaccaccgtattaagatccacttcgacggatggagccatggatacgatttttggattgacgctgatcatcccgatattcaccctgcagggtggtgttcgaaaactggccacccactgcaacctcctctggggccgcgcgagccttcgagtgcgtccccaggggggtgtcctcctctatcgtatcggagtctccctcataccagaacctccaaatattccttccaccatagaaagtgtcccactcccggctgtgacggaagcgggcacgtgactgggaaattcacagcccatcactgcctttctggatgtcccctggctgagcgaaaccaatctaggctgaaagccgaattaagtgatagcgaggcgagcgccagaaaaaagaatctgtctgggttctctccacggaaaaaaccccgccaccatggcaggatcggtcggccaccaaaatacaggaaaataccgcaagaggactttcaaacactcactccggacgtggtccaccagtctttattcatgtctgcattgtcagcgcaccccgaccgctccctctccgtctgttgggaacagcattgcaaactgctcccaggggtggccggaattagcgcgtcgaccgtggcaaagtggaccattgatgaggtctttggcttcgtccagacactaaccggctgcgaggaccaagccaggctcttcaaagacgaggcacgcattgtccgagtgacccacgtttctgggaagaccctcgtgtggacagtggctcagctgggagatctggtgtgctctgatcacctgcaggaaggcaaaggcattctcgagaccggagtgcacagcctgttatgttcactgcctacccacttattagccaaactgtccttcgccagtgactcgcagtattag

SEQ ID NO: 121800 - DNA, 2523 bp, synthetic construct
  misc_feature 1..2523: note = Description of Artificial Sequence: Synthetic coding sequence
  source 1..2523: mol_type = other DNA
atgcatctcgtggcaggagactctccaggttcaggcccacatctgcccgctaccgctttcattattccggcaagctccgcaactcttggtctgccctcctcagcactggacgtgtcttgtttccctagagaaccgattcatgttggagcccccgaacaggtcgcaggttgtgaacctgtttctgctaccgtattaccacaactgtctgccggaccagcgtcctcttcaaccagcacagtgagactgcttgagtggaccgaggccgcggcaccaccacccggcgggggcctgaggttcaggatctcagaatataagccgctaaatatggccggtgtggaacaacctccctccccggagctgagacaggagggtgttaccgagtacgaggacgggggtgcccccgctggcgacggcgaagcagggcctcagcaggcagaggatcacccacagaatccccctgaggatccaaaccaggatccccctgaggatgactccacatgccaatgtcaagcatgtggcccacaccaggcagcggggccagatcttggaagtagcaatgatggttgccctcagttgttccaggagaggtccgtcatagtagaaaatagcagtggctcaacttcagcgagcgaattgctgaaacccatgaagaaacgcaaaaggcgtgaatatcagtcaccttctgaagaagaaagcgagccggaggcaatggaaaagcaggaagagggtaaggacccagaaggtcagcctactgcctccacgcctgagagcgaggaatggtcatcctctcagccagctactggcgagaagaaggaatgctggtcctgggagagctatctggaggagcaaaaggccataacagctcctgttagcctatttcaggactcccaagcggtcactcacaacaaaaatggttttaagcttgggatgaaactggagggtatagacccacagcacccgagcatgtatttcattctgaccgttgccgaggtgtgcggctacaggctgaggttacactttgacggctacagtgaatgtcatgacttctgggtcaatgccaacagtcctgacatccatcccgcaggatggtttgagaaaactgggcacaaattgcagccccctaaaggctacaaggaagaagaattcagctggtcccagtatctgagatctaccagagcccaggctgcacccaaacatctatttgtctctcaatcccactccccaccacccttgggtttccaggtcgggatgaaactggaggcagtggataggatgaaccccagcttggtgtgcgtggcttcagtcacagacgtggttgactcccggtttctggtccacttcgataattgggatgatacttacgattattggtgcgatccatctagcccctatatccatcccgtgggctggtgtcagaagcagggcaagccacttactccgccccaggattacccggaccccgacaatttctgctgggagaaatatctcgaagaaactggggcctccgcggtacctacttgggccttcaaggtgcgcccacctcactcgtttcttgtgaacatgaagttggaagcagtggaccgtagaaatccagcgttgatcagagtcgcttccgtagaagatgttgaggaccacagaattaagattcacttcgatggttggtctcacggctacgacttctggattgacgcggatcacccagatattcatcccgcaggctggtgtagtaagactggtcaccccttgcagccccccttaggcccaagggagccatccagtgcctcccctggggggtgcccacccctttcttacagatcactgcctcatacccggaccagcaagtatagctttcatcatagaaaatgtcccacccctggttgtgacggcagcgggcatgtcaccggcaagttcaccgcccatcattgtctgtctgggtgcccattagcggaacggaatcagtccagactgaaggccgagctcagcgacagcgaagctagtgcacggaaaaagaacctctccggattttcacctcgtaagaagcccagacatcatggcagaatcggacgacccccaaagtataggaaaatccctcaggaagattttcagacactgactcccgacgtcgtccaccagtcgttattcatgtccgccctaagtgctcatcctgatcgctcactatccgtgtgttgggagcagcactgcaagttattgcccggcgtggcaggtatcagcgcaagtacggtcgcgaaatggactatcgacgaggtttttggtttcgtgcagaccttgactggctgcgaggaccaagccaggctattcaaagacgaggcccgcatagtcagggtcacacacgtgagcggaaaaaccttggtctggactgtagcacagctaggggatcttgtttgctctgatcaccttcaggaggggaagggaattttagaaactggcgtgcattccctgctttgtagcctcccaactcatctactggctaagctgagttttgcctccgattcgcagtattag

SEQ ID NO: 121801 - DNA, 1617 bp, synthetic construct
  misc_feature 1..1617: note = Description of Artificial Sequence: Synthetic coding sequence
  source 1..1617: mol_type = other DNA
cagaaagcaataacagcccccgtgtcattattccaggactcccaggccgtgacgcacaacaagaacggctttaagttaggcatgaaactcgaggggattgaccctcaacacccctcaatgtacttcatacttactgtggccgaagtgtgcggataccgactaaggttgcactttgatggatactccgagtgtcatgatttttgggtgaatgccaattcccccgacattcatcccgctgggtggtttgagaaaactgggcataagttgcaaccccccaagggttacaaggaggaggaattctcctggtcccagtacttgagaagcacccgggcccaggcagcacccaagcacctgtttgtgtcccagtcccatagccctccacctctgggcttccaagtgggaatgaaactggaagcagtcgaccgcatgaacccttctctggtgtgtgtagcctccgtcacggacgtcgtcgacagccggtttctcgtgcacttcgacaattgggatgacacttatgattactggtgcgacccttctagcccttacatccatccggttggatggtgtcagaagcaggggaagcccctcacgccacctcaggactacccggatccagacaatttttgttgggagaaatatcttgaggagacgggggccagtgccgttcccacatgggcttttaaggttcgtcctcctcacagttttcttgttaacatgaaacttgaagccgtcgacagaaggaatccagccctgatcagggtcgcctccgtggaggacgttgaggaccacagaatcaaaatccatttcgatgggtggagccacggctatgacttctggatcgatgccgaccatccagacatacaccccgcgggttggtgctctaagaccggtcaccccctgcagcccccactaggccctagagagcccagttctgcgtcgccaggtggatgcccacccctttcataccggtcccttcctcacaccagaacttccaagtacagcttccatcacagaaagtgccccacacctggctgtgatggatcggggcacgtgactggtaagttcacagcacatcattgcctgtcgggctgcccactggcagagcgaaatcagagccgactgaaggcagaactgagcgacagtgaggccagtgctcggaaaaaaaacctgtctggcttcagtccgcgaaagaaaccccggcaccatggtaggatcggaaggccccccaagtatcgcaagattccacaggaagacttccagactctgaccccagacgttgtgcaccagtcccttttcatgagcgcactgtccgcacatcccgatcgatcattatctgtgtgctgggaacagcactgcaaactgctccccggtgtggccggcatctccgcttcaacagttgcaaaatggacaattgatgaggtgttcggttttgtgcagacgctaacaggctgcgaggatcaggcgagactatttaaggacgaaatgattgacggcgaagcctttttgttgttgactcaggccgatatcgtcaagatcatgagcgtaaaattgggtcccgcgctgaaaatctacaatgctatcctcatgttcaaaaatgcagatgataccctgaagtag

SEQ ID NO: 121802 - DNA, 2523 bp, synthetic construct
  misc_feature 1..2523: note = Description of Artificial Sequence: Synthetic coding sequence
  source 1..2523: mol_type = other DNA
atgcacctggtcgcaggagattctcctggcagtggaccccacctacccgctacagcttttatcattccagcatcctctgccacactgggcctgccatcatctgcactcgatgtcagttgtttccctcgcgagccaatacatgtgggtgcaccagaacaggttgcaggctgcgagccagtgagcgccaccgtgcttcctcagttgagcgctgggccagcgagctcctctacatctactgttcgcctgctagaatggactgaggccgcggccccaccgccaggaggggggctccgctttagaatttcagaatataagccccttaacatggccggcgttgagcagcctccatcacccgaattgaggcaagagggggtgacggagtatgaggacggaggtgcacccgccggcgacggggaggcagggccacagcaggccgaagaccatcctcagaatcctcccgaggatccgaaccaggaccccccagaggatgactcaacttgccagtgccaagcctgtggaccacaccaagccgcagggcccgatctgggatcttcaaacgacggctgcccgcagctgttccaggagcgctccgttattgtggagaattcgagcggtagcacttctgccagcgaactactgaagcccatgaaaaaacgaaagcgccgcgaatatcagagtccctccgaagaagagagtgagccagaggctatggaaaaacaggaagaaggaaaagaccccgagggccaacctacagcgagtacgcccgaatccgaagagtggagtagctcccagcctgctacgggagagaaaaaggagtgttggtcctgggagtcctacctggaagagcagaaggccattaccgcccccgtgagtctctttcaggattctcaggctgtcacccacaataaaaacggattcaagttgggaatgaagttagaaggtattgatccccagcatccatctatgtactttatcttgacagttgcggaagtctgcggttataggctgcgcctgcatttcgatggttatagcgagtgtcacgacttttgggttaatgccaatagcccagacatacatcctgctggatggttcgaaaaaactggccacaagctgcagccacctaagggatataaggaagaggagtttagctggtctcaatacctgcgctccaccagagcccaagccgcacctaagcacttattcgtgtcccagagtcacagccctcctccactaggtttccaagtaggaatgaagcttgaggcagtagaccgtatgaacccttcacttgtgtgcgttgccagcgtaacggatgttgtggatagtcgatttcttgtccacttcgacaattgggatgacacctatgactattggtgtgatcctagttctccttatatccaccctgtagggtggtgtcagaagcagggcaagcctctgactcccccgcaggactacccggatcccgataatttttgttgggaaaagtacctcgaggagactggcgcaagcgccgtgccaacatgggcctttaaggtacgtcccccccatagcttcctggttaatatgaaactggaggctgtggatcgccgcaatcccgccttgattagagtcgccagcgtcgaggacgttgaggaccataggatcaagattcacttcgatggatggagtcacggctatgacttctggattgatgccgatcaccccgacattcatcccgcaggctggtgttccaagactgggcatcctctccagccccccttaggtcctagagagccaagctccgccagtccaggcggatgtccccccttgagttacagaagtttgccgcacactcgcacaagcaagtactctttccatcaccggaaatgcccaacaccaggctgcgacggtagtggacatgtcacgggcaagttcaccgctcaccactgtctaagcggctgtccactggctgagcgaaaccagtctcgcctcaaagctgaattgtcagattccgaggcctcagctcggaaaaagaatctgtcaggtttcagccccagaaagaagccacggcatcacggccgcattggccgcccccctaagtatcggaaaataccccaggaggatttccagacacttactcccgacgtcgtacaccagagtctcttcatgtctgccctctctgcacaccctgatcggagcctttccgtgtgctgggagcagcattgtaagcttttgccaggagtcgccggtatctcagccagcactgtggcaaaatggactatcgacgaagtgttcggattcgttcagacactgaccggctgcgaagaccaagctcggctttttaaggacgaggccaggatcgttcgggttacccacgtgtcaggcaagacacttgtgtggacagtggctcagctcggggacctggtgtgctccgaccacctccaggaaggcaagggcatccttgagaccggggtccatagtttgttatgcagtctgccaacacacctgctcgcgaagctgagcttcgcgagcgatagtcaatattag

SEQ ID NO: 121803 - DNA, 255 bp, synthetic construct
  misc_feature 1..255: note = Description of Artificial Sequence: Synthetic coding sequence
  source 1..255: mol_type = other DNA
atggccggagtggaacagcctccatcccctgaactgaggcaggagggagtaacagaatatgaagatggaggtgcccccgctggggacggggaggctgggccccagcaggccgaggaccatccccagaatcctcctgaggatcccaatcaggacccccccgaggatgactcaacctgtcagtgccaagcctgcggacctcaccaggcagcaggcccagatttgggtagctctaatgatggttgccctcagctctag

SEQ ID NO: 121804 - DNA, 417 bp, synthetic construct
  misc_feature 1..417: note = Description of Artificial Sequence: Synthetic coding sequence
  source 1..417: mol_type = other DNA
atgcacctcgtagccggagattcccccggtagcggcccgcatctgcccgcgactgctttcataatcccagcgagttcggcaacactcggactgccctcctccgccctcgacgtgtcttgctttccccgggagccgatccatgtgggcgcccccgagcaggtggctgggtgtgagcccgtgtctgcaaccgtgttgccacagctaagcgctgggccagcatcttcctcgacttccacagtgaggctccttgagtggacagaagctgcagccccgccccctggcgggggcctgaggttccgaatctctgagtataaaccactgaatatggctggcgtggaacagccaccaagcccagaacttcgacaggagggtgtgacagagtatgaagatggaggagcccctgcgggagacggatag

SEQ ID NO: 121805 - DNA, 2217 bp, synthetic construct
  misc_feature 1..2217: note = Description of Artificial Sequence: Synthetic coding sequence
  source 1..2217: mol_type = other DNA
atgcggcgccgcgaaggacatggcacagattctgaaatgggacagggaccagtaagagagtctcagtcttccgatccgcccgctttgcaatttcgtatctctgaatataaaccgctgaacatggctggagtcgaacagccacccagtcccgagctccgacaggagggcgttactgagtatgaagacggtggagcccctgccggagatggagaggccgggcctcagcaggccgaagaccatccccagaatccacccgaagatcctaaccaggatcctccagaagatgacagcacttgccaatgtcaagcttgtggtccccatcaggcagctggcccggacctgggcagctccaacgatggctgtcctcaactctttcaggaaaggtcagtgatcgtggagaatagttcaggatccacgtccgcctcagaactattgaagcccatgaaaaagagaaaacgacgagaatatcagtccccatcagaggaagagtccgagcctgaggccatggagaaacaggaggagggcaaggaccctgaggggcaacccacagcatcaacccctgagtccgaggaatggtcctctagccaaccggcaacaggggaaaagaaggagtgttggtcttgggagtcttacctggaagagcagaaagcaattacggcgcccgtgagcttgtttcaggattcccaggctgtgacgcacaacaaaaacgggtttaagctaggcatgaagctcgagggaatcgatccccagcaccccagtatgtacttcattctgaccgtggcggaggtttgcgggtaccgcttacggctacatttcgatggatactctgagtgtcacgacttctgggtgaatgccaattcccccgacattcatcccgcaggctggttcgaaaagaccggccacaaactacagcctccgaaaggttataaggaggaagaattttcgtggtcccagtacctgagaagcacccgcgcacaggccgcacctaagcacctgttcgtgtcccagtcccattctccgccaccacttgggtttcaagtaggcatgaaacttgaggctgtagacaggatgaaccctagtctcgtgtgcgtcgcatcagtgaccgacgttgtcgactcacgcttcttggtgcattttgacaactgggacgacacatatgattactggtgcgacccatccagcccatacattcaccccgtgggttggtgccagaagcagggcaaacctctcaccccgcctcaggattacccagatcctgacaacttctgttgggaaaaatatctggaagagacaggggcatcggctgtacctacctgggcctttaaagtgagacctccccacagtttcctggttaacatgaagctcgaagctgtagaccgccgtaatcccgccctgataagggtcgccagcgtggaggacgtggaagaccaccgaataaaaatccattttgatggatggagtcacggctatgatttttggatagatgctgaccatccagatatccaccctgcaggctggtgctcaaaaaccggccatccattgcaaccccccttgggtcccagagagccctcttctgcgagccccgggggctgccccccgctgtcgtacaggagcctcccacacactcggaccagtaagtactcttttcatcatagaaagtgccccacacctggctgcgatgggagcggtcatgtaaccggaaaattcactgctcatcactgtctttcaggctgcccactggccgaaaggaaccagagtcgcctgaaggcagaactatcggatagcgaggcctccgcgcgcaagaaaaatttatcaggcttttccccccggaagaagcctcggcatcacggccgaattggtcggccgcccaagtaccgcaagattccgcaggaagacttccaaacactcaccccagacgttgtgcatcagagtctattcatgagtgcgctatctgcccatcctgaccggagtctgagcgtttgctgggaacagcattgtaaactgcttcccggcgtcgccggtatttctgcctcaactgtagccaagtggacgatcgatgaagtattcggattcgtccagacattaactgggtgtgaagatcaggcaagactgtttaaagacgaggtcagatgcaagtgccgagtgggcgacagggccggtgttaccgtgctgaagactgctggctcccgttgcccgccccaaaggcatttctgctag

SEQ ID NO: 121806 - DNA, 870 bp, synthetic construct
  misc_feature 1..870: note = Description of Artificial Sequence: Synthetic coding sequence
  source 1..870: mol_type = other DNA
tagaccagcggcagcatgccaacaccgttaactttcacgctactcgccggctccaggcgacgggcgacatcctgtagcttacctaaaagcccccctcccctgggattccaagtgggtatgaaattggaggctgtcgacaggatgaatccctctctcgtttgtgtggcttccgtgacagacgttgtagatagtcgatttctggtccatttcgataattgggacgatacctacgactattggtgtgaccctagttccccgtacatccatcctgtgggatggtgccagaagcagggcaagcctttaaccccgccacaggactatccggacccggacaatttttgttgggagaagtacctagaagaaactggggcaagtgctgtccctacatgggcgttcaaggtccgccccccacacagttttctggtcaatatgaagctagaagcagttgaccggcgcaaccccgccctgatccgggttgctagtgttgaggatgttgaagaccacaggattaaaattcacttcgatggctggagccatggctatgatttttggattgatgccgaccacccggacattcaccccgccggatggtgcagtaaaactggccatcccctgcaacctcctctgggcccccgggagcctagttctgcctctccagggggctgtcccccacttagctatcgctcacttccccacacccgaacctccaaatactcattccaccaccgcaagtgtcctacccctggttgcgacgggtctggccatgttacaggaaagtttacggctcaccactgcctttcaggctgtcccttggctgaacgtaatcaatcccgtctgaaggctgaactttcggactctgaagcgtcttag

SEQ ID NO: 121807 - DNA, 327 bp, synthetic construct
  misc_feature 1..327: note = Description of Artificial Sequence: Synthetic coding sequence
  source 1..327: mol_type = other DNA
atggccgccgcgatggacgtggacaccccctcaggaacaaactccggcgccggtaagaaacggttcgaagtgaaaaaatggaatgcggtggccctctgggcctgggacatcgtagtggacaattgcgctatctgcagaaaccacatcatggatctgtgtatcgagtgtcaggcaaaccaggcttctgccacatcggaggaatgtactgtggcctggggcgtctgtaatcacgccttccactttcattgcatttcacgatggttgaagacacggcaagtgtgccctttagataatcgcgagtgggagtttcagaaatatggccactag

SEQ ID NO: 121808 - DNA, 867 bp, synthetic construct
  misc_feature 1..867: note = Description of Artificial Sequence: Synthetic coding sequence
  source 1..867: mol_type = other DNA
taaagaccacacctgcagaatcagtggcgtaagagaaagatgactacttggtcttgcctcgtcgctatgatcgtctccggcgttattaccgccgtatgggccgtgcgtgctgcccccatttggagaagccaggtgaagcagaagatgcgaattggaaaacaaggcaattgtcgccctccacggtgcatctgtagcgccctgggtctgttagcaccatggatggccgtggtgctcagccagggaaagccaccgaccaaaaaagccaaggtcttacataaggccgcctggtcagccaagatcggagcctttctacattctcagggaacaggccagttagccgatggcacgcccacggggcaagacgcgcttgtcctcggttttgactggggaaaattcctgaaggaccattcttataaagccgcccctgtgtcttgcttcaaacacgttcctctgtatgatcagtgggaagacgtgatgaaagggatgaaggtcgaggtgttgaacagtgacgccgtgttaccttctagagtttactggatcgcatctgttattcagaccgccggttaccgggttctgcttcgatatgagggatttgaaaatgacgcaagccatgatttttggtgtaatctaggaacggtggacgtccacccgattggatggtgcgctatcaattcaaaaatcctggtaccaccccgcactattcacgccaagtttacagattggaagggatacctgatgaagcgcctggtcgggagccgtacgctgccagtggatttccatataaaagttggatctgagccactgaccgacgtgccgccatctgccctgccctttttctgtatcctccacgccacccactggtcttag

SEQ ID NO: 121809 - DNA, 3762 bp, synthetic construct
  misc_feature 1..3762: note = Description of Artificial Sequence: Synthetic coding sequence
  source 1..3762: mol_type = other DNA
atggtagtggccctgcggtacgtgtggccgcttttattatgctccccatgcctgctgattcagatccccgaggagtatgagggacaccacgtcatggaacctcctgtgatcacagagcagtcccccaggcgtctggtagtttttcctaccgatgatattagcctcaagtgcgaggcaagcggtaaacccgaggttcagttccgatggacacgcgacggcgtgcacttcaaacctaaggaggaactgggggtcactgtatatcagtctcctcatagcggcagctttactattactggcaacaattcaaacttcgcccagcggttccagggcatctatcggtgttttgcatcgaataagttgggtacagctatgagtcacgaaatccggttaatggccgagggggcccccaagtggcctaaggaaacagttaagcccgtggaggtggaagaaggagagagcgtggtcctcccctgcaatcccccgccatcagccgagccactgcggatctattggatgaattccaagatcctgcacattaagcaggacgagcgcgttacaatgggccaaaacggcaacctgtactttgctaacgtcctcacgagcgacaatcactccgactacatctgccatgcacactttccaggcaccaggaccatcatccaaaaagagccgattgatctacgcgttaaagcgacgaactccatgattgataggaagccccggctgctctttccaacaaattcaagctcccatttagtagccttgcagggccagcccctggtgcttgaatgcatagccgagggctttcccactccgaccattaaatggcttagacccagcggcccaatgcctgccgaccgggtcacttaccaaaatcataacaagaccttacagttattgaaagtgggcgaggaagacgacggagagtatcgctgtctggcagaaaattccctgggttctgcccggcacgcatactacgtgaccgtcgaggctgccccgtactggctacacaaaccacagtctcatctatacgggcccggcgaaactgcgaggctggattgccaggttcagggtaggccacagcccgaggtcacatggagaatcaacgggattccggtggaagaactggccaaggaccagaaatatagaattcagagaggtgcactgatcctttccaacgtacaacccagcgacaccatggttacgcaatgcgaggctagaaacaggcacggcctgctcctggctaacgcttacatctacgtcgtgcagctccctgccaagatactgactgcggataaccagacctatatggccgtgcaaggctctaccgcctatctgctgtgtaaggcgttcggcgccccagtgcccagtgttcagtggctggacgaagatggcacaaccgtcctccaggatgagagattcttcccctacgccaacggaactttgggaatacgtgacttgcaggccaacgacacaggacggtacttttgcctcgcagctaatgatcagaataacgtaacaatcatggcaaatttgaaggtgaaagatgctacccaaatcacgcagggcccacggagcaccatcgaaaagaagggctcacgagtcaccttcacatgccaggcctctttcgacccttccctgcaaccctcaataacatggaggggggacggccgcgatctgcaggaactaggcgacagtgataagtatttcattgaagatggaaggctggtgatccattctcttgactacagcgatcagggcaattactcttgcgttgctagcaccgagcttgatgtggtagaatcgagagcccagctcctagtggtcggtagccccgggccagttcctcggttggttctgtccgacctgcaccttctaacccagagtcaagtcagagtctcctggagtcctgccgaggatcacaatgccccaattgagaagtacgatattgaattcgaggacaaggaaatggctcctgaaaagtggtacagcttgggtaaagttcccggaaatcagacctcgaccaccttgaaattgtccccctatgtccattatacatttcgcgttactgccattaacaaatacggaccaggcgagccttctccggtgagtgagaccgtggttacacctgaggccgcccctgagaagaatccagtggacgttaagggcgaaggcaacgaaaccactaatatggtgatcacttggaaacctctccggtggatggactggaacgctcctcaggtccagtaccgcgtgcagtggcggcctcaggggacacgaggaccctggcaggaacagattgtgtctgatccattcctggttgttagcaacacctccacattcgtcccttacgagatcaaagtccaggcagttaactcacagggaaagggacccgaacctcaggtcaccattgggtattccggagaagactatccccaggctattcccgagctcgagggtatcgagatcctgaactcctccgctgtacttgttaagtggcggccagttgatttggcccaggtcaaaggacacttacgcggctataatgtgacttattggcgtgagggtagccaaaggaagcactcaaaaaggcacatacacaaggatcacgtagtcgtgccagccaacacaaccagcgtgatcctgtctggccttcgcccatatagttcttaccacctcgaggtgcaagccttcaacggtcggggttccggccccgcttctgaatttaccttcagcactcccgagggcgtgccagggcatccagaagcgctgcacctcgagtgtcagagcaatacatctctgcttttgcggtggcagcccccactgtcccataacggcgtcctaaccggatatgtgttgtcctaccacccattggacgaaggcgggaaagggcagctgagtttcaatctcagggatcccgagttgaggacccataatctgaccgacctctctcctcacctgaggtatcgctttcagctccaggccactaccaaggaagggcccggcgaggccattgtcagagaaggtggtacaatggcgctgagcgggatctcagactttgggaatattagcgctacagctggagagaattactctgtcgtgtcttgggttcctaaggaggggcagtgcaactttcggttccatatcctgttcaaggcccttggcgaagagaagggcggtgccagtttaagcccccagtacgtatcttacaaccaaagtagctacacccagtgggacctgcagcctgataccgattacgaaattcatttatttaaagaacgcatgtttaggcaccagatggctgtgaaaaccaatgggacgggacgagtaaggctaccgcctgctgggttcgccaccgaaggatggttcattggcttcgtatccgccataattctgttgcttctggtgttgcttatcctgtgtttcattaagaggtctaagggtggtaaatactctgtgaaagacaaagaggacacccaggtggattccgaggccaggcctatgaaagacgagaccttcggggagtatagcgacaacgaagagaaggcgtttggttccagccaaccttcactcaatggggatatcaaacccttagggtcggatgatagtctggccgattatggcgggtcagtggatgtccagttcaacgaggatggatcctttattgggcaatattcaggaaagaaggagaaggaggcagccgggggaaacgattcaagcggcgccacttctccaatcaatcctgccgtggccttagaatag

SEQ ID NO: 121810 - DNA, 3747 bp, synthetic construct
  misc_feature 1..3747: note = Description of Artificial Sequence: Synthetic coding sequence
  source 1..3747: mol_type = other DNA
atggtagtagccttacggtatgtgtggcccctgctcttgtgtagcccatgcctcctcatccagatcccagaggagttgatggagccgcccgtgataacagagcaatccccacgacgcctggtggtcttccccactgatgacatctctctcaaatgcgaagcctcaggcaagcctgaagtacagttccgctggacaagggacggagtgcacttcaaaccgaaagaggaactgggagtgactgtctatcaaagtcctcacagcggtagctttacaattaccgggaacaacagtaatttcgctcagcggtttcagggcatttaccggtgcttcgcttccaacaaacttgggaccgccatgagccacgaaattaggctgatggccgaaggagctccaaaatggccaaaggaaaccgtcaagcctgtggaggttgaggaaggagaatcagttgtcttaccttgtaatccccctccgtcagccgaacccttgcgtatttattggatgaactctaaaatcctgcacattaaacaggatgaaagggtgacaatgggccagaacgggaatctttacttcgccaacgtgttaacttcagataatcactcggactatatctgtcacgcccactttcccggaactagaactatcattcaaaaggagcccattgacctacgggttaaagctactaatagcatgattgatcggaagcctcgtctgctgttccccactaactcaagctcccacctagtggcactgcagggccaacccctggtcttagagtgtattgcagagggcttcccaacccctacaataaagtggctgcgcccttcgggcccaatgccagccgatcgtgttacctaccagaaccataataagactctgcaactgctgaaggtaggagaggaggacgatggagagtatagatgcctggcagaaaactccctgggctccgcccggcatgcgtactatgtaacagttgaggccgctccctattggctgcataaacctcagtcccatctgtacggccctggagagacagcccggttagactgccaggtgcagggacgcccccagccagaggtgacttggcggattaacggcatcccagttgaagaactggccaaagatcagaaatacagaattcagcgcggcgcactgatcctgtccaacgttcagccaagtgacacaatggttacgcagtgtgaggccaggaatcggcacgggctccttctagcaaatgcctacatttacgtagtgcagctacccgctaagatcctcacggcagacaatcagacttatatggccgtgcaggggagtacagcataccttttgtgcaaagcctttggcgctcccgtaccaagcgtccagtggctcgatgaggatggtaccacagtgctgcaagacgaacggttctttccttatgccaacggcaccctcggtatccgggatctgcaggcgaatgatacagggcggtacttttgtctggctgctaacgaccaaaacaacgtgaccattatggctaaccttaaggtgaaagacgctacacagatcacacagggccctcgttcaaccatcgagaaaaagggtagcagagtgacattcacctgccaggcttcttttgacccttcactgcaaccgtctatcacatggagaggggacggcagagacctccaggaactgggagattccgataagtactttatcgaagacggccgactggtcattcattcactagactatagcgaccaaggcaactacagctgcgtggctagcaccgagctcgatgtggtggagtccagggctcaattactcgttgtcggaagccccgggcccgtgccaagacttgtgctctccgatcttcatctcctgactcagtcccaagttagggtgtcctggtcacccgccgaggaccataacgctccaatcgagaagtacgacattgaatttgaagataaagagatggcacccgagaaatggtattctctcggtaaagtaccagggaaccagacctccacgaccttaaaattgtccccatatgtgcactacacgtttcgggttactgccataaataaatatggccccggcgagccttcaccagtttcggagactgttgtcacacccgaggctgcaccggagaaaaatcctgtggatgtgaaaggtgaggggaatgaaactactaatatggtgataacctggaagcctctccgatggatggactggaatgccccacaggtgcagtatcgcgtccagtggcggccccagggcaccagaggcccctggcaagagcaaatagttagtgacccattcctggtcgtcagcaatactagcacctttgtgccttatgagattaaagtccaagcggtgaattcacagggcaaaggtcccgagccccaggtgaccattgggtattctggcgaagattacccccaggctatcccggagttggagggcatcgagatacttaatagctcagccgtcttagtcaaatggaggcctgtagacttggcccaggtgaaaggtcatctgaggggctacaacgtcacgtactggagggaaggatctcaacgtaagcacagcaaacgccatatacacaaagatcacgttgtggtgccggccaacactaccagtgtcatactatctggcttgagaccatatagctcttaccacttggaggtgcaggctttcaacggccggggatccgggccggcaagtgagtttacctttagcacacctgaaggagtccccggacatcctgaggcactgcacctggagtgtcaatccaacacctctctgttgctacggtggcagcctcccctctcgcacaatggggtgctcacaggctacgtcctgagctaccaccctctcgatgaagggggaaagggtcagctgtcatttaatctcagagacccagagctcaggacccataacctgacggacctgtctccgcatcttcggtaccggtttcagctgcaggccacgactaaagagggcccaggagaagcaatagtgagggagggtggaactatggctttgtctgggatatctgacttcggcaatatctccgctacagccggcgaaaattattccgtggtctcatgggtccctaaggagggccaatgcaactttagattccacattctgttcaaagccctgggtgaagaaaaggggggcgcctccctctcgccacagtacgtatcttataatcagtctagctacacccagtgggatctacagccagacacagactatgagatacacctgttcaaggagaggatgttccgacaccagatggccgtcaagacaaatggtaccggacgggtccgtctgccaccagctggcttcgctacagaaggctggttcattgggttcgtgagcgcaattatattacttctgttggtgttgctgatactttgtttcatcaaaaggagtaagggcggtaagtactccgtgaaagataaggaagatacccaggtggactccgaggctagacccatgaaagatgagaccttcggcgagtactctgacaacgaggaaaaggccttcggctcctcccagccatccttgaatggcgacattaagcctctgggctctgacgattcgctggccgactatggcggttccgttgacgtccagtttaacgaggatggctccttcatcggacagtactcgggcaaaaaggaaaaggaagcagctggtgggaatgacagttctggcgcaaccagtccaattaacccagctgttgcattagaatag

SEQ ID NO: 121811 - DNA, 3747 bp, synthetic construct
  misc_feature 1..3747: note = Description of Artificial Sequence: Synthetic coding sequence
  source 1..3747: mol_type = other DNA
atggtggtcgccctaagatacgtctggccactgctgctgtgttcaccctgcctgctgattcagattccggaggagctgatggagcctcctgttattacagagcagtctccacgaaggctagtcgtctttcccaccgacgatatctcattgaagtgtgaggcaagcggaaagcccgaggtccagttcagatggactcgcgacggagtgcatttcaaacccaaagaagaactcggagttaccgtataccagagccctcatagcggctccttcacaatcactggcaacaactccaatttcgcacagcgattccagggaatttatcggtgcttcgcctcgaataagctcggcacagcaatgagccacgaaattcgcctgatggcagaaggcgccccaaaatggccgaaggagacagtgaagccggtggaggtggaagagggtgaatctgtcgtgctgccctgcaatcccccgccttctgctgagccacttcgcatttactggatgaactctaaaatcctgcatatcaagcaggatgagagagttactatgggacagaatggtaatctgtattttgctaacgtgcttacttcggacaaccattccgactatatttgccacgctcactttccaggtactaggacgatcattcagaaggaacctatagacttacgtgtaaaggccacaaatagcatgatagaccgcaagccccgactgttgttccctaccaattcttccagtcatctggttgccttgcaagggcaaccactggtgctggaatgcattgccgaaggtttccccaccccaacaataaaatggctccggccaagcgggccgatgcccgccgaccgagtgacgtaccaaaatcacaacaaaaccctgcagctgttaaaggtaggcgaggaggacgatggcgagtatcggtgcctggcagagaatagtttgggctcagctcgccatgcctactatgttacagttgaggccgctccctactggttacacaagccccagagccatctgtatggcccaggggagacagccagacttgactgtcaggtgcaaggtagacctcaacccgaggtcacctggagaataaacggcatccccgtggaagagctggccaaggaccagaaatatcgcatacagaggggagctctcatactgagtaatgtccaacctagtgacactatggttactcagtgcgaggctcggaaccggcatggactcctcctagctaatgcttatatttatgtcgtgcaactacccgcaaagattctgaccgccgataaccagacttacatggccgtgcaggggagtacggcttacttgctttgtaaggccttcggagctccagtcccctccgtccagtggcttgatgaagacggcacgaccgtgctgcaggatgagcggttcttcccatatgctaatggtactttagggatccgggatttgcaggccaacgataccggccgctacttctgcctagcagcgaatgaccagaataacgtgaccatcatggccaacctcaaagtgaaggacgccactcaaataactcaagggcctcgttctactatcgagaaaaagggcagccgtgtaactttcacttgtcaagcaagctttgatcctagtctccagccgagcattacttggaggggggacggacgcgacctgcaagagctaggcgacagtgataagtacttcatcgaagacgggcgcctggtaatccactctcttgattatagcgaccagggtaactattcatgcgttgcctctaccgagttggacgtcgtggaatccagagcccaactgcttgtcgtcggcagccctggccctgtgcctcgtctagtcctatctgatcttcatttactgacacagagtcaggtcagggtcagctggagtccggcagaggaccacaacgcccccatcgagaagtacgatatcgagttcgaagacaaagaaatggcgcccgagaagtggtacagccttggaaaggtgccagggaaccagacctctaccacccttaaactttctccctacgtgcactatacatttcgtgtgaccgcgattaataaatacggcccaggagaaccatcacctgtgtcagagaccgtggtgacacccgaggccgcgcctgagaagaatccggtggatgttaaaggagaaggcaacgagactacgaatatggtgattacttggaagccactgagatggatggattggaatgctcctcaggtgcaataccgagtgcagtggcgtccgcaaggcactcgggggccatggcaggagcagattgtgtcagacccttttctcgtagtgtccaacacatcgacctttgtgccgtacgagatcaaggttcaggccgtcaatagccaaggcaagggacccgagccgcaagttaccatcggctattcgggtgaagactatcctcaggccattcctgaactagaaggcatcgagatcctaaactcttccgccgtgcttgtgaagtggcgtccagtagacttggcccaggttaagggccatttgcgcggatacaatgtgacctactggcgcgaggggtcgcagcgcaagcactccaagagacatattcataaagatcatgtggtggttccagctaacacaacgtcagtgattctgagcggtctcaggccatattcttcctaccacctggaggtgcaggcctttaacggaaggggcagtgggcctgcctcagagtttaccttcagcacaccggagggcgtgccagggcatccagaagcactgcatctggagtgtcagtctaacaccagtctgcttctccgttggcagccccccctatcgcacaatggggttcttacaggctacgtgctttcttaccaccctctggacgaggggggaaaaggccagctttcattcaacttaagggatccagagttaagaacccataaccttacggatttgagtccccacttaagatatcggttccagctccaggccactacaaaagaaggcccaggcgaagccatagttcgcgaaggcgggacgatggccctcagtggaatcagcgacttcggtaatatttccgccactgctggagagaattactctgtggttagctgggtaccaaaggagggacagtgcaatttccgcttccacattctgttcaaagccctcggggaagaaaaaggcggagccagcttgagcccccaatacgtgtcctataaccaaagttcctacacccaatgggacctgcagcccgacactgattacgaaatacacctcttcaaggagcgcatgtttaggcaccagatggcagtcaagactaacggcacaggtcgggtcagactgcctcccgccggatttgctactgaaggctggtttattgggttcgtatccgctattatactgctgttgctcgtcctgctgatcctgtgcttcatcaagcgctcaaagggaggaaagtactctgtaaaggacaaggaggatacacaggtcgacagtgaggcaagaccgatgaaggatgaaacgtttggcgaatactccgacaacgaggagaaggccttcggtagttcacagccctcattaaacggggacattaagccgttggggagcgacgactccctggctgactacggcggtagcgtggacgtccagttcaatgaggatgggagctttatagggcagtattccggcaaaaaggagaaggaagccgctggggggaacgattcatcaggagccacatcccccattaatccagccgtagccctagaatag

SEQ ID NO: 121812 - DNA, 3774 bp, synthetic construct
  misc_feature 1..3774: note = Description of Artificial Sequence: Synthetic coding sequence
  source 1..3774: mol_type = other DNA
atggtggtggcccttcgatacgtttggcccctgcttctttgttccccatgcctcctgatccagataccagaagagtatgagggccaccatgtaatggagcctccagttatcacagagcagtcccccaggcggctggttgtgtttccgactgacgacattagtctgaagtgcgaggccagcggcaaacctgaagtacagtttcgatggaccagggacggggtgcatttcaaacccaaagaagaactgggagttacagtctaccaatccccacattcgggctctttcacgatcactggcaacaactccaatttcgcccagaggttccaaggcatctatcggtgctttgcatctaataaactcggcaccgccatgtcccacgagattcgtctgatggctgagggcgccccaaagtggcccaaagagaccgttaagcctgtggaagtggaagagggggagtctgtggtgttgccatgcaatccacctccaagcgcagagccgctgcgtatctactggatgaattccaagatcctgcatattaaacaggacgagagagtgacaatgggccaaaacggcaacctgtactttgcaaatgtgctgactagtgacaatcattcagattatatttgccacgcacattttcccggcacgcgcacaattattcagaaagagcctatcgaccttcgggtcaaggcgaccaactctatgattgatagaaaaccgcggctgttattcccaacaaactcatcatcacacctggtggctttgcagggccagcctttggtcctggagtgcatcgcggagggattccccacacctactataaaatggctgcgccccagcggtccaatgcccgctgacagagtcacttatcagaatcacaacaagaccctgcagctgctcaaggtaggggaggaggacgatggtgagtatcggtgcctagctgagaatagtctggggtctgctcgccatgcctattatgtgaccgtggaggccgcaccctattggttgcacaaaccccagagtcacttatacggtcctggggagaccgcccgcctcgattgtcaggtccaagggagaccgcaacccgaggtgacttggaggattaacggaatcccagtggaagaattggccaaggaccagaagtatcgcatccagcgcggggcgctgatcctatctaacgtgcaaccctcagatacaatggtgacccagtgcgaagcccggaacaggcacggactgctactggccaacgcctatatctacgtcgtgcagctgcccgcaaagatcctaacagccgacaatcagacatacatggccgtgcaggggagtacggcttatctcctgtgtaaagcgttcggcgcccccgtgccgagcgttcagtggctggacgaagacggcaccactgttctgcaagatgagcgtttctttccgtacgccaacggaacacttggaatcagagatctacaggccaatgacaccggcaggtatttttgcctggccgcaaacgaccagaacaacgttacgatcatggccaacctgaaggtaaaggatgcaacgcagatcactcaaggcccaaggtcgacaatagaaaaaaagggatctcgggtgacattcacatgccaggcttcattcgaccctagccttcagcctagtatcacttggcgcggggacgggagggacctacaggagctgggcgattctgacaaatactttatcgaggacggtcgacttgttatacattccctggattatagtgaccaggggaactattcctgtgtcgctagtacagagctagatgtcgtagaatcaagggctcagcttttggtggtggggtcaccgggacctgtgccccggctagtgctcagcgacctgcacctcctgacacaaagccaagtgagggtttcctggtccccggctgaggaccacaatgcacccattgaaaaatatgatattgagttcgaggataaagagatggcgccagaaaaatggtatagtctgggaaaggtgccagggaatcagacaagtacaacgcttaagctgagcccctacgtgcactatacctttcgggtaaccgccatcaataaatatggtccaggcgaaccgtctcctgtgtcggaaaccgtcgtaacccctgaggccgcacccgaaaaaaatcccgttgacgtcaagggtgagggaaatgagacaactaatatggtaatcacatggaaacctttgcggtggatggactggaacgcccctcaggttcagtaccgggtgcagtggcgccctcagggtacacgagggccatggcaggaacagattgtgtccgacccattccttgtggtctctaatacctcgacctttgtcccgtatgagattaaggtccaagccgtgaactctcaggggaaagggcctgagccccaagtaacgattggatactcaggcgaagactacccccaggctatcccagaactcgaaggaatcgagatcctcaactctagtgccgtgctcgtcaaatggcgccctgtggatcttgctcaggtgaaaggacacctaagggggtacaacgtgacctattggcgcgagggttcacagcgtaaacattccaaacgccatatccacaaggatcacgtcgtggtccctgcaaacacaactagtgtcattctgagtggcctacggccgtacagcagctaccatctggaggttcaagcgtttaatggaaggggttccgggccagctagcgagttcacgttctccactccagaaggagttccaggacatcccgaagcgctgcacctggaatgtcagtcaaacacaagcctgctcttacggtggcaacctcctctgtctcacaatggggtactaacggggtacgttcttagttaccacccattagatgagggcgggaaagggcagctctccttcaatttgcgcgatcccgaattgcggacgcataacctgactgacctgagcccccacctgcgctacaggtttcagctgcaagctacgaccaaagaaggtcccggtgaagcaatagtccgtgaggggggcactatggctttatcgggcatatccgacttcggaaacatcagcgcaactgccggcgagaactacagtgttgtgagctgggttccaaaggagggacagtgcaactttcggtttcatatcttgttcaaggctctcggcgaggagaaaggtggcgcgtccttgagcccccaatatgtgagctacaaccagtccagttatacccagtgggatcttcagccagatacagactacgaaatccacctgttcaaggaaaggatgttccgacaccagatggccgtgaagaccaacggcaccggacgcgtcagattgccgcctgccggcttcgcaactgaaggatggtttattgggttcgtttctgcgattattttactgctgctggtcctgcttattctgtgctttataaagcgatctaagggcggcaaatactcagtcaaggataaggaagacactcaggtggactccgaggcgagaccaatgaaggatgaaacttttggcgagtaccggtctctggaatctgacaatgaggagaaggctttcggctcatcacagcctagcctaaacggggacattaagccattgggctcagatgattcactggcagattatggtggcagtgtggacgttcagttcaacgaagatggcagttttatcggacaatacagcgggaagaaggagaaggaggccgctggcgggaacgattcttccggcgccacaagcccaatcaaccctgccgtcgcgctcgagtag

SEQ ID NO: 121813 - DNA, 3774 bp, synthetic construct
  misc_feature 1..3774: note = Description of Artificial Sequence: Synthetic coding sequence
  source 1..3774: mol_type = other DNA
atggtggtggcactgaggtacgtttggccactcctgctgtgttctccttgtctactgatacaaatcccagaggagtacgaaggccatcatgtcatggagcccccagtgattaccgagcagagcccccgacggctggtcgtgttcccaaccgacgacatctctctgaagtgtgaggcaagtgggaagccagaggtgcaattcaggtggaccagggatggtgttcacttcaaacccaaggaggaactcggtgtgacagtctatcagtcacctcacagtggctcttttaccattacaggtaataattcaaactttgcccaaagattccaggggatctatcgatgctttgcttcgaacaagttagggactgcaatgagccatgagataaggcttatggctgagggcgccccaaagtggccaaaggagaccgtgaagccggttgaagtcgaagaaggcgagagcgtagtgctgccttgcaatccgccgccatcagccgagccactgagaatctattggatgaactcaaagattcttcatattaagcaggatgaacgagtcactatgggtcaaaacggcaacctgtacttcgctaacgtgctcacatccgacaaccactcagactatatatgtcatgcccactttcctggaacgagaacgattatacaaaaggaaccaattgatcttcgggtaaaggctactaacagcatgatagaccggaaacctcgccttctctttccgaccaacagctcaagccacctggttgccttgcagggccagcctcttgtgctggaatgcatcgccgaagggttcccaacccctacaattaagtggctgcggcctagcggccctatgccagctgaccgagtcacctaccagaatcataataagactttgcagctgctgaaggtcggcgaagaagatgatggagagtaccgttgtttagccgaaaattcactgggttcagcacgtcacgcatattacgttacggtcgaagctgccccgtactggctgcacaagccacaatcacatctatatggccctggagagactgcccggctggactgccaggtgcagggccggccccagcctgaagttacatggcgaatcaacggtatccccgttgaggaacttgcaaaggatcagaaataccggatccagcgaggggctctgatccttagtaacgtgcagccaagcgatactatggtgacccagtgcgaagctcgtaatagacacggcctgttactggcgaacgcttatatctacgtcgttcaattacctgccaagatcctaacagccgataatcaaacctacatggcagtacaaggatccaccgcatatctgctctgtaaggcattcggagctccggttccttcggtgcagtggctggatgaggacggaactactgtcttgcaggatgaacggttttttccttacgctaatggtactctaggtattagggatttgcaggcaaatgacactggccggtatttttgcctggccgcaaatgaccaaaataacgtgacaatcatggctaatctgaaggtgaaagatgctactcagattacacaggggcctcgctcaaccattgagaaaaagggaagccgggttacgtttacatgtcaggctagctttgacccctcactccaaccttctatcacgtggagaggggacggaagagatctgcaggaactcggtgatagcgacaagtactttattgaggacggccgattagtaatacatagcctggactacagtgatcagggcaattactcctgcgtggccagcaccgaacttgatgtggtggaatcacgcgctcagttgcttgtcgtgggttcgccaggtccagtgccgaggctggttttgtctgacttacatttactgacacagagccaggtgcgagtttcatggtcccctgctgaggaccataatgcaccaatcgagaagtacgatatcgagttcgaggacaaggagatggcacctgaaaagtggtatagcttagggaaagtaccaggcaaccagacaagcacaacgctgaagctgagtccgtatgtgcattacacattccgggtgacggctatcaataagtacggcccaggtgagcccagcccagtgagcgagaccgtcgtgacgccggaggcggcgcctgaaaagaatccggtggatgttaaaggagaaggaaacgagacgacaaacatggtcataacctggaagccactgaggtggatggattggaacgccccccaggtgcagtatagagttcagtggagaccccaggggaccaggggcccctggcaggaacagattgtttcagacccgttcctcgtggtatcaaatacaagcacattcgtaccctacgaaattaaagtgcaagcagtcaactctcaaggtaagggacccgagccccaggtgactatcggctacagcggagaagattaccctcaggctatccctgagctcgaaggaatagagattcttaactcgagcgccgtgctggttaaatggcggcccgttgatttggcacaggtgaaaggccacttgagggggtacaacgtaacgtattggagagaggggagccaaaggaaacattcgaagcgccatattcataaagaccacgtggttgtgcctgctaacactacttctgtcatcctgagtggccttcgtccctatagtagctatcacctggaggtgcaagctttcaatggccgcgggtccggccctgctagcgaatttaccttctctacccccgaaggagttcctggtcatcccgaggccttgcacctcgaatgccagagtaatacttctctgctgctcaggtggcagccccccttgagccacaacggggtactaacgggctacgtgctatcatatcatcctctggatgaggggggtaagggccagctcagtttcaatctcagggaccctgagcttagaacgcacaatctgactgacctgagccctcacctgcgctatagattccaattgcaggctaccactaaggagggaccaggggaagcaattgtccgcgaaggggggacaatggcactgtctggaatctccgactttggaaacatcagtgccactgcaggggagaactattctgtggtaagctgggtgcctaaagaggggcagtgcaactttcgcttccacattctgttcaaagcccttggggaagagaagggaggagcgagtttgtcccctcagtacgtttcctataatcagtcttcctacacccagtgggatctgcagcccgacacagactacgagatacaccttttcaaggaaaggatgttccgccatcaaatggctgtgaaaaccaatggaaccggccgggtcagattgccccccgccggatttgcaaccgaagggtggttcatcggatttgtaagcgccatcatccttctgctcctggtgttgctgattctctgttttatcaaacgctccaaagggggcaagtactccgtcaaagacaaagaagatacacaggtggactcagaggctcgtccaatgaaggatgaaacttttggtgaatatcgaagtctagaatcagacaatgaggagaaggcctttggaagctcccagcctagtctgaacggagacatcaagccactcggttcagacgactcgttagcggattacggcgggagtgtcgatgtgcagttcaatgaagacggcagctttataggccaatactctggcaagaaggaaaaggaggccgcaggtgggaatgacagctctggagccaccagccccatcaaccccgcagtcgccctcgagtag

SEQ ID NO: 121814 - DNA, 456 bp, synthetic construct
  misc_feature 1..456: note = Description of Artificial Sequence: Synthetic coding sequence
  source 1..456: mol_type = other DNA
atggtcgtggctctaaggtatgtctggcccttgctcctgtgttcaccatgcctgctgattcaaatcccagaggagtacgagggacatcatgtgatggaacctcctgttatcacggagcagagccccaggagattggttgtattccccactgatgatatttctctgaaatgtgaggcttccgggaagccagaagtccagtttagatggacccgggacggtgtgcacttcaagcccaaggaggaactcggggttactgtttaccaaagcccacacagtggatcgtttactattactggcaataactcaaattttgctcagagatttcaaggaatttacaggtgttttgcgtctaacaagctggggaccgctatgagccacgaaatcagactgatggccgagggagctccaaagtggccaaaggaaactgttaaacccgtggaggtggaggaaggctag

SEQ ID NO: 121815 - DNA, 255 bp, synthetic construct
  misc_feature 1..255: note = Description of Artificial Sequence: Synthetic coding sequence
  source 1..255: mol_type = other DNA
atggtagtggccttgcggtacgtatggcccctattattgtgcagcccctgtttattgatacagatccccgaagagtacgagggacatcatgtgatggagccgccggtcataactgaacaaagtcccaggcgactcgtggtattccccacagacgatatttcactgaaatgcgaggccagcggtaaacccgaggtgcagttccgttggactcgggacggcgtgcactttaaacctaaggaggaacttggagtctag

SEQ ID NO: 121816 - DNA, 3768 bp, synthetic construct
  misc_feature 1..3768: note = Description of Artificial Sequence: Synthetic coding sequence
  source 1..3768: mol_type = other DNA
atggtggtggccttgcggtatgtgtggccccttctgctttgctcaccctgtttgctaattcagattcctgaagaaagttttcctggacaccgagtcgtaatggagccacccgtaatcacagagcagtctccccgccgattggtggtgtttccaacagacgatataagtttgaagtgtgaagctagtggtaagcccgaggtacagtttagatggaccagagacggtgtacatttcaaaccaaaggaagagctcggtgtgaccgtctatcagagtcctcattccgggtcatttactattactggcaataacagcaacttcgcccagagattccaaggtatttacaggtgcttcgctagtaacaaactagggactgcgatgtctcacgagattaggttgatggccgagggtgcacccaagtggccaaaagagacagtcaagccagtggaggttgaggaaggagagtccgtggttttaccttgcaatcctccacctagtgccgagcctctgaggatctattggatgaacagcaagatactccatatcaaacaggatgagcgagtcacgatgggccaaaacgggaacttgtacttcgcaaacgtgctcaccagcgacaaccatagtgattacatctgccacgcgcactttccggggaccagaaccatcatccagaaggagccaatcgacctccgggtcaaagccaccaactcaatgatcgatcggaaaccgaggctcctcttccccaccaattccagctctcatctagtcgccctccagggacaaccactcgtacttgagtgcatcgctgagggcttccccacgcccacaataaaatggctgcgcccatcgggcccgatgcctgcggaccgagtgacatatcagaaccacaacaagactctacagcttttgaaagtcggggaggaggacgacggcgagtacagatgcctagcggagaatagtctgggctctgctcggcacgcatattatgtgactgtcgaagcggccccctactggctgcacaagccacagtcccacctctacggaccgggcgaaactgccaggctggactgtcaggttcaaggccgaccgcagcccgaggtcacatggaggatcaatggtatcccagtcgaggagctagccaaagatcaaaaatacagaatccagagaggagcgttgatcctgtctaacgtgcaaccgtccgacactatggtgacccagtgcgaagcgcgtaacaggcacggactgctgctggctaatgcctacatttatgtggtacaattgcccgcaaaaatcctgactgccgataatcagacctacatggctgtacaggggtctacggcctacctcctatgtaaggcttttggtgcacccgtgcccagcgtccagtggttggacgaggacggaactacagtcctgcaggacgaaaggttcttcccatacgctaacggcacgctgggaataagagacctccaggctaacgacaccggccgttacttctgcctggctgcgaatgaccagaacaacgtgacgatcatggccaatctgaaggtgaaggatgcaactcaaatcacgcagggtcccaggtcaacgatcgagaaaaagggctcccgagtgacatttacatgccaagcgagctttgatccctcacttcaaccttctattacctggagaggggacgggagagaccttcaggagctgggagactccgataagtactttattgaggatggaagactagtaattcattccctggattatagcgatcagggaaattacagctgcgtcgcctccaccgagcttgacgtggttgagagccgcgcccaactcctggtagtgggttctcccggtcccgtacctcggctggtgcttagtgacctgcacctgttgacccagtcccaggtgcgtgtgagttggagtcccgccgaggaccataatgctccaatcgagaaatacgacatcgagttcgaggacaaggaaatggctcccgagaaatggtactctctcggtaaagttcctggtaatcagacttctaccactttgaaactcagcccctatgttcattacacatttagggtaacggctataaacaaatacgggccaggcgaacccagtcccgtgtctgagactgtcgtaacccctgaagcagctcccgagaagaatccggtcgatgtcaagggagaaggcaatgaaaccactaatatggtgatcacatggaaacccctaaggtggatggattggaatgcgcctcaggttcagtacagggtgcagtggcgcccccaagggacgagggggccgtggcaggagcagattgtgagtgacccattccttgtcgtaagtaatacctctacctttgtgccatacgaaataaaagtgcaggcagtcaacagtcagggtaaaggaccggagccacaggtaactattgggtattctggggaagactaccctcaggctataccagagttggaaggcattgagatcctgaatagtagtgctgtcctggtcaagtggcgtcctgtggacttagcacaagtaaaggggcatctccgagggtataacgttacatactggcgcgagggcagccagagaaaacattctaagcgccacattcacaaggaccatgtggtcgtacccgcaaatacgacctccgtgatactgtcaggactccggccctattcctcgtatcacctcgaggttcaagccttcaacgggaggggcagtggtccagcttccgagttcaccttctccactcccgagggagtgccgggccaccccgaggccttgcacctagaatgtcagtccaacacctctctcttactgaggtggcaaccgcccctttcgcataacggggtcctgactgggtatgtcctctcgtatcaccccctggacgaagggggtaaaggccagctcagcttcaatctgcgggatcccgagctgcgtacccacaacctgaccgatttgagtccccacctcagataccgcttccaactccaggcgactaccaaggaagggcccggagaggctattgtccgcgagggagggaccatggccctgtctgggatctcagattttgggaatattagcgctacagcgggagagaactactctgtcgtaagctgggtccccaaggaggggcaatgcaactttagattccatatcttgtttaaggctctcggtgaggaaaagggcggagcatccctatccccccagtatgtcagttacaaccagagttcatatacccaatgggacctacagcccgatactgactatgagattcacttattcaaagaacgcatgtttcgacaccagatggccgtgaagactaacgggacaggccgcgtgcggctcccaccagccgggtttgctactgaagggtggttcatcggcttcgtctcagcaatcattctgttattacttgtactgctaattctttgctttattaagcgtagcaaaggaggcaaatattcagtcaaagacaaagaagacactcaggtcgacagcgaggcaagacccatgaaagacgaaacatttggggagtacagtgataacgaggaaaaggcgttcggatcaagtcagccatccctgaacggagatatcaagccattgggcagcgatgattctctggccgattacggcggcagtgtcgatgtccagtttaacgaagacgggagttttatcggacagtattcaggtaagaaggaaaaagaagccgccggtggaaatgattcttccggagcgacaagccccatcaaccctgccgtggcgcttgagtag

SEQ ID NO: 121817 - DNA, 351 bp, synthetic construct
  misc_feature 1..351: note = Description of Artificial Sequence: Synthetic coding sequence
  source 1..351: mol_type = other DNA
atggctgaaggtgctccgaaatggccgaaggaaactgttaagcccgtggaagtggaggaaggtgaaagcgtcgtacttccgtgcaaccccccccctagtgccgagccattgagaatctattggatgaatagcaagattctgcatataaagcaggacgagcgcgttacaatgggtcagaacggcaatttgtactttgccaacgtcctaaccagcgataaccactcggactacatctgtcacgcccatttccctgggacaagaaccatcatccagaaggaacctatcgacctgagagtgaaggcgactaatagcatgattgacagaaaaccacgattactgtttcctacttag

SEQ ID NO: 121818 - DNA, 3780 bp, synthetic construct
  misc_feature 1..3780: note = Description of Artificial Sequence: Synthetic coding sequence
  source 1..3780: mol_type = other DNA
atggtggtggcgttgagatacgtgtggcccttgctgctgtgctctccctgcctcctcatccagattccagaggagagtttccccggacacagggttgtgatggaacccccagtgatcaccgagcagtcccccaggagactcgtagtcttcccaactgatgacatcagcctgaaatgcgaggcaagcggcaaacccgaagtccagttcagatggacccgcgacggtgtacacttcaaacctaaagaggagttgggcgtcactgtgtatcagtcaccccacagcggcagcttcaccatcaccggcaataactccaattttgcccagcgatttcaaggcatctaccgttgctttgcctctaacaagctcgggactgccatgagtcatgagattcgtttaatggccgaaggtgccccaaaatggcccaaggaaactgtcaagcctgttgaggtggaagagggtgaatctgtggtgctgccgtgcaaccctccacctagcgccgagccactgcgcatttattggatgaattcaaagatattacatatcaaacaggatgaacgggtgaccatgggacagaatggtaatctctactttgcaaatgtgctgacaagcgacaaccacagtgactacatatgtcacgcccattttccaggcaccaggaccatcattcagaaggagccaatcgacctccgggtaaaggcaactaactccatgattgaccgtaagccgcggctcctgtttcctactaactcctctagccacctggtcgcgctgcagggacaacccctagtactagagtgtattgccgaaggattcccgacgcctacaattaaatggctccgtccatccggcccgatgccagcggaccgagtgacttaccagaaccacaacaagaccctgcagctgctcaaagtaggtgaagaggacgatggagagtatcgttgcttagctgaaaattccctggggtcagctagacacgcctactacgtgactgtcgaagccgcaccatactggttacataagccgcaatctcacctctacggccccggtgaaaccgcccgactggactgccaggtgcaggggcggcctcagccagaagtgacatggcggataaatggcattccggtggaagagctggcgaaagaccagaagtaccgcatacagcggggggctctcattctgtccaacgtgcaaccttcagataccatggttacccagtgcgaagcccggaatagacatgggcttctccttgccaacgcgtacatctacgtagtgcagctgccagctaagattctgaccgcagacaaccaaacttacatggctgtgcagggaagcacagcctacctattatgcaaggctttcggggctcccgtccctagtgtacagtggctggacgaggacgggacgaccgtactccaggacgagcgattctttccgtatgctaacggtacattaggtattagggatttgcaggcaaacgacacaggaaggtatttttgtctggcagccaacgatcaaaacaacgtgaccatcatggctaatctgaaagtaaaggatgcgacccagattactcagggtcctcggtcaacaatcgaaaaaaagggcagcagggtgacattcacttgccaagcctcttttgacccatctctccaaccctctatcacttggagaggagatggcagggacttacaggaactcggcgactctgataaatacttcatagaggatggccgtttagtgatccacagcctggactactccgaccaagggaactattcctgtgtcgcttcgacggaactggacgtggtggagagcagagctcaattgcttgttgtgggatctcctggacctgttccaaggctggtactatctgacctccacttactgacacagtcccaggtccgggtgtcatggtcccctgctgaggaccataacgcccctattgaaaagtatgacatcgaatttgaggataaggaaatggccccagagaagtggtattcccttgggaaagtaccaggcaatcagacgtctacaactctgaaactatctccgtatgtccactacaccttcagggtgacggcaataaataagtatgggcctggggagccatctccagtgtccgagacggttgtaacccctgaggctgccccagagaaaaacccagtcgatgtcaagggggaaggtaacgagaccactaatatggtaatcacctggaaaccgctgagatggatggattggaacgccccccaggtgcaataccgcgtgcagtggaggccccagggaactcgggggccatggcaagagcagattgtgtccgatccatttctagtggtgtccaataccagcacttttgtgccgtacgaaattaaggtccaggctgtgaatagccagggtaagggtcctgagccacaggtaacaatagggtattctggagaggactatccgcaggcgattccggagctcgaaggaattgaaatcctgaacagcagcgctgtgcttgtcaaatggaggcctgtggatctcgctcaggtcaaaggtcacctgcgcggatacaacgtcacctactggcgcgaaggatcacagcggaagcactcaaagagacacatccacaaggatcacgtggtagttcccgccaacacgacaagcgttattctttctggtctgaggccttattccagctatcatttggaggttcaggcattcaacgggaggggttccggaccggctagcgagttcacatttagcacacccgaaggagtgccgggacatccggaggccttgcacctggagtgccagtccaatacatcactactgctgcgttggcagccacctctcagtcataatggtgtcctgactgggtatgtactgtcctatcatcctctggacgagggcggaaagggccaactgagcttcaacctccgagacccagaactgagaacacataatttaacggacctgagcccacacctcaggtatcgattccaattacaggccacaacaaaagagggtccgggggaggcgatcgtccgcgaaggtggcactatggctctttccggtatttcggatttcgggaacatttccgcaactgccggagagaactattccgttgtcagctgggttcctaaggaagggcaatgcaacttccggtttcatatattattcaaggctctgggagaagagaagggtggcgccagcctctctccacagtacgtttcgtataaccaaagttcgtacacacagtgggatctgcagccggacacggattacgagatacatctctttaaggaacggatgtttcgccatcagatggctgtgaagacaaacggcaccggccgcgtgaggctgccaccagccggatttgcaaccgagggctggtttatcggatttgtcagcgctattatcttgctgctgctcgttctactcattctctgcttcatcaagcgcagtaaaggcggaaaatacagtgtgaaagataaggaggacacccaggtggatagtgaagccagacctatgaaggatgaaaccttcggtgagtatcgctccctggaaagcgacaatgaggaaaaagccttcggatcgagccagccaagtttgaacggggacatcaaacccttggggtccgatgacagcttagccgattacggcgggagcgttgacgttcaattcaacgaggacggatctttcatcgggcaatacagtggaaagaaagaaaaagaagccgctggagggaacgattcatctggcgccaccagcccaatcaatccagctgtggccctggagtag

SEQ ID NO: 121819 - DNA, 1326 bp, synthetic construct
  misc_feature 1..1326: note = Description of Artificial Sequence: Synthetic coding sequence
  source 1..1326: mol_type = other DNA
atggttccagcccttagatatcttgtgggggcatgtgggcgggccagaggcctgttcgctggcgggagccctggagcctgcggattcgccagcggtcggccccggcccctgtgcgggggatcccgaagcgcctctacaagcagctttgatattgtgattgtgggaggagggatcgtaggactggcttccgctcgcgccctaattctgagacaccccagcttatctatcggggttctggagaaggaaaaagacctggccgtacaccagacgggccataactcaggcgtgatccactccggcatatactataagcctgagagtctgaaagctaagctgtgcgtgcagggggctgcacttctgtacgaatattgccagcagaaggggatctcttacaagcagtgtggaaagctgattgtggccgtggaacaggaggagattcctagattgcaggccctgtatgagaaggggctccaaaacggagtgcccggcttacggctgatacaacaggaagatatcaagaagaaggagccatattgtaggggcctgatggccattgactgcccacacaccggcatcgtcgattatcgccaggttgcactctccttcgcccaagattttcaggaagcaggcgggagcgtgttaaccaactttgaggttaagggaattgagatggccaaagaaagcccatctcgctctatcgatggcatgcaatatcccatcgtgatcaaaaataccaaaggagaggagattaggtgccagtacgtcgtgacatgtgctggcctgtactctgatagaatcagcgagctgtccgggtgcactcctgatccccggatagtacctttccggggtgactatctgctactgaaacccgaaaaatgctacttagttaaggggaatatatatccagtgcccgattcccgatttccattcctcggcgtgcacttcactcctcggatggatgggtctatctggttgggaccaaacgcagtgctggcctttaagagggaaggttatagaccttttgactttagcgccacagacgtcatggacattattattaactcaggactgatcaagctggcatcgcagaacttttcatatggagtaaccgaaatgtacaaagcgtgtttcctcggcgccactgtaaaatacctgcagaagtttattcccgagataactatctctgacatcttgcgccaggtcgccgtgcgcggccctagctggctgtggcagcagccaatgaaagtgtcggacaataatatatactgtttcctgtggcgctgcttcgctttactgctcacaggaagcgcctgttccttcaaatag

SEQ ID NO: 121820 - DNA, 1392 bp, synthetic construct
  misc_feature 1..1392: note = Description of Artificial Sequence: Synthetic coding sequence
  source 1..1392: mol_type = other DNA
atggtgccggcccttagatacttagtgggcgcctgtggccgggcaagaggcctgttcgccggcggcagtccaggagcctgtgggtttgcgtccggcaggccccgccccctgtgtgggggctctagatcagctagtacgagttcttttgacatagtgattgttggcggtggaatagtcgggttggcatcagcccgggctctcatcctgcgacacccgagtctaagcatcggggtactcgaaaaagaaaaggatctcgcagttcaccagaccggtcataactctggcgtaatccactcaggcatatattataagcctgaatccctcaaagccaaactgtgcgtgcagggcgccgcactcctctatgaatattgtcaacagaaggggatttcctacaagcagtgcggtaaattaatagtcgccgttgagcaagaagaaatcccacgcttgcaggctctctatgagaaggggcttcagaacggggtgccaggactcagactgattcagcaggaagatatcaagaagaaggaaccgtactgccggggccttatggccattgactgccctcatacaggcattgtggactacaggcaggttgccctatctttcgctcaggactttcaggaggctggtggatcggtgctgaccaatttcgaggtaaagggtattgaaatggccaaggaaagcccatctcggtccattgacgggatgcagtaccccatcgtgattaagaacactaaaggagaagagattagatgtcagtacgtcgtgacatgtgcagggctgtattctgatcggattagcgaattgtcaggctgcaccccagacccccggattgtccccttccggggagactacctgctgctgaaacctgagaaatgctatttggtgaagggtaacatttaccccgtgccagactcccggtttccattcctgggagttcactttactccaagaatggacggctccatctggctggggcctaacgccgtgctggcatttaagcgtgaaggttacaggccctttgactttagcgcaaccgatgtcatggacataatcatcaattccgggctgatcaagttagcttcccagaacttctcctatggtgttactgagatgtataaggcatgcttccttggggcgacagtaaagtacctgcagaagtttattcccgagattactattagcgatatcctgcggggacctgctggagtgcgagctcaggccctcgaccgagatggcaatctagtagaagatttcgtttttgatgccggagtgggcgacatcgggaatagaatccttcacgttagaaatgcaccgtctccagcagctaccagctctatcgctattagcggcatgattgcggatgaggtccagcaaagattcgaattatag

SEQ ID NO: 121821 - DNA, 1392 bp, synthetic construct
  misc_feature 1..1392: note = Description of Artificial Sequence: Synthetic coding sequence
  source 1..1392: mol_type = other DNA
atggttcccgctctgcgttacctagtgggggcttgcggccgagcccgcggtcttttcgccgggggttctccgggagcttgcggttttgcctcaggccgcccccgcccactgtgcggcgggtctcgtagtgcatccactagcagtttcgacatagtgatcgtggggggagggatagtgggtctggcctccgccagagccctaattctgcggcacccgtccctcagtataggagtcttagaaaaggaaaaagacttagctgttcaccagactgggcacaactcaggagtgatccattcaggaatctactataaacccgagtcactgaaagccaaactttgcgtacagggagccgcccttctctatgagtattgccagcagaaaggcatttcttacaaacagtgtgggaaactaatcgtcgccgtcgagcaggaagaaatccctcgtctgcaagctctatacgaaaaaggcctgcagaatggggttccagggctccgactgatccagcaggaggacatcaagaagaaggagccatattgccgcggcctcatggcaattgactgcccacacaccggcatcgtggattaccgtcaggtggccctctccttcgcccaggatttccaggaggcgggggggtcggtccttacaaactttgaggtgaagggcatagagatggccaaggagagcccctctaggtcaatagatggaatgcagtaccccattgttattaaaaataccaagggcgaggagatcaggtgtcaatacgtcgtaacatgtgcaggcttatattccgaccgtattagtgaactgtctggctgtaccccagaccccagaattgtgccatttcgaggagactacttactgctcaagcctgagaaatgctatctcgttaagggaaacatatatcccgtgccagacagccgattcccatttcttggggtgcactttacgcctaggatggacggctcaatatggttgggaccgaacgctgtcctggcgttcaaacgcgagggctatcgcccatttgatttcagcgcgactgatgtgatggatataataatcaactccggcttaatcaagctggctagccaaaactttagctacggagtgaccgaaatgtacaaagcctgctttctcggcgccacagttaagtatctgcaaaagttcatcccagagatcacaatttctgacattctccgaggaccagcgggggtccgagctcaagcactggatagagacggaaatctcgtcgaagattttgtcttcgatgccggtgtcggggatattggtaaccgtatcctgcatgttaggaacgcaccgtcccctgctgcaactagctcgatcgcgatttccggcatgattgctgatgaggttcaacagaggttcgagttgtag

SEQ ID NO: 121822 - DNA, 3060 bp, synthetic construct
  misc_feature 1..3060: note = Description of Artificial Sequence: Synthetic coding sequence
  source 1..3060: mol_type = other DNA
atgctgtggcgggtcttgcttagtaagcgccctcctttcccccaccctgaactggattttcaggaagcccccatcccgagctgtccaggacgcctaccaggacgaaaaaacagcgtggctctcgcggcggcgccacgcaaagagcctaccggtgaccgcgaaaaaccattgccgttcccagtactggcgccctttagtaatccagagcactccgcaccggcaaaagtggtccgcgccgccgtgcccaagcagaggaaaggatccaaggtcggggatttcggtgacgccatcaactggcctacacccggcgaaatcgctcataagagtgtccagccccaatcccacaagccccagccaacacgcaagctgccgcctaagaaggatatgaaggaacaggagaaaggcgaagggagcgattcaaaggagagccccaagacgaaaagcgatgagtctggtgaggaaaaaaacggcgatgaagattgtcagcgaggtggccaaaaaaaaaaaggcaacaagcacaagtgggtgcccctgcagatagatatgaagccagaagtcccccgcgagaaactagcatctcgcccaactagacctccagagccccgacacatcccagctaataggggcgagataaagggatcagagtcagcaacatatgtgccagttgctccacctacacccgcctggcagcctgaaattaagcctgagcctgcctggcatgatcaggatgagactagcagcgtgaaatccgacggtgctggtggcgcgcgggcctcttttagaggccggggtaggggtcggggcaggggcagaggcagaggccgaggtggaacacggacacactttgattaccagttcggatacagaaaatttgacggagtcgaaggtccgagaacaccgaagtacatgaataacatcacatattatttcgataatgtgtctagcactgagctgtactccgtggatcaggaacttctgaaggactacattaagcggcagattgagtattacttcagtgtcgacaaccttgaaagagatttcttccttcgaaggaagatggacgccgacggtttcttgccgattacactcatcgcaagttttcaccgggtccaggcccttacaacagacataagcctcatattcgccgcgctgaaggattccaaagtggtggaaatagtcgacgaaaaggtgagacgccgggaagaacctgagaagtggccactccctcctattgtggattatagccagacggacttttcacagctcctcaactgtccggagtttgttccgcgccagcattaccagaaagagaccgagagcgctcccggcagtcccagggccgtgacccccgtacccaccaaaactgaggaagtgagcaacttaaagacgctgccgaagggcctatcagcaagcctcccggatttggactccgagaattggatcgaggtgaaaaagcggcctcgcccttctcctgcccgacccaagaaatccgaggaatctcgcttcagtcatctcacctcactaccacaacaactgcccagtcaacaactgatgtctaaggatcaagacgaacaggaggaattggactttctatttgatgaggaaatggaacaaatggatggtaggaaaaacaccttcactgcgtggagtgacgaggagtcagactacgagatagacgatcgagacgtaaacaagatccttatcgtgactcaaaccccacattacatgaggcgacacccggggggagacagaaccgggaaccacacctcccgggctaagatgtctgctgaactggccaaggtgattaatgatgggcttttttactacgagcaagacctatgggccgagaagttcgagcctgagtacagccagatcaaacaggaagtggaaaacttcaagaaagtgaatatgatttcaagggagcagttcgatactttgactcccgagcctccggtggaccccaaccaggaggtgcctcccggccctccccgattccagcaggtgccaaccgatgctttagccaacaagctgttcggagccccagaaccctcaacaatcgctcgaagtttgccgacgaccgtgccagaatcgccgaactacagaaatacacgcacaccccgtacgccacggacgccccaactgaaagactcctcccaaacatcaagattctatccagttgttaaggaggggcgaactttggatgctaaaatgccaaggaaacgaaaaacccggcacagctcaaatcccccactcgaatcccatgtgggatgggtgatggattctagggagcacaggccaaggaccgcctcaatttcatcaagtccgagcgagggcacacctacagtgggatcatacggctgcacaccccagagcctgccgaagtttcagcaccccagtcatgagctcttgaaagagaatgggttcacccagcacgtgtatcataaatatcggcgccgctgcttgaacgaacggaaaaggttaggcatcggccagagtcaagagatgaatactctttttcgcttctggagcttttttttgcgcgaccattttaacaagaaaatgtatgaggaattcaagcagcttgccttggaagacgcaaaggagggctaccgttacggtctggaatgcctctttcgttattattcctacggcctcgaaaagaagtttagactcgatattttcaaggactttcaagaggagactgttaaggactacgaagctggtcagctgtacggccttgagaagttctgggcgtttctgaagtactccaaagctaagaatttagacattgatccgaaacttcaggagtatctgggaaaattcaggcggttggaggattttcgcgttgaccccccaatgggcgaggagggcaaccacaagaggcatagtgtagtggctggcggcggggggggggaagggcggaaaaggtgtccttcccagtcgagctcaagacccgcagcaatgatatctcaacctcccacaccgcccactggtcaacccgttcgggaagacgcgaagtggacctcacagcattctaacactcagaccctgggaaaatag

SEQ ID NO: 121823 - DNA, 2451 bp, synthetic construct
  misc_feature 1..2451: note = Description of Artificial Sequence: Synthetic coding sequence
  source 1..2451: mol_type = other DNA
atggctacccaggtagaacccctcctccccggcggcgcaacactactccaggccgaggaacacggagggctggttcgaaagaaacccccgccagcccctgaggggaaaggagagcccgggccaaatgatgtgagagggggagagccggatggaagcgcgaggaggccgcgccctccctgtgctaagccccataaggaaggtaccggacaacaggagcgagaatctccccggcccctgcagttgcccggggctgaaggacccgccatctctgacggagaagagggcggtggggagccaggcgcaggggggggcgcggccggcgcagctggtgccgggaggcgcgacttcgtggaagccccaccccccaaagttaatccctggaccaaaaatgcactgccccctgtactaactaccgttaacggacagtccccccctgaacatagtgcccctgccaaagtggttcgggccgctgtccccaagcagcgaaaaggcagtaaggttggtgacttcggcgacgctattaactggcccactcccggcgaaattgcacacaagtccgtgcagccgcagtcacacaagcctcagcctacaaggaagcttccccctaagaaggacatgaaagaacaggaaaagggggaaggctcagatagtaaggagagccccaagaccaagagcgacgaatcaggcgaagagaaaaatggagatgaggactgccagcggggtggccaaaaaaaaaaagggaataaacacaaatgggtaccattgcaaatcgatatgaaacctgaagttccccgtgagaagctggcatcacggccaactagaccaccagagcccaggcacatcccagctaatcgcggcgaaataaaagggagtgagagcgccacctatgttccggtggcaccacccaccccagcttggcagccagagatcaaacccgagcccgcctggcatgatcaagatgaaacttcatctgtgaaatcggatggagctgggggcgctagggccagttttaggggccgggggaggggtcgagggaggggacggggtagaggaaggggaggtacacggacacactttgactaccagttcggctataggaagtttgatggcgtggaagggcccaggaccccaaaatacatgaacaatattacatattactttgataacgtgtcttctacagagctgtactcagtagaccaggaacttcttaaggactatattaaaagacagatcgagtattatttctctgtggacaacctcgagcgggatttttttctgcggagaaagatggacgcggatggttttctgcctatcaccctaatagctagctttcaccgggtccaggccctgacaacagacatcagccttatctttgcggccctcaaagatagcaaagtcgtggaaatcgtggacgagaaagtccggcgcagagaggagcccgagaaatggccattaccgcctattgtggactactcccaaaccgacttttcacaattgctcaattgtccagaattcgtccccaggcagcactaccagaaggagacggagtccgcccctgggagcccccgggcagtgacccctgttccaactaaaactgaggaagtcagtaacctgaaaaccctcccaaagggcctttccgctagcctcccagatctcgacagcgagaattggattgaagtgaaaaaacggccaaggccctctccagctcggccgaagaagagtgaagagagccgtttttcccacctcacttcactgccacagcagttgccctcacagcagctcatgagtaaagatcaagacgagcaggaagagctggacttcttgttcgacgaggagatggagcagatggatggcagaaagaatacttttacagcttggagtgatgaagagtctgactacgagattgatgacagagatgtcaacaaaatcctgatagttactcaaacgccgcattatatgcgtagacatccaggcggcgaccggactggcaatcatacctcgagggctaagatgagcgctgaattggccaaagttataaacgatggcctgttttactatgagcaagacttatgggccgagaaatttgagccagaatactcacaaatcaaacaggaagtggaaaacttcaaaaaggtgaatatgatctcgcgcgagcagttcgatacgctgactcccgaacctccagtagaccctaatcaggaagtgcctcctggccctcctaggtttcaacaggtgcctacagacgccctggcaaataaactgtttggggccccagagccatcaacaatcgcacgatccctgcctaccaccgtgccagagagcccaaactataggaatacccgaacacctcgtacgccacgcacaccacagcttaaagactctagtcaaaccagtagattttacccagtcgtgaaggaaggcaggacactggatgcaaaaatgccaaggtag

SEQ ID NO: 121824 - DNA, 282 bp, synthetic construct
  misc_feature 1..282: note = Description of Artificial Sequence: Synthetic coding sequence
  source 1..282: mol_type = other DNA
atgaaagagcaggaaaaaggtgaaggaagtgacagcaaggaatcgcccaagactaagagcgacgaaagtggggaggaaaagaacggggacgaggactgtcagaggggtgggcagaaaaagaaggggaataaacataagtgggtgccactgcagatcgatatgaagcccgaggttcccagggagaagttagccagcagaccaacccgccctccggaaccacgccatatccccgccaaccgtggcgaaatcaaggggagcgagagcgcaacgtacgtgccatag

SEQ ID NO: 121825 - DNA, 1836 bp, synthetic construct
  misc_feature 1..1836: note = Description of Artificial Sequence: Synthetic coding sequence
  source 1..1836: mol_type = other DNA
atgaaagaacaggagaagggtgagggcagtgattctaaggagtcaccaaaaaccaaaagcgatgagtcaggcgaagaaaaaaatggcgacgaggactgccagcgaggtggacagaaaaagaagggaaataaacacaagtgggtccctttacagattgacatgaagcctgaggtgcctagggaaaagttagcgtctcgacccacacgaccgccagagccgcgccatatccccgcgaatagaggagagattaaaggatccgaatctgcaacctatgtgcccgtggccccccctaccccggcctggcagcctgagataaaacctgaacctgcctggcatgaccaggatgagacatcctcggtaaaatcggacggcgcaggaggagctagggcctcttttagagggcgaggtcgcgggagaggtcgtggcaggggtcggggaagaggtggtacaagaacacactttgactaccagttcggctatcgcaaattcgatggggtggaaggtcctagaacccccaaatatatgaataacataacgtattacttcgacaatgttagttctaccgaattgtatagtgttgaccaggaactgttgaaggattacataaagcggcagatcgagtattacttttccgtggataatctcgagcgtgacttcttccttaggcgtaagatggacgctgacggcttccttccaatcaccctcattgccagcttccatcgggttcaggcattaacaaccgatatcagtcttatattcgctgctctgaaggactctaaggtggtagagattgtggacgagaaagtgcgcagacgagaagaaccggaaaaatggccactgcctcctattgtggactattctcaaaccgatttctctcaactactgaactgtcccgaattcgtgccccgccagcattaccagaaggagaccgagagtgcccccggcagccctcgcgctgtgacgcccgtcccgacgaagaccgaagaggtcagcaatctgaaaactctccctaagggactctccgccagtctgccggatctggattcagaaaactggattgaggtgaagaaaaggcctcgtccaagtcctgcccggcctaaaaagtcagaagaatctcggttcagccatctgacttcccttccacaacagctcccatcacagcagctcatgagcaaggaccaggacgaacaggaggagctcgattttttgtttgacgaggaaatggaacagatggacggtcgcaaaaacacatttaccgcatggtcagatgaggagtccgactatgaaatcgacgaccgagacgtaaacaaaattctgattgtgacacagacaccacattacatgcgccgtcatcccggaggggatcggacagggaatcacacctcaagagcgaaaatgagcgcagaactggcgaaggtcatcaacgacggactgttctattatgaacaagatctgtgggccgagaagttcgaaccagagtactcacagatcaaacaggaagtagaaaacttcaaaaaagtgaacatgatctcaagggaacaattcgatacacttacacccgagccccccgtggaccccaatcaagaggtgcccccgggacccccaagatttcagcaggtgcccacagatgcactggccaacaagctgtttggtgcacccgagccatctacaatcgccaggagtttgcccacgaccgttcctgagagccccaactatcggaataccaggacccctagaacccctcgtactcctcagctcaaggactcatctcagactagccgattctacccggttgttaaagaagggcgtacactggatgcgaaaatgcccagatag

SEQ ID NO: 121826 - DNA, 1749 bp, synthetic construct
  misc_feature 1..1749: note = Description of Artificial Sequence: Synthetic coding sequence
  source 1..1749: mol_type = other DNA
atggagaccgaatcagggaaccaggaaaaagtgatggaggaggagtccacagaaaaaaagaaagaagtggagaaaaaaaagcgaagccgcgttaagcaagttcttgccgacattgcgaaacaggtggatttttggttcggcgacgccaacttgcataaagatcgattcctgagagaacagatcgaaaagtccagagatgggtatgtcgacataagtctgctggtgtcttttaacaagatgaagaagttaacaacggatggcaagctcatcgccagggccctcaggagctcagctgttgtcgagctcgatctggagggcactcgaatcagaaggaaaaagcctttgggggagagacccaaagacgaggacgaacgcacagtttacgtagagttgctgccgaaaaacgtcaaccattcatggattgagagggtcttcggcaaatgcggaaacgtggtctatattagcatcccacactacaagtccaccggcgaccccaagggattcgcttttgtggaattcgaaactaaagaacaggccgcaaaggcaattgaattcctcaataatccccctgaggaggcaccccgcaaacctggcatattccctaaaaccgttaagaataaacctatcccggccctacgcgttgtggaggaaaaaaagaaaaagaaaaagaagaagggccgcatgaagaaggaggataatatccaggcaaaagaagaaaatatggacacctctaacacttccatttcaaagatgaaaagaagcagacctacttcagagggctcagatatcgaaagcaccgaaccacagaaacagtgctcaaagaaaaaaaagaaaagggaccgcgtggaagcctcctcattgccagaagtccgaaccggcaagagaaagcgaagctcttcagaggatgccgaaagtttggcacctaggtctaaggttaaaaagatcatccaaaaggacattattaaggaggcttccgaggctagcaaggagaatcgggacatcgaaattagcactgaggaagaaaaggataccggtgatctgaaggacagcagtcttttgaagacaaaacgcaaacacaagaagaaacataaggagcgacataaaatgggcgaggaagtgataccgctaagagtgctgagtaagagtgagtggatggatttaaagaaagaataccttgcgttgcagaaagcttctatggctagtctgaagaagaccatttcacaaattaagtcagaatccgaaatggaaaccgattccggcgtgccacaaaatacgggcatgaaaaacgagaaaacagctaacagagaagagtgccggacacaggagaaggtgaatgcgactggtccccagttcgtatccggagtaatcgtcaaaattatcagcactgaacctctacccggccggaagcaagtgagagataccctagctgccatttccgaggtactctatgtagacctactggaaggagacaccgaatgccacgcccgattcaagacccctgaagacgcacaggccgtcataaatgcctatacagaaatcaacaagaagcactgctggaagctggaaatactctctggagaccacgaacagaggtactggcagaaaatattggtagatcgccaggcgaagctgaatcagcctcgggaaaaaaagcgaggcacagagaagttgattactaaggcagagaaaatcagactggctaagactcagcaggcaagcaagcacatccggttctctgagtacgactag

SEQ ID NO: 121827 - DNA, 1749 bp, synthetic construct
  misc_feature 1..1749: note = Description of Artificial Sequence: Synthetic coding sequence
  source 1..1749: mol_type = other DNA
atggagacagaatctggcaaccaggagaaggttatggaggaggagtctaccgagaagaagaaggaagtggagaaaaaaaaacggtcacgggttaaacaagtgctggccgatattgctaaacaggtcgatttttggttcggtgacgcaaatctccacaaggataggttcctgcgagaacaaattgagaagagccgggacggatatgttgatatctccctgttagtgtccttcaacaagatgaaaaaactcacaacggacggaaagttgatcgcccgcgcgttacgctcctccgcagtcgtcgaactcgatctcgaaggtactcgcatccggagaaaaaaacccctcggcgaaaggccaaaagacgaggatgagagaactgtctacgttgaactgctacctaaaaatgtgaaccatagctggatcgaacgggtgtttggcaaatgcggcaacgttgtgtacatttctattccacactataagtcgaccggcgaccctaaagggtttgcttttgtggagttcgagacaaaggaacaggctgcaaaggctattgaatttctgaataaccctcctgaggaggcaccccggaaaccaggaatcttccccaaaaccgtgaaaaataagcctattcctgcattgagggttgtggaggaaaagaaaaagaaaaaaaaaaaaaagggccgcatgaaaaaggaagataacatccaggctaaagaagaaaacatggacacaagtaatactagtatctctaaaatgaaacgaagtcgccctacctccgagggatctgatatcgaatcgaccgaaccccagaagcaatgctcaaaaaaaaaaaaaaaaagagatagagtcgaggcctcatccctccctgaggtgcgaactggaaaaagaaagcggagctcaagcgaggacgctgaaagtctggctcccaggtcaaaagtgaagaagataattcaaaaggatatcatcaaggaggccagcgaggcctctaaggagaatcgagatatcgagatctctaccgaagaagaaaaagacactggggatctgaaagattcaagcttgctgaaaacaaagcggaagcataagaaaaagcataaagagaggcataagatgggtgaggaggtaattccactccgggtcctctcaaagagcgaatggatggatctcaaaaaggaatacttggccctccagaaagcctccatggcatcactgaaaaagaccatttcccagatcaaatctgagagcgagatggagactgatagcggggtgccacagaacaccgggatgaagaatgagaaaaccgccaacagagaggagtgccggacacaggagaaggtgaatgccactggaccccagttcgtttctggcgtgatcgtgaaaataatctcaactgaacctttacccggccggaagcaggttagagatacactggcggccatctccgaggtgttgtatgtagacctgctggagggcgacaccgagtgccacgcgagattcaagacccctgaggatgcgcaggcggttattaacgcgtacaccgagatcaataaaaagcattgctggaagcttgagatcctgtcaggagaccacgaacagcgatactggcagaaaatcttggtcgatcgacaggcaaaacttaaccaaccaagggagaaaaagagaggcacggagaagctgatcactaaagccgagaagatcaggctggccaagactcaacaagcttctaagcatatccgattctccgagtacgactag

SEQ ID NO: 121828 - DNA, 900 bp, synthetic construct
  misc_feature 1..900: note = Description of Artificial Sequence: Synthetic coding sequence
  source 1..900: mol_type = other DNA
atggagaccgagtcaggtaatcaagaaaaagtcatggaagaggagtccactgagaagaaaaaagaagttgagaagaaaaaacgctctcgggttaaacaggtcctagccgacattgcgaaacaggtcgatttctggtttggggatgctaacctgcacaaggaccgttttctgcgagaacaaattgaaaagtcacgggatggctacgtcgacatcagtctgctggtatctttcaataagatgaaaaagctgactaccgacgggaagctgatcgcaagggcactaagatcttctgcggtggtggaattggatctggagggcacaagaataaggcgaaagaagcccctgggcgagagacccaaggacgaagacgagagaaccgtctacgtagagctgctgcctaaaaatgtgaatcacagctggattgagagggtcttcggcaaatgcgggaatgtggtttacatctccatacctcactacaagagcacgggggatcccaaaggcttcgcctttgtggagtttgagaccaaggaacaggcagcaaaagccatcgagttcctgaataacccgcccgaagaggcgcctagaaagccagggattttccccaaaaccgtcaagaacaagccaatccccgctctgcgagtcgtggaggagaagaagaaaaagaagaagaagaaggggaggatgaagaaagaagacaatatacaggctaaggaggaaaatatggatacctcaaacacgagtatcagcaagatgaaacgatcccggcccacttccgaaggatcagatatagaatcaaccgagccacagaagcagtgttctaagaagaagaaaaaaagggacagagttgaggcctctagcttgccagaggtacgtaccggaaaacggaaacgcagctcttag

SEQ ID NO: 121829 - DNA, 390 bp, synthetic construct
  misc_feature 1..390: note = Description of Artificial Sequence: Synthetic coding sequence
  source 1..390: mol_type = other DNA
atggagactgagtcaggcaaccaggagaaagttatggaggaggagtctaccgagaaaaagaaagaagtggagaagaagaagaggtcccgagttaagcaggtgttagctgatattgccaagcaggtcgacttttggtttggagatgctaacttgcacaaggatcgctttttaagagaacagatagagaagagccgtgacggctacgtcgacatatccttgctcgtttcgtttaacaagatgaaaaagttgactaccgacggaaagctaatagctcgggctttgcgatcctcggcagtcgtagagttggatctggagggaacgcgcattaggaggaagaaaccactcggtgagcgcccaaaggacgaggatgagaggacagtctacgtgtag

SEQ ID NO: 121830 - DNA, 360 bp, synthetic construct
  misc_feature 1..360: note = Description of Artificial Sequence: Synthetic coding sequence
  source 1..360: mol_type = other DNA
atggagactgaatcaggcaatcaggaaaaggtgatggaggaagaaagtaccgaaaagaaaaaagaagtggagaaaaagaagcggtcaagggtcaagcaggtgctcgcagatatcgcaaagcaagtagacttctggtttggcgatgctaatctgcacaaggataggttcttaagggagcagatcgagaagagtcgggacggttatgtggacatttctctgctcgtgagcttcaacaaaatgaagaaactgacaacggacggcaaactgatcgctagagcgctgagatcttccgcagttgtggagctggatttagaaggtactcggatccgtcgcaaaaagccgttaggtgagagaccttag

SEQ ID NO: 121831 - DNA, 1770 bp, synthetic construct
  misc_feature 1..1770: note = Description of Artificial Sequence: Synthetic coding sequence
  source 1..1770: mol_type = other DNA
atgattcccaacatcgaaggcatggagaccgagtctggaaaccaggagaaagtcatggaggaggaatctactgaaaaaaagaaggaagtagagaaaaaaaagcgcagtagagtgaagcaagtgcttgctgacatcgcaaagcaggtggacttttggttcggggacgcgaatctgcataaggatcgcttcctgcgggagcagattgaaaaatctcgcgatggttatgttgatatctcattattagtttcttttaacaagatgaaaaagctcaccactgatggaaagctgattgcccgcgctctgagatctagtgcagtcgtggaacttgatctagagggcactaggattcgaaggaaaaaacccctgggagaacgtcccaaagacgaggacgagcgtacagtttacgtcgagctcctgcccaagaatgtgaaccacagctggatcgagcgcgtgtttgggaagtgcggcaatgttgtgtacataagtataccccactacaagtctactggcgatcccaaaggcttcgcatttgtcgaatttgagacgaaggagcaggcagcgaaggctatcgagtttctgaacaatccccccgaagaggcccccaggaaacctggcatatttcctaaaacagtcaagaacaagcctattcccgcactccgagtggtcgaagaaaagaaaaagaagaaaaagaagaaaggtcgcatgaagaaagaagataacattcaagccaaagaggagaatatggacacttctaatacttctatttccaaaatgaagagatctcgaccaacctccgagggtagtgatatcgagagtaccgagccgcagaaacagtgctctaagaagaagaagaaacgcgacagggtggaggcctcgtctctgccggaggtgcggaccggcaaacggaagcgaagcagctctgaggacgccgagtccctggccccacgcagtaaagtgaagaaaataatacagaaagatataattaaagaggcaagcgaagctagcaaggaaaaccgagatatcgaaattagcaccgaagaagaaaaggatactggagacctgaaggattcaagcctactgaagacaaaacggaaacacaaaaagaagcacaaggaaaggcacaagatgggtgaggaagtgataccgctccgcgtcttgagcaaatcggagtggatggacctcaagaaggagtatctggccttgcagaaggcgagcatggcctcactgaaaaagacaatctctcagattaaatctgaaagtgaaatggagaccgactccggagtcccccagaacactggtatgaaaaatgagaaaacagctaatcgcgaggagtgtcgcacccaggaaaaggttaatgcgactgggccccagtttgtgagcggcgtgatagttaagatcataagtaccgaaccactgcctggacgcaaacaagtccgcgacacacttgccgctatttctgaggtgctatatgttgatcttttggagggggacaccgagtgccacgctagattcaagacccctgaggacgcccaagcagtcataaacgcatatactgagatcaataagaagcattgctggaaactggaaattttatccggtgatcacgagcagagatattggcaaaagatcttagtcgacagacaggcaaagctgaatcaacctcgagagaagaaaagggggactgaaaagttgattaccaaagccgagaagattagattggcaaaaacccagcaagccagcaaacacatccgcttcagtgaatatgactag

SEQ ID NO: 121832 - DNA, 417 bp, synthetic construct
  misc_feature 1..417: note = Description of Artificial Sequence: Synthetic coding sequence
  source 1..417: mol_type = other DNA
atgaagttcaccaccctgctcttcctggctgccgtagccggtgcactggtgtacgccgaagatgccagcagtgattcaactggcgctgaccctgctcaggaagctggtaccagtaaaccaaacgaggagatcagtgggccagcggagcccgccagtccccctgagacaacaaccacggctcaggagacttccgccgcagccgtgcagggcacggccaaagtgacgtcatctagacaggagctgaatcccctgaagtctatcgtggagaagagcatcctacttactgagcaggctctggctaaagccggaaagggtatgcacggaggcgtgcccggaggaaaacaattcatagagaacggcagcgaatttgcccagaaactcctgaagaaattttcactgctgaaaccctgggcctag

SEQ ID NO: 121833 - DNA, 429 bp, synthetic construct
  misc_feature 1..429: note = Description of Artificial Sequence: Synthetic coding sequence
  source 1..429: mol_type = other DNA
atgcgcttctttgtgccccttttcttagtgggtattctgttcccagctatattggctaagcagttcacaaagtgcgaactctcccagctgctgaaggatattgacgggtatggaggaatcgctctgccagaactgatctgcactatgttccacacaagtggctatgacacgcaggctatcgttgagaataacgaatctacggagtacggactttttcagatctctaataaactttggtgtaaaagctcacaggttcctcaatcacgcaacatatgtgatatttcatgcgataaattcttagacgatgatatcacggacgatatcatgtgcgccaagaagattctggacataaaaggcatcgactactggctggcacataaagccctctgtacagagaaactggaacagtggctctgtgagaagttgtag

SEQ ID NO: 121834 - DNA, 1644 bp, synthetic construct
  misc_feature 1..1644: note = Description of Artificial Sequence: Synthetic coding sequence
  source 1..1644: mol_type = other DNA
atgtatcgcctcatgtcagccgtcaccgcccgcgctgctgccccaggcggtctggctagctcctgcgggaggaggggagtacaccaaagagcaggccttccacccttgggccatgggtgggtcggtggacttgggttaggactgggtttagctctgggcgttaaattggcaggcgggctacggggggccgcacctgcccagtcccccgcagctcctgaccccgaagcgagcccactcgcagagcccccacaggagcaatccctagcaccatggtcccctcagacccctgccccaccctgttccagatgctttgcgagagctattgagagctcccgcgatctcctgcaccgaatcaaggacgaggtgggagccccagggatcgtggtgggagtctccgtagatggaaaggaagtttggtccgaaggcctgggatatgccgatgtagagaatagggtgccctgcaagccagagactgttatgagaatcgcgtccattagcaagagtctgaccatggtcgcgctggcaaagttatgggaagcgggcaaactcgacctggacatcccagtacaacactacgtcccagagtttcccgaaaaggagtacgagggagagaaagtgagtgtgaccactaggctgctgatttcccacttgagcgggatcaggcactacgagaaggacataaaaaaagttaaagaagagaaagcctacaaggccctgaagatgatgaaggagaatgtggcatttgaacaggagaaggagggaaaaagcaatgagaaaaacgacttcacaaaatttaagactgaacaggagaatgaggcgaagtgcaggaattccaaacctgggaagaaaaagaatgatttcgaacagggagagttgtacctgcgagaaaagtttgagaattctatagagagcttaaggctgttcaagaacgatcccttgttttttaaaccaggctcacaattcctttactctacattcgggtacacactgctggccgccatcgtcgaaagggccagcggctgtaagtatttggattacatgcagaagatttttcacgacttggacatgctaacgactgtgcaagaggaaaatgagccagttatctacaatcgtgccaggttctacgtttataataagaagaagagactagtcaatactccatatgtggataactcctataagtgggcaggaggcggtttccttagcacagtgggagacctgctcaaattcggaaacgctatgctttacgggtatcaggtgggcctcttcaaaaacagtaatgagaaccttctacccggctatctgaaaccggaaaccatggttatgatgtggacacccgttcctaataccgaaatgtcatgggataaagaaggcaaatatgctatggcttggggcgtcgtggaacggaaacagacctatggttcctgtcgcaaacagcgccattatgcttctcacactggcggtgctgtgggagcatcaagcgtccttctagtcctgcctgaagagctcgacactgaaactatcaacaacaaggtgcctccccgtggaataatcgtgtccatcatatgcaatatgcagagtgtgggattgaatagtacagccttaaagattgcgcttgagtttgataaagaccggtctgattag

SEQ ID NO: 121835 - DNA, 1122 bp, synthetic construct
  misc_feature 1..1122: note = Description of Artificial Sequence: Synthetic coding sequence
  source 1..1122: mol_type = other DNA
atgtataggctcatgtctgccgttacagctagggccgccgcccctggtgggctggcctcatcctgtgggaggcgcggagttcaccagcgagccggtttgccacccttaggacacggttgggtaggcggactaggcctcggactgggtctggccctgggcgtgaagctggccggcggactgagaggggccgcaccagcccagtctcccgcggcaccagatcccgaagccagccccctggcggagcccccccaggagcagtccttagccccgtggtccccacaaactcccgcgccaccgtgtagtaggtgcttcgcaagagcaattgaaagcagtagggatttactccaccggattaaggatgaagtgggcgcacctggtattgtcgtaggcgtgtccgtggatggaaaggaagtgtggagcgaggggctagggtatgccgatgtggagaatcgcgttccatgtaaacctgagacagtgatgagaatcgcctcgatttccaaatctctcactatggtagccctcgctaagttatgggaggctggaaagctagacctggacatccccgtccaacactacgtccccgagttcccggagaaggagtacgaaggagagaaagtctcggtgacgaccagactcctcatcagccatctgagcgggataagacactatgagaaggacatcaaaaaggtcaaggaggaaaaagcgtataaagcattgaagatgatgaaagagaacgtggccttcgagcaggaaaaggaggggaagagcaacgaaaagaacgactttacaaagttcaaaaccgagcaagagaatgaggctaagtgtaggaatagtaagcccggtaagaagaagaatgatttcgagcagggggaactgtatttgagggagaagttcgaaaattctattgaaagtttgcggctgttcaaaaacgacccgctgttcttcaagcctggttcccaattcctgtatagcacctttggctatacactactagctgccatcgtggagcgggcctccggctgcaagtatctcgactacatgcagaagatttttcatgatcttgacatgctgacgaccgtccaagaagaaaacgagcctgtaatttacaatagggcccgctag

SEQ ID NO: 121836 - DNA, 5784 bp, synthetic construct
  misc_feature 1..5784: note = Description of Artificial Sequence: Synthetic coding sequence
  source 1..5784: mol_type = other DNA
atggaactgtcttggcacgtggttttcatcgcattgctctcattttcctgctgggggtccgactgggaaagtgatagaaatttcataagcactgctgggccccttacgaacgatttgcttcacaacctcagcgggctgctaggagatcagtccagcaattttgtcgcaggagataaggacatgtatgtatgccaccagcccctgcctaccttcctgcctgagtatttttccagccttcatgcctcccaaatcacacactacaaagtattcctctcttgggcccaactgctacccgccggatcgactcagaacccagatgagaaaactgtacagtgttaccgtagactcctaaaggcgcttaagacagcacggctgcaaccaatggtgatcttacatcaccagacactgcccgccagcactctgcggagaaccgaggctttcgctgacctgttcgccgactatgctacatttgcattccacagtttcggagacttagtcgggatctggtttaccttcagcgatctcgaagaagtgatcaaggagctccctcatcaggaaagccgagcatcacaattgcagactctgtcggacgctcatcggaaggcctatgagatctaccatgagagctatgcgttccagggagggaaactctcagtcgtgctgagagctgaggatatcccagagttgctcctggaaccccctatctcggctctggcccaagacactgtcgatttcctcagcctggacctgtcgtacgagtgtcagaacgaagcttcactgaggcagaaactatcgaagctgcagacaatagagcctaaggttaaagtcttcatcttcaatcttaaattaccagattgccctagtactatgaaaaatccggcatccctgctcttcagcctgtttgaggctattaataaagatcaggttcttaccattggctttgacataaatgaatttctcagttgctcctctagctcaaagaaaagtatgtcatgctcactgacaggttcgctcgccttgcaacctgatcaacaacaggatcacgaaaccactgactctagccctgctagtgcctatcagcggatttgggaggctttcgccaatcagagccgggctgaaagggatgcctttctgcaggataccttccccgaaggctttctgtggggcgccagtacaggtgcattcaacgtggagggggggtgggccgaaggcggtcgcggcgtgtctatctgggatccccgacgccccctcaatacgacggaggggcaggcgactctcgaggtagcctcggacagttatcataaagtggcttccgatgttgcattgctgtgtggattgcgagcccaggtgtataagttttccataagttggtctcggatctttcctatgggacatggctctagtcccagtctgcccggagtagcctactataacaagctgatcgacagactgcaagatgcaggtattgagcctatggctacgctcttccactgggatctccctcaggcccttcaagaccacggaggctggcaaaacgagagtgtggtcgatgcgtttctggattacgccgctttttgcttctcaaccttcggagatagggttaagctgtgggtcaccttccacgaaccttgggtgatgtcttacgccgggtacggaaccggtcaacatccccccggaatcagcgacccaggggtggcgagttttaaagtggcccatctggtgcttaaggctcacgcccggacctggcatcactacaactcacatcatcgcccacagcaacagggacacgtcgggattgtcctgaatagcgattgggccgaacctctgtccccagagaggcctgaggatttgagagccagtgagcggttcctccatttcatgctggggtggtttgcgcaccccgtctttgtagacggggactatcctgcgaccttgcggacacagattcaacaaatgaatcgccaatgttctcaccctgtggcccagttacccgagttcactgaggctgagaagcagctgctgaaagggtcggctgatttcttaggcctcagccattatacatcgcgcttgattagcaacgcaccgcagaacacgtgtatccctagttatgacaccatcggcggcttttcccagcatgtaaatcatgtttggccgcagacctccagctcgtggatccgtgtcgtaccttggggcatcaggcgtctgctgcagttcgtgagtcttgagtatactcggggcaaggtgccaatctacttagccggaaatggcatgcctatcggcgaaagtgagaatcttttcgatgattccttacgcgtggactactttaatcagtatataaatgaagtgcttaaagctatcaaggaggacagtgtggatgttaggtcttatatcgcgcgctctctcatcgacggttttgaaggcccatccggatacagccagcgctttggactgcaccatgtcaatttttccgatagcagcaaaagccgtactccaagaaagagcgcctactttttcacctcaataatagagaaaaatggctttctgacaaaaggcgccaaaaggctgcttcctccaaataccgtcaatcttccatcaaaggtccgtgcctttacatttcccagtgaggtccccagtaaggccaaggttgtctgggagaaattctcctcacagccaaaattcgagcgagacttgttttatcacggtacattcagagacgactttctctggggcgtttcctcttccgcttatcagatcgagggggcctgggatgcagatggaaagggaccaagcatctgggataattttactcatacccctggtagtaatgtgaaagacaacgcgaccggcgacatcgcctgcgactcctaccaccaactggatgcagatcttaacatgcttagggcgctgaaagtcaaggcctatcggttctccatctcctggtctaggatttttccaactggtagaaatagttccataaactcccatggtgtggactactacaatcggctgatcaacggactggtagccagcaatatcttcccaatggtgaccctctttcactgggatctaccgcaggctttacaggatatcggtggctgggagaaccccgcattgatcgatctctttgactcatatgccgatttttgcttccagaccttcggtgatagagtcaagttctggatgacctttaacgaaccgatgtatctagcttggttaggctatgggtccggggagtttccccccggtgttaaggaccccggttgggctccctacagaattgctcacgctgttattaaggcccatgcccgggtgtatcacacatatgatgagaagtaccgacaggagcagaagggagtcattagcttgtcgctgtctacccattgggcagaacccaagtcccctggagtccccagggatgtcgaagccgccgacaggatgctgcagttctctctaggctggtttgcccacccgattttccggaatggggactacccagacacaatgaaatggaaagtcggcaatagatctgagctgcagcacttggccacctctcgactgcctagtttcacagaggaggaaaaacggttcattcgtgccactgctgatgttttttgcctgaacacatactattcacggatcgtgcagcacaagacgccaagactgaacccaccatcctacgaagatgaccaggagatggctgaagaagaagatccctcgtggcccagcacggccatgaatcgtgcagccccatgggggacacggcgattgctgaattggattaaggaagaatatggagatatccccatatacatcacagagaacggggtgggtcttaccaatccaaataccgaggacacagatcggatcttctaccacaagacctatataaatgaagcactgaaggcctatcgactagacggcatagaccttcggggatacgtggcatggtcactcatggataatttcgaatggctgaatggctacacagtgaagtttgggctgtaccacgtcgacttcaacaatactaatagacccaggacagcacgcgccagcgctaggtattacacggaggttatcaccaataacgggatgcctttggcccgcgaagatgagtttctttatggaagatttccggagggattcatttggtctgcagcaagtgccgcctatcagatcgaaggcgcctggcgtgccgatgggaagggactgtccatttgggatacattttcacataccccacttcgggtagagaacgacgctatcggtgatgtagcctgcgactcttaccacaagatcgcggaggacctagtgaccctacagaatctcggcgtgagccactaccgcttctctatttcttggtcccgtatcttgcccgatgggacaacaagatatatcaacgaggcgggactcaactactacgtccgattaatagatactctcctggcagcatccatccagccccaggtcacaatctaccactgggatctaccccagacactgcaggatgttgggggatgggagaacgaaactattgtgcagagattcaaggagtacgctgatgtcctgtttcagagactaggcgacaaggtgaagttctggattaccctcaatgagccatttgtgattgcataccagggatacgggtacgggaccgctgctcctggcgtgagcaatcgtcccggtacggcaccgtatatcgtgggtcataatttaatcaaggcacatgccgaggcatggcacctgtacaatgatgtgtatcgcgcgtctcagggaggtgtgatctcaataacaatctcaagtgactgggctgaaccccgagacccgagtaatcaggaggacgttgaggctgcacgccgatacgtacaatttatgggcggctggttcgcacacccgatctttaaaaacggtgactacaacgaggtcatgaagacgcgtatccgcgatagatccttagccgccggcctcaataaaagccgccttcctgaattcacggaaagcgaaaaacgcagaattaatggcacctacgatttctttggctttaaccactataccactgtgttggcttacaatctaaattatgccactgccattagttcatttgatgcggataggggtgtggcatcaatcgctgaccgaagttggccagactccgggagcttttggctgaagatgaccccctttggctttagaaggatccttaactggctgaaagaggagtataatgatccacctatttatgtaacagaaaatggggtgagccaacgtgaggagacggatcttaacgataccgcaagaatctattatttacgtacgtacatcaatgaggcccttaaagcggtccaggacaaggtggacttgaggggctataccgtttggtcagcaatggacaactttgagtgggctactggctttagcgagaggtttggcctacattttgtgaactattccgacccatcactgccccggatcccaaaagcatctgcaaaattctacgcaagcgtggtgcgttgcaatggtttccctgatcccgccaccggacctcacgcatgtttgcaccagcccgacgccgggcccacgatatcacctgtaagacaggaggaagttcagttcctgggcctgatgctggggacaactgaagcccagacagccctgtatgtgctgtttagcctcgtactgctcggtgtctgcggattagcttttctgtcttataagtactgtaagcggtctaagcagggcaaaacacagagaagccagcaagagttgtcaccagtgagcagcttttag

SEQ ID NO: 121837 - DNA, 3012 bp, synthetic construct
  misc_feature 1..3012: note = Description of Artificial Sequence: Synthetic coding sequence
  source 1..3012: mol_type = other DNA
aaggtggctcacctcgtgttaaaagctcatgccagaacttggcaccattacaactctcatcaccgccctcagcagcaaggccacgtgggcattgtgcttaatagtgattgggcagagcccctatctccggagcgcccggaggatctgagggcatcagagcggttcttacactttatgctgggatggtttgctcacccggtgttcgttgatggcgactatccggcaactctgcgaacccagattcagcagatgaacagacagtgctcacatcctgttgctcaacttcctgagtttactgaagctgagaaacaactgctgaagggcagcgcagatttcctgggactcagtcactacacctctcggctcattagcaatgccccacagaacacttgcatcccatcctacgatactatcgggggcttcagccagcacgttaatcacgtgtggccacaaacctctagcagctggattagagtagtgccctggggcataaggcggctcttgcagttcgtgagcctagagtacactcggggcaaagtaccgatttacctggccgggaatggaatgcctattggagagtctgagaacctgttcgatgattctctcagggtggattattttaatcaatacataaacgaagttctgaaagcgattaaagaggacagcgtcgatgtgcgctcgtacatagcacgtagtctcattgacggattcgagggcccttcagggtacagtcagagattcggactccaccatgtgaatttttccgactcgtctaagtccaggacacccaggaaatcggcatactttttcacatccattatcgagaagaacggttttttgaccaagggcgctaagcgcttactgccacccaacacagtaaacttaccgagcaaggttcgagcttttacattcccttctgaggtcccttccaaggctaaggtcgtgtgggaaaaattttcaagtcagcccaaatttgaacgtgatcttttttaccacggtacgttccgggatgactttctttggggcgtatcttctagcgcctatcaaattgaaggcgcttgggatgccgatgggaagggacctagcatctgggacaatttcacacacactcccggcagtaacgtgaaagacaatgcaactggggatattgcatgcgactcataccaccaacttgatgctgacttgaatatgcttagagcgctgaaagtgaaggcctatcgattctcaattagttggagccgcatattccccaccggacgaaacagctctatcaatagtcacggggtcgactattataaccgattgatcaatggcctagtcgcctcaaatatttttccaatggtcactctgtttcattgggacctgccacaggctctgcaagacattggagggtgggagaacccagcactgatcgatctctttgattcttacgcagatttctgttttcagacattcggggatagggtcaaattctggatgactttcaatgaaccaatgtacttggcgtggctagggtacggatccggcgagtttccgcctggggtgaaagaccctggatgggccccctatagaatcgcccacgccgtaattaaagcccacgcccgcgtttatcatacatacgatgagaagtatagacaggaacagaagggggtaattagtctcagtctctccacacattgggccgagcccaagtcccccggggtgccccgagacgtggaagccgccgaccggatgctccagtttagcttggggtggttcgctcacccaatctttcgcaatggcgactatccagataccatgaaatggaaagtgggcaatcgaagtgagctgcagcatctcgccacttctcgtctgcccagctttactgaagaagaaaaaaggtttattagggctacggccgacgttttttgtcttaatacatactatagtcggattgtacaacacaagaccccacgcctgaaccccccctcatacgaggatgatcaggagatggctgaggaagaggacccttcttggcccagcaccgccatgaatcgggctgctccttggggcacccggcggttactgaattggatcaaggaggaatatggagatattcccatttacataacggaaaatggggtcggcctgaccaaccccaacaccgaggatacggaccggattttctatcataaaacctacatcaatgaagctctgaaagcatatagactggatggcatcgatttgcgcgggtacgtggcttggtccctgatggataattttgagtggctaaatgggtacacagtcaagttcggattataccatgtagatttcaataataccaatagacctcggactgccagagcctctgccaggtattacaccgaagttattactaacaatgggatgcccttggctcgcgaggacgaattcctgtacggtaggtttcctgaaggttttatctggtccgccgcgtctgcagcatatcagatcgagggcgcctggcgcgccgacgggaaaggtttgtcaatctgggatacattctcacatacacctctccgagtggagaatgacgctatcggcgatgtagcctgtgatagttaccacaagattgccgaagatctggtgacattgcaaaaccttggggtatcccactatcgcttttccatttcgtggtcacggattctgcccgacgggaccactaggtacatcaacgaggcagggctcaactactacgtgcgcttgatcgacacacttctcgccgctagcattcaaccacaggtcaccatctaccactgggatttaccacagacacttcaggacgtgggcggctgggagaacgagaccattgtccagcgatttaaggaatacgctgacgtgctgtttcagcggcttggtgacaaggtgaaattttggataactttgaacgaaccattcgtgatcgcgtaccaaggttatggctatggaacggccgcccccgtccatggccggctcgtatgcaccagctacttccaggaatggaggctgcaatag

SEQ ID NO: 121838 - DNA, 1005 bp, synthetic construct
  misc_feature 1..1005: note = Description of Artificial Sequence: Synthetic coding sequence
  source 1..1005: mol_type = other DNA
atggcaactctgaaggagaaacttattgcgcctgtcgcagaggaggaagcaacagtgccgaacaacaaaataaccgtggtgggggttgggcaggtagggatggcctgcgccatctcaatactggggaagagcctggcagatgagcttgccctggtcgacgtgcttgaggacaaactcaagggggagatgatggacctacagcacggaagcctgtttcttcagacacctaaaattgtagctgacaaggattattctgtaaccgctaactccaagattgtggttgtgactgcgggcgtgagacagcaggagggggagtcaaggctgaatcttgtgcaacgcaacgtgaacgtttttaagtttattatcccacagatcgtaaagtattctcctgattgtataatcatagtcgtgagcaaccctgtggacatccttacctacgtcacatggaagctttctggacttcctaagcatagggtaattggtagtggttgtaacttagattccgcacggtttaggtacctcatggcagagaagctcgggattcatccttcgagctgccacgggtggatactcggggaacacggcgattcttctgttgcagtctggagcggggttaatgttgccggggtaagtcttcaggaactgaatcccgagatggggacagataacgatagtgaaaattggaaggaggtccacaagatggtggtggaaagcgcgtatgaagtgattaaactaaaggggtatactaattgggctattgggctgtccgtcgctgatctcatcgaatccatgcttaagaacctttccaggatccacccagtctcgactatggtgaaggggatgtacggtattgaaaacgaagtcttcttgagtctgccatgtattctaaacgcaaggggccttactagcgtgatcaaccaaaagttgaaggatgatgaggtagcccagctgaagaagtcagccgacacactgtgggacattcagaaagaccttaaggacctgtag

SEQ ID NO: 121839 - DNA, 699 bp, synthetic construct
  misc_feature 1..699: note = Description of Artificial Sequence: Synthetic coding sequence
  source 1..699: mol_type = other DNA
atggcaactttgaaggaaaagctgatcgcccccgtggcagaggaagaggccacggtcccaaataacaagatcacagtggtgggagttggccaggtgggaatggcctgtgcaattagcatcctcggaaaatctttggcggatgaactcgcgctggtggatgtgctcgaagacaagctgaaaggagagatgatggacttgcaacatggatcattgtttctacaaactcccaagattgtggcagataaagattattcagtgaccgccaactcaaagatagtggtggtaacagccggggtgcgccaacaggaaggggagtccagactgaacctagtgcaacgtaatgttaacgtgtttaaatttatcatccctcagatagtgaagtacagcccagattgcattattatcgttgtgtccaaccccgtcgatattctgacctacgttacctggaagctgagcggactccccaagcatagagtgattggaagcggatgcaatttggattccgctcggttcaggtatctgatggctgagaaactgggcatccacccctcttcatgtcatggttggatcctgggtgaacacggggactcctccgtcgccgtgtggagcggggttaacgtcgcaggtgtgtccctacaggagcttaatccagagatgggcacagacaacgattccgaaaattggaaggaagtccattag

SEQ ID NO: 121840 - DNA, 1005 bp, synthetic construct
  misc_feature 1..1005: note = Description of Artificial Sequence: Synthetic coding sequence
  source 1..1005: mol_type = other DNA
atggccaccctgaaggagaagctcatcgcccccgtcgcggaagaagaggcgaccgtacctaataacaaaatcacagttgttggggtgggtcaggtaggtatggcctgtgcaattagcatcctgggaaagagcttagcagacgaactagcacttgtcgacgtgctcgaagacaagttgaaaggggagatgatggacctacagcacggtagtctatttctgcagaccccgaagattgtcgccgacaaagactatagtgtcaccgccaattctaagattgtggtggtcactgctggggtgaggcagcaagaaggcgagtccagactcaacctggtccagaggaacgttaacgtttttaagttcattattcctcagatcgtgaagtactcccctgactgcattattatcgtcgtttctaatcctgtggatatactcacatatgttacatggaagctcagcggcctgccgaagcatagggtgatcgggagtggatgcaacctcgactcagcgagatttagatatcttatggcagagaaattaggaatacacccttcctcttgccatggctggatcctgggcgaacatggggactcctctgtcgccgtgtggagcggagtgaacgtcgcaggcgtgtccttacaggaactcaatccggagatgggcactgacaatgattccgagaattggaaggaagtgcacaagatggtggtcgaatcagcatatgaggtgataaagttgaaaggatatacaaattgggctattggcttgagcgttgcggatttaatagagagcatgctcaaaaacctctctagaatacatccggtttccacgatggtcaagggcatgtatggcattgaaaatgaggtgttcctatccctgccttgcatactgaatgcacgaggccttacaagtgtcatcaaccagaagctaaaagacgatgaggttgcccagctcaaaaaatctgctgatactctttgggatatacaaaaagatctaaaggacctctag

SEQ ID NO: 121841 - DNA, 414 bp, synthetic construct
  misc_feature 1..414: note = Description of Artificial Sequence: Synthetic coding sequence
  source 1..414: mol_type = other DNA
atggccactctcaaagaaaaattgattgctcccgttgccgaagaggaagctaccgtgccaaacaacaagattacagtcgttggggtgggacaagtgggcatggcctgtgcaatatcaattctgggaaaatctctggcagacgagctcgccctcgttgatgtgctggaagacaagttgaagggagagatgatggacctccaacacggatctttattcctccagacaccaaagatcgtggcagataaggattacagtgtgaccgcaaattctaaaattgttgtggtgaccgccggagtacgtcagcaggaaggtgaaagtaggctcaacctggtgcagagaaatgtcaatgtctttaaattcataatccctcagatagtaaagtactcaccggattgtatcataatcgtggtctag

SEQ ID NO: 121842 - DNA, 309 bp, synthetic construct
  misc_feature 1..309: note = Description of Artificial Sequence: Synthetic coding sequence
  source 1..309: mol_type = other DNA
atggcgactttgaaggaaaaactcatagccccggtcgcggaagaggaggccacagtgccaaacaataagatcaccgtcgttggtgtaggacaggtgggaatggcctgtgccatctccattctgggaaaatctctggccgacgagctcgccctggttgacgttctggaggacaagcttaagggggagatgatggatcttcagcacggctctttgtttctccagacacccaaaattgtagccgataaggactacagcgtgaccgccaacagcaagatagtggtggttacagctggggtcaggcaacagtag

SEQ ID NO: 121843 - DNA, 999 bp, synthetic construct
  misc_feature 1..999: note = Description of Artificial Sequence: Synthetic coding sequence
  source 1..999: mol_type = other DNA
atgagcaccgtgaaggagcagctcattgagaagctaatagaggatgatgagaacagccagtgcaagatcacaattgtcggtactggggccgttggaatggcttgtgccatctccatcctgctcaaagatctagccgatgagctcgccctggtcgatgttgcgctggacaagcttaagggcgaaatgatggatctccagcacgggtccctgtttttttctacctcaaaaattacctctggtaaggactatagtgtctccgccaatagcaggattgtcatagtcacagcaggcgctcgtcagcaggagggcgaaacgcggctagctctcgtacagcgaaatgtagccatcatgaaatccattatcccagctatcgtgcactattccccagactgtaagattctcgtggtgagtaaccctgtggacatcctgacgtacatagtttggaaaatttctggtctcccagtgactcgagtgattgggagcgggtgtaacctcgacagcgccaggttccgataccttattggcgagaagcttggggtacatcctacatcctgccacggatggatcatcggagagcacggagacagctctgtgcctctttggtcaggggtaaacgtagctggggtggcattgaaaacactggatcccaagctgggcaccgattccgataaagagcactggaagaacatacacaagcaggtgatccagagcgcctacgagatcattaaactgaagggctacactagctgggcaatagggctttccgtgatggacctcgtgggctccatcctgaagaatcttaggcgcgtacacccagtgagtacaatggtgaaaggactctacggcattaaggaggagctctttctatctataccttgtgtccttgggcggaatggggtgagcgacgtcgttaaaattaatctgaactcggaggaggaggccttattcaagaagagcgcagaaactctgtggaatattcagaaggacctaattttttag

SEQ ID NO: 121844 - DNA, 999 bp, synthetic construct
  misc_feature 1..999: note = Description of Artificial Sequence: Synthetic coding sequence
  source 1..999: mol_type = other DNA
atgtccactgttaaagagcagctcatagagaaactcattgaagacgacgagaacagccagtgcaagatcactatcgttgggaccggagccgtggggatggcatgtgcaatctcaattctgttaaaggacctggccgatgagttggcactggtggacgtggcactagacaagctcaagggggaaatgatggatctccagcatggatctctgttcttttcgacctctaagataacaagcggcaaggattactcagtctctgccaactcccgtatcgtaatagtgactgccggcgcaagacaacaagagggggaaacaaggctggccctggtgcaaagaaacgttgctattatgaaatccattattccagccatcgtccattattcaccagactgcaaaatcctcgtggtgagcaatcccgtcgatatcctcacctacattgtttggaagatctcaggactccccgtcacccgagttatagggagtggatgcaacttagacagcgcccgctttcgatacctcatcggagagaaactgggcgtgcaccctacctcttgtcacgggtggataattggcgagcatggagacagcagcgtcccactgtggagtggagttaacgtggctggcgtagcactgaaaaccctggatccaaagttaggcactgacagcgacaaggagcactggaaaaacatccataaacaggtcatccagagcgcttatgagatcatcaagttaaagggctacacatcttgggccatcggcctcagtgtgatggacctggtgggatccatcctcaagaatcttagacgggtgcaccccgtgtctacaatggtgaagggattgtatgggataaaggaggagctattcctctcaatcccatgtgtcttgggccgcaacggagtttctgacgtggtgaaaatcaatctcaattcggaggaagaagcgttgtttaagaagtctgccgagacattgtggaatatccagaaagacttgattttctag

SEQ ID NO: 121845 - DNA, 1524 bp, synthetic construct
  misc_feature 1..1524: note = Description of Artificial Sequence: Synthetic coding sequence
  source 1..1524: mol_type = other DNA
atggcccggctcctgcggagtgctacctgggagctatttccctggagaggatactgctctcagaaagctaaaggggagctgtgcagagacttcgtggaagctcttaaggcagttgtcggaggttcccacgtgagcacagccgccgtagtgcgggagcagcacggacgagatgaatccgtccatcgctgcgagccaccagacgccgtggtgtggcctcagaacgtggagcaggtgagtaggctggcggccctttgttaccggcagggagttcccattattccttttggtaccggaacagggctggaaggtggggtttgtgccgtgcagggcggcgtgtgcgttaacctaacccatatggatagaattctcgagcttaaccaagaggattttagtgtggttgtcgaaccgggggttacgcgcaaagccttaaatgcgcatctcagagattcaggactgtggtttcctgtcgatcccggggcggacgcaagtctttgtggaatggccgccacaggcgcttccggaaccaatgcagtccgttatgggacaatgagagacaacgtcctaaatttagaggtggtgctgcctgatgggcgcctgttgcacacagccggtcggggcagacactttaggtttgggttctggcccgaaattccacaccacacagcctggtacagtccatgtgtaagtttaggcaggaggaaaagcgcagcgggatacaatctgaccggcctgttcgtcggctctgagggaacactcgggctgataaccgctacaacgcttaggcttcaccctgctccggaagccactgtcgccgctacatgcgccttcccttctgtgcaggcggctgtagattcgaccgtccatattctccaggccgccgtgcccgtggctcgcattgagtttctcgacgaggttatgatggatgcttgcaatcgatactctaagctaaactgtctggtggcccccacgcttttcctggaattccacggcagtcagcaggccctagaggagcagctgcagcgcactgaggaaattgtccagcagaacggtgcaagtgattttagttgggccaaggaagcagaggagagatccaggttatggacagcccggcacaacgcatggtatgcagcactggctacacgtccgggatgcaagggatactccacagatgtttgtgtgccaatttcaagactccccgaaatcgttgttcagacaaaggaagacctgaacgcatccgggctcaccggaagcatagtgggtcacgtgggtgacggtaatttccattgtatcctgctggtgaaccccgatgatgctgaagaactcggaagagtgaaggccttcgcggagcaactggggcgccgcgcattggctcttcacggaacctgcaccggggagcacggcattggaatgggcaaacgccaactgctgcaggaagaggtaggagcggtaggcgtcgaaaccatgagacagctgaaggctgttctcgacccgcagggtttgatgaatccaggaaaagtcctgtag

SEQ ID NO: 121846 - DNA, 1455 bp, synthetic construct
  misc_feature 1..1455: note = Description of Artificial Sequence: Synthetic coding sequence
  source 1..1455: mol_type = other DNA
atggcccgtctactcaggtctgccacatgggaattattcccgtggaggggatactgctctcagaaggcaaagggcgagctgtgcagggactttgtggaggctctgaaggcggtcgtgggaggcagccacgttagcaccgccgcagtggtgcgtgagcagcatgggcgggatgaatctgtgcacaggtgcgagcccccagacgccgtagtgtggccccagaatgtggagcaagtctcaaggctggccgctctgtgctaccggcagggtgtgccaattattccattcggcacaggcaccggactggagggaggggtgtgcgccgtgcaagggggcgtctgcgtgaaccttactcacatggacagaattctggagttgaaccaggaggacttctcagtagttgtggagccaggtgtgaccagaaaagcactgaacgctcacttacgtgactccgggctctggtttcccgttgaccccggagcggacgcaagtctgtgcgggatggctgccacaggcgcttcaggaaccaatgccgtgcgatatggcaccatgcgcgacaacgttctgaacctggaagttgttctgcccgacggtcgcctactgcacaccgctgggcgggggcgccattttcgaaaaagtgcagcaggttataatctaacaggtttgtttgtaggctccgaggggacccttggcttgattactgccacaacactccggctccaccctgcccctgaagcgacagtggcagcaacttgcgccttccctagtgtgcaggcagctgtagacagcacggtgcacatcctccaagcagctgtccccgtggcgagaattgagttcttggatgaagtaatgatggatgcctgtaatcgctactctaagctgaactgcctcgtggcgccaaccctgttcctagaatttcacgggagtcagcaggccctagaggaacaattacaaaggacagaagaaattgtccagcagaacggtgccagtgacttctcttgggcaaaagaggcggaggaacggtctcgcctctggacagctaggcacaacgcctggtacgcggctctggctacacggcccggctgcaaaggttacagcactgacgtgtgcgtgccgatttctcgcctgcctgagatagtggtacaaacaaaggaagatctgaacgcatccggattaaccggctcaatcgtgggacatgtgggcgacgggaactttcactgtattctgttggtaaatcccgatgacgctgaagaactaggtcgggtaaaggcatttgccgagcagctgggtcgtagggctctggcactacatggcacatgcaccggcgagcacggaataggaatgggcaagagacaactcctgcaggaagaagtgggagctgtgggcgttgagactatgcgccaacttaaggcagtcttagacccacaggggttaatgaatcccggaaaggttttatag

SEQ ID NO: 121847 - DNA, 2139 bp, synthetic construct
  misc_feature 1..2139: note = Description of Artificial Sequence: Synthetic coding sequence
  source 1..2139: mol_type = other DNA
atgcgggtgcttctgcacctacccgccttacttgcatctttaatcctgctgcaggctgccgcttccactaccagggcacagaccacacgaacctcagccatcagtgatactgtatcacaggctaaggtgcaggtgaataaagcgtttctggactctagaacaaggttgaagacagctatgtcatctgagactcctacgtccagacaactgagcgaatatctgaaacacgcaaagggccgcactcgcacagcaatcaggaatggacaagtctgggaggagtctctgaagcgactcaggcagaaggcatcgctgactaacgtaacagacccatctttggacctcacatccctgtcactcgaagtaggctgcggggccccagcccctgtggtgagatgcgatccttgttcgccatacaggactatcactggagattgtaacaatcgacgcaaaccagcacttggggctgcgaatcgggcactggcacggtggttaccagcggagtacgaggatggtctgagcctgccttttgggtggaccccagggaagacaaggaatgggtttcccttacccctggcacgggaggtgtccaacaagatagtagggtatctgaatgaggagggcgtgctcgaccagaatagatcactactcttcatgcagtggggccagatcgtcgaccacgacctcgattttgcacccgacacggaacttgggtccagcgagtatagtaaggctcagtgtgacgaatattgtattcagggcgataattgctttcccatcatgtttccgcccaacgaccctaaggctggcacacagggcaagtgcatgcctttcttcagggctgggtttgtatgccccacacccccttataagagtcttgcccgcgaacagatcaacgctctcacctcttttctcgatgccagtttcgtgtattccagcgagccatctttggcatcacgactgcgcaatctctcctcaccattgggactaatggccgtgaatcaagaggtaagcgatcacggcctgccttacctcccatacgattcaaagaagccgtccccctgcgagtttataaacactaccgctcgggtgccatgcttcctggccggggactctcgtgcttcagagcacattttgttggctacaagccacaccctctttttacgcgagcacaatagactagcacgcgagctcaaacgcctgaacccccagtgggatggtgaaaaattataccaggaggcgaggaagatcctaggggcatttgtccagatcatcacattcagagattatctgcctattttgctcggggaccatatgcagaagtggatccccccttatcagggttactcagagagcgtagacccccgaattagcaacgtgtttacgtttgcattcaggttcggacaccttgaggtgcctagttccatgtttagattagacgaaaactatcaaccttggggacctgagccagaactccccttgcataccctgttctttaacacttggagaatggtgaaagacgggggcatcgatccactagtgagaggcctcctggccaaaaaatcaaagctgatgaaacagaataagatgatgacaggtgagctacggaataagctgttccagcctactcaccgtatccacggttttgacctggctgctataaatacccagagatgcagagatcacggtcagccgggttacaatagttggcgcgccttttgtgatctgagccagccccagacgttagaagaattgaatacggtgttgaagtcaaaaatgctagccaagaagcttttgggtctgtacggtactcctgacaacatcgacatttggataggcgctatagctgagcccctcgtggagcgaggtcgtgtgggacctctgctagcatgcctgctgggaaagcaattccagcaaatcagagatggtgatcgcttttggtgggagaatcctggtgtcttcacaaacgagcagaaagattcactccagaagatgagctttagtcggctagtatgtgacaacacacggatcacaaaggtccccagagatcccttctgggcgaactcatatccctatgattttgtggactgttctgccatcgacaaactggacctgagtccatgggcctccgtgaagaactag

SEQ ID NO: 121848 - DNA, 1374 bp, synthetic construct
  misc_feature 1..1374: note = Description of Artificial Sequence: Synthetic coding sequence
  source 1..1374: mol_type = other DNA
tgttttcctgttcagtttcctcctaatgaccctaaggccgggactcagggcaagtgcatgcccttctttcgggctggctttgtgtgtcctacccctccttacaagtcgttggcccgcgagcaaataaatgccctgacttcattcctcgatgcaagctttgtgtattcatctgagccatcattggccagtcggcttaggaacttatcctccccactggggctcatggccgtcaaccaggaggtcagtgatcacggattgccatatctcccatacgacagcaaaaaacctagtccctgtgaatttattaatactactgccagagtgccctgttttcttgccggcgacagtagagcttccgagcatattcttttagcaacctcccataccctttttcttagagagcacaataggctggctcgggagctgaagcggttgaatccccagtgggacggcgagaagctataccaagaggctcgaaagattctaggggcctttgtccagatcataacttttcgcgactacctacccatcctgctgggagaccacatgcaaaaatggatacctccgtaccaagggtattccgagtctgtcgatccccgcatctcgaacgtgttcactttcgcttttaggtttggtcacttagaggtacctagcagcatgttccggttggatgagaactaccagccatggggccccgaacctgagctgcccctgcatactctgtttttcaacacctggaggatggtaaaggatggtgggattgacccacttgtgagaggactgttggccaagaaatctaaacttatgaagcaaaataagatgatgaccggcgaactgagaaacaagcttttccaaccaactcataggatccacggattcgacctggcggccatcaatacccaaaggtgtcgggaccacggtcagcccggatacaactcctggagagcgttctgtgatctatctcaaccacagactttagaagagctgaacaccgtcctgaagagtaagatgctggcaaaaaaactcctaggcctctacggaacccccgacaacatagacatctggattggcgccatagccgagccactggttgagcgcggccgtgtaggcccacttttggcctgcctactggggaagcagttccagcagatcagggacggcgaccgtttttggtgggaaaacccaggggtcttcacaaacgagcagaaagacagcctacagaaaatgagcttctctcgcctagtgtgtgacaacacacgcattaccaaagtccccagagatcctttctgggctaacagctatccatacgatttcgtggattgctctgcaatcgataagctggatctctcaccatgggcctccgttaaaaattag

SEQ ID NO: 121849 - DNA, 1890 bp, synthetic construct
  misc_feature 1..1890: note = Description of Artificial Sequence: Synthetic coding sequence
  source 1..1890: mol_type = other DNA
atgcgggttctcttgcatctgccggcgctgctcgccagcctcatactccttcaggccgcagcctccactaccagggatcctagcctggacctcacctcactctcgctggaagttggttgcggggccccggcccccgtggttagatgcgatccttgctcaccttatcggactataacgggcgactgcaataaccgtcgcaagcccgcactgggagctgcaaacagggctctggctagatggctccctgccgagtacgaagacggcttgagcctgccgttcgggtggactcctgggaagacacgtaatggattccccctgccattagctcgagaggtgtcgaataagatcgtgggatacctgaacgaggaaggggtattagaccagaatcgctcactgctgtttatgcaatgggggcagattgtggaccatgacctcgacttcgcgcctgatacggagcttggctccagtgagtactccaaggctcagtgcgacgaatactgcattcaaggggacaactgctttccaatcatgtttcctccgaacgacccaaaagccggaacccagggaaaatgtatgccgttctttagggccgggttcgtgtgtccaactccaccttacaaatccctcgcaagagaacaaatcaacgcgctgacatccttcctcgacgcgagctttgtctattcatctgaaccttctctcgcctccagattacggaaccttagcagtccactgggcctgatggctgtaaaccaagaggtgtctgaccatggactcccctatctgccctacgattccaagaagccaagcccatgtgaatttataaacaccacagctcgcgtcccttgctttctggcgggggactcccgtgcttcagaacacatcctgctggccacctcgcacaccttgtttcttagagaacataataggctcgcccgagaattgaaaaggcttaatccacagtgggatggagaaaaactgtaccaggaggcacgcaaaattctgggcgcatttgtgcaaattatcacatttagggattacctgccaattctcctcggcgatcatatgcaaaaatggatcccgccttatcagggttatagtgaatctgtggaccccaggatttccaatgtgtttacgtttgcgttccgtttcgggcacctggaggtgccttccagcatgttccggctcgacgaaaactatcaaccttggggcccagagcctgagcttccactgcacaccctgtttttcaacacttggaggatggttaaggacggcggcattgacccactggtgcgtggacttctggctaagaagtcaaaacttatgaagcagaacaagatgatgaccggtgaattgcgtaataaactctttcagccgacgcatcgcatccacgggtttgatcttgcggccattaacacacagcgttgccgcgatcatgggcagcctggatataattcttggagagctttctgtgatcttagccagcctcagacacttgaggagttgaacaccgtgctgaagagcaaaatgctggctaaaaagctgctggggctgtacgggactcctgacaatattgatatctggatcggggcgattgccgaaccattggtcgagagaggacgagttggaccgctcttggcttgcttgttgggtaagcagttccaacagattagggacggcgatcgcttctggtgggaaaacccaggcgtctttacaaatgagcagaaagactcactgcagaaaatgtccttttcaaggttggtctgcgacaacactaggatcaccaaggtccctcgggatccattttgggcgaattcttatccctacgactttgtagattgttccgccatcgacaagcttgatctgagtccatgggctagcgtgaagaattag

SEQ ID NO: 121850 - DNA, 1962 bp, synthetic construct
  misc_feature 1..1962: note = Description of Artificial Sequence: Synthetic coding sequence
  source 1..1962: mol_type = other DNA
atgtccagcgaaacccccacctcacgacaactttccgagtacctaaaacacgctaagggaaggacccggacagcaatacgcaatgggcaggtgtgggaagaaagcctgaaaagactcagacagaaggctagcttgactaatgttacggaccccagtctggacctcaccagcttaagtcttgaagtggggtgcggagcacccgctcccgtggtgagatgcgatccatgctccccataccgcaccattactggagactgcaacaaccgacggaaacctgcactgggagccgctaatcgggcgctagcccgctggctgccggcggagtatgaagatgggctgtcacttccattcggctggactcccgggaagaccagaaatgggttccccctgcctcttgcccgcgaggtcagcaacaagatcgtgggataccttaacgaggagggagttctggatcagaatcgtagcttgttgttcatgcagtggggtcagatcgtcgaccacgatctggatttcgcccccgatactgaactaggcagcagcgaatatagcaaggcccagtgcgacgagtattgcattcagggtgataactgcttcccaataatgtttccacctaacgatcccaaagctggcacccaggggaaatgtatgccctttttccgagccggtttcgtgtgccccactcctccctacaaatccctcgctcgagaacagatcaacgccctcaccagttttttggacgctagttttgtttatagtagtgaaccctctctggcttccaggctgcggaatctgtcttctccccttggactgatggctgtgaaccaggaagtgtctgatcacggtcttccgtatttgccttacgattctaaaaaaccatctccgtgcgagttcatcaacactactgcaagagtgccctgctttctggcaggcgacagcagggcctccgagcatattttattggcaacaagccacactttgttccttagagaacataaccgactggcccgagaacttaaaaggttgaacccacagtgggatggggaaaagctataccaggaggcgcgaaaaatcctgggtgcctttgtccagattattactttcagagactacctccctatcctgctcggggaccatatgcaaaagtggatcccaccttatcagggctattccgagtccgttgacccccgaatatcaaacgtgttcaccttcgccttccgcttcggccacctggaggtaccatctagcatgtttcgactcgacgagaactatcagccctgggggccagagccagagctccctctccacacattgttcttcaacacctggcggatggtgaaagatggcggcatcgaccctctggtgcgcggcctgctcgccaagaagtcgaagttgatgaaacagaacaaaatgatgaccggtgaactcaggaacaaattgtttcagcctactcatcgtatccatgggtttgatctggccgccattaacacccagcgatgtagggatcatggccagcccggctataactcctggcgagccttttgtgatctgtcccagccacagaccctggaagagctgaacacagtgctaaaatcaaaaatgcttgcaaaaaagctcctggggttatacggcactcccgataacattgacatctggattggagctatcgccgaacccctagtcgagcgcggcagagttgggcctttgctcgcctgcctgttggggaagcagtttcagcagattagagacggagaccggttctggtgggagaacccaggcgtttttactaacgagcaaaaggactcacttcagaaaatgagcttcagcagactggtctgcgacaatactaggattaccaaagtgcctagggaccccttctgggctaatagctacccttatgatttcgtcgattgctcagcaatcgataagctcgatctctcaccatgggcatctgtcaaaaattag

SEQ ID NO: 121851 - DNA, 1323 bp, synthetic construct
  misc_feature 1..1323: note = Description of Artificial Sequence: Synthetic coding sequence
  source 1..1323: mol_type = other DNA
atgggagatctagaactgctgctcccgggggaagccgaagtcctcgtccgcgggttgcgctccttccctctgcgggaaatgggcagtgaagggtggaatcagcagcatgaaaacctcgagaagcttaacatgcaggctatactagatgccaccgtctcccagggcgagccaattcaggaactgctcgtaacccacggaaaggtgcctaccctggtggaggagcttattgctgtagaaatgtggaagcaaaaggttttcccagtcttttgtcgtgtggaagattttaaaccacagaacacatttcccatatatatggtcgtgcatcatgaggcaagtattatcaatctcctggagacagtcttcttccataaagaggtgtgcgagtcggctgaagacaccgtactcgatctggtggactactgccacagaaagctgacactgctcgtggcccagtctggctgtggcggtccacccgagggtgagggctcacaggattctaaccccatgcaggagctgcaaaagcaggccgagctaatggaatttgagatcgcactcaaggcattgagcgttctacgctacataactgattgtgtggacagcttatctctctccaccttgtctaggatgttgagcacccataatctcccctgtttattggtagagttgctggagcatagcccgtggagtcgccgggaaggagggaaattgcagcagtttgaaggatctaggtggcatacggtggcgcctagtgagcaacaaaagttatcaaaactcgacggacaagtttggatcgctttgtataacctgctcctgtccccagaagcccaggcgagatattgtttaacttcctttgcaaagggtaggctgttaaagctgcgcgcgttcctcaccgataccctgttggaccagctccccaatctggctcacctacagtcttttctggcacacctaacattgaccgaaactcagcctccaaaaaaagatcttgtgcttgagcagatccctgagatctgggagaggctggagcgtgaaaatagaggaaaatggcaggccatagcgaagcatcagctacaacatgtcttttctccgtccgaacaggaccttaggctacaggccagaaggtgggccgaaacctaccgcctggacgtcttagaggccgtcgcacccgaacgccctcggtgtgcgtactgctcagctgaagcctcaaaacgttgtagccgttgtcaaaatgagtggtactgctgtagagagtgccaagtgaagcactgggagaagcacggaaagacgtgtgtgctagccgcccagggagaccgggcgaaatag

SEQ ID NO: 121852 - DNA, 2001 bp, synthetic construct
  misc_feature 1..2001: note = Description of Artificial Sequence: Synthetic coding sequence
  source 1..2001: mol_type = other DNA
atgaggaaggtgagggggccacctgtctcttgtataaagcgggacagtccgattcagtgcatccaggccattgcagagaatcgggctgatgctgtgaccctggatggaggattcatttacgaggcggggctcgctccctacaagcttcggccggttgccgccgaagtgtacggaactgagagacagccgcgtacgcactattacgccgtcgccgtcgtgaaaaaaggtggcagctttcagctgaatgaactgcaggggttaaaaagttgccatacgggtctcagacggacggctggatggaacgtgccaattggcactctgaggccgttccttaattggactgggccccccgaacccattgaagcagccgtcgctcgctttttttcagcgtcttgcgtccctggagcagataaaggtcagtttcctaacctctgcaggctctgcgccggcaccggggagaacaaatgtgcattctcttcccaggagccctatttctcctactccggagcatttaaatgcctgcgcgacggcgccggggatgtcgccttcatcagggagtccaccgtcttcgaggacctttcagacgaggccgaaagggatgagtacgaactgctctgtcctgataatactcgcaaacctgttgacaagtttaaggactgtcatctggcaagagttccaagtcacgccgtagtcgcacgcagtgtgaacggcaaagaagacgccatttggaacctgctccgacaagcccaggagaagttcggtaaggataaatctccaaaattccaactgttcggctcgcctagcggacaaaaggacctgctgtttaaggacagtgcgataggcttctctagagtcccacctcgcattgattcagggctgtacctcggaagtgggtacttcactgctatccagaaccttcgtaagtccgaagaggaggtggcggcccgacgtgccagggtcgtctggtgcgctgtcggggagcaggagctgcgaaagtgcaatcagtggtccggcctttcagagggatctgtgacatgttcaagcgcttcgacaacagaggattgcatagccctagtgttgaaaggggaagcggacgccatgtcactggacggcggttatgtgtatactgctggcaaatgtgggctagtcccggtcctcgccgaaaactacaagtcacaacagtcaagtgaccccgatccaaactgcgtggatcggccagttgagggctatcttgctgttgcagtggtccgcaggagtgatacatcattgacgtggaatagcgtgaagggcaagaagtcatgccatacagcagtcgataggaccgccgggtggaatatcccaatggggctgttgttcaatcagaccggtagttgcaagttcgacgaatatttcagccagtcatgtgccccagggagcgacccacgcagtaatctgtgcgcgctgtgcatcggagatgagcagggtgaaaataaatgcgtgccgaatagcaacgagcgatactatggctatacaggcgcttttcgctgcttggccgagaacgcaggggacgtggccttcgtgaaggacgttacagttctgcagaacacagacgggaataacaatgaggcctgggccaaggacctaaagttagccgatttcgccctgttgtgcctagacggcaaacggaaacctgtaaccgaggccaggtcatgtcatctagcgatggctcctaaccacgccgtggtcagtcgtatggataaggtggagaggctgaagcaagtgctgctgcaccaacaagctaaattcgggcgaaatggatctgactgtccagataaattctgcctctttcaatcggagacaaagaacctgttgttcaatgataatacagagtgccttgcgcgcctgcatggaaagacaacatacgagaaatacctcggaccacagtacgtggctgggatcaccaacctgaagaaatgttcaactagtccccttctggaggcctgcgaattcttaaggaaatag

SEQ ID NO: 121853 - DNA, 453 bp, synthetic construct
  misc_feature 1..453: note = Description of Artificial Sequence: Synthetic coding sequence
  source 1..453: mol_type = other DNA
atgaaacttgtgttcctcgtcttgttattcctgggtgccctgggactgtgcttagctggtcgtcggcgtagcgtgcaatggtgcgcagtttcacaaccggaggcgaccaagtgtttccaatggcaacgaaatatgagaaaggtcagagggcccccggtttcatgcatcaagcgggatagccccatccagtgtatccaggccattgccgaaaacagggcagacgcagttaccctggacggggggtttatctatgaggctggtctggccccctacaagctgcgccctgttgccgccgaagtctacggcacagagcgccagccagctgtgttccccgtgcagattaaggactctagccccacgtgcgtggcttgcgttcggggtcaggggaaaacaaacgtgccttctccccctcggaaccgtacatccgcgaccctggttccctcgagcgtctag

SEQ ID NO: 121854 - DNA, 846 bp, synthetic construct
  misc_feature 1..846: note = Description of Artificial Sequence: Synthetic coding sequence
  source 1..846: mol_type = other DNA
atgactagcaaagaggatggcaaggccgctccaggtgaggagagacgccggagtcccttagatcacctgccccctcccgccaactcaaacaaaccgttgacacctttctctattgaagacattctgaataagccctccgtacgtagatcatacagcctttgcggtgcagctcatctgttggccgctgctgacaagcacgcccagggggggctgcccttggccggccgggctctcctgagccaaactagtccgctctgcgctcttgaggaactggcctcaaagacttttaaaggtctggaagtgtcagtattgcaggctgctgaaggcagagacgggatgactatcttcggccaaagacagacaccaaaaaagagacgcaaaagtcggactgcattcacaaatcatcagatttacgagcttgaaaagcgattcctgtatcagaagtatctgtctcctgccgaccgggaccagatcgctcagcagctgggcctgacgaacgctcaagtcatcacatggtttcaaaaccggagagcgaagcttaaacgagacctagaggagatgaaagcggacgtagaatccgcaaaaaagctgggtccatccgggcagatggacattgtggcactggctgaactcgagcagaattcagaggccactgctggtgggggtgggggctgcgggcgggctaagagccgcccggggtcccctgtgctgcccccaggcgcgcctaaggcccctggcgccggcgccctgcagctgagccccgccagccctcttaccgaccagcccgcaagttctcaggattgtagcgaggatgaagaggatgaggagattgatgttgatgattag

SEQ ID NO: 121855 - DNA, 597 bp, synthetic construct
  misc_feature 1..597: note = Description of Artificial Sequence: Synthetic coding sequence
  source 1..597: mol_type = other DNA
atgaactccgggcgggaaccccgcactccgcggactttactgtcaatagctgatatcctggcccccagaatggtacctcgcgccccttcggccccccagttaccagagtctgggcctggacctacctctcccctctgtgcccttgaggagttgacctccaagacgtttaggggtcttgatgcccgggccttgcagccatctgagggcagggcgggccccgacgccttgggacccggaccctttggcaggaaacggcgtaagtccaggacggcttttacggcccagcaggtgctcgagcttgagagaaggttcgtgttccaaaagtacctggcgccttctgagcgggacggcctggccactcgcctcgggcttgccaacgcccaggtcgtgacctggttccaaaataggcgggccaagctcaagcgggacgtggaggagatgcgggcagacgtggcttcactgcgggctctgtctccagaggtgttgtgcagcctggcattgccagagggcgcccccgaccccgggctttgtctgggccccgcgggaccagacagcagacctcatttgtctgatgaggaaattcaagtggacgactag

SEQ ID NO: 121856 - DNA, 585 bp, synthetic construct
  misc_feature 1..585: note = Description of Artificial Sequence: Synthetic coding sequence
  source 1..585: mol_type = other DNA
atgggtaagcgcacaagcctggaagtttcgctgggcgaactgggaggtgagaagtgccgtggtggacgccggtctttccccccacttgctgcatcccgccctgcccggccaggaggttggaggtgggctcgtcgcgatctctgcaagaccgcctccagagcagaaaataactctcaggcctgcaggccccaaaggcgagctggccccgacgctctggggcccggccccttcggccgcaagaggcgaaagtcacgcaccgcgtttacagctcaacaggtcctggagctggaaagaaggttcgttttccagaagtatctggcgccctcagagcgtgatggactagcaacccgcctgggtctggcaaatgcgcaggtggttacttggtttcagaataggcgggctaaattaaaacgggacgtcgaagaaatgcgcgccgacgtggcaagcttgagggctctcagccctgaggtcctttgtagtctggccctgcccgaaggcgccccagaccctgggctctgtctggggcccgctggcccagatagcagacctcacctttccgatgaggaaatccaggtggacgattag

SEQ ID NO: 121857 - DNA, 1398 bp, synthetic construct
  misc_feature 1..1398: note = Description of Artificial Sequence: Synthetic coding sequence
  source 1..1398: mol_type = other DNA
atggaaacacctagccagaggcgggcaacacgctccggggctcaagcatccagtacacccctctcacctacaaggattacgcggttgcaggaaaaagaggatctgcaggagctcaatgaccgtctggcagtgtatattgacagggtgcgttccttggagactgagaacgccggcttacggttacgcatcacagagagcgaggaagtcgtgagccgggaagtgtcaggaattaaggccgcttatgaagctgagttaggtgatgccagaaagacactagactccgttgcaaaagaacgtgccaggctgcagctggagctgtccaaggtgagagaggagttcaaggagttaaaagctcgcaacactaaaaaggaaggagacttgattgcagctcaggctcgcctgaaggacctggaagccctgctgaatagtaaggaggctgccctttctaccgctctgtccgaaaaacgcaccctggagggtgagctgcatgatcttcgcggacaggttgccaagttggaagcggctttaggagaggccaagaagcagcttcaggacgaaatgcttcgacgggtggacgcagaaaaccggttgcaaactatgaaggaagagctagattttcaaaagaacatttattccgaagagttgcgcgagacaaagcgacggcacgagaccagattggtcgagattgacaatggtaagcagagggagtttgagtcccggcttgctgacgccttgcaagagctgagagcgcagcatgaagaccaggtggaacagtacaaaaaggagctggagaagacctactcagcgaaactcgacaatgcaaggcagtcggccgagcgaaattctaacctcgtcggggctgcccacgaggaactccagcagagccgcattaggattgactctctatccgctcagctctcccagctgcagaagcaactcgccgccaaggaggccaagctacgcgatctggaagacagcctggctagggagcgcgacacctcccgtaggcttctcgctgaaaaagaaagagagatggccgagatgcgggctaggatgcagcaacaacttgacgaatatcaagaacttctcgatatcaagttggcgctagacatggaaattcatgcttatagaaagttgcttgaaggagaggaggaaaggcttaggctgtcaccaagccccacctctcaacgctctagaggacgcgcgtccagccacagttcacagacacaggggggggggtctgtaactaagaagcggaagctagaatcgaccgagtcgagaagttcctttagccaacatgcccgtacgtctggtcgcgtggccgtggaagaagtggacgaggacgaagatggcgacgatctgctgcatcatcaccatgtcagtgggagccgcaggtag

SEQ ID NO: 121858 - DNA, 1905 bp, synthetic construct
  misc_feature 1..1905: note = Description of Artificial Sequence: Synthetic coding sequence
  source 1..1905: mol_type = other DNA
atggaaactccgtcccagcgtcgcgctacccggagcggcgcacaggctagtagcacgccactatctcccacacgtataacccgtctgcaggagaaggaagacttgcaggaactaaacgaccggctagctgtgtatattgacagggtgcggagtcttgaaaccgaaaacgctggtctgcgcctgcgcataacggagtcggaggaggtggtgagcagggaagtctccggaataaaggccgcttatgaagctgagctcggggacgcgcgcaagaccctggactcagttgcaaaagaacgggcccgtttacagttagagctttccaaagtccgggaggaatttaaagaactgaaagctaggaatactaagaaggagggcgatttgatcgccgcacaggcgcggctcaaggatctagaagcccttctgaactccaaggaggccgcactgtctaccgctttgtcggagaaaagaacgctagagggcgagctccatgaccttcgaggccaggtcgctaagctggaggctgccctaggcgaggctaagaagcagctgcaggacgagatgctgcggcgcgtcgacgccgaaaataggctgcaaaccatgaaagaggagctcgatttccagaagaatatatactctgaggaattgcgggagacgaagcggaggcacgaaacccgtctcgtggaaatcgacaatggcaagcagcgtgagttcgaatcccggttggccgatgccctgcaggagctgagagcccagcacgaggatcaggtggagcagtacaagaaagaactggagaagacatactctgccaaactggataatgcgagacagtccgctgaaaggaatagtaacttggtgggagcagcacatgaggaactccaacagagccgaatccggatcgactcactgagcgcccagctgtctcagctgcagaagcagctggcagcgaaagaggcgaagctcagagatctagaggactccctcgctcgcgagcgggatacgagccgccgcctcctggcagaaaaggagcgcgagatggccgagatgagggcgaggatgcagcagcagttggacgaataccaggaattgcttgatatcaagctggcactcgatatggaaattcacgcataccgcaaactgcttgagggagaagaggaacgtctgcgactttctccttcccctacctctcaaaggagccgaggacgagcaagcagccactcatcccaaacacagggaggaggaagcgttaccaaaaagcggaagctcgaaagcaccgagtcccgcagctccttttcccaacatgcacggacgtcaggccgcgtagcagtcgaggaggtggatgaggagggaaagttcgtccgcctgagaaacaagagtaatgaagatcagagtatgggaaattggcagatcaagcggcaaaatggagatgacccactcctgacttatcgatttcctcctaagtttaccctgaaagccgggcaggtggtcaccatctgggcagccggggctggagcaactcacagcccacctaccgatctggtgtggaaggcgcagaacacttggggatgcggtaacagcctccgtacagcattgattaacagcacaggggagggatcacattgtagtagttccggggaccccgctgagtacaatcttcgatcacgcaccgttctctgcgggacatgcggccagcctgctgacaaggcgagtgccagtggatctggagcacaagtagggggcccaatttcatcaggatcatccgctagcagtgtaacggtaactcggtcttacagaagtgtggggggctctggggggggctcgttcggggacaatctggtgactcgctcatacctgttaggaaattcatcaccaaggacccagtctcctcagaactgttcaattatgtag

SEQ ID NO: 121859 - DNA, 1719 bp, synthetic construct
  misc_feature 1..1719: note = Description of Artificial Sequence: Synthetic coding sequence
  source 1..1719: mol_type = other DNA
atggaaaccccctcgcagagacgagccacaagaagcggagctcaagcgtcaagtacacctctgagccccacccgaattactagacttcaggagaaagaggacctccaggagctgaatgatcgtttggccgtgtacatagatagggtgaggagccttgagaccgaaaacgccggcctaagactgaggatcacggagagcgaagaagtcgtctcccgggaagtctcaggaattaaggccgcttatgaggccgagctgggcgatgcaaggaagaccctggatagcgttgccaaggaaagggctcgactccagcttgaattatccaaggtacgggaggaattcaaggaactgaaggcaagaaatactaaaaaggagggtgacctgatcgcagctcaagcccggttgaaggatttagaggccctgttaaactctaaggaagcagctctgagtacggccctgtctgaaaaacgcacactggagggagagctccatgatctgagaggacaggtcgccaagcttgaggccgccctgggagaagcaaagaaacagctgcaagatgagatgctgagacgggtggacgcggagaacaggctgcagacaatgaaagaggagttggattttcagaaaaacatttactcagaagaactgcgcgaaacaaagcggcgacacgaaacccgactcgtggagatcgataatggcaagcaaagggaatttgagtcacgcctcgccgatgcattacaggaactcagagcccaacacgaagatcaagtggagcagtataaaaaagaactggaaaagacttatagtgctaagttagataacgcacgacagagtgccgaacgcaacagtaatcttgttggtgctgcccatgaggagttacagcaatcccggattaggattgattctttgagcgctcagctatcccagctgcagaaacagctggccgcgaaggaggcaaagctgagggacctggaagacagcctcgctcgcgagcgagataccagccgtaggttgctggctgaaaaagaacgcgagatggccgaaatgagggctagaatgcaacagcaactggacgagtaccaagagctcttggatattaagctcgcccttgatatggaaattcatgcataccggaaactcctagaaggggaggaggagaggctgcggctgagcccttcaccaacctctcagcgctcaagaggcagagctagtagtcactccagccagactcaaggcggtggctccgtgactaagaaaaggaagctggaatctactgaatctcgcagctctttctctcagcacgctcggacatccggtcgggtggccgtggaagaggtagacgaggagggaaagtttgtaaggttgaggaacaagagtaacgaagaccagagcatgggcaactggcagatcaaaaggcagaacggcgatgatccccttctcacttaccgcttccccccgaagttcaccctgaaggctgggcaagtggtaacaatatgggcagctggagccggcgccacacacagtccgcctaccgaccttgtgtggaaggcccagaatacctggggttgcgggaactccttgagaactgcactcataaattccaccggcgaggaggtggcaatgcgaaaactggtacggtcagtcaccgtcgtggaagatgacgaagatgaggacggcgacgacctgctccatcaccatcacgtgagtgggagccgaaggtag

SEQ ID NO: 121860 - DNA, 1476 bp, synthetic construct
  misc_feature 1..1476: note = Description of Artificial Sequence: Synthetic coding sequence
  source 1..1476: mol_type = other DNA
atgcagccattactctgtctgggcaatctggaggacgcaagggaacgaactgggactctgctcgctcaacatcctgcatggggcaggactcgggcaaaacccgggagcccactgaacactaagaaggagggcgacctgattgccgcccaggcccggttaaaagacctggaggctctgttgaacagtaaagaggctgcactgtccaccgcattgtcagagaaacggacattggagggcgagctgcatgacctccgcggacaagttgcaaagctggaggccgcactgggggaggcgaaaaaacagttgcaggatgaaatgctgaggcgcgtggatgcggaaaatcgtctgcaaaccatgaaagaagagctggacttccagaagaacatttactcagaagagcttcgggagacaaagcgccgacacgagacgcgcctcgtggaaattgacaatggtaaacagcgggagttcgagtcgcgccttgctgatgctttgcaggagttgcgagctcagcacgaagaccaggtggaacaatataaaaaggagttagagaagacctattctgccaagctggacaacgccagacagtctgcagaaagaaacagtaatctggttggggcggcacacgaagagctccagcagagtcgcatccgcattgattcactgagcgctcaattgtctcaactccagaagcagctggcagcgaaggaggctaagctgcgcgatttggaagacagtctggctcgggaaagagacacaagtcggcgcctgctggctgagaaagagagagaaatggccgagatgcgtgcccgcatgcagcagcagctagatgagtatcaggagcttcttgacattaagttagctctcgacatggagattcacgcttatcgcaagcttctcgagggggaggaagaacgacttcggttgagcccctctcccacctcccaaagatccaggggaagggcttcctcacactcttcacaaacccagggcggtggcagcgtgactaagaaacgaaagctggaaagtacagagtctagaagctccttttcacagcacgctcgcacatccggccgtgtggccgtagaagaggtcgatgaagagggcaaatttgtgcgccttcgaaataaaagcaacgaagatcaatccatgggcaattggcagattaaacgccagaacggagacgatcctttgttaacctatcgcttccctcctaagtttaccctcaaggctggtcaggtcgtgactatttgggccgctggtgccggcgctactcatagtccccccacagatttggtttggaaggcccagaatacctggggctgtggcaactctctgcgaacagctctaattaatagcacaggagaggaagtcgctatgcggaaactggtgagatccgtgactgtggtggaggatgatgaagatgaggatggcgatgacctgctgcaccaccaccatgtgagtgggtcccgccggtag

SEQ ID NO: 121861 - DNA, 1845 bp, synthetic construct
  misc_feature 1..1845: note = Description of Artificial Sequence: Synthetic coding sequence
  source 1..1845: mol_type = other DNA
atggagaccccctcgcagaggagagcaacccggagtggcgcgcaggccagcagcacccctttatcccccacaaggatcacccggttgcaggagaaggaggatctccaggaactaaatgataggctggcagtgtacattgacagggtccgtagtctcgagaccgagaatgccggcctcagactacgaattactgaaagcgaagaggttgtgagtcgcgaggtgtctggcattaaggctgcgtatgaggcagagttgggcgacgcgagaaaaacactggacagtgtggcgaaggagagagccagactccaactcgagctgtctaaggtgagagaagagttcaaggaactgaaggcaagaaatactaagaaagagggggatctgattgcagcgcaggctcgactgaaagacctggaggccctactgaacagtaaggaggccgcactttcgacagcactgtcagaaaaacggactctggaaggagagcttcacgacttacgcggccaggtagcaaaactcgaagccgctctcggggaggcgaaaaagcagttgcaggatgagatgttgaggcgtgtcgacgctgagaaccggctccagaccatgaaggaggaactggatttccagaaaaacatctattcagaggagttgcgagagacgaagcggcgtcatgagactcgcctggtcgaaatagacaacggaaaacagcgcgaattcgaatcaagactagccgacgctctgcaggagctccgggctcagcacgaggatcaagtggagcaatataaaaaggaactggagaaaacctactcagccaagcttgacaacgcaaggcagtctgccgaaaggaacagcaacttggtgggggccgcgcatgaagagttgcaacagtcacggatcaggattgattccctgtcggcacagctcagccagttgcagaagcaattggcggcaaaggaagctaaactgcgggatttggaagattccctagcaagagagcgcgataccagcagacggcttctggctgagaaagagagggaaatggccgagatgagagctcgcatgcagcagcaactcgatgagtatcaggagctgctcgatatcaagttggcactggatatggagatccacgcttaccgaaaactcctcgaaggcgaagaggagcggctccgactgtcccccagccccacctcccaacggtctcgaggtcgggcctcctctcactctagtcagacacagggtggcgggagtgtcacgaagaaaaggaaactagagagcaccgagtctcgctcaagttttagccagcacgctcggacatcggggagggtagccgtcgaagaggtggatgaggaggggaagttcgttcgcctgagaaacaagagtaacgaagatcagtctatggggaattggcaaattaagagacagaacggagacgatcccctcctaacctaccgctttccgcccaaatttacacttaaggcaggacaggtcgtaactatctgggcggcaggagcaggcgccacccatagccccccaaccgacttggtttggaaggctcaaaacacctggggctgtggaaactcccttcgcacggctttgatcaactcaacaggtgaagaagtcgcaatgagaaagctggtgaggtccgttacagtggtggaagacgacgaggacgaagatggcgatgacctgctccatcatcatcacggctcccattgttccagctccggcgatcccgcagagtacaatctgaggtctcggactgtgttgtgtggcacttgtgggcaacccgccgataaggcctccgcctcaggttccggtgcgcagagccctcagaattgctcaatcatgtag

SEQ ID NO: 121862 - DNA, 1995 bp, synthetic construct
  misc_feature 1..1995: note = Description of Artificial Sequence: Synthetic coding sequence
  source 1..1995: mol_type = other DNA
atggagaccccaagccagcggagggctacaagatccggtgctcaagcctcctctactccactctcgcccacgagaatcacccggctccaagagaaagaagatctgcaggaactgaacgataggctagctgtctatattgaccgggtccggtcattggagacggagaatgccgggttgaggctaaggatcacagagagcgaagaagtagtcagtagagaagtttccggcatcaaagctgcttacgaagccgagcttggcgacgcacgcaagacccttgattcggtagcaaaagaacgggccaggctgcagcttgaactgagcaaagtgcgggaagagtttaaagaactcaaagcaagaaataccaagaaggagggggaccttatcgccgcccaggcccgactcaaggacctcgaagcgctacttaatagtaaagaagcagccctttctactgcactgagcgaaaagaggacactggagggggagctccatgacctcagaggccaggttgccaaactggaggccgcccttggggaagccaagaaacaactgcaagatgagatgttacggagggtggatgccgagaatcggctgcagaccatgaaggaagagttggactttcagaaaaatatatactctgaagaactgcgtgaaacaaagaggcgacatgaaaccagactggtggagatcgataacggaaagcaacgcgagtttgagtccaggctagccgatgcactccaggagttacgggcccagcatgaggatcaggttgaacagtacaagaaggaactggaaaagacgtacagtgcgaagctggataacgctcgccaatcagccgaacgtaactcaaacttggtcggggccgctcacgaggaactgcagcaaagtaggataaggatcgactcactcagcgctcagctctctcagttgcagaagcagcttgcagctaaagaggctaagctgagagacctcgaggactcgctggcacgagaaagagatacaagtagaagattgctagctgagaaagaacgggaaatggcggagatgcgagcccgcatgcagcaacagctggatgagtaccaagaactgttagacatcaaactcgcgcttgacatggaaattcacgcctacaggaagctcctggagggagaggaggaaagactgcgcctgagcccatcccccaccagccagcgctcgagagggagggcctcatcccatagttctcaaacccagggaggcggcagtgtcaccaaaaaaaggaaactagagtcaacagaatcacgctcaagtttttcccagcatgcgcggacttctgggcgggtcgctgtcgaggaggtcgatgaagagggaaagttcgtaaggctgagaaacaagtctaatgaggaccagagcatgggaaactggcagatcaagcggcaaaacggcgacgatccactactgacgtaccgattccctccaaaattcactctgaaggctggccaggtggtcacgatttgggctgccggcgccggtgcaacccactcaccgcccacagatctcgtttggaaggcccagaacacttggggttgcggcaattccctgcgaacagcactcataaactccacaggggaagaggtggccatgcgaaagctggttagaagtgtgaccgttgtcgaggacgatgaagacgaagatggagatgatctgttacaccaccatcacggtagtcactgttcatcttccggagacccagccgaatacaatctaagaagtaggacagttttatgtggaacctgcggccagccagctgacaaggcctcggctagtggatcaggtgcgcaggttggagggcctattagttcaggctcaagtgccagttcagtcaccgtgacacgatcatatagatctgtaggcggcagtggcggggggtcattcggcgataacctggttacgcgcagctacttgctcgggaactcatcccccagaacacaatccccccagaattgctcaatcatgtag

SEQ ID NO: 121863 - DNA, 1719 bp, synthetic construct
  misc_feature 1..1719: note = Description of Artificial Sequence: Synthetic coding sequence
  source 1..1719: mol_type = other DNA
atggaaactccttcacagaggcgagccacaaggagtggggcccaggctagtagcacccccctcagcccaactcgaatcacaagactgcaggagaaagaagatcttcaggagttgaacgacagactggcggtttatattgacagagtccggtctctcgaaaccgaaaacgcgggtctgagactcagaattacggaatcggaggaggtggtgtcacgggaagtgtcagggattaaagccgcatacgaggccgagttgggcgacgctaggaagacgctggattcggtggcgaaagaaagagcccgtctgcaactggagttgagcaaagtgagagaggagttcaaggaactcaaagctcgcaatacgaaaaaagaaggcgatcttattgctgctcaggcacgactcaaagacctcgaggccctgttgaacagcaaagaagctgctttgtctacagccctgtctgagaaacgaactctagaaggcgaattgcatgacctgaggggccaagtcgccaaactggaagcagcactcggtgaggccaaaaaacagttgcaggacgagatgctcaggcgcgtggatgcagagaaccgcttgcagaccatgaaggaagaacttgactttcagaaaaacatctactctgaggaacttcgcgaaacaaaacgcagacacgagacaagactcgtggaaatcgacaacggaaagcagagagaattcgagtcaaggctggctgacgctttgcaagaactccgggctcaacatgaggatcaagtggaacaatataaaaaagaattggagaaaacgtattcagcgaaactggataatgccagacaatccgccgagcggaatagcaacctggtaggggccgcccacgaggaactacaacagagcaggattcgtattgatagcctgagcgcccagttgagtcagttgcagaagcagctcgccgcaaaggaagcaaaactgagggacttggaggactcccttgctcgagagcgtgacacaagtcggagactattggcggagaaagaaagagagatggccgaaatgagggccagaatgcaacagcagcttgatgagtaccaggagctgctggacattaagttggcgctggacatggagatccacgcctaccggaaactgcttgaaggcgaggaagagagactgagactttccccctcacctacctctcagaggagtcgaggtcgcgcatcaagtcatagcagtcagacacagggtggaggctccgtgaccaaaaaacgaaaacttgagagcacagaaagtcggtcatccttcagccaacacgcacgcacttcgggtagagtggcggtggaggaagtcgatgaggagggaaagttcgtgcggttgcggaataagtctaacgaagatcaatctatggggaactggcagatcaaaaggcagaatggtgacgatcctttactcacatatcgatttccccctaaattcactctcaaggcaggccaggtggtaacaatatgggctgctggtgctggagctacacacagcccacctactgatctggtgtggaaggctcagaatacttgggggtgcgggaactccctcaggaccgcacttatcaattcaaccggcgaagaggtcgccatgcggaagctcgtgaggtcagtgactgtggtggaggatgacgaagatgaggacggggacgacctgcttcatcaccatcacgtgagtggctcacgtagatag

SEQ ID NO: 121864 - DNA, 1476 bp, synthetic construct
  misc_feature 1..1476: note = Description of Artificial Sequence: Synthetic coding sequence
  source 1..1476: mol_type = other DNA
atgcaaccactgttgtgcctgggtaacttagaagatgccagggaacgcaccggcactttgctggctcaacacccggcttggggccgcaccagagctaaacctggaagccctttgaataccaaaaaggagggcgacctgatcgccgcgcaagcacggctgaaagatctggaagctctcttgaatagcaaggaggcggccctgagtactgcgttgtcggaaaaaagaacacttgagggcgagctccatgacctgcgaggccaagtggccaaactggaagccgccttgggcgaggctaagaaacaactgcaggatgaaatgttgcggcgggtcgacgctgaaaaccgactacagacaatgaaggaggagctcgactttcagaagaatatttactctgaagagctcagggagacaaagcgccgccacgagactcggctagtcgaaatcgacaacggcaagcagagagagttcgaaagtagacttgcagatgcactccaggagctgcgcgcccaacacgaggaccaagttgaacaatacaagaaagaactggagaaaacttattcagccaagctcgacaatgccagacaaagtgctgagcgcaactccaatctcgttggagccgcgcacgaagagttgcagcagtcaaggattagaatcgatagcctgtcggcccagctgtctcagctccagaaacagctcgctgcaaaagaagctaaactgcgcgatttggaagatagcctagcaagagaacgagatacttcacggaggctgctggccgagaaggagcgggagatggcagagatgagggcccgcatgcagcagcaactggatgagtaccaagaattgctggacattaagttggcgctagatatggagattcacgcctaccgcaaactattggaaggggaagaagagagactcaggctgtctccctcacctacgtcacagcgaagccgcggacgggcctcatctcacagctcccagacccagggaggtgggagcgtgacaaagaagaggaagctggagagtacagagagccgatctagcttcagccaacacgctcgcacatccggccgagtggccgtggaagaggtggacgaagagggcaagttcgtgcggctgcgtaacaagtccaacgaagatcagagcatgggtaactggcagatcaagcgacagaacggagacgatccactgctgacttacaggtttccccctaagttcacattaaaagctggacaggtagtgacaatctgggcagccggcgcaggggccacacacagtcctccgactgatcttgtttggaaggcacaaaacacctggggttgcggaaattctttaagaacagctctgatcaattccactggagaagaggtggccatgcgtaaactggtgagatccgtaacggtcgtggaggatgacgaagacgaagatggcgacgatctcctgcatcaccaccacgttagtggctccaggaggtag

SEQ ID NO: 121865 - DNA, 1464 bp, synthetic construct
  misc_feature 1..1464: note = Description of Artificial Sequence: Synthetic coding sequence
  source 1..1464: mol_type = other DNA
atggaaactccgagccagagacgcgcaactcgatccggggcccaggctagctctacacctctgtcacctaccagaattacacggcttcaggagaaagaggacctacaggaactcaatgaccggctggccgtgtacattgatcgggtcaggtctctcgagaccgagaacgccggtttgcgacttagaatcaccgagtccgaggaagtggtttctagagaagtaagtggaattaaagctgcgtacgaggccgagcttggagatgctaggaaaacactggactccgtcgctaaagaacgcgctaggctgcagctggagttatccaaggtcagagaggagtttaaggagctcaaggcccgaaacaccaagaaagagggtgaccttatcgctgcccaggctcggctgaaagacctcgaggcgctgctgaattctaaggaggccgccctgtcaactgctctgtccgagaagcggaccctggagggcgaattacatgacctcagagggcaagtcgccaaactggaggccgcactcggcgaggctaagaagcagctgcaggacgaaatgctgaggagagtggacgctgagaatcggctccaaaccatgaaagaggagcttgatttccaaaaaaacatttacagtgaggagctgcgggagacgaagagacgacatgagaccagacttgtggagatagacaatggcaagcagagagagttcgaaagccggctcgctgatgcactacaggaactgcgtgctcagcatgaagaccaggttgagcagtacaaaaaagagctggagaagacttatagcgcgaagctggacaacgccagacagtcagccgaaagaaatagtaatctggttggcgccgcccacgaggaactgcaacaaagccggatacggatcgattccctgagtgctcagctgagccagctgcagaaacaactggctgcgaaagaggctaaactgagggacctggaggacagcctggctcgggagagggacacctctcgtcgattgctggctgagaaggagagggagatggccgagatgagggcgcggatgcagcagcagctggacgagtaccaggagttgctggatatcaaacttgcgctagacatggaaattcacgcttatagaaaactgctggagggagaggaagagcgcctgagactaagtccttccccgaccagccagcggtcccgaggaagggcatccagccattcttctcagacacagggcggcggatcagtaactaaaaaaagaaaactggagagcactgagtccaggtccagcttttcacaacacgcaagaacatccggcaattctctgaggaccgcactgattaactctacgggagaagaagtagccatgcgcaagctagtccgttctgtgaccgtggtagaggacgatgaggacgaagacggcgatgatctgctgcatcatcatcacgtgagtggatcacgccgctag

SEQ ID NO: 121866 - DNA, 1725 bp, synthetic construct
  misc_feature 1..1725: note = Description of Artificial Sequence: Synthetic coding sequence
  source 1..1725: mol_type = other DNA
atgggcaattctgaagggtgcaatacaaagaaggagggagacctgattgccgctcaagcccggcttaaagacctcgaggccctgcttaacagcaaggaggccgccttaagtacagccctgtcagagaaacggactctcgaaggtgagttgcatgatctgcgcggacaggtggccaagttagaggcagcccttggggaagccaagaagcagctccaagatgaaatgctacgtagagtggacgccgagaaccggctgcagactatgaaggaagaactggattttcagaagaacatctactctgaggaactaagggagaccaagagacggcacgagacacgcctggtggagattgacaatggcaagcagagagaattcgaaagtaggctcgctgatgccctgcaggaactcagagcgcagcacgaagatcaggttgagcagtacaaaaaagagctggaaaagacgtattccgcaaagctggataacgcccgccagagtgcggagagaaactccaatctggtcggggctgctcatgaggagctacaacagagcagaataagaatcgacagcctctcagcacaactgtcccaactgcagaagcagctggccgctaaagaggccaaactccgcgacctagaggacagcctggccagagaacgcgacaccagcagaagactactggccgagaaagaacgcgagatggctgaaatgcgtgctaggatgcagcaacagttggacgagtatcaggaattactggacatcaagctggcactggatatggagatccacgcgtataggaagttgctggagggagaggaggaaagactccgactgtcacctagtccgactagccagaggtcaaggggccgcgcatccagccattcttcccagacacagggaggggggagcgtgacaaaaaaacggaaactagagtcgacagaatcacgaagttctttcagtcagcacgcccgtacttccggccgggtggcggtggaagaagtggacgaggaggggaagtttgtccgtctcaggaacaaatccaacgaggaccagtcaatgggaaattggcagataaaaaggcagaatggggacgaccccctgctgacctatagatttccacctaagttcacactgaaagcaggacaagtagtgacaatttgggcagctggggctggagctactcactctcccccgaccgatctcgtctggaaagcccagaacacctggggatgcgggaatagtctgcgcaccgcactaataaattcaacaggcgaagaggtcgccatgcgcaagttggtcagatctgttacagtggtcgaggatgatgaagatgaggacggagatgatctccttcaccaccatcatgggtcacattgctcctcatctggggatccagcggaatataatttaaggtccagaaccgtgctgtgtgggacctgtggccaacccgccgacaaggcatccgcgtccggttccggcgcacaagtgggcgggcccatatccagcggtagttccgccagttccgttaccgtgacacggtcctatcgttcagtcggggggtccggggggggttcttttggagacaacctggtgaccagatcctacctgctgggtaattcgagcccgagaactcaaagcccgcagaattgctcaatcattcaggagatgggaatgaggtgggaagtcgaagagggccggagaaaagtgagcctgtcgtgcctcccctag

SEQ ID NO: 121867 - DNA, 1848 bp, synthetic construct
  misc_feature 1..1848: note = Description of Artificial Sequence: Synthetic coding sequence
  source 1..1848: mol_type = other DNA
atgccaagccggaaattcgccgacggtgaggtagttcgcggcaggtggcccgggtcctccctatactatgaagtagagattttgtcacacgattccacatcgcagctatacaccgttaagtacaaggatgggactgagttggaactgaaagagaacgacatcaaacccctgacatccttcaggcagaggaaaggcggaagcacctctagctctccatcaaggagaagaggaagccgttcgcgaagccggtcccggtccccaggacgaccaccgaaatctgcccggaggtccgccagtgccagccatcaagcagatatcaaggaagcccggcgcgaggtggaggtgaaactgactccactcatcctgaagcctttcggaaattcaatctctagatacaatggagagccagagcatattgaacggaatgatgctcctcacaagaatactcaggagaaattttctctctctcaggaaagtagttacattgcaacccagtactctttgcgacctagacgagaggaagtcaagcttaaggaaattgattctaaagaggagaaatatgttgctaaggagctggcagtgagaactttcgaggtgactccgatccgagccaaggaccttgaattcgggggcgtgcctggcgtgttcctcatcatgttcggcttgccagtatttctgttcctgctgctgctgatgtgcaaacaaaaggatcctagtctactcaatttcccccctccacttcccgcattatacgaactatgggaaacaagagtgtttggagtctatctgctgtggtttcttattcaggtgttgttctatctgttgccgatcggaaaggtcgtcgagggcaccccacttatcgacgggaggaggctgaagtatcgcctcaatggcttttatgcgttcatccttacatccgccgtaattggtacctcactgtttcagggcgtggaatttcactatgtctactcccattttctgcagttcgcgctggcagcgacagtcttttgcgtggtcctttcagtttatctgtatatgagatcgttgaaagcgccgcgcaatgacttgagtccagcttctagtggtaacgctgtctacgactttttcatcggacgagagctgaatccaagaatcggcacatttgaccttaagtatttctgtgagctcaggccagggctgataggctgggtggtgatcaacctggtgatgcttctggctgagatgaagatccaggaccgagcagtgccttccctagcaatgattctagttaactctttccagctgctgtacgtagtcgatgccctgtggaacgaagaagcacttctaacgaccatggacattatccatgatggtttcggattcatgctggccttcggtgatctggtgtgggtgccgttcatttattcttttcaggcattttatctcgtctcccatccaaatgaagtgtcttggccaatggcaagcctcatcatcgtcctcaaactctgtggatatgttatcttcagaggcgccaacagccaaaagaacgcttttagaaaaaatccgtccgaccctaagctggcacacctgaaaaccatccacacttctaccggcaaaaacttactggtgtccggctggtggggcttcgttaggcatcctaactatctgggagatctgattatggcgcttgcatggtccctcccctgtgggtttaaccatattctcccatacttctacatcatttacttcacaatgctgttagtacatcgcgaagcacgagacgagtaccactgcaaaaaaaaatatggcgtcgcatgggagaagtattgtcagcgggtaccctatcgcatcttcccatatatatactag

SEQ ID NO: 121868 - DNA, 1848 bp, synthetic construct
  misc_feature 1..1848: note = Description of Artificial Sequence: Synthetic coding sequence
  source 1..1848: mol_type = other DNA
atgccctctcggaaatttgcagacggagaagtagtgcgaggaaggtggccggggtcatccctgtactatgaggtggagatcctctctcatgactcaacttcccagctttataccgtaaagtataaagacggaaccgaactagagctgaaagagaacgatataaagcctctgactagctttcggcagcgtaagggcggcagcacctccagttccccctcaaggaggcgcggctccaggtcacgatcaaggtcccgctcccccggaaggcctcctaagagtgcacgtcgtagcgcaagcgcatcacaccaggccgatattaaggaagctagacgagaagttgaggtaaagctgactccactaattctaaaaccttttggcaattccatctcgaggtacaacggtgagcccgagcatattgaaaggaacgacgcaccacataaaaacactcaggagaagttttcactcagtcaagagtcgagctatatcgctacacaatacagcctcaggccccgccgggaggaagtaaagctgaaggaaattgattctaaggaagaaaagtacgtggctaaagaactggcagtccgcactttcgaggtgaccccaatccgagccaaagacctcgagtttggaggcgttcccggcgtgttcctcattatgttcggactgcccgtcttcctctttttattacttctaatgtgtaaacaaaaagaccccagtctgttgaatttcccgccgcctcttcccgcgctatatgagctctgggagactcgagtgtttggcgtttatctcctttggttcctgatccaggtgctgttttacctgctacctattggaaaagtggttgaaggaacacccctgatcgatggtagacggcttaagtatcgattgaatggattctacgctttcattttaacctcggccgtcattggaacgagcctgttccagggtgtcgaattccactatgtttattcccacttccttcagttcgccctggcagccactgtattctgcgtggtgttatccgtgtatctttacatgcgcagccttaaagctcctaggaacgatctgagccctgctagcagcggcaatgccgtgtacgatttcttcattggacgcgaactcaatcctcggataggcacatttgatctgaaatacttctgcgaactccgcccaggcctgatcggctgggtagtgatcaatctagtcatgttgctggctgagatgaaaatccaagaccgtgccgtgccctcactcgctatgatcctggtgaacagctttcagcttctatacgtcgttgatgcattatggaatgaagaagccctcctaaccactatggacattattcacgacggatttggcttcatgctcgcttttggagatctcgtctgggtgccatttatctatagttttcaggccttctacctcgtgtcacacccaaacgaggtgagctggcctatggcatcgctgatcattgttctaaaactctgcggctatgtcatctttcgtggtgcaaactcacagaaaaatgcttttcgaaagaacccttccgatcctaagctggcccatttaaagaccatacatacttcaaccggtaaaaatctgttggtgagcggatggtggggctttgtgcgccacccaaattacctcggggacctgatcatggcattagcctggtcattgccatgtggttttaaccatattctcccatatttttacattatctacttcaccatgcttcttgttcaccgggaggcacgtgacgaatatcactgtaagaaaaagtatggcgtcgcttgggagaaatactgccagcgcgtgccctatcgaattttcccttacatctactag

SEQ ID NO: 121869 - DNA, 156 bp, synthetic construct
  misc_feature 1..156: note = Description of Artificial Sequence: Synthetic coding sequence
  source 1..156: mol_type = other DNA
atgccttcgagaaaatttgcagatggcgaagtagtcagaggaaggtggcctggaagtagtctatactacgaggtggaaattctctcccacgattccacttcacaactgtatactgtgaagtacaaggacggcacagaattagaactgaaggagtag

SEQ ID NO: 121870 - DNA, 387 bp, synthetic construct
  misc_feature 1..387: note = Description of Artificial Sequence: Synthetic coding sequence
  source 1..387: mol_type = other DNA
atcggcagggagctcaatccccgaatcggcacattcgacctcaagtatttttgcgagctgcgccctggactaattggctgggtggtcattaatctagtgatgctacttgcagaaatgaagatacaggaccgggcggtgccctctctggccatgatccttgtgaattcttttcagctgctctatgtggtcgacgcgctgtggaatgaggaagctttgctgactaccatggatattattcatgacggcttcggattcatgcttgccttcggcgatctggtgtgggtacccttcatctacagctttcaggccttctatttggtttctcacccaaacgaggtatcttggcccatggcttctctgatcatcgtgctgaagcgagagtactag

SEQ ID NO: 121871 - DNA, 642 bp, synthetic construct
  misc_feature 1..642: note = Description of Artificial Sequence: Synthetic coding sequence
  source 1..642: mol_type = other DNA
atgccgtccagaaaattcgccgacggagaagtggtccggggccgctggcctggctctagtctatattatgaagttgaaatcctttcccacgattctacatcccagctttacacagtcaagtacaaagacgggacggagcttgagttgaaggaaaacgacatcaagcctttgacttcattcaggcagcggaagggaggcagcaccagctcctcaccaagtagacgccgaggaagcagaagccgctccagatcccggagtcctggacgacccccaaaaagcgcgcggaggtcagctagtgctagtcatcaggccgacatcaaggaggcgaggcgggaggtcgaagtgaaactcacccccctgatcctgaaacctttcgggaactccatcagcagatataacggggagccggaacatatagagcgaaacgatgctccccataaaaacacacaggagaaattcagcctatctcaggagtcttcttacattgccactcagtacagcctcagaccacgccgcgaagaggtgaagctgaaggagatcgattctaaggaggagaaatacgtagcaaaagagctagccgtgagaacatttgaggtgactccgatcagagcaaaagatctcgaattcgggggcgtgccgtag

SEQ ID NO: 121872 - DNA, 324 bp, synthetic construct
  misc_feature 1..324: note = Description of Artificial Sequence: Synthetic coding sequence
  source 1..324: mol_type = other DNA
taatctacctctctgaaaatgtacttctacttctacatagatctgaagacaattcatacttcaacaggcaagaatctgctagtgtctgggtggtgggggtttgtcagacacccaaactatctcggggacctcataatggcactggcatggtcattgccatgcggatttaatcacatcttgccttacttttacattatctattttactatgctactggttcacagagaagcccgagacgagtaccactgcaagaaaaagtatggggtggcatgggagaaatactgtcagagggtgccttatcggattttcccgtatatatattag

SEQ ID NO: 121873 - DNA, 1761 bp, synthetic construct
  misc_feature 1..1761: note = Description of Artificial Sequence: Synthetic coding sequence
  source 1..1761: mol_type = other DNA
atggccactgcgacacctgtgcctcccaggatggggtcaagggccggggggcccactacccccctgtcacccacacggctttcaaggttgcaggaaaaggaggagttgcgagagctgaatgaccggctggctgtgtacattgataaggtccggtctttggaaacagaaaactccgctctgcagttgcaggtgaccgagagagaggaagtccgaggcagagagcttacaggacttaaggccctgtatgagacagagttggcagatgcccggagggctcttgacgataccgctcgcgaaagggctaaactacagatcgagcttggtaagtgtaaagcagagcacgaccagctactgctgaattatgcaaagaaggagtcagatctaaacggggcgcagattaagttgcgtgaatacgaggcagcacttaacagtaaggacgcagccttggctaccgcgctaggcgataagaaaagcctggagggagacctggaggacctgaaagaccagatcgctcaactggaggctagcctcgctgccgctaagaagcagttagccgatgagacactcctcaaggtcgatctcgagaataggtgtcagtctttgacagaagatctagaatttcggaaatctatgtacgaagaggagatcaatgagaccaggaggaagcatgaaacccgactggtcgaagttgattctggtcggcaaatcgaatacgaatataagctggcccaggcgctgcacgagatgagggagcagcacgacgctcaggtgcggttatataaggaagagctcgagcaaacttaccacgccaaacttgagaacgccaggttgagctccgaaatgaatacctcaacggtcaattccgcccgggaggaactgatggagtcacggatgcggatcgaaagcttgtcgtctcagttaagcaacttacagaaagagtcacgcgcatgtcttgaaagaattcaagagttagaggatttattagccaaggaaaaggacaattccagacgaatgctaaccgacaaggaacgggagatggctgagattagagaccagatgcagcagcaactgaacgactatgagcagctcttagatgtgaaacttgctctcgacatggaaatttccgcctatcgtaaactgctagagggcgaagaggaacggctgaagctgtctcccagtccttcaagcagagtgactgtatcacgagcgtcatcttcaaggtcagtgaggaccactcgcggtaaaaggaagagggtggatgtggaagagagcgaggcctcgtccagtgtaagcatcagccacagtgccagcgccacaggcaacgtgtgtatcgaggaaattgacgtggatggcaaatttatccgcctcaagaatacttctgagcaagatcagcccatgggcggctgggagatgataagaaaaattggggacacctccgtgtcatataagtacaccagccgctacgtgcttaaagcagggcagacagtgactatctgggcagccaacgccggggtgaccgctagcccccctaccgatcttatttggaagaaccagaactcctggggcacgggggaagatgtgaaggtcatcctcaagaatagtcagggagaggaagtcgcccaaagatctacagtgtttaagacaacaattcccgaggaagaggaggaagaagaggaggcagctggggtagtggttgaagaggagctttttcatcaacagggcacgccacgcgcctccaatcgttcatgcgccatcatgtag

SEQ ID NO: 121874 - DNA, 1803 bp, synthetic construct
  misc_feature 1..1803: note = Description of Artificial Sequence: Synthetic coding sequence
  source 1..1803: mol_type = other DNA
atggccacccctttgccgggtcgtgccggagggccggctactcctctatctcccacaagactgtctaggctccaggagaaggaggagctacgcgagcttaatgacagactggctcactatatcgatagggtgcgagctcttgagcttgagaacgaccgtctattgctgaaaatcagcgaaaaggaagaggtgacaacccgggaggtatccggaatcaaggctctgtacgaaagtgaattagccgacgcacgccgggtcctggatgagaccgcccgagagagggcaagattacagatcgagatcggaaaattacgcgccgagctagatgaggtaaataagtcagctaagaagcgggagggcgagctgaccgtggctcagggtcgagttaaggacctggaatctctttttcatcgcagcgaagtggaactagccgcggccctgagcgataagcgtggtttagagagcgatgttgccgagctgagggcccagctggccaaagcggaggacgggcacgccgtagccaagaagcaattggaaaaagaaactctcatgcgggtggatttagagaatcgctgccaatctctccaagaggaactggacttccggaaaagtgtgtttgaggaggaggtcagagagacaagaaggcggcacgagaggcgcctggttgaggtggacagcagccgtcaacaggagtatgatttcaaaatggcccaggccttggaggagttgcgatctcaacatgatgagcaagttaggctctacaaactcgaactggagcagacctatcaggctaagctcgactcagcaaagctgtctagtgatcagaacgataaggcagccagcgctgcccgggaggaattgaaagaggctcgaatgaggctcgagtcactgagctaccagcttagcggccttcagaagcaggccagcgcagctgaggatcggattagggaacttgaagaagcaatggctggggaacgtgacaaattccggaagatgctggatgccaaggaacaagagatgaccgagatgagagatgtgatgcaacaacagctggccgaataccaggagctcctagacgttaaacttgccttggatatggaaataaatgcttatcgcaagttgctggaaggtgaagaagaacgactaaaacttagcccctccccctccagtagagttacagtttccagggcgaccagtagtagctccgggagtcttagcgccactgggcggctgggccgctctaaacgcaagcgactcgaagttgaggaacctctaggctccgggccctctgtgctgggaactggaacaggcggctccggcggcttccatttagcacagcaggcctcggccagcggctccgtgtccattgaggagattgacctggaaggaaaatttgtgcaactcaagaataactcagataaggaccagtcgttgggtaactggcgcatcaagcgccaggtgcttgaaggcgaggagatcgcctataagtttactcctaaatacatactgagagctggccagatggtcaccgtatgggccgctggcgccggcgtagcacatagtcccccctctaccctcgtctggaagggacagtctagctgggggacaggcgagtcctttcgtacagtcttagtgaatgccgatggagaagaggtggccatgcgcactgtgaaaaagtcttcggttatgagggagaacgagaatggggaagaggaggaagaggaggccgagttcggggaagaagacctttttcatcagcagggtgaccctagaacgacctcgaggggatgttacgtgatgtag

SEQ ID NO: 121875 - DNA, 1803 bp, synthetic construct
  misc_feature 1..1803: note = Description of Artificial Sequence: Synthetic coding sequence
  source 1..1803: mol_type = other DNA
atggctacccccctcccagggagagccggcggccctgccacgcctttatctccaactaggctgtcacgattgcaggagaaggaggagcttcgtgagctgaacgaccgcctggctcactacatcgaccgagtgcgagcgctggagctcgagaacgacagactgctgcttaagattagtgaaaaagaagaagtgacaacacgcgaagttagcgggattaaggctctgtatgaaagcgagctggccgacgctcgacgtgttctcgatgaaaccgcgagagagagggccagactccagattgagattggaaaacttcgcgcggagcttgacgaggtgaataaatccgcgaaaaaacgcgagggagaactcacggtcgcccagggcagggtgaaggatctagaatccttgtttcacagatctgaagtcgaactggctgcggctctgtcagataaacggggtctcgagtccgacgttgccgagctgcgcgcccagctggcaaaggccgaagacggccatgcagttgcaaagaaacaactcgaaaaagagacccttatgcgagttgaccttgaaaatagatgtcaaagcctccaggaggagctggacttcaggaagagtgtgtttgaagaggaggtgcgagagactaggaggcgtcatgagaggaggttagtggaggtggacagttctagacagcaggagtatgattttaaaatggctcaagctctggaggaactcaggtcacagcacgacgagcaggtgcgcctttacaagttggagttggaacagacgtatcaggccaagttagattctgccaaattatcttctgaccaaaacgataaagccgcatcagccgcccgcgaggagcttaaggaagccaggatgaggctggagtctctgagctaccagctctcaggactgcaaaaacaggctagtgcggcagaggacagaatccgagaacttgaagaggccatggccggagaaagagataagtttcgaaaaatgctcgacgccaaagagcaggagatgacggagatgcgagatgtcatgcagcaacaactggcagagtaccaggagctcctagatgtgaagctcgccctcgatatggaaatcaatgcatatagaaaattgctagaaggagaggaagaacgcctgaagctctcaccctcacctagcagtcgcgttactgtgtctagggccaccagctcaagcagcggctccttatctgcaacgggccgcttgggaaggtctaaacgcaaacgactggaggtcgaggagcccctgggcagcggaccttccgtgttgggaactggtaccggaggttctggcggctttcacctggctcagcaggcctcagccagtggttctgtgtctatcgaggagatcgatctggaaggtaagttcgtgcagcttaaaaacaatagcgataaagatcagtctctaggaaactggcggataaaacgacaggtactggagggcgaagaaatcgcctacaagtttacaccaaagtatatcctgcgcgctggacagatggtgactgtgtgggctgccggtgccggggttgcgcatagccctccctcgactttggtgtggaagggacagtcctcttggggaacaggcgagtcatttagaaccgttctcgttaatgcagatggcgaggaggtcgctatgaggaccgtaaaaaaatccagcgtgatgagagaaaacgagaatggggaggaggaagaagaggaggccgagttcggagaggaggacttatttcaccagcagggtgatcctaggactacctctaggggctgctatgtaatgtag

SEQ ID NO: 121876 - DNA, 651 bp, synthetic construct
  misc_feature 1..651: note = Description of Artificial Sequence: Synthetic coding sequence
  source 1..651: mol_type = other DNA
atgctaattggaggcaacattgaggtgcacgtgaaccctggtgacggcacgggcttacggaaggcgctgctacacgcacctacgggcacctgctcagatggccaggcacactcaatttcattagtgagaaaccgaaggatcattaccgtgcagctggatgagaacaaccctgtggaaatgaagctgggtacactggttgagtcccggaccataaatgtctctaacctttatgttggcggcatccccgaaggggagggcactagtctcctcactatgcggcggtctttccacgggtgtatcaagaatcttattttcaaccttgagcttctcgactttaactctgccgtcatgagcaagtccacatggactcccgcaggttgtcagaagggtctgagttggctgcctatgcagcggaccaagctgctcccagagccaagagccttccccgtgggagctgcctcattcacaatctcccaggttcaaagcgcaaaggaaggactggggcagagagagctgaaatgggggctcgcagttaaagtccccgccaaggcaggcgctggggccggagcgggcgccgtacttaagatccgcgccggtaccggaagggaacgtgtgcctcaggctacacaaatgactcggcccaacccctag

SEQ ID NO: 121877 - DNA, 9228 bp, synthetic construct
  misc_feature 1..9228: note = Description of Artificial Sequence: Synthetic coding sequence
  source 1..9228: mol_type = other DNA
atgaggggcggggtgctgctcgtgctccttctgtgcgttgcggcacagtgcaggcaacggggactatttcccgcaatcctcaatctcgcgagcaatgctcatatttcaaccaacgccacttgtggagagaaaggccctgaaatgttttgcaaacttgttgagcatgttcctggccgcccggtacggaaccctcagtgccgtatttgcgacgggaattccgcgaaccctcgggagcgacaccctatctcccatgctattgatggcactaataattggtggcagagcccttctatccagaacggccgggaatatcattgggtgaccatcactctggatctccgccaggtgttccaagttgcatacgttatcattaaggcggccaacgcgccgcgtccaggcaattggattttggaaaggtctctagatggtacaacattttctccctggcagtactatgcggtgagcgacagcgaatgtctgtcccggtataacatcactccgaggcgcgggcccccgacttacagagccgacgatgaggtgatctgtacatcatactacagtcgactggtgccactagagcatggtgaaattcacacatccctgattaatgggcgaccctctgcagacgacctgtccccaaagctcctggagtttacttccgcacgctatatcaggctgcgattacagcggatcaggaccttgaacgccgacctgatgactctgtctcaccgagaacctaaggagttggatccgatcgtgaccaggcgttactactacagcataaaggacataagtgtgggggggatgtgcatctgttatgggcacgcgtccagttgcccatgggacgagactaccaaaaaattacagtgtcaatgtgagcacaatacttgtggagagagctgtaaccgctgctgccccggataccatcagcagccttggcgacctggcaccgtgagcagcggtaacacctgcgaggcctgcaattgtcataacaaggcaaaggattgttattacgacgagtcagttgctaaacaaaagaagtcacttaacactgctggccaattcaggggcggaggtgtctgcatcaattgcctccagaacacaatgggcattaactgcgaaacctgtatcgacggctactacaggcctcataaggtttctccttatgaggacgagccctgtcgcccctgcaattgcgatccagtcgggtctctgtccagtgtttgtatcaaggacgacctgcactccgacttgcataacggcaagcagccaggtcaatgtccatgcaaggaggggtataccggcgaaaaatgcgataggtgtcaactgggatataaggattacccaacctgcgtatcttgcggctgcaatccagtggggtcagcttccgacgaaccctgcaccggcccatgtgtctgcaaggagaatgtggagggaaaagcttgcgatagatgtaaacccggattttataacctgaaagagaaaaatccccgcgggtgctctgaatgtttctgctttggcgtgagcgacgtgtgctcatctctgtcctggcctgtgggccaggttaattcaatgtccggctggctcgtcacagatctgattagtccaagaaagataccatcacagcaggacgccctggggggtagacatcaagtctctattaacaacaccgcagtgatgcagcggcttgccccaaaatattattgggctgcccctgaggcctacttgggaaacaagctaacagcttttggaggttttctgaagtacacagtctcgtatgacatccccgtggagaccgtggacagcaacctgatgtcacacgcggacgtcattatcaagggaaacggactgaccttgtctactcaggccgaggggctcagcctgcagccgtatgaggaatatctgaatgtcgtgaggttagtgccagagaattttcaggattttcacagcaagaggcaaatcgatagagatcaactcatgaccgtcctggctaatgtgactcatctgcttatccgagctaattacaactcggcaaaaatggctctttataggctggaaagcgtgtcactcgatatcgcaagcagcaatgctattgacttggtggttgccgctgacgtggagcattgcgagtgccctcagggatacacagggacgtcttgtgagagttgtctgtcaggctactatcgagtggatgggatcttattcggtggtatttgccaaccttgcgagtgccacggccatgctgctgagtgcaatgtgcacggggtgtgtatagcttgcgctcacaacactacgggtgttcactgtgagcagtgcctgcccggtttttatggtgagccttctcgtggtacccctggggattgccagccctgtgcttgccctttaacaatcgcctctaacaacttctctcccacatgtcatctgaatgatggcgatgaagtcgtgtgcgattggtgtgcacctggttactcaggggcttggtgcgagagatgcgccgatggatactatgggaatcccaccgtacctggggaaagttgtgtgccctgtgactgtagcggaaatgttgatccaagcgaggctggtcactgcgacagcgtgaccggggaatgtctaaagtgcttgggaaataccgatggtgcccactgcgagcgatgtgccgacggcttttacggcgatgccgtcaccgctaaaaattgccgggcctgtgaatgtcacgtaaaaggcagtcatagtgcagtctgccatctggaaacagggctgtgcgattgcaagcctaacgtgacaggccagcaatgcgatcagtgtctgcacggctactacggcttggattctggccacggctgtagaccctgtaactgcagtgtggccggaagcgtcagcgacggctgcactgacgaaggacagtgccattgcgttccaggagttgctggaaagagatgcgatagatgtgctcacgggttctatgcctatcaggacggatcatgcaccccctgtgattgcccccacactcagaacacctgtgacccggagaccggagaatgtgtatgccctccccacacgcagggagtcaaatgcgaggagtgcgaggacggccactgggggtatgatgccgaggtcggatgccaagcctgcaactgttccctggtggggtcaacacatcaccggtgcgacgtggtgacgggacattgccaatgcaaatctaaattcggtggaagggcttgtgatcagtgctcactgggataccgagatttccctgactgtgttccctgcgactgtgacctccgtggaacctcaggagatgcctgcaaccttgaacagggactgtgcgggtgcgtggaggaaacaggggcatgcccctgtaaagaaaacgtcttcggaccccagtgtaatgaatgccgtgagggcacatttgccctccgggcagacaatcctctggggtgctccccttgcttctgctcagggctttcacacctctgtagcgaactggaggactacgtgcggacacctgtgacactggggtctgaccagccccttctccgggttgtgtctcagagcaatctaaggggaaccaccgagggcgtctattatcaggctccggatttcttgctggacgctgctaccgtccgccagcacatccgcgctgagcctttttattggcggctgccacagcagtttcagggcgaccagctcatggcttatggtggcaaacttaagtactccgtcgctttctacagcttagatggagtgggaacgagcaacttcgagcctcaggttctcataaagggcgggaggataaggaagcaggtgatttacatggatgcgcccgccccagagaacggcgtacggcaggaacaggaggtggctatgcgtgaaaatttctggaaatacttcaatagtgtatcagagaagcccgtgacaagggaggacttcatgtccgtgctttcggatatcgaatacatcctgatcaaggccagttacggccagggcctccagcaaagcaggatcagcgatataagtatggaggtcggaagaaaggcagaaaaattacacccggaggaagaggtggcctcgctgcttgaaaactgtgtgtgcccaccagggacagtgggtttctcctgccaagactgtgctcctggttaccatagagggaaacttccggcggggtccgaccgcggtccaaggccgctggtggccccgtgtgtgccatgtagctgtaataaccactcagacacctgcgacccaaacactggcaaatgcctcaattgcggagataacacagcaggagaccactgcgatgtgtgtaccagtggttactacgggaaagtcaccggcagcgcatccgactgcgctctctgcgcatgtccccactccccgccagctagcttttcccctacatgcgtgctagaaggggaccacgattttcggtgcgacgcatgcctattgggatacgagggcaagcattgtgagagatgctcctcctcatactatggaaatcctcagacgcctggaggttcctgtcagaagtgtgactgtaatccccatggcagcgtgcacggagactgcgataggacgagcggacagtgcgtgtgtagattgggggcttcaggcctgcggtgtgacgaatgcgagccccggcacatccttatggaaactgattgcgtgagctgcgacgacgagtgcgtgggcgtgctattgaacgacctggacgaaattggagacgcagtactgagcttgaacttgaccgggattatcccagtcccttacggaatactctcaaacctcgagaacacaacgaagtacctgcaggagtcactcctcaaggagaatatgcagaaagacttgggcaagattaaactggagggggtggcggaagagacggacaatttacagaagaagctgactaggatgttggcctccacgcagaaagttaatcgggctaccgagaggatcttcaaggaatcccaggatctagccatcgccatcgagcgtcttcagatgtctattaccgaaatcatggagaaaaccacgttaaaccagaccctcgatgaagactttctgttgccaaattctactctgcagaacatgcaacagaacggtacaagtcttctcgagatcatgcagatacgtgatttcacgcagctgcaccaaaacgccaccttagaattgaaggctgccgaagacctgctgtctcagatccaggaaaactaccagaaacccctggaggaactggaagtgcttaaagaagcagcatcacatgtgttgtccaaacataacaacgagctcaaggctgctgaggccctggtgcgcgaggcagaggctaaaatgcaggaaagcaaccatcttctgctgatggttaatgcgaacttgcgggagttcagcgacaaaaaactgcacgtgcaggaagaacagaatcttacctccgagctcattgtgcagggtagaggactcatcgacgccgccgcagctcagacagacgccgtgcaggatgccctggaacaccttgaggatcaccaggataagcttctgctctggtcagccaagattcgccaccacattgacgacctagttatgcacatgtctcagagaaacgctgtggacctggtgtacagggcagaagaccacgccgcggagttccagagattggccgatgtgctgtatagtggattggaaaacatccgaaacgtgtcacttaacgccactagcgccgcatatgtgcattataacatacagagtctcatcgaagaaagcgaggaactcgctcgtgacgcacaccggaccgtgacagaaacatccctcttgtccgaatccctggtgtctaatggcaaagcggccgttcagcgatccagtagattcctgaaagagggtaacaatctgtctcgcaagctgcctggcattgctttggagctctctgagcttagaaacaagacaaacaggtttcaagagaacgctgtcgaaattactagacagacgaatgaatcactgctgatcctgcgggcgattcctaaaggtatccgggataaaggagctaaaactaaggagttggcgacaagcgctagtcagtccgccgtgtcaaccctgcgcgacgtagccgggttgtctcaagaactgctcaatacctcagcatcgctgagccgtgtcaacactactctgcgcgaaacccaccagctgctgcaggactccactatggccactctgctggcgggtagaaaagttaaagacgtcgaaatccaggctaaccttctctttgataggctgaaacccctgaagatgttagaggaaaacttgtcgcggaatttgtcagagatcaagcttctgattagccaagctaggaaacaggccgcctcaattaaggtggcggtcagcgctgaccgcgattgtatccgggcataccagcctcagatcagttcaaccaattacaacactctgactttaaatgttaagacccaggagcccgacaatctcttgttttacctcggatcaagtaccgcttccgactttcttgctgtggagatgaggaggggccgtgtggcatttctctgggacctgggatccggcagcactcggttggagttccctgactttcctattgacgacaatcggtggcactccatacatgtcgcaagattcggcaacattgggtcgctatccgtgaaggagatgtcaagtaatcagaagagcccaacaaaaactagcaagtcaccaggcacggctaacgtcttggatgtgaataatagtacccttatgttcgttggcggactcggagggcagattaagaagtccccagccgttaaagttacccacttcaagggatgccttggcgaagcattcctgaatgggaagagtattggcctctggaattacattgagcgagaaggcaagtgtcggggctgtttcggcagctctcaaaacgaggacccatcctttcactttgacggatcaggatattcagtggtagaaaagagcctgcctgcaacggtgactcagataatcatgctctttaatactttctcccccaacggcttgctgctctatcttggaagttacggtacaaaggattttctgtcaatcgagctatttagagggcgcgtgaaagttatgaccgatctgggaagcggccccatcaccctcttaacagaccggcgctacaataacgggacttggtacaagatagctttccagcgcaatcgaaagcaaggggtcctagctgtcatagacgcctataacacttcaaataaggaaacaaaacaaggggaaacccccggtgcctcctctgatctaaatcggcttgataaggaccctatttacgtgggcgggttgcctcggtctcgggtagtgcgccggggcgtgactaccaaaagcttcgtcggctgtataaagaatcttgagatttccaggtcaacatttgatctgctacgaaattcctatggggtgcgcaaggggtgtctgctggagcccatcagaagcgtgtcttttcttaagggaggctatattgagttacctcctaaatcgctgagtccagagtcagagtggctcgttacgtttgcaaccacaaactcatccgggattatcctggcagccctggggggcgatgtcgaaaagaggggggaccgcgaagaagctcatgtgcccttcttttcagtcatgttaatcggggggaacatagaggtccacgtcaacccaggggacggaaccggacttagaaaggccctactgcatgcgccgaccggaacctgctcggatgggcaggcccactcgatctccctcgttcgcaatcgcaggatcatcactgtccagttggacgaaaataatcccgtggagatgaagctcgggactctggtggagtctcggaccatcaacgtaagcaacctgtacgtggggggtattcctgagggcgaaggcaccagccttctcactatgaggcgttctttccatggctgtatcaagaacttgatttttaacctcgagctcctagattttaactccgctgttgggcacgagcaggtggacctggatacttgctggctttctgagaggccaaagctggctcctgatgctgaggattccaaacttctgccagaacccagagctttccccgaacaatgtgtggttgatgcagccctggagtatgtgccaggggcccatcagttcgggctaacccagaattcgcattttatcctcccattcaatcagtcggcagttcgcaagaagctaagcgtggaattgagcattcggacatttgcttcttcagggctgatttattacatggcccatcagaatcaggcagactacgctgtactgcagttgcacggcggtaggctccacttcatgtttgacttaggaaagggaaggacaaaggtctcgcacccagcattgctgagtgatgggaagtggcatactgtgaaaacagattatgttaaaagaaagggctttatcaccgtggatggcagagaatcgcccatggtgactgtggttggtgacggcaccatgctcgatgttgaaggtctgttctatctcggtggcttgccaagtcagtaccaggcccggaagatcggaaatataacacacagcatccccgcctgtatcggcgatgtcaccgtgaattccaagcagcttgacaaagacagccctgtcagcgcctttaccgtgaataggtgctacgctgttgctcaagaaggcacctatttcgatggatctggatacgctgctttggttaaagaaggctacaaggtccagtctgatgtgaacattaccctggaatttaggacatcaagccaaaacggggtgctgcttgggataagcactgcgaaagtggatgcaatcggattagagctggtagacggcaaagtgctttttcacgtcaataatggagcagggcgtattaccgctgcgtacgaacctaagacagccacagtactttgcgatggtaaatggcacactctgcaagccaacaagtctaaacatagaattactctgatcgtggatggcaatgctgtgggtgccgaatcaccccatacacagtcgacctccgtggatactaataatccgatttatgtggggggctatccggccggggtgaagcagaaatgtctgcgtagccagacttcctttcgcggctgcctgcggaagctcgccctcattaagtcgcctcaggtccagtcttttgacttctcgagggctttcgaactgcacggcgttttcctgcactcttgccccgggactgagtcatag

SEQ ID NO: 121878 - DNA, 9366 bp, synthetic construct
  misc_feature 1..9366: note = Description of Artificial Sequence: Synthetic coding sequence
  source 1..9366: mol_type = other DNA
atgcccggtgcagcgggcgtgctgctgctgctgttattatctggcgggcttggcggggttcaagctcagcgcccccagcagcaacgtcaaagccaagcacaccagcagcgtgggctgttccctgcggtgctgaacctcgcctcaaatgccctaattacgaccaacgccacctgcggggagaaaggccccgagatgtactgcaagctggtggagcacgtgccaggccaacccgttaggaatcctcagtgcaggatttgtaaccagaactcctccaaccccaatcagcggcaccccatcaccaatgcaatcgatggaaagaacacatggtggcagtccccatctatcaagaatggcatcgaataccactacgtgaccatcacgctggacctacaacaggtttttcagattgcatatgtgattgttaaggccgctaactcaccaagaccggggaattggatcctggagcggagcctcgacgatgtggagtataagccatggcagtatcacgcagtgaccgacaccgaatgtcttaccttgtacaacatttacccacgcaccggcccccctagctacgctaaggacgatgaagttatatgcacctctttttatagtaaaatccacccactcgaaaacggcgagatccacatatccctgatcaatggaaggcccagtgctgatgaccccagcccagagcttctggagttcacatcggcccgctacatcagactgaggtttcagcgcattaggactctaaatgccgatttgatgatgtttgcccacaaggaccccagagagatcgacccgatcgtgaccagacgctattattattcagttaaggatatctccgttggggggatgtgcatttgctatggccacgcccgagcctgtcccctggaccccgctacgaataagtcaagatgtgaatgcgagcataacacatgcggagatagctgcgaccagtgctgccctggtttccatcagaagccttggagagcaggcacattcctaacgaaaactgaatgtgaagcatgcaactgtcatggcaaggccgaagagtgctattacgatgagaatgtagcaaggagaaacctgtctctcaacatccgcgggaaatacataggggggggggtctgtataaattgcacacagaacacagctggaattaattgtgaaacgtgtacagatggcttcttcagaccaaagggcgtatcccctaactaccctagaccatgtcagccttgccactgcgatccgatcggaagccttaatgaagtgtgtgttaaggacgaaaaacacgctcgccgcggacttgcccccggctcttgtcattgcaaaactggatttgggggggtgtcctgtgataggtgtgccagaggttatactgggtacccagactgtaaagcatgcaattgctctggtctggggagtaaaaatgaagacccctgtttcggcccctgcatttgtaaagaaaacgttgaaggcggcgactgctctaggtgtaagtcaggtttcttcaatctgcaggaagacaattggaagggatgtgatgagtgtttctgctctggagtttccaacaggtgccagtctagctattggacatacgggaagatccaggacatgagtggttggtatcttactgacctccccgggcggatcagggtggctcctcaacaggatgacctggattcccctcaacagatctcaattagtaatgctgaggcaaggcaggcactgccccattcttattactggtccgcccccgcgccctacctcgggaataaactcccagccgtcggtggccaactgaccttcacaatttcctatgacttggaggaggaggaggaagacacggaacgcgtgctacagctgatgatcatcctggagggaaacgatctgagcatttccactgcgcaagacgaggtctatctccatccttcagaagagcacacaaacgtgctccttctgaaggaggaatcgtttacaatccacggaactcatttccccgtcaggcggaaggaatttatgaccgttctggccaacctaaaacgtgtactgttgcagataacttatagcttcggaatggacgctatattccggctgtcatctgtgaatctcgaaagcgcagtgtcttatcccactgatggttctatcgcggccgcagtagaagtatgtcaatgtcctcctggctacacaggctcttcatgtgagtcttgttggcctcgtcatcgccgggttaacggcaccatcttcggagggatttgtgaaccatgtcagtgttttgggcacgcggaaagttgtgacgacgtcactggcgaatgtctgaattgtaaggaccacacaggcggcccatactgcgataagtgtttacctggtttctacggtgagcccacgaagggcacatcagaggactgccagccctgcgcatgtcccctcaacataccctccaacaatttctccccaacatgtcacctcgatcggtcactgggactgatatgcgatggctgtccagtgggttataccggcccccggtgcgagcgctgtgcagagggttattttggacagccatcagtccccgggggctcgtgccaaccttgtcagtgcaacgataatctagatttttctatcccaggttcgtgcgacagcttaagtggaagttgcttaatttgtaaacctgggaccactggccgatactgcgagctctgcgcagacggatattttggagatgcagtggacgcaaagaattgccagccttgtcgctgtaatgctggcggctccttctccgaggtgtgccacagtcagactggccagtgcgaatgccgagccaatgtgcaggggcagaggtgcgacaaatgcaaagccgggaccttcggtctccagagcgcaagggggtgcgtgccatgtaattgcaactccttcggatctaagtcctttgattgtgaagagagtgggcagtgttggtgccaacctggggtcaccggcaagaagtgtgaccggtgcgctcacgggtactttaatttccaggaagggggttgtactgcctgtgagtgtagtcatttgggaaacaactgcgatccaaaaaccgggcgctgtatctgtcctcctaatactattggggagaagtgctctaagtgcgcccctaacacttggggtcacagcataaccactggatgcaaggcatgcaactgtagcacagtcggtagcctggatttccagtgtaatgtgaatactggacaatgcaactgtcaccccaagttttccggcgcgaaatgtaccgaatgctctagagggcactggaattacccgcgatgtaatctctgcgattgctttctgccaggcaccgatgcaaccacatgcgacagtgaaactaagaagtgcagctgctccgaccaaacagggcagtgcacatgcaaagtgaatgtcgagggcattcattgtgataggtgtcgcccgggcaagtttggtttagatgcgaaaaatcccctgggttgtagctcatgctattgcttcgggacgacgacccagtgctccgaagccaagggactcatccgaacgtgggtaactctgaaggctgaacagactatccttcctctggtggatgaggcgctgcagcacaccactaccaagggaatcgtgttccagcatcctgagattgttgcccatatggatcttatgagagaggatctccatctcgaaccattttattggaaattaccagagcagttcgagggcaaaaaactgatggcgtacggcgggaagctgaagtacgcaatctacttcgaggcccgggaagagaccggcttcagcacctacaacccccaagtgattattcgcggaggcaccccgacccacgcgaggattatcgtacgtcatatggccgcccccctgatcggacagctgacgcggcacgagatcgagatgaccgaaaaagagtggaaatattacggcgatgaccctagagtgcataggacagtgacccgcgaggacttcctcgatatcttgtacgacatccactatatcctgatcaaggcgacttacgggaattttatgaggcagagccggatctcagagatctcaatggaagttgccgagcaggggagaggtactaccatgactccccctgccgaccttatcgagaaatgcgactgccccctggggtattccggactgtcttgtgaggcttgccttccgggcttttaccggctccgttcccaacccgggggaaggacacccgggcccaccttgggcacgtgcgtgccttgtcaatgtaatggccacagctccctttgcgaccccgagacttctatttgccagaactgccagcaccacaccgctggggacttctgtgagcggtgtgcactgggctattacgggattgtaaaaggtctgcccaacgattgccagcaatgtgcttgccctctgatctcctcatcaaataatttctctcctagctgcgtggctgaggggctggatgactaccgctgtaccgcatgtccccgagggtacgagggtcagtattgcgagaggtgtgcaccaggatatacaggatcaccgggaaatcccggaggaagctgccaggagtgcgagtgtgatccctatggctctctgccggtgccatgtgatcccgtgactgggttctgcacatgtagaccaggcgcaactgggaggaagtgcgacggctgcaagcactggcacgcacgcgaaggttgggaatgtgtcttctgtggggatgaatgcacaggactcctgctcggcgacctggcgcgactggaacaaatggttatgagcattaatctcacaggccctctgcccgccccctataagatgctttatggactagagaatatgacacaagaactgaagcatctactttctcctcagagggctccggagagactgatccagcttgccgagggaaaccttaataccttggttaccgagatgaacgagctgttgacccgcgcgaccaaggtgacagcagacggcgaacaaacaggacaagatgcggagcggacaaatacacgcgcaaaatcactgggggaatttatcaaggaattggcacgggatgccgaggctgtgaatgagaaggcaatcaagctgaacgagaccttgggcactagagacgaggctttcgagcggaacctcgaagggctccagaaggaaatcgaccagatgatcaaagagttacgcaggaagaatttggaaacgcagaaagagattgccgaggacgagctcgtggctgccgaggccttgctgaagaaggtcaagaagctgttcggagagagccgcggcgaaaatgaagagatggaaaaggacctaagagagaagttggcggactacaagaacaaggtggacgacgcctgggatctcctgcgggaggcgacagataaaattcgggaggccaatcggctgtttgctgtgaaccagaagaacatgaccgcattggaaaaaaaaaaagaggccgtagagagtggcaagcgccagatagaaaatactcttaaggagggcaatgacatcttggatgaagcaaacagacttgcggacgagatcaatagtatcatagactacgtggaggatatccagacaaagctcccacccatgtcagaggaacttaacgacaaaatcgatgacctttctcaggaaattaaagaccgcaaactcgccgaaaaagtgagccaagccgaatcccatgccgcgcagctcaatgacagttcagccgttctggacgggatactggatgaggcaaaaaatatctcctttaatgccactgccgcgtttaaagcctacagtaatatcaaagattatattgatgaagctgaaaaggttgcaaaggaggcgaaggaccttgcacatgaggccactaagctcgccactggcccacgcggtctgctgaaagaggacgctaaaggctgcttgcaaaaatctttcaggattttgaacgaagccaaaaaactggccaatgacgtcaaggagaacgaggaccacctgaatggcctgaaaacacgtattgagaatgctgatgccagaaatggcgatcttttgaggacactgaacgatacactgggaaaattgagcgctattcccaatgacactgcagctaagctccaagccgttaaagataaggcacgccaggcaaatgacacagccaaggacgtcctggctcagatcacagaattacaccagaatttggacggactaaagaagaactacaataaactagctgacagcgtcgctaagaccaatgccgtggtgaaggacccaagcaaaaacaccgtagccgatgcagatgctaccgtaaaaaacctggagcaggaggcggatcgactgatcgataaattaaaaccaattaaggaactggaggataatttaaaaaagaacatttcagaaatcaaagagctcatcaaccaggcccgcaagcaggccaacagtattaaagtctctgtctcatcaggtggcgactgcattcgcacctacaaacctgaaataaagaaagggagttataataacattgtagtgaatgtcaagacggccgtcgcagataatcttctgttttacctcggaagtgctaaatttatcgacttcctggcaattgaaatgagaaagggtaaggtatcctttctatgggatgtcgggtctggagtcgggagggtggagtaccccgacctcactatcgatgactcttactggtaccgcatcgtggcctctcggacaggcagaaatggaaccatttcggttagggcactggacggaccgaaggcatcgattgtgccctccacccaccacagcacttctccacccggttatactattctggatgttgacgccaacgccatgctctttgtgggtggtctgacgggaaagctgaaaaaggccgatgccgttagggttattactttcaccggctgtatgggagagacgtactttgataataagcccatcggattgtggaatttccgggagaaggagggcgactgcaaagggtgcacagtgagcccgcaggttgaggattctgaggggactatccagttcgacggagaaggatacgctttagtctcccgacccatccgatggtatcctaacatttcaaccgttatgttcaagttccggaccttctcttcatctgccctgcttatgtacctggctacaagagatcttagagattttatgagtgttgaattgaccgacggacatattaaagtatcgtacgacctcggcagtggaatggctagtgtcgttagcaaccagaaccataacgacggaaagtggaaaagctttactctgagtcgcatccagaagcaggcaaatatctcaatagtagacatagatactaatcaggaggagaacatagccacttcttcaagcggaaacaatttcgggctggacttgaaggccgatgataagatttacttcggtggtctgcccaccctccgcaatctgagtatgaaggctaggcctgaggtcaacctcaagaagtacagcggttgcctgaaagacatcgagatcagtagaactccttacaacattttaagttctcccgactatgtgggggtcaccaaagggtgtagcctggagaatgtttacacagtctccttccctaaaccgggattcgtggagctgagccctgtgcccatcgatgttgggaccgagatcaatctgagttttagtacaaagaatgaatccggtattatcctactagggtctggcggaacacctgctcctccgagacggaaacggcgacagactgggcaggcttattacgctattctgttaaataggggacggttggaggtacatttaagcactggagcccgcactatgaggaaaatcgttatccgccctgagcctaacctattccatgatgggagggaacactccgtgcacgtcgaacgcacccgcgggatcttcacggtccaggtcgatgagaaccgtagatacatgcagaatctaaccgttgaacagccaatcgaggtgaagaaactcttcgtgggcggcgcacctccagaatttcagccctcacctctacggaacatcccaccctttgaagggtgcatatggaatctggtgattaattcggtgccaatggatttcgcaagacctgtgagtttcaaaaatgcggatattggccgctgcgcacaccagaaactcagggaagatgaggatggagctgcgccagcagaaatagtgatccaacctgagccggtccccactccggcattccctactcccacgccagtgctgactcacgggccatgcgcggcagaaagtgaaccagccctcctgatcggtagtaagcaattcgggctctcacggaactcgcacatagcaatagcatttgacgataccaaagtgaaaaatcgtctcaccattgaattagaggtgcggaccgaggcagaatccggactgttattttacatggctcgcatcaatcacgctgatttcgcaactgtgcagctgaggaacgggctaccctacttcagctatgacctgggaagcggagatactcacacaatgatcccaactaaaatcaacgacgggcaatggcataaaataaagattatgcgttccaaacaagagggcattctgtacgtcgatggggcgtctaatcgtacaatcagtccgaagaaagccgatatcctcgacgtggtgggcatgctgtacgtcggtggactgcccataaactataccacacgcaggattggccccgtgacctactcaatagacggctgtgtgcgtaacttgcacatggccgaggcccctgcagatttggagcaacccacttctagttttcacgtgggtacatgttttgccaatgctcagcgcggtacctatttcgatggaacaggtttcgcgaaagctgtagggggtttcaaggttggattagaccttctagtggagtttgagtttagaacaactaccacgacaggagtgctcctggggatcagctcccagaaaatggatggaatgggcatagagatgatcgatgagaagctgatgttccacgtggacaacggagccggtcggttcacagcggtgtatgatgcaggcgttccagggcatttgtgcgatggccagtggcacaaggtcacagcaaataaaattaagcacaggattgagctcacggtcgacggcaatcaggtggaggctcaatcacccaacccagcgtctacctctgccgacactaacgaccccgtgttcgtggggggcttccccgacgatcttaagcagttcggcttaacaacttccataccattccgcgggtgtattaggagcctgaagctgaccaaaggaactgggaaacctcttgaggtaaatttcgcgaaagctctcgagctaaggggagtgcagccggtctcgtgccccgccaactag

SEQ ID NO: 121879 - DNA, 9369 bp, synthetic construct
  misc_feature 1..9369: note = Description of Artificial Sequence: Synthetic coding sequence
  source 1..9369: mol_type = other DNA
atgcccggcgctgcaggggtgttactcctgctcctgctgagcggagggctggggggcgtacaggctcagcgcccgcagcagcagaggcagagtcaagcgcatcaacagcgcgggttgtttccagcagttttgaatctggcatcaaatgctttaattaccacaaacgctacatgcggcgagaagggtcccgaaatgtattgcaaattggtggagcacgtgccaggccaaccggtgagaaatccccagtgtcggatctgcaaccagaactcttccaacccaaatcagcgacaccccatcactaatgcgatcgacgggaagaatacttggtggcagtctccatccattaaaaatggcatcgagtaccactacgtgaccattacattagacttgcaacaagtctttcagatagcttatgtgatcgtgaaggccgccaatagtcctcgccccgggaattggatacttgaacgttcgttggacgacgttgaatataagccttggcaatatcatgcagtcaccgacaccgagtgcttgaccttatataatatctatcctcgtacgggccctccatcatacgccaaggatgatgaagtcatctgtacctccttttactctaaaatccatcccctggaaaatggggagattcatatcagtctgattaacggacgccctagcgcggacgatccctctccggagctgctggaatttacgtcggcacgctatattcggctgagatttcagcggattcggaccttgaacgccgatctcatgatgttcgcccacaaagatcccagggagatcgatcccatcgtgacgagacggtactattactcagtcaaggacatctctgtgggcgggatgtgcatctgctatggccacgcccgtgcatgtcccttagatcccgctactaacaagagccgctgcgagtgtgaacacaatacctgtggagactcctgtgatcaatgctgccccgggtttcatcagaagccttggagagcgggaacctttctgactaagactgagtgcgaggcctgtaattgccacggcaaagccgaggagtgctattatgacgagaatgtggccagaaggaacctctctcttaatattagagggaaatacatcggtggcggggtgtgcataaactgcacgcagaacacggccgggatcaattgcgagacctgtaccgatgggttttttcgccccaagggcgtctcaccaaattatcctcgaccatgtcaaccatgtcactgcgaccctattgggagcctgaacgaggtatgcgtgaaagacgagaagcatgcgcggagaggactggcccccggatcgtgccattgcaaaacaggttttggcggagtcagctgcgaccgatgtgcgagaggttacacagggtatcccgactgcaaggcgtgtaattgcagcggcctcgggagcaagaatgaggacccttgcttcgggccttgtatctgtaaagagaatgttgaagggggcgactgtagtcggtgcaaaagcgggttcttcaatctgcaagaggataactggaagggttgtgacgaatgtttctgctccggtgtctcaaatcgctgtcagagcagctactggacctatgggaaaatccaggacatgagcgggtggtaccttaccgacctacctgggagaatccgagtggcacctcagcaggatgatcttgactcgccccagcaaatctctatttccaatgccgaggcccgccaggccctcccgcactcctactattggagtgcacccgcgccatatcttggaaacaaactcccagcagtgggcggacagcttactttcaccatcagttatgatcttgaagaagaagaggaagataccgaacgcgtccttcagttgatgatcattcttgaggggaatgacctctccatttccacggcacaggatgaagtgtacctgcacccttcagaggagcacactaacgtcctgctgcttaaagaggaatccttcacaatccacggaacacactttcccgttagacgcaaggaattcatgaccgtactggcgaacctcaaacgcgtgctgctccagataacatactcattcggcatggacgcaatcttccgcctctcatcagtaaacctcgagagcgccgtgagttacccgaccgatggctctatcgcggcggccgttgaggtttgccagtgcccccccggatacactggttcttcctgcgaatcttgctggcctcgacacagacgagtgaatggcaccatattcggcggcatctgtgagccatgccagtgcttcggacatgcggagagctgcgatgacgtgaccggagaatgcttgaattgcaaggaccataccggagggccctattgcgacaagtgccttcctggtttctacggtgaaccgacaaagggcacctcagaggactgtcagccctgcgcctgtcctcttaatattccctccaacaacttcagccccacctgtcaccttgacaggtccctggggcttatatgcgacgggtgtccagtcggatatactggacctcgctgcgagcgatgtgctgagggctacttcggacagccgagcgtccccggcgggagctgtcagccatgccagtgtaatgacaatcttgactttagtatcccaggcagctgcgactcgctgtccggtagttgtctgatttgcaaacctggaacgacaggacggtattgtgaactgtgtgcagacggttatttcggagatgcggtggacgctaaaaactgtcagccatgcaggtgtaacgcgggaggcagcttttccgaggtgtgtcacagccagacaggccaatgcgagtgcagagccaacgtacaggggcaacgctgcgataaatgcaaggctggcactttcggcctacagtctgccagaggatgtgtgccctgtaactgcaactcctttggatctaagagctttgactgtgaggaatcaggacagtgttggtgtcagcccggggtcactggcaaaaaatgcgatcgttgcgcccatggatacttcaatttccaggagggtgggtgcacagcctgtgaatgctcacacttgggtaacaactgtgacccgaaaacagggcgatgcatctgtcccccgaataccatcggcgagaagtgcagtaagtgcgcccctaatacatggggccacagtattaccacaggctgcaaggcatgtaactgttcgaccgttgggagtctggacttccagtgtaacgttaacaccggtcagtgtaactgccaccccaagttcagcggtgccaagtgcaccgagtgcagccgggggcactggaattatccacggtgcaatctgtgtgattgctttttacccggtacagatgcaacaacttgcgacagtgagacgaaaaaatgctcttgttccgaccagacaggtcagtgtacctgcaaagtgaatgtggaaggaattcattgcgaccgctgccgcccggggaagtttggcctcgatgccaagaacccactcgggtgctcttcgtgttactgctttggaaccacaacccaatgcagcgaagccaaaggtttgataagaacatgggtgacactgaaagccgagcagacaatcttgccactcgtggacgaggccctgcagcacaccacaaccaagggcatagtcttccagcacccggaaatcgtggcacatatggacctgatgagggaagacctccacttagaacctttttattggaagctccccgagcagttcgaagggaagaagctgatggcttatggtggaaagctgaagtacgctatctactttgaggcgagagaagaaaccggattttctacatataaccctcaggtgatcattagagggggaacccctactcacgctagaatcattgtgcgacatatggcagcacccttgatcggccagcttacaagacatgaaattgagatgaccgaaaaggaatggaagtactacggagacgacccacgcgtccaccggaccgttacccgggaagatttcctcgatatactatatgatattcactacatccttatcaaggcaacttacgggaacttcatgaggcagagtcggatcagcgagattagtatggaggtggcggaacaggggcgcggcaccacaatgactcctccggcggatctcattgagaaatgtgattgcccactgggatactcggggctatcttgcgaagcatgcctaccaggcttctaccgcctccgctcccagccaggcggacgcacccccggaccaaccctgggaacatgtgtcccttgtcaatgcaacggacactcctccctgtgcgatcctgagacatcaatttgccaaaattgccagcaccacaccgccggcgacttttgcgaacggtgtgccctgggttattatggcatcgtaaaaggcctgcctaacgattgtcagcagtgtgcatgccccctcatttctagctctaacaactttagcccgagctgcgtggccgagggcctggatgactaccgatgtaccgcatgccctcggggctatgaaggacagtattgtgagaggtgtgccccaggatataccggctctcccggaaaccctgggggcagctgtcaggaatgcgaatgcgatccgtatggtagcctcccggttccgtgcgacccagtcacaggtttctgcacatgccggcccggtgcaaccggcaggaaatgtgatgggtgtaagcattggcatgcccgggagggttgggaatgcgtcttctgcggtgacgagtgcaccggcctcctcctgggggacctggctagactggagcagatggtcatgtccatcaacctgaccggccctctccctgcgccctacaagatgctgtacggactggagaacatgactcaggagcttaagcacctgctttcaccccagcgtgctccagagagactaatacagttggccgagggcaacctgaataccttggtgactgagatgaatgagctgctcacaagggcgacaaaggtaacagccgatggcgaacagaccggtcaagacgcagaacggaccaatacccgcgctaagtccctcggggaatttatcaaagaattagcacgggatgctgaagcagttaatgaaaaagctatcaaattaaacgaaacacttggaactcgggatgaagccttcgagcgcaatcttgaaggattgcagaaggagatagaccaaatgattaaagagttgcggagaaaaaacttagaaacccagaaggagatcgcagaggacgagcttgtggccgccgaggctttgttgaagaaggtgaagaaactatttggagagagtcgtggggagaacgaagaaatggagaaggacctgcgggaaaagttggctgactacaagaacaaagttgatgatgcctgggatctgctaagggaagcaacggataagattagggaagcaaacagacttttcgctgttaaccagaagaacatgactgccctggagaaaaaaaaggaggcggttgagagtggaaagcgccagatagagaacaccctgaaggagggcaatgatattctcgacgaggctaatcgactggccgatgagatcaattcaatcatcgattatgtggaggacatccagacaaagctcccccccatgtcagaggagttgaatgataagattgacgacctgtcacaagagattaaggaccgcaagctcgccgagaaggtctctcaagccgaatcccacgccgcacagctgaacgattcttctgctgtactggacggtatactggacgaggctaagaacatcagttttaatgcgactgctgccttcaaagcatatagcaatattaaggactacatagatgaagctgaaaaagttgctaaagaagcgaaggatctggcgcacgaagcgactaagctcgctactggccctcgcgggctactcaaggaggatgcaaaaggatgtctgcagaaatccttccggatcttgaacgaggccaagaaacttgcaaacgacgtcaaagagaatgaggaccaccttaatggcttgaaaaccagaatagagaatgctgacgctcggaacggcgatcttctgagaaccctcaatgacaccttgggcaaattgagtgcgattcctaatgatactgccgctaagttgcaagccgtcaaggataaggcccggcaagccaacgacactgctaaggatgtgttggcacagattaccgagctgcaccagaatctggacggcctcaaaaaaaattacaataagcttgccgattcggtggcaaaaaccaacgcggtcgtgaaggaccccagtaaaaacaaaattgttgccgacgctgacgccaccgtcaagaacctggaacaggaggcggatcgcctgatcgacaaactgaagccgataaaggaacttgaggacaatctgaagaagaacatctccgagataaaggaattgatcaaccaggcccgaaagcaagctaattctattaaggtgtcagtgagttctggaggagactgcatcagaacctataaacctgagattaagaaaggttcttacaacaatatcgtggtaaacgtcaaaacagctgtggccgataacctcctgttttacctaggttcagcgaagttcatagattttttggccatcgagatgcgcaaggggaaggtcagctttctgtgggatgtagggtcaggcgttggaagagttgaatacccagaccttacaattgatgatagttactggtaccgcatcgtggcatcaaggaccggacgaaacggaaccatctctgttcgtgcactggacggaccgaaagcttcaatcgttcctagtacccaccactctacatcaccacctggttatacgattcttgacgtcgacgcaaatgcaatgctgtttgtcgggggcctcacaggcaagctgaagaaagcagacgccgtccgcgtaataacatttacaggctgcatgggtgaaacttactttgacaacaagcctatcggcctctggaactttcgagagaaagagggggactgtaaaggttgtaccgtttccccccaggtggaagactcagagggtacaatacaatttgatggggaggggtatgctctagtcagtagacctatccgatggtacccgaatatctctacagtgatgtttaagtttcggacattctcaagcagtgccctactgatgtatctggcaacaagagacctgcgtgactttatgtccgtggaactcacagatgggcacatcaaagtaagttacgatctgggaagcgggatggcatctgtggtctcaaaccaaaaccataatgacggcaaatggaagtcattcacactgagtagaattcaaaaacaggcaaatatctccatcgtggatatcgacacaaaccaggaagaaaacattgccacttcgagctccggcaacaactttggcctcgacttaaaagcagatgataagatctatttcggggggttaccaacactacgcaatctgcgcttgttcaaccggcctgaggtaaacttaaagaagtattcaggatgcctgaaggacattgaaatctctcgcactccatataatatactgagtagcccagattatgtgggagtcacaaaagggtgcagcctcgaaaatgtgtacacggtctccttcccgaaacccggttttgtggaactgtcacccgtcccgatcgacgtgggtaccgaaatcaacctatccttctccactaaaaatgagtccggaatcatcttattaggaagcggcggaacgcccgccccgccacgtcggaaacgtagacagaccggccaagcctactacgctattctgctgaacagaggacgtctagaggttcacttatcaaccggagccaggaccatgcggaagattgtgattagaccagaacctaatctgttccatgacggaagagagcattcagtgcatgtggagcggacgaggggcattttcacagtccaggtggacgaaaataggcgctatatgcagaacctgacggtcgagcagcccatcgaagtgaaaaaactgtttgtgggcggtgctcccccggagttccagcccagtccactgcgcaatataccccccttcgaaggctgtatatggaacctggtcattaactcggtgccgatggatttcgcacggcccgtgagcttcaaaaacgccgacatcggcagatgtgcccaccaaaaacttagagaggatgaggacggagccgccccagctgaaatcgtcatccagcctgagccagtccccactcctgcgtttccgacccccacacccgtgctcacacacgggccgtgtgcagcggaatcagaacctgctttgttgatcgggtccaagcagtttgggttgtcccggaacagccacatagcgatcgcgtttgacgacaccaaggtcaaaaaccgattaacgattgagcttgaggtgcgcacggaggccgaaagcgggctgcttttttatatggcccggattaatcacgccgactttgcaacagtgcagctgcgaaatggtttgccatactttagctacgatttgggatctggagatactcacaccatgatacccactaagatcaacgatggccaatggcacaagattaaaattatgaggtcaaagcaggagggcatcctctatgtcgatggggcatctaaccgcaccatttcccctaagaaggctgatattctggatgttgtcggcatgctgtacgttggagggttgccaattaactacacgacgaggcgtataggccccgtcacttattcaattgatggatgtgtgagaaacctacacatggctgaggctcccgccgacctggagcagcccacctcttctttccacgtgggcacatgctttgccaatgcccagcggggtacgtacttcgacggcacaggttttgcgaaggcggtcgggggcttcaaagtggggctggacctgctggtggaatttgagttcaggaccaccaccacgacaggtgtgttgctggggatcagttcgcagaagatggatggtatgggcatagaaatgatcgacgagaagctgatgttccacgtcgacaacggagcgggacgcttcacagccgtgtacgatgccggtgttccaggccatctgtgtgacgggcagtggcataaagttaccgcaaataaaatcaaacacaggatagaattgaccgtagacgggaaccaggtcgaggcccagagccccaacccggcatcaacatcagctgacactaacgacccagtgtttgtcggaggcttcccggatgatctgaagcagtttgggcttacaacatccattccatttcggggctgtattagatccctgaagcttacaaaaggcactggcaaacccctagaagttaacttcgctaaagcgttagagctccgtggcgttcagccagtgagctgtcctgctaactag

SEQ ID NO: 121880 - DNA, 9369 bp, synthetic construct
  misc_feature 1..9369: note = Description of Artificial Sequence: Synthetic coding sequence
  source 1..9369: mol_type = other DNA
atgcccggagcagctggcgttctgcttctgctgctgctctctggcgggctaggtggcgtgcaagctcagaggccccaacagcagcgccaatctcaagcccatcagcaaagaggtctgtttccggccgtgctgaacttagcttcgaacgccttaattacgaccaacgctacttgtggagagaagggcccggagatgtattgtaaactggtagagcatgtaccaggacagcctgtgagaaatccccagtgccggatttgtaatcagaacagtagtaatcctaatcaacggcaccccattactaatgccattgatggtaagaacacctggtggcagagcccatcgataaagaacgggatcgaataccactacgtgaccataactctagatcttcagcaggtctttcagatcgcctacgtgattgtaaaggcagctaactcccctcggccaggaaattggatactggaacgatccctcgacgatgtggaatataagccttggcagtaccatgcagtgacagacaccgagtgcctgacactttataatatttatccacggacggggccgccctcatacgcgaaagatgatgaggtgatctgcacctcattttattccaagattcatcccctggagaacggtgaaatccacatctctttgattaatgggcgtcccagcgctgatgatccttcccccgaacttctcgagttcacatcggctcgatatataagacttaggttccagcgtatcagaacccttaatgctgatctgatgatgttcgctcacaaggatccgagagaaattgatcctatcgttacccgacggtactattacagcgtgaaggacatctcagttggcgggatgtgcatctgttatggacatgccagagcttgtccactagaccctgcgactaacaagtcaagatgtgaatgtgagcataacacttgtggtgacagctgcgatcaatgctgccccggctttcaccagaagccgtggcgggctggcacctttttgacaaaaaccgaatgtgaagcttgcaactgccatggcaaggccgaagagtgctactacgacgaaaatgtcgctcgccgcaatctgtctctgaatatcagggggaaatacatcgggggaggagtatgcatcaactgcactcaaaataccgctggcataaactgcgagacttgtactgatggcttctttaggcctaagggggtgagcccaaattacccaaggccttgccagccctgtcactgtgacccaatcggttcactcaatgaggtttgtgttaaggacgagaagcatgctagacgcggtttggcccctggctcttgccactgtaagacaggcttcgggggcgtctcttgcgacaggtgcgctcggggatacaccggataccctgactgtaaagcatgcaactgtagtggtctgggatccaagaacgaagatccatgcttcgggccctgcatctgcaaggaaaacgtagagggaggggattgtagccgatgtaaaagtgggttttttaatctgcaggaggataattggaaagggtgcgatgagtgcttctgttctggggtaagtaaccggtgccagagctcgtattggacgtatgggaagattcaggacatgtctggatggtatttgacagacttgcccggcagaataagagtggctcctcagcaggacgacttggactcccctcagcaaatttccatcagtaacgctgaagctaggcaggcgctgcctcattcctactactggagtgctcctgcaccttacctcggaaataaactgccagccgtcgggggtcagcttactttcacaatcagctacgatctggaggaagaggaagaggacactgagagagttctacagctgatgatcatcctggaagggaatgacctctcaatcagcaccgcccaggacgaagtatacttacatccctccgaggagcatacgaacgttcttttgctcaaggaggagagcttcaccattcacggcacacactttcccgtgcgacggaaagaatttatgacagtgctggccaatctgaaacgtgttctccttcagattacatacagttttggtatggatgcaatctttagattgtcttctgtgaacctggagagtgccgtaagctacccaaccgacggcagcatcgcagctgccgtggaagtttgtcagtgcccaccaggatacactggttcaagttgcgaatcctgttggcctcggcacagacgagtcaacgggacaatcttcggggggatctgtgagccctgtcaatgcttcgggcacgctgaaagttgtgatgatgtgaccggggaatgtttgaactgcaaagaccataccggaggaccctattgcgataagtgtcttccagggttttacggagagcctaccaagggaaccagtgaggattgtcaaccatgtgcttgtcccctgaacattccatcaaacaacttctccccaacatgtcatctcgatcgatctttaggactgatctgcgatggatgcccggtggggtataccggccctcggtgcgaacgatgcgccgaggggtattttggacaaccatcagtgccaggagggtcttgtcagccctgccagtgcaatgacaatttagacttctctattcccggaagctgcgactctctgagtggaagctgcctgatatgcaaaccgggtacaaccggaagatactgcgagctgtgcgccgatggctacttcggtgacgcagtggacgctaaaaattgtcagccctgccgctgcaacgcaggcggatctttcagcgaggtatgtcactctcagacgggccagtgcgagtgtcgcgccaatgtgcagggccagcgatgcgataagtgcaaggcagggactttcgggctgcagtctgccagagggtgtgttccgtgtaattgcaatagtttcggctctaagtcattcgactgcgaagagtctgggcagtgttggtgccaacctggggtgacgggtaaaaagtgtgaccgttgcgcccacggctatttcaatttccaagagggcggctgcacagcctgcgagtgctcccacttgggcaacaactgtgatcccaagactgggcggtgtatctgcccacccaataccatcggggaaaaatgcagcaaatgtgcgcctaatacatgggggcactccattaccactgggtgtaaggcctgtaattgctcaaccgtcgggagccttgacttccagtgcaatgtcaatactggccagtgtaactgtcatcccaagttcagcggtgcaaagtgcaccgagtgttcccgtggacactggaactatccaagatgtaacctgtgcgactgctttcttcctggcaccgatgccacaacatgcgactctgaaaccaagaagtgcagttgttctgatcaaaccggacagtgcacttgtaaggtgaacgttgaagggatccactgtgatagatgccggccgggcaagttcggattagatgctaagaaccctttggggtgcagcagttgctattgctttggcaccactactcagtgctctgaagcgaagggactaatccgcacatgggtaaccctgaaagcagaacagacgatacttccgctagtcgacgaggctctgcagcatacaactacaaaaggaatcgtctttcaacatcccgagattgtcgcacacatggatcttatgcgcgaggatctccatcttgagcccttctattggaagcttccggagcaattcgagggaaagaaactcatggcctatggggggaagctcaagtacgccatctacttcgaggctcgggaagaaacggggttctccacctacaatccacaggtgataattaggggaggcacccctacacacgcacggattatcgtgcggcacatggcagcacccctcatcgggcagctaacccgccacgagattgagatgaccgagaaagagtggaagtattatggtgacgatccacgcgtgcacagaaccgtgacgagagaggacttcctggacatcctctacgacattcattacatcctgattaaagccacatacggcaacttcatgcgccaatcccgcatttcagagattagcatggaggttgccgagcagggccgcggcacgacgatgacaccacctgcagatttaattgaaaagtgcgattgtccgcttggttactccgggctgtcctgcgaggcatgtttgcccggattttaccggttgcgtagccagccgggagggcgcacccccggccctacccttggaacctgcgtcccgtgccagtgtaatggacacagctctctgtgcgacccagaaacatctatctgtcagaattgccagcatcataccgccggtgacttctgcgagcgctgtgctctgggctactacggcatcgtgaagggtctccctaatgattgccagcagtgcgcttgcccactgatttcctccagcaataattttagtccatcttgcgttgcagaagggctggatgattacaggtgtaccgcctgccctcgcggatatgaagggcaatactgtgaacggtgtgcacctgggtacacagggtcacctgggaacccaggagggtcctgtcaggaatgtgagtgcgacccctatggttctctcccagttccctgcgaccccgtgaccggattttgtacctgcagacctggagccaccggccgaaagtgtgatggatgcaaacactggcatgctcgcgagggatgggaatgtgtgttctgtggagatgaatgtaccgggctgctgctgggcgacctggccaggcttgagcagatggtgatgtctatcaatttgacgggaccgctccctgctccttacaagatgctgtacggcttggaaaatatgacacaggagttgaagcatttgctgagtcctcagcgggcaccagagagactgattcagctcgctgagggtaatcttaataccctggtgactgaaatgaacgagctgttgacccgcgccaccaaagtgacagcagatggagagcagacaggtcaggatgccgagcgcacaaataccagagcaaaatccctgggcgagttcatcaaggagctcgcccgggatgctgaggccgttaacgaaaaagccattaaactgaacgagactctaggaactcgcgacgaagcgtttgaacggaacttggaagggctgcagaaagagatcgaccagatgattaaggagctgcggcgtaagaatcttgagacgcagaaggagattgccgaggatgaactggtagctgccgaggctctgctgaaaaaagtgaagaagctgttcggtgagtcccgcggtgaaaatgaggagatggaaaaggatttgagagaaaagctggctgattataagaataaagtggacgatgcctgggacctgttaagggaggctactgacaagatccgggaggctaatcgtctgttcgccgtgaaccagaaaaacatgactgccctggaaaaaaaaaaggaggcagtagaaagtggaaaaaggcagattgagaatacactcaaagagggcaatgatattctggacgaggccaaccgtttagctgatgaaattaacagcatcatagattatgtcgaagatatacagaccaaactgccacccatgagcgaggagctgaacgataaaatagacgacctgtctcaggagattaaggaccgtaagctcgccgagaaggtgtcccaagcagagtcccacgctgctcagctgaatgactcctctgctgttttagatggcattctagatgaagctaagaatattagttttaatgctaccgcagcgtttaaagcctatagcaatatcaaggattacatcgacgaagctgagaaggtggcgaaagaggccaaggatttggcacatgaggccacgaagctggctactggcccacgcgggctgctgaaagaagatgcaaagggatgtcttcagaaatcatttagaatcctcaatgaagccaagaaattagcaaacgacgtaaaagaaaatgaagaccatttaaacggtttaaagaccagaattgaaaacgcggatgcgcgtaatggtgacctcctgaggacccttaatgatacgttggggaagctgtccgctattccgaacgatactgcagcaaagttgcaagctgtgaaagacaaggcccggcaggcaaatgacacagctaaggatgtcttggcacaaatcacagaacttcatcagaacctggatggacttaagaagaactacaacaagctagcagatagcgtagctaaaactaacgccgtcgtgaaggacccatctaagaataagattatcgcggatgcagatgcaaccgtgaagaatttagaacaagaggctgacagactgatcgacaagctgaagcccatcaaagaattagaagataatcttaaaaagaacatatcagagattaaggagctgatcaatcaggccaggaagcaagcaaactcgatcaaagttagcgtatcttctgggggcgattgtattcggacctataaaccggagattaaaaagggcagctacaataatatagtggtgaatgtgaaaaccgcggtggcggacaatctcctgttttacctggggagtgcaaaatttattgactttctggccattgagatgcggaaagggaaggtgagctttctgtgggacgtgggaagtggagtcggtcgggtggaatatccagacctcaccatagatgattcatattggtatcgcattgtggccagccgcacaggacgcaacgggacaatatctgtgagagcccttgacgggccgaaggcctctattgtaccttcgacacatcactccacgagtccccccggatacacgattttggatgtggatgcaaatgcaatgctatttgtcggggggctaaccggaaaactgaaaaaggctgacgccgtgcgagtgatcactttcaccgggtgcatgggtgaaacgtattttgacaataaacctattggcctctggaattttcgagagaaagagggcgattgtaaaggctgtactgtctctccccaggtagaagattcggaaggcaccattcaattcgacggcgaaggatatgctctggtcagtaggccgataagatggtatcctaatatcagcacagtcatgttcaaatttcgtacattttccagctctgctttactgatgtacctggccactcgcgacctgagggacttcatgtctgtggaactgacagatggccacattaaggtttcctacgatctaggtagcggaatggctagtgtggtaagtaaccagaatcacaacgatggaaagtggaagtcctttactctctcacgcattcagaaacaggcgaacatcagcatcgtggatatcgacacgaatcaggaggagaacatcgcaacatcctcgtccggaaataatttcgggctcgatttgaaagccgatgataaaatctacttcggtggactgccaacacttagaaacctgtctatgaaggctagaccagaggttaatttaaaaaaatatagcggttgtcttaaggatattgaaatttccaggaccccatacaacattcttagctcgcccgactatgtcggcgttaccaaaggatgtagcttggaaaatgtctataccgtgagttttcctaaaccaggattcgtggaactgtccccagtgcctattgatgtgggcaccgagattaacctgagcttctccactaaaaatgagtctgggattatcctgttgggatctgggggcaccccagcaccgccaagaaggaaacggagacaaacagggcaggcttattacgcaatcctgctgaatagaggacgcctggaagtccacctaagtaccggagccagaactatgcgcaaaatagtaattcggccagaacccaacttgtttcacgatggcagagagcattccgtgcacgtcgagcggactcggggaatcttcactgtccaggttgacgagaatcgacggtatatgcaaaatcttactgtggaacaacccatcgaagttaagaaactgttcgttggtggtgccccccctgaattccaaccttctcctctgcggaatataccaccctttgagggctgcatctggaatctggtgataaattccgtgccaatggacttcgctagacctgtcagttttaaaaatgccgacattggaaggtgtgctcatcagaaattgcgcgaggatgaagatggagcagctcctgccgaaatcgttatccaacctgaaccagtcccaacgcctgccttccctacacctaccccagtcctgactcacgggccctgcgccgccgagtcggaacccgccctgcttatcggaagtaagcagtttggtttatcaaggaactcccatatcgcgatcgccttcgacgatactaaggtaaagaaccgcttaactattgaattggaagtacggacagaggctgaatcgggcttgcttttctatatggcaagaattaaccatgccgatttcgccaccgtgcagctaagaaacgggctaccatactttagttacgacctcggatcgggagatacacacactatgatacccaccaaaatcaacgatggtcagtggcacaagatcaagatcatgagatctaaacaggaaggcattctttatgtggacggcgcaagtaataggactattagcccaaagaaggccgacattcttgacgtagtgggaatgctttacgtgggggggctgcccatcaactacactacccggagaatcggtccggtgacgtatagtatcgatgggtgtgtgcggaacctacatatggctgaggcccctgcggatctggagcagccaacatccagcttccacgttggaacttgttttgcaaatgcccagcgcgggacatattttgacggcaccgggtttgccaaggccgtgggcggcttcaaagtggggttggatctccttgtcgagtttgagtttagaaccaccactaccaccggagtcctcctgggcatctcttctcagaagatggatggaatgggaattgaaatgatcgatgaaaagttgatgttccacgttgataacggggctgggcggtttaccgccgtttatgacgccggcgtacccggacatctgtgcgatggacagtggcataaggtgaccgcaaacaaaattaagcatagaatagagctaaccgtcgacggaaatcaggtggaagcccagtctcccaacccggcttccacgtccgccgacacaaatgaccctgtgttcgttggcggcttcccggatgacctgaagcagttcggcctcactactagcatcccgttcaggggctgtatccgcagcctcaagctgaccaagggcacgggtaaacctctagaggttaactttgcaaaagccctggaactccgaggagtgcagcccgtctcctgccccgccaactag

SEQ ID NO: 121881 - DNA, 3387 bp, synthetic construct
  misc_feature 1..3387: note = Description of Artificial Sequence: Synthetic coding sequence
  source 1..3387: mol_type = other DNA
aagaagctcgcgaatgacgtgaaggaaaatgaggatcatcttaatggcctgaaaactagaatcgagaatgcagacgcacggaatggggatctcctgcgtaccctaaacgatacgttgggtaagctctcagccatacccaatgacactgccgccaaacttcaggcagtgaaagacaaggcccggcaggcgaacgacactgccaaggatgtgctcgctcagatcacggaactacaccagaacctcgatgggttaaaaaagaattataataaactggccgactctgttgctaagacgaatgcagtggtcaaggatccttcaaagaatacagtcgcagatgccgacgcaaccgtgaagaacctggaacaggaggccgatcgtctaattgacaaactgaaaccaattaaggagttggaggacaatctcaaaaaaaatatctctgagattaaagagcttatcaatcaggcaagaaaacaagccaatagcataaaagtttccgtatcctccggcggcgattgcatccggacctataagccagaaataaaaaagggtagttataataatatcgtggtcaacgtgaagacagcagtcgcagacaatctcctgttttacctgggcagtgccaagtttatcgatttcttggctatcgagatgaggaaggggaaagtatcgtttctgtgggacgtggggtctggagtcggccgggtggagtacccggacctcacaattgacgattcgtactggtacaggatcgtcgcatctcgcaccgggagaaatggtacgattagcgttcgagccctcgacggacccaaagcttctattgttcccagcacccatcactcaacctctcctcctggttacaccatcctcgacgttgacgcaaacgccatgttgttcgttggtggtctgacaggaaaattaaagaaggctgatgctgtgagggtaatcacattcacaggctgcatgggcgaaacctatttcgacaataaacctattggcctgtggaatttccgggaaaaggaaggtgactgcaaaggttgtaccgtcagcccccaggtggaagactccgaggggactatacagtttgatggtgaagggtacgcactggtgagtcgaccaattcggtggtaccccaatattagcacagtcatgtttaaattcaggacattttcttcctccgccctgcttatgtatctagccacacgggaccttagggacttcatgtccgtggaactcactgatggacacattaaggtttcctatgatctgggcagcgggatggctagcgttgtctcaaatcagaaccacaacgacggtaaatggaagtcgtttacgttgagccggatacaaaaacaagccaatatatccatagtcgacatcgacaccaaccaggaggaaaatatcgccacgtccagctccggaaacaacttcggactggacttaaaggctgacgataagatctacttcggcgggttaccaacgctccggaacctgagcatgaaggcgagacccgaggtcaatctcaagaaatactccgggtgcctgaaagacattgagatttctagaactccctacaacatcttaagcagcccagattatgttggagtgaccaaaggctgcagtttagagaacgtatatacagtgtccttccctaagcccggttttgttgagttgtctccggtccccatagacgtcgggacggaaattaacctgtcgttttcaaccaagaacgagtcaggcatcattctgctgggaagcggtggtactcctgcccccccgagaagaaaacggcgacagacggggcaggcatactacgccattctcctgaatcgcggccggctagaagtccatcttagcaccggggccaggacaatgcgcaagattgtcatcaggcctgaaccaaatctgtttcacgacggaagggagcactctgtgcatgtggaacgaacaagggggatatttacggtccaggtggatgagaaccggcgctacatgcagaatctgaccgtggaacagccaatcgaggtgaagaaacttttcgtgggaggggcccccccagaatttcagccatcccctctgaggaatatcccccctttcgagggatgcatctggaacctggtgatcaatagtgttcctatggacttcgcacgtcccgtgtctttcaaaaacgcagatatcggcagatgtgcccaccagaaactgcgcgaggacgaagatggtgctgcccctgccgaaattgtgattcagcctgagcctgtgcccacgccagctttccctaccccgacgccggtgctcacacacggcccctgtgccgcagaatcagagccggctctgcttatcggaagcaaacagtttggtctgtcccgcaattcccacattgccattgcctttgacgataccaaggtgaagaatcggctcactatcgagctggaggtgagaacagaggccgaatctggtctactcttctatatggcgcgtatcaatcacgccgattttgctactgtgcagctgcgcaacggactcccctatttctcatacgacctgggctccggagacacacatactatgattcccacaaaaatcaatgacgggcagtggcataagatcaagattatgcggtctaaacaggaggggatcctgtacgtagatggtgccagcaatcgaactatttcaccgaaaaaagcagacatcctggacgtcgtcggaatgttgtatgtgggtggtctcccaatcaactatacgacgagaaggatcggccccgtcacttatagcatcgacggctgcgtgcggaacctccatatggccgaggccccagcagatcttgaacaacccacgagtagctttcatgtcggtacctgctttgcgaatgctcagaggggcacatatttcgatgggacagggttcgccaaggccgtgggtggcttcaaggtcggactggatctgctcgtggagttcgaattccggactaccaccaccaccggggttcttctgggaattagcagtcagaagatggacggaatgggaatagaaatgattgacgagaaattaatgtttcatgtcgataacggggcaggccggttcactgcagtgtacgacgcaggcgtcccagggcatctttgcgatggtcagtggcacaaagtgaccgccaacaagataaagcatcgcatcgagctgaccgtggatggtaaccaggtggaggcacagagcccgaatccagcgagtacatcagctgacactaacgatccagtgtttgtgggtggtttccccgatgacctgaagcagtttgggcttacaacaagcatcccatttagggggtgcattcgcagcctaaagctgactaagggtacagcttctcactggagactgattttgcctaggccctggaattag

SEQ ID NO: 121882 - DNA, 5175 bp, synthetic construct
  misc_feature 1..5175: note = Description of Artificial Sequence: Synthetic coding sequence
  source 1..5175: mol_type = other DNA
atgccacccgctgtcagaagaagcgcttgtagtatggggtggttgtggattttcggcgccgcactgggtcagtgcctgggatacagcagccagcagcagagagtgccattcttgcagcctcccgggcagagtcagctccaagcatcttacgtcgagttcagaccgtctcaggggtgcagccccggctactatcgggaccacaagggcctgtacaccggccggtgcgtaccttgtaattgtaatggccactcaaaccagtgtcaggatggttctgggatttgtgttaactgtcagcacaacactgctggcgaacattgtgaaaggtgtcaggaaggttactatggaaatgccgtgcatggttcgtgtagagcgtgcccctgcccgcacaccaactcatttgcgaccgggtgtgtggttaatggcggagatgtccgatgctcttgcaaggcgggctatacgggcacacagtgcgaaaggtgcgcaccaggttatttcggtaacccccagaagttcggaggttcgtgccagccatgctcctgtaactctaacggtcagctgggctcatgtcatcctcttactggggactgtatcaaccaggagcccaaggatagtagtcctgccgaggaatgcgatgactgtgacagttgtgttatgactcttctgaacgacttagcaacaatgggcgaacagctgcgcctggtgaaaagtcagctgcaggggctgtccgcctccgccggccttctggaacagatgagacacatggaaacccaagcaaaagacctaaggaaccaactgctgaattaccggagcgctattagtaatcatggctcaaagattgagggattagaacgagagctgactgatctgaatcaggaattcgagactcttcaagagaaggctcaggtgaactctcgcaaagcacagactcttaataataatgtcaatcgtgcaacccagagtgctaaggaacttgatgttaagatcaagaatgtgatccgaaatgtccacatactcctgaagcagatctccgggaccgatggggagggcaataacgttccatccggtgacttttcaagggagtgggctgaggcgcagcgaatgatgcgagagctgcgtaatcgtaacttcgggaagcaccttcgggaagccgaggcagacaagcgggaaagtcagctactgctgaaccggatacgcacttggcagaagacccaccagggagaaaacaatgggctggccaattcaatcagggactcgttgaatgagtacgaggctaagctctccgacctgcgagcaaggctacaggaggccgcagcccaggcgaaacaagccaacggcctaaatcaggagaatgagcgggccctcggcgcaatccagagacaggtcaaggagatcaatagcctccaaagcgacttcacaaagtatctgaccacggcagatagttctttactgcagacaaatattgctctacagcttatggagaagtcgcagaaggaatatgagaagctggcagcaagcctcaatgaagctcgtcaggaactgtccgacaaggttcgggagctgagccggtccgctggtaaaaccagcctggtggaggaggctgagaaacacgcgaggagtctgcaggaactggctaaacaacttgaagagatcaagaggaatgcttccggcgacgagctggtcaggtgcgcagttgatgctgctacagcttacgagaacatcctgaatgcaatcaaagccgctgaggatgcagccaatcgcgccgcctctgccagtgaatctgcacttcagacagtaatcaaggaggatctgccccgaaaagctaagactctgagttctaattccgacaagcttcttaacgaggccaaaatgactcagaagaagcttaagcaagaggtttcaccagccctcaacaacctgcagcaaactctcaatatcgttacagttcagaaagaggttatagatactaacttaactacactgcgggatggactccatggcatccaaaggggcgacatagacgccatgatcagcagcgccaagagcatggtgagaaaagcaaacgatatcacggacgaggtattagacgggctgaatcccattcagacagacgttgagcgcatcaaggacacatatgggcggacacaaaacgaggatttcaagaaggccttgaccgatgcggacaattccgtcaataaactcactaacaaactgccagatctgtggagaaagatcgagtcaattaatcagcagttgttgccgctcggcaacatttctgacaatatggatcgcatccgcgaactgatccagcaggccagagatgcagctagcaaggttgcagtgcccatgaggttcaatggcaagtctggcgtagaagtgagactgccaaacgacctggaggatctcaaagggtatacaagcctgagcctgtttctgcagcggccaaatagtagggagaatggtgggaccgagaacatgttcgttatgtaccttggcaacaaggacgctagcagagattacattggaatggcggtggtagacggccagctgacctgcgtgtataacctgggagatagggaggccgagctccaggtggatcagattctgaccaagtcagagacaaaagaagctgttatggatcgcgtgaagttccagcgtatataccagtttgccaggcttaattataccaagggggccacatcatctaaacccgagactcctggcgtgtatgatatggacggccggaactcaaatacgttgctcaacttggatcccgaaaatgtggtcttttacgtcgggggatacccccccgacttcaagctacccagcaggctttcctttcccccctataagggatgtatagaactggatgacttgaacgagaatgttctgtccctgtacaattttaagaagacattcaacctgaacacaaccgaggtggaaccctgccgccggaggaaagaagaatccgacaaaaattatttcgaagggaccggatatgctagggttccaactcagccacacgcccctattcccactttcggacaaaccattcagactacagtcgaccgcggcctgctgttctttgctgagaatggggacaggttcatcagcttgaacattgaagatggcaagctaatggtgcgctataaactcaacagtgaactcccaaaggagcggggagtgggtgacgctatcaataacggccgagatcatagcatccaaattaaaatcgggaagctccagaaaagaatgtggataaatgtagatgtgcagaatacaatcatcgacggagaagtcttcgactttagtacatattacctgggcggcatccccatcgccatcagagagcgctttaacatctccactcctgctttccgcggttgcatgaagaatttgaaaaagacttccggcgttgtgaggctgaatgatactgtgggagttacgaagaagtgttccgaggactggaaactggtgaggtcggctagctttagcaggggaggccagctctcttttaccgacctcggcctgcctccgaccgatcatcttcaggcaagcttcggttttcagacattccagccttctggcatattgctggatcatcaaacatggacccgaaacctccaggtgacgttggaagatggatatatcgagttatccacttctgattcaggctccccgattttcaagagcccccagacttatatggacggactcctccactatgtaagcgtcatatcagacaattctgggttacgcctgctgatcgacgaccaattactccgcaattccaagcgccttaaacacattagtagttccaggcagagcttgcggcttggaggcagtaattttgagggatgtatctcaaacgtgtttgtccagcgcttgagcctatctccagaagtgctggacctcaccagcaacagtctcaaacgggatgtgagcctcggtggatgttcactgaacaagcccccgttccttatgctcctgaagggcagtactcgcttcaataaaacaaagactttccgaatcaaccagctcctccaggataccccggtggcaagcccacggtccgtaaaagtgtggcaggacgcctgttccccgttaccaaagacccaggctaatcatggcgcacttcagtttggcgatattcccacatcacacctcttattcaaattgccacaggagctccttaagcctcgcagtcagttcgcagtggacatgcagactactagtagtcggggccttgttttccataccggcaccaagaatagttttatggccttgtatctgtccaaggggaggttggttttcgcactgggaacagacgggaagaaactgagaatcaagtctaaggagaagtgtaatgacgggaagtggcatacagtggttttcggtcatgacggtgagaagggacggctagtcgttgacggtctgcgagcccgggaaggctccctcccaggtaactcaactatcagcatacgggcacctgtgtacttaggttcacctccttctggcaagcccaaatccttgcctacaaattcgttcgtgggatgcttaaaaaacttccaactcgactctaaacctctgtatacgccctccagtagcttcggagtaagcagttgtctcgggggcccattggaaaagggtatctacttctccgaagagggggggcacgttgtcttggcccactccgttctcctcggaccagaatttaagctcgtgttttcaatccgccccaggtcactgacagggatcctgattcacattggctcccagccggggaaacacctctgcgtgtatttggaggctggaaaggttactgcaagtatggacagcggcgcaggagggacatcgacttccgtcaccccaaaacagagtctctgcgatggacagtggcactcggttgccgtaactatcaagcagcacatcctccaccttgaattggatactgattcctcatatacagcgggacagattccatttcctcccgcttcaactcaggaacctctacacctcggtggcgcccctgcaaatttgaccacactgaggataccagtctggaagagtttcttcggatgtctcaggaatattcatgtcaaccacatcccagtgcctgtaactgaagccctcgaagttcagggtcctgtctctctgaacggctgcccggatcagtag

SEQ ID NO: 121883 - DNA, 10002 bp, synthetic construct
  misc_feature 1..10002: note = Description of Artificial Sequence: Synthetic coding sequence
  source 1..10002: mol_type = other DNA
atggcggctgccgccagaccaagaggcagagcattgggaccagtactaccacccacacctctcttgttgctagtgttgcgggtcctgcccgcctgtggggcaaccgcacgggaccccggtgccgccgctggcctgtcactccaccctacatatttcaacctagccgaggccgctcgcatttgggccaccgccacttgcggcgaacgcgggcctggggagggccgtccccagcccgaactgtactgcaagctggtgggaggccccactgcaccaggcagcggccataccatccaaggtcagttctgcgattactgcaacagtgaggaccccagaaaagctcaccccgtcactaatgcaatagatggcagtgagagatggtggcagtctccgccattgtctagtggtacccagtataaccgggtgaacctgacactcgatcttggccagctttttcacgtggcgtatatcctgattaaatttgctaattcccccagaccagacctgtgggtactggaaagaagcgtggattttggcagcacatacagtccgtggcagtatttcgcgcacagcaaagtggactgtctgaaggagttcggcagggaggccaacatggcggttacaagagacgatgatgtcttatgcgtcactgaatattcacggatcgtacccctggaaaatggcgaggtggtagtatccctcatcaatggtcgaccaggagcgaaaaatttcactttcagccatactttgagagagttcacaaaagcaaccaatatccgcctacggtttctgagaacaaatacactgctcggccatctcatttcgaaggcccaacgggatcctacagttacgcgacggtactactacagcattaaagatatcagcataggaggacaatgcgtctgcaatggccatgctgaggtctgcaacatcaataatcccgaaaaactcttccgatgcgagtgccagcaccacacttgtggagagacgtgcgaccgctgttgcactggctataaccagagacggtggcgaccagctgcctgggagcagagtcatgaatgcgaggcttgcaattgccacgggcacgccagtaattgttactacgacccagacgtcgaaagacagcaagcttctcttaatacgcagggaatctacgccggtggcggggtgtgcattaactgccaacacaacacagcgggcgttaactgcgagcagtgcgctaaaggatactataggccatatggcgttcccgtggacgctcctgatggctgcattccatgttcttgcgacccagagcatgccgatggttgtgagcagggatcaggccgttgccactgtaagcccaactttcacggggataactgtgaaaagtgtgccatcggctattataattttccattttgcctgcgcatccccatatttccggtcagtactcccagttctgaagatccagttgctggcgatattaagggctgcgattgcaacctggaaggggtgctgccagagatttgtgacgctcacggtaggtgtctgtgtagacccggcgtggaggggccacgatgtgacacatgccgatctggtttttattcctttcccatttgccaggcatgttggtgtagcgctttgggatcatatcagatgccctgcagtagcgttacaggtcagtgtgagtgtagacctggagtgactggccagcggtgcgaccggtgcctgtcgggagcctatgattttccacactgccagggtagctcttccgcatgcgatcccgcaggcacgatcaatagcaacttgggatactgtcagtgcaaactccacgtggaaggccccacatgctccagatgcaagttgttgtactggaatctggataaagagaacccatcagggtgcagtgaatgcaaatgtcacaaggctgggactgtttcaggaaccggcgagtgcagacaaggtgacggagactgtcattgtaagtcgcacgtcggcggagattcttgcgacacctgtgaagacggctactttgcgttggaaaagagtaactatttcggctgtcagggatgccagtgcgacattggcggggccttatcaagcatgtgcagcggaccatccggggtgtgtcaatgcagagagcacgtggtcgggaaagtgtgtcagcggcccgaaaacaactactactttcccgacctccatcatatgaagtacgagattgaggacggatctactcctaacggacgtgacctgcgctttggctttgatccattggcgtttccagaattttcatggagaggatatgcacagatgacttccgtgcagaacgacgtgcgcattacactgaatgttggtaagtcttctggttccctcttccgcgtgattcttaggtatgtgaatcctgggaccgaagccgtgagcggtcacatcaccatttaccctagttggggggccgcacagtctaaagagattatcttccttcctagcaaagaaccggccttcgtaactgtgccaggcaacggttttgctgaccctttcagcatcactccaggcatttgggttgcttgcattaaggccgaaggagtgctgttggactacttggttctccttcctagagactattacgaggcatccgtgctgcagctgcctgtgaccgaaccttgtgcatacgccggaccaccacaggaaaactgcctgctgtatcagcacctgcccgtaaccagatttccttgtaccttagcgtgcgaggcgcggcacttccttcttgacggcgaaccacgccccgtcgcagtaagacagcccacccctgcccaccctgttatggtggacctgtcaggtcgagaggttgagctccacctgcgccttcgcatccctcaggtcggacactatgtggttgtcgtggaatactcaacagaagccgctcagctgtttgtcgtcgacgtgaacgtcaagagctctggctcagtgcttgccggacaggtgaacatctacagctgtaactattccgtgctctgtcgaagcgctgtgattgaccacatgagccggatagctatgtacgaacttctcgcggacgccgacattcagctgaaagggcacatggctcgttttctgctccatcaggtatgcattataccgatcgaagaattctccgctgagtacgttcggccccaggttcactgtatcgcgtcatacggacgttttgttaatcagtccgccacatgcgtgtccttggcccatgaaaccccacctactgccctgatcttggatgtgttatccggtaggcccttccctcatctacctcagcagagttctccatcagtggatgtgctgccgggagtgaccctaaaggctccacagaatcaagtaacccttagaggaagggtgccacatttgggacggtacgtgttcgttatacatttttatcaagcggctcaccccacttttcccgctcaggtctctgtggacggcggttggcccagggccggaagcttccatgcctccttctgtccacatgtgctgggctgtcgggatcaagttattgccgaaggacagatcgaatttgacatatccgagcctgaagtcgccgctaccgtcaaggttcctgaaggaaaaagtctggtgctagtccgtgtcctggttgtgcccgctgaaaattacgactatcaaatcctgcataaaaaatcaatggacaagtccctggaattcatcacaaattgtgggaaaaattctttttatctcgatccgcagaccgcgagcaggttttgcaagaatagtgccaggtctctggtggccttctaccataaaggcgctcttccttgtgagtgtcaccctactggagcaaccgggccgcactgtagcccagaaggcggccagtgcccatgtcagcccaatgtgattggtagacaatgcacacgatgcgctacagggcattatggcttcccccgctgtaagccctgctcttgcgggcggagattgtgtgaggaaatgactggccaatgtcgctgccccccccgcacggtacgaccccagtgtgaggtctgcgagactcattccttcagctttcacccaatggcgggatgcgagggatgtaattgtagtaggcgggggacaattgaggccgcgatgcctgaatgcgaccgggactccgggcagtgtcgatgcaaacctaggataaccggtagacagtgcgaccgctgtgcctctggattctaccgcttcccggaatgtgtaccttgcaattgcaaccgtgatgggactgagcccggggtttgtgatcccggcaccggcgcatgtctctgcaaagagaatgttgaaggaactgaatgcaacgtgtgcagggaaggctcattccacctagatcctgccaatcttaagggctgcactagttgcttttgtttcggggtcaacaatcagtgtcatagcagtcataagcgtcgaacaaaatttgttgacatgcttggctggcacctggagacagcagatagagttgacatacccgtatcattcaatcccggaagcaatagcatggttgccgatctgcaggagctgcccgccaccattcactccgcttcttgggttgcaccaaccagttatttgggagacaaggtgagctcttacggcggttacctgacgtaccaagcaaagtcttttggcctccctggagatatggtgttactggaaaagaagcctgacgtgcagttgacaggacagcacatgagcattatttatgaggaaaccaatactcctagaccggatcgcctgcaccacggccgcgtccatgtggtcgaggggaatttccgccatgcttcatcaagagcgccagttagccgcgaggagctcatgacggtcctttctaggcttgcagacgtaagaatccaaggcttatacttcacagagacccaaagacttactcttagcgaggtagggctcgaggaagcttcagacaccgggtcaggcaggatcgcactcgccgtggagatttgcgcctgtccccctgcctacgccggcgatagctgccagggatgctcccctgggtattaccgggaccataaagggctttatacaggccgatgtgtgccttgcaactgcaatgggcactctaatcagtgccaagatggatccgggatttgcgtaaactgtcagcacaataccgccggtgaacattgtgaaaggtgccaggagggatactacggcaacgcggtccatggatcatgccgagcatgtccctgtccccatactaacagttttgcaaccggctgcgtggtaaatgggggagacgtaaggtgctcctgtaaggccggctatacgggcacacagtgcgagcgctgcgccccagggtactttggcaatccccaaaagttcggagggtcttgtcaaccttgctcttgtaactcaaatgggcagctcgggtcatgccatcctttgactggcgattgtattaatcaagagccgaaagactcaagtcctgctgaggaatgtgacgattgcgacagctgtgtgatgactctcctgaatgacctggcgactatgggcgaacagctcagactagtgaagtcccagctccagggactcagtgcgtctgcaggtctgttagagcagatgagacatatggaaacccaggccaaggacttgcgcaatcaacttctcaactacaggagcgccatatctaatcatggatcaaagatcgaaggtctggagagggaactgaccgacctgaatcaagagtttgaaaccctgcaggaaaaggcgcaggtcaatagtcggaaggcccagacgttgaataataacgttaatcgggcaacgcagtcggctaaggagctcgacgtgaaaattaaaaacgttattaggaatgtgcacatcctgcttaagcagatctccgggacagatggagaagggaacaatgtgccatctggtgatttctccagagagtgggcagaggcccagcgaatgatgcgcgaactgcggaacaggaacttcggcaagcatttgagagaagcggaggcagacaagcgggagtctcagctgctattaaacaggattaggacttggcagaagacacaccagggggaaaataatgggcttgcgaatagtataagagacagcttgaatgaatacgaggccaagctgtccgatcttagggcacgcctgcaggaggctgccgctcaagcaaaacaagccaacggcctgaatcaggagaatgagagggctctgggcgcaatccagcggcaggtaaaggagataaacagtctccagtccgactttacaaaatacctgaccacagccgatagcagtctgttacaaacaaacatcgctctgcaactgatggagaagtctcagaaagagtacgaaaaactggccgcttccctcaacgaggctcggcaggaactgtcagacaaggtccgggagctgtctagatctgcaggaaaaacttcattagtggaggaggctgaaaaacacgcccgatctctgcaagaactcgccaagcaactcgaagagattaagagaaacgcatcaggggacgaattggtacgctgcgccgtggatgcagccaccgcctatgagaatattttgaatgccattaaagccgctgaggacgcagctaatagagcagcttctgcctctgaaagcgctttgcagactgttatcaaggaggatctgccacgtaaagctaagaccctctcaagcaacagcgataagctcctcaatgaagctaagatgacgcaaaaaaaattaaagcaagaggtcagcccggccctcaataaccttcagcaaacgcttaatatagtgactgtccagaaggaggttattgacaccaaccttacaacccttcgggatggcctgcacggcattcaacggggagacatagacgcaatgattagtagcgcaaaatccatggtgaggaaggctaacgacattaccgacgaggtgctggacggcctcaatcccatacagaccgacgtcgaacgaatcaaggacacttacggacgcacccagaatgaggactttaaaaaagcgctcactgacgccgataattctgtgaacaaattgaccaataagttgcctgacttgtggcggaaaatagaatcaattaatcagcagcttctccctctgggaaatatttccgataatatggaccgcatccgagagttaatacagcaagcaagagacgccgcttccaaggtggccgtaccaatgcggtttaacgggaaatccggggttgaggtacgcctgcctaacgaccttgaggatcttaaggggtacacttctctctcattgttcttgcagcgaccaaactcccgagagaatggaggcaccgagaacatgtttgtcatgtatcttggcaacaaagatgcaagcagagactacatcgggatggccgtggtggacggacaacttacttgcgtgtacaatttgggagatcgtgaggcggagctgcaagtggatcaaatcctcaccaagtctgagaccaaggaggctgtaatggacagagtgaaattccagcggatatatcagttcgctcgtctcaattatacaaaaggagctacttcttctaagcctgaaacccctggggtatatgatatggacggcaggaactccaatacactacttaatctagatccagaaaatgtggtgttctacgtagggggctatccccccgattttaaactcccctcacgcctcagcttcccaccgtacaaaggatgcattgaactagacgatttgaatgaaaacgtcctgtctttgtataatttcaaaaaaacatttaaccttaacaccacagaggtggagccatgcaggagaagaaaagaggaatccgacaagaactacttcgagggcacaggctacgcccgcgtgccaactcagccccatgctccaattcctactttcggacagacaatccaaactacagttgaccgggggctcttgttctttgccgagaatggtgaccgcttcatttcgttgaacatcgaggacggcaagctgatggtgaggtacaaactgaattccgagctacccaaggagagaggggtgggggacgcaattaataacgggcgtgaccactctattcagatcaaaatcgggaagctgcagaagcggatgtggattaacgttgacgttcagaatacaataattgatggcgaggtctttgactttagcacttattacctcggagggattccaatcgccattagagagcggttcaatatatctacacctgccttcagaggatgcatgaagaatctgaagaaaacatcaggtgtggtgagactcaacgatacggtcggagtaactaagaagtgtagcgaggactggaaactggtaagatcggcctctttctccaggggcgggcaactctccttcaccgacttgggcttaccgcccacggaccaccttcaggcttctttcggctttcagacctttcagcccagcggtatcctgctggatcatcagacttggacacgcaacctgcaggtgactctggaagacgggtatatcgagctctcgacaagcgattcaggcagccccatatttaagagtcctcaaacttacatggacgggctgcttcactatgtgtcggtcatctccgataactcaggactaaggctgttaatcgacgatcagctattaaggaacagtaaaagactgaagcacatctccagctccagacaatccctacggctgggcggctccaactttgagggctgcatcagtaatgtattcgtacaaagactttctctgtcacctgaagtgctcgacctaactagcaactcattgaagcgcgatgtttccctggggggctgtagtctcaacaagcctccttttctgatgctgttgaagggcagtacccggtttaataagaccaagacgttcaggatcaaccaactgcttcaggatacacctgtggcctcgcctcggtctgtgaaggtgtggcaagacgcgtgcagcccactgccaaagactcaggccaatcacggggctctccagttcggggatatacctacttcccacctcctctttaaacttccacaagagctgttaaagcctcggtcccagtttgccgtggacatgcaaacaacatcctcccgcggactagtcttccacacaggcactaagaacagcttcatggcactatacctcagcaaaggacggttagtatttgccttgggcacagatggtaaaaagctgagaattaaatccaaagaaaagtgcaacgacggaaagtggcatacagtagtgtttgggcatgatggcgaaaaagggaggcttgttgttgatggcctgcgtgcacgcgagggcagcttaccaggaaacagtacaatatctatccgggccccagtgtatctggggtccccaccgagtgggaaaccaaagtcccttcccactaactcctttgtcggctgtctgaaaaactttcaactggattctaagcccttgtataccccttcctcctcctttggtgtcagttcgtgtttgggtgggcccctggagaagggaatatatttctcagaagaggggggccatgtggttctagcccacagcgtgttgctggggcccgagttcaagttggtgttcagtatacgcccacgttcacttacaggaattttaatacacattggctcccaacctggtaagcacctgtgtgtgtacctggaagctggcaaagtgaccgcctccatggatagcggcgccggaggaacttcgacaagtgtgacaccaaagcagagtctctgcgacgggcagtggcatagtgtggcggtgacaataaaacagcatattttgcatctcgaactggacactgattcaagctacaccgctgggcagatcccatttcctccggcaagtactcaggagcctttgcatttgggaggtgccccagctaatctgacgacgctgcgcatccctgtctggaaatcatttttcggatgtctgcggaacatccatgtgaaccacattcccgtcccagtgacggaagccctggaagtgcaggggcccgtaagtttaaatggttgcccagaccaatag

SEQ ID NO: 121884 - DNA, 9834 bp, synthetic construct
  misc_feature 1..9834: note = Description of Artificial Sequence: Synthetic coding sequence
  source 1..9834: mol_type = other DNA
atggccgctgccgccagaccccgcggtagagctctcggtccagtgctcccccctacacccctgcttctgttggtgctcagagttctcccagcttgtggtgctactgcccgggacccaggcgcagcagcaggattaagcctccatcccacttatttcaatctcgccgaagctgcacggatctgggccaccgccacatgtggcgagcggggtccaggcgaaggccggccgcagcccgaattgtattgtaagctcgtcggaggcccaaccgcaccaggatctgggcacaccattcaaggccagttctgcgactactgcaatagcgaagacccccgaaaggctcatcctgttaccaatgccattgatgggtccgagcggtggtggcagagtcctccattgagctcaggtactcaatacaatcgtgtcaatctgacgcttgaccttgggcagctcttccatgtggcctacatcctgattaaattcgccaattctcctagacccgacttgtgggttctcgaacgctcagtggacttcggctcgacatactccccctggcagtactttgcacattccaaagtggattgcctaaaagagttcggacgcgaggccaatatggctgttactagagatgacgatgtcctctgtgttactgagtatagcaggatcgttcccctggagaatggcgaggtggtcgtttcactgatcaacgggagacccggtgccaagaactttactttttctcacaccctgcgtgagtttacgaaagccacgaacatccggctccgcttcctgcgcacaaatacactccttggacatctcattagtaaggcgcaacgggaccccacagtaaccagacgctattattactcaattaaagatatcagcattggcggtcaatgtgtttgcaacgggcatgccgaggtatgtaacataaacaaccccgagaaactgtttcggtgcgaatgccaacaccacacatgtggcgagacgtgcgaccgctgctgcacaggctataatcagaggcggtggaggcctgccgcgtgggagcaatctcacgaatgcgaagcctgtaattgccatggtcacgcctcaaactgctactacgatcccgatgtagaacggcagcaggcaagcttaaacactcagggaatatacgctggcggaggcgtttgcatcaactgccagcataacaccgccggagtgaactgcgagcagtgtgctaagggttattaccggccttacggtgttccagttgatgcaccagacggctgcattccctgcagctgcgaccctgaacacgctgatggatgcgagcaggggagtggacgctgtcactgtaaacccaatttccacggagataactgtgaaaagtgcgcgatcggatattacaatttcccattttgcctgaggattcccatctttcccgtaagcacaccatctagcgaggaccccgtggctggcgatataaagggttgtgactgcaacctggagggagtgttgcctgagatctgtgatgcacacggccgatgtctgtgccgaccaggcgtggagggaccacggtgtgatacatgtcggagcggattttattcattccctatctgccaggcctgttggtgttctgctttgggatcttatcaaatgccctgctcctctgtgaccgggcagtgcgagtgtaggcccggggtgaccggccagcgctgtgatcgctgcctgtccggagcctacgatttcccacactgtcagggtagtagctctgcatgtgatccggccggcacgatcaacagtaatctgggatactgccagtgtaagttgcacgtcgagggccctacatgtagccgctgcaaacttctttactggaacctggataaggaaaatccgagcggatgctccgagtgcaagtgtcacaaagctgggactgttagcgggaccggagaatgcaggcaaggtgacggcgattgtcactgcaagagtcatgtcggtggcgacagctgcgacacgtgcgaagacgggtatttcgccctggaaaaatccaactactttggctgccagggctgtcagtgtgacattggaggcgccctctctagcatgtgctcagggccttccggggtctgccaatgccgcgagcacgttgtggggaaggtttgtcaaaggcctgagaacaactactattttccggaccttcatcatatgaagtacgagatcgaggatggctcgacccctaatgggagggacttaaggtttggattcgatcccttggccttccccgaattctcgtggcgcgggtacgcacaaatgacttctgtgcagaatgatgtgcgtatcacacttaatgtgggcaagtcctcaggctctctctttcgtgtcatcctgcgatacgtaaacccaggcacagaagctgtatctggacacataacaatctacccttcctggggcgcagctcagtcaaaagagattatcttccttccgtcaaaggagcccgccttcgtcactgtccctggcaatgggtttgccgatcctttttctatcaccccaggaatctgggtcgcatgtattaaggccgagggcgtgctgctggattatctggtgcttctgcccagagactactacgaggcaagcgtgctgcagttgcccgtgacggagccctgcgcctacgcgggtcctccgcaggagaactgcttgctgtatcagcatcttcctgtaaccagatttccttgcactctagcttgtgaagcgagacatttccttctggacggggagccgaggcccgtggcagtcagacaacctactcccgcccacccagtgatggtggacttgtctggccgcgaggtggaactgcacttgaggctcagaataccgcaggtgggccactatgtggtagtggtggagtattcgacagaagctgctcagctgtttgtagtggacgtaaacgtaaaaagctctggctccgttcttgcaggacaggtgaatatatattcgtgcaattacagcgtactgtgccgctccgcagtgatcgatcacatgtcgaggatagctatgtacgagctacttgcagatgctgacattcagcttaaagggcatatggcccgtttcctgcttcatcaggtgtgtattatccccattgaggaattcagtgccgaatatgtacggcctcaggtgcattgcattgcaagctacggacggttcgttaaccaatccgccacatgtgtgagccttgctcatgagactccccctactgcactcattctcgatgtgttgtcagggcgcccctttccacacctgccccagcagtcaagtccctccgttgacgtgttgcctggtgtgactctgaaagccccacagaaccaggtcaccctgcgtggccgcgtgccccatttaggtaggtacgttttcgtcatacatttttatcaggctgcccatccaacattcccggctcaagtgtctgtagacggtggatggccgcgcgccggaagctttcacgcatctttttgtccacacgtcctcgggtgtagggatcaggtaattgcggagggccaaatagagttcgatatctctgagcccgaggttgccgccactgtcaaggtcccagagggtaagtcgctcgtgttagtgagggttctggtggtgccagctgaaaactacgactaccagattctacataagaagagtatggataagagtctggaatttattacaaattgtggcaagaacagcttctacctagatccacagaccgcctctcgtttttgtaaaaactccgcaagaagccttgtagctttctatcataagggagccttgccttgcgagtgtcatcctacgggagcaaccggccctcactgttcaccagagggtggccagtgtccatgccagcctaatgtgatcggccggcagtgtacccgctgtgccactggacactacggctttccccggtgtaagccctgcagctgcggccgcagactgtgcgaggaaatgacagggcagtgccgctgccctcctcgaactgttcggccccagtgcgaggtgtgtgaaacccattctttctcttttcacccgatggcaggttgcgagggctgtaattgctcccggcggggcactatcgaggctgcgatgcccgaatgcgacagggacagtgggcagtgtcggtgcaagccacggataaccgggcggcaatgcgaccggtgcgcaagcggcttctaccggtttcctgagtgcgtgccttgcaactgcaaccgtgatggcaccgagccaggagtgtgcgatcctggcacgggcgcttgtctgtgcaaggagaatgtcgaaggcactgagtgcaacgtttgtagggaaggaagcttccacctcgaccccgctaatctgaagggatgcaccagctgtttttgcttcggcgtgaacaaccaatgtcactccagccacaagcgtaggacaaagtttgtggatatgctcggctggcatctcgagaccgccgatagggtcgacatcccggtcagcttcaacccaggcagcaacagtatggttgccgacctgcaggaactgcctgctacgattcacagcgcctcatgggtagccccgacatcctacctgggcgataaagtcagtagctacggcggctacctcacatatcaggcgaaatctttcggactgccaggggatatggttctgctcgagaagaaaccagatgtgcagctaacaggacagcatatgtcgatcatctacgaagagacaaacactccaagaccagatcgattgcaccatggacgcgtgcatgtggtggaaggcaactttcgacatgcttctagccgagccccagtatctcgcgaggagttgatgaccgttctatctcggctagccgacgtccgcatccagggattgtacttcactgaaactcagcgactgaccttgagcgaagtgggcctggaagaggcatcggacacaggaagtggcaggatcgccctcgccgtggagatttgcgcttgccctcccgcctacgccggcgactcttgccagggctgttcacctggctattatcgcgaccacaaaggattatataccggccggtgtgtaccttgcaattgcaatggtcattctaatcaatgccaagacggatctggaatctgcgtgaactgccaacacaacacagctggcgaacactgcgagcgctgtcaagaaggatactacggtaacgccgtacacggaagctgccgggcctgcccctgtcctcacaccaatagtttcgcaaccggatgtgtggtgaatgggggggacgtccggtgctcttgcaaggctggctacacgggcactcagtgcgagagatgtgcccccggatacttcgggaatcctcagaagttcggtggatcctgtcagccttgcagctgcaattcaaatggccaactgggaagctgtcatcccctaactggggattgcataaaccaggagccgaaggattcttctccggctgaagagtgcgacgattgcgactcttgcgttatgactcttctcaacgatctcgcaaccatgggagaacagctcaggctggtcaagtctcaactacagggcctgtcagcatccgcagggttgctggagcagatgagacacatggagactcaggccaaggacctccgcaaccaattacttaattaccgtagcgcaatcagcaaccacggctccaaaatcgagggactggaaagggagctgaccgatctgaatcaggagtttgagacgctgcaagaaaaagctcaggtaaatagccggaaagctcagacactgaataacaatgtgaaccgggcaactcaatccgccaaagaactcgacgtgaaaatcaaaaatgttatacggaatgttcatatgctgaaccggataagaacatggcagaagacacaccaaggagaaaataatggtctggcaaactccattagagatagtctgaacgaatacgaggcaaaactcagtgacctgcgtgccagactgcaggaggccgccgcccaggccaagcaagccaacggactgaatcaagaaaatgagagggcactgggagctattcagcggcaggtgaaagagattaattcactgcagtctgactttactaaatacctgactaccgccgactccagtctcctgcaaaccaacattgctctacagttgatggaaaagagtcagaaagagtacgagaaactggccgctagtttgaatgaggcgaggcaggaattaagcgataaagttcgagagctcagcaggagcgcggggaaaactagtcttgttgaagaggctgaaaaacacgcgaggtctctgcaggagctagctaaacagctggaggagatcaaacggaacgcctctggagacgaactggtcagatgtgcggttgatgctgctaccgcctatgagaatatccttaacgccatcaaggccgcagaagacgcagcgaacagagcggccagcgcatctgaatcagccctccagactgtgattaaggaggatttaccaaggaaagcgaaaaccctgagctcaaactccgacaaactgttaaacgaggcaaaaatgacccaaaaaaagctgaagcaggaagtgagcccggcattgaataatctgcagcagaccctcaacatcgtcacggtccagaaggaagtgatagatacgaacctcactacactgcgggacggtctacatggaatacaacgtggtgatatagatgctatgatctcctctgctaagagcatggtccgcaaggcaaacgacatcaccgatgaggtactggacggcctgaatccaatccaaactgacgtggagaggattaaagacacatatgggcgcacgcagaacgaggattttaagaaggcgctcactgacgccgacaacagtgtcaacaaacttaccaacaagcttcccgacctttggaggaaaattgagtccatcaaccagcaactgctccccctggggaacatttctgataatatggatcgcattcgggagttgatacagcaggctcgcgacgccgcaagcaaggtggccgtgcccatgagatttaacgggaaatctggggtggaggtcaggctccccaatgacctggaggatctgaaaggttacaccagtttgtctcttttcctccaaaggcctaattctcgtgagaatggggggacggagaacatgttcgttatgtaccttggaaacaaggacgcaagccgggattacataggcatggcagtggtggacgggcagttgacttgcgtatacaaccttggggaccgagaggctgaactgcaggtcgatcagatcctgactaagagcgagacaaaagaagctgttatggatagggtgaagttccagcggatatatcagttcgctagactcaactataccaaaggggccacgtcttctaagccagaaacacccggagtgtatgatatggatggacggaacagtaataccctgctcaacctggaccccgagaacgtggttttttatgtgggcggataccccccggattttaaactcccaagtcggctctcgttccccccctacaagggctgcattgaactggacgacttaaatgagaatgtgctctctctgtataattttaaaaagactttcaatttgaatactacagaggtagaaccctgccgccgaaggaaggaagagagcgataagaactactttgaagggacgggttatgcgagggttccaacccagccgcacgcccctatcccgactttcggacagactattcagaccacggttgaccgcggtttgctcttcttcgcggaaaatggtgatagatttattagcttaaacatagaagacggaaagctgatggttcgctataagctcaactccgaactccccaaggagagaggcgtgggcgacgccataaacaacggcagggatcacagcatccagattaaaattggaaaactgcagaagcgcatgtggatcaatgtggacgtgcagaacactatcattgatggagaagtctttgacttttccacatattacctgggcggcatacccatcgcgataagggagcgctttaatatctccacaccggcgtttcgggggtgcatgaaaaacctaaaaaaaaccagcggcgttgtgcgcttgaacgacaccgtcggggtgacaaagaaatgctccgaggactggaaactggtcagatccgcctccttttcgagggggggacaactgtctttcactgatctcggcctgcctccgaccgatcacttgcaggccagtttcggattccagacattccagccatctgggattttattggatcaccagacctggactcgaaatctgcaggtgacgctggaagatggctacatcgaactgtctacctctgacagtggaagccccatatttaagtctccccaaacgtacatggacggattactccattatgtttcagttatttctgataactctgggttgaggctcctgatcgacgaccaacttctacggaattccaagagattgaaacatatctcctccagcagacagtccctgcggttgggaggcagtaacttcgaggggtgtatatctaatgtttttgtgcagcgcttaagcctgtccccagaggtcctcgatctgacctccaattcactgaagcgtgatgtgagtctgggcggttgttcactcaataagccgccttttttgatgttactgaaaggatccacaagatttaacaagacaaaaacctttagaatcaatcaattgcttcaggatactcctgtcgccagcccccgctctgtcaaagtatggcaggatgcctgttcccccctccctaaaacgcaggccaaccacggagccctgcaatttggagacattccaacatcacatctgcttttcaagctccctcaggaactgctcaagcctaggagtcagttcgcagtggatatgcaaacgacatctagccgaggcctcgtgttccataccgggactaaaaactcatttatggcgctgtatctgtcaaagggtcgtctcgtgttcgccctcggcacagatggcaagaaacttagaataaagagcaaggagaagtgcaatgacgggaagtggcacacagtggtgttcggacacgatggggagaaggggcggctggtggtggatggtttgagagctagagagggaagcctaccgggcaattctactatttcaattcgagctcccgtttacctcggttctccccctagcggcaaacctaagagcctacccacaaatagcttcgtggggtgtctgaagaactttcagttagactcaaagcccctctacactccctcttccagcttcggagtgtcttcttgtctgggcggtcctttggaaaagggcatttacttttccgaggagggtgggcatgtcgtgctagcccattcagtgcttctcggccccgagttcaaacttgtattttctataaggccaagaagtttaacagggattctgatccatattggatcccaacctggtaaacacctgtgtgtctatctagaggcgggcaaggtgaccgcaagtatggactctggtgcgggtgggacctccaccagcgtgacgcccaaacaaagtttgtgcgatgggcaatggcatagtgttgcagtgaccattaagcagcacatattgcatcttgagctggatactgatagttcatatacagctggacaaataccgttccctcccgcaagtacccaggagcctctccacctagggggggcccccgctaacctgacgacgttaaggattccagtttggaaatctttctttggctgcctcaggaatatacacgtgaaccatattcctgttcctgtgacagaagccctagaagtccagggcccagtaagtctcaacggatgtccagatcagtag

SEQ ID NO: 121885 - DNA, 4560 bp, synthetic construct
  misc_feature 1..4560: note = Description of Artificial Sequence: Synthetic coding sequence
  source 1..4560: mol_type = other DNA
atggccgcggccgcgcgtccacgtggtagggctttaggccctgtcctccctcctacccctctgttactactcgtattacgtgttttacctgcgtgtggcgccaccgcccgggatcccggtgcagctgcaggcctgagtctgcacccaacatattttaacctcgctgaagcggccagaatttgggccactgcgacatgtggtgagagagggccgggggaaggccgaccccagcccgaactatactgcaagctggtggggggtcccacagcccccgggtccggtcacaccatacagggccagttttgtgactattgtaatagtgaagaccccagaaaagcccaccctgtcacaaatgccatagatgggagcgaacgatggtggcagtctccccctctgagtagcggcactcagtacaaccgggtcaatttaactctggacctggggcaactgttccatgtcgcctacattctgattaaattcgctaacagccccagacccgacttatgggtgctagaaagatccgttgatttcggctcaacatactctccctggcagtatttcgcccatagcaaagtagactgcctgaaggagtttggacgggaggccaacatggcggtaactagagatgatgatgtgttgtgtgtgacggaatacagccgcatcgtgccattggagaatggtgaggtggtggtgtctctgatcaacggccgaccaggagcaaagaattttactttctcacatacgctgagggtctaccagggcaacaaacacccactgtttttgaggactaatacactccttggacatcttatttctaaggcacagcgcgaccccactgtaactcgtaggtactattacagcatcaaagacatttctataggcgggcagtgtgtgtgcaatgggcatgcagaggtctgtaacatcaacaatccagagaagctgttccggtgcgagtgccaacaccatacttgtggggagacctgcgacaggtgttgtacagggtacaaccaacgcaggtggaggccagccgcctgggagcagtcacatgaatgtgaggcatgcaactgtcatggccatgcaagtaactgttactatgatcccgatgtggagcggcagcaggcttctctgaatacccaaggtatttatgctggcgggggggtttgcatcaactgccaacataacaccgccggcgtcaactgtgagcagtgcgcaaagggctattaccggccgtacggggtgcctgtggacgctccggacggttgcataccatgctcctgcgaccctgagcatgccgatggctgcgaacagggcagcggccgctgtcactgcaagcctaactttcatggtgacaactgcgagaagtgcgcgattgggtactacaacttcccattttgcctgagaatccccattttccctgtatcaacgccgtcatccgaggatcccgttgccggggatattaaaggttgcgattgtaaccttgaaggagtgctgccagaaatctgcgatgctcacggtagatgcttgtgccgccccggggtggagggtccccggtgcgacacttgccgctcaggtttttattcattcccaatttgtcaggcttgctggtgttctgctctcgggtcataccagatgccctgtagcagtgttactggccagtgcgagtgtagaccaggagtgactggccaacgatgcgaccgctgtctgagtggagcgtacgacttccctcactgtcagggaagttcttcagcgtgcgatccagctgggaccatcaactccaacctcggctactgccagtgcaaacttcacgtggaggggccaacttgttcccggtgtaaattgttgtattggaatctggataaagaaaaccccagtggctgttccgaatgtaaatgtcacaaagccggcacagtgtccggaacaggtgagtgtcggcaaggggacggggattgtcattgtaagagtcacgtggggggcgattcctgcgacacctgtgaggacggttatttcgcgctcgagaagtctaactacttcgggtgtcaagggtgtcagtgtgacatcggaggagcactctcatccatgtgttccggcccctctggcgtctgccaatgtcgggaacacgttgtcgggaaggtctgccagcggccagagaataattactattttcctgatctgcatcatatgaaatatgaaatagaggacggtagcacaccaaatggtcgcgatctcagatttggcttcgacccgctagccttccctgagttctcttggagaggctacgcccagatgaccagcgtgcagaacgatgtgcgcattaccttgaatgtggggaagtcttcagggagcctgttccgcgtaatactgagatacgtgaacccaggcaccgaggctgtgtctggacatatcactatttatcccagctggggagcggctcaatctaaagaaatcatcttccttccttctaaggagcctgccttcgtgaccgtaccaggcaacggattcgccgatccctttagcataacaccaggcatctgggtggcatgtattaaagcggagggcgttttactggattatctagtattgctgcccagggactactacgaagcgtctgtcttgcagcttcctgtcaccgagccttgcgcctatgctggaccaccccaggaaaattgtctgctttaccaacacctgccagttacaaggtttccatgtacgctcgcctgcgaggcaagacatttcctactagatggagagccgagacccgtggccgtgcgacagcccaccccagcccatcctgtcatggtcgacttatcaggacgcgaggtcgagctgcacttacggctcagaataccccaggtggggcattatgtggtcgtggttgagtacagcaccgaggctgcccagttgttcgtggttgatgttaacgtgaagagctctggaagcgttctcgccggccaggtgaacatttatagctgcaattacagtgtgctctgccgatctgctgtcattgatcatatgtctaggattgcgatgtatgagctgcttgcggacgctgacattcagctgaaaggccacatggcccgattcctgctgcaccaggtgtgcatcattcccatcgaagaatttagtgccgaatacgtgcgcccacaggtgcactgcatcgccagttacggaagatttgtcaaccagtcggccacctgtgtctctctggcacacgagacaccccccactgcacttatcctggatgtgttatctggaagacctttccctcatctcccccagcagagctccccatcagtggatgttttgccgggggtcactctcaaagcccctcagaatcaggtgacactacgcggacgcgtcccccatcttggaagatacgtgttcgtcattcacttttaccaagccgcccaccctactttccccgctcaggtttctgttgatggtggctggccacgggctgggagtttccacgcatccttctgcccccatgttctggggtgccgagatcaggtcattgcagaaggccagatagaattcgacatttccgaaccagaggtggccgccacggtgaaggtgccagagggaaagtcgcttgttctggtgcgcgtgttggtggtacctgcggaaaattatgattatcagatcctgcacaagaagtccatggacaagagtctggagttcatcaccaattgcggtaaaaatagcttttaccttgaccctcagaccgcatctaggttttgcaaaaattctgccagatccctggtggccttttaccataaaggtgcactgccctgcgagtgtcaccccactggagcgacaggaccgcattgcagcccagaaggcggagcacacgcaagccccacttcgtctggaggatccgcaccggcggtgcagcaagcgtacggcttcccccggtgcaagcgcaaatcttgcagctgcggccggcggttatgcgaggaaatgactggacagtgccgctgcccgcccagaaccgtcaggccgcagtgcgaggtctgcgagacacatagcttttctttccatccgatggccggatgtgaaggctgcaactgctctcggcgcgggaccatcgaagcggctatgcctgaatgtgatagggactcgggccagtgccgctgcaagccacggatcacaggaaggcaatgtgaccgttgcgcgtccggcttctaccgtttcccagaatgcgtgccctgtaactgtaatagggatggtacagagcccggagtctgtgacccagggaccggggcgtgcctctgtaaggaaaacgtcgagggtacagaatgtaacgtgtgtagggagggctcctttcatcttgatcctgcaaatctcaaagggtgtacgtcatgcttctgtttcggagtaaacaaccagtgccatagctcccataaaaggcgtacaaaattcgtggatatgttagggtggcacctcgaaaccgccgaccgcgtcgacattcccgtgtctttcaaccctggctccaattcaatggtggcagacctgcaggagctaccggccaccatccattccgcatcttgggtcgccccatag

SEQ ID NO: 121886 - DNA, 1743 bp, synthetic construct
  misc_feature 1..1743: note = Description of Artificial Sequence: Synthetic coding sequence
  source 1..1743: mol_type = other DNA
atggccgctgcagcgcggccccgaggcagagcactaggtccggtcctaccaccaacaccactgctgctgctcgtgttacgggtattacccgcctgtggagccacggccagagacccaggtgctgccgccgggttgagtttacacccaacttatttcaatttggccgaggccgcccggatttgggccactgccacatgcggcgaacgcggccccggcgaaggaaggccccagccggagctgtactgtaagctagtgggaggtcccaccgcgcctggcagtggccacaccattcagggacagttctgcgactactgtaatagcgaggacccccggaaggcacacccagttaccaatgcaattgacggcagtgagcggtggtggcagagcccccctttgtcctctggcacccaatacaacagggtcaaccttaccctcgaccttgggcaactcttccacgttgcttatatactaattaaattcgctaacagtcctcgtcctgatctctgggtgttagaaagaagtgtagactttggcagcacctattccccttggcagtattttgcacactccaaggtggactgtttgaaagaatttggcagagaagccaatatggccgtaaccagggacgatgacgtgctgtgcgtgaccgagtatagccgcatcgttcctttggaaaatggagaggtggtggtgtcgttgattaatggtcggccaggtgccaaaaacttcacattttcccatacactgagagagtttactaaggccactaatattagactgcggtttctgcgcactaacaccctgcttgggcatctgatctcaaaagcccagcgcgacccaactgtcacaaggcgctattattactcaatcaaagacatatctataggcgggcagtgcgtgtgtaatggacacgccgaggtctgtaatattaacaatccggagaagctgttccggtgtgagtgccagcaccacacatgtggcgaaacttgcgatcggtgctgcacaggatataatcagcggcgttggcgacccgctgcgtgggagcagtctcatgagtgcgaagcttgtaattgtcatggtcatgcctcaaactgttactacgatcccgatgtggagcgtcagcaggcaagcctgaacacacaaggcatatacgccggcggaggtgtttgcattaattgccaacacaacacagccggcgtgaactgtgagcagtgcgcgaaaggctactaccgaccttatggcgttcctgttgatgcgcccgacggctgcattccttgttcctgtgacccagaacatgcggatggctgcgagcagggcagtgggagatgtcattgcaagcccaacttccacggcgacaattgcgaaaaatgcgctatcgggtattataattttcccttctgtttgaggataccgattttcccagtgtcaactcctagctctgaggatcctgtggctggggacatcaaaggaaattggtgtgactgcaacctcgagggggtgcttccggaaatttgcgatgcccacggccggtgtctgtgtagaccaggtgtagaggggccacggtgtgacacttgtaggagtggcttttattccttccctatttgccagggtccgtctgagaaggtggcaatttacaaaccagagtccaggcccagtgctgagactgagccagccagcacctggatcctggatttcccagcatcaaggacaggtgaaatcaatttctactgcctgtctccatag

SEQ ID NO: 121887 - DNA, 5007 bp, synthetic construct
  misc_feature 1..5007: note = Description of Artificial Sequence: Synthetic coding sequence
  source 1..5007: mol_type = other DNA
atgcctcctgccgtaagacgctccgcatgcagcatgggttggttatggatctttggggccgctctggggcagtgcctgggatactcatctcagcagcaacgagttccattcctacagcctccgggccagagtcagctacaggcctcttatgtggagttccggccgagtcagggatgcagcccaggttattatagggaccataagggattatacacaggtaggtgtgtcccttgcaattgcaatgggcatagcaatcagtgccaggacggctccggaatatgcgtgaattgtcaacataataccgcgggtgagcactgtgaacggtgtcaagaaggctattacggcaacgccgtccacggatcatgccgcgcctgcccatgtccacacaccaacagcttcgccactggatgcgtcgtaaacggcggcgacgtgcgatgtagctgtaaagcgggatatactggtactcagtgtgagaggtgcgcccctgggtattttggcaacccgcagaaatttggcggttcatgtcaaccttgttcctgtaactctaacggccagctgggttcatgccatccactcacaggagactgcattaatcaagaacccaaggactcctcgcctgctgaggaatgtgacgactgtgattcttgcgtgatgacccttctgaacgacttggccaccatgggggaacagcttcgattagtgaagtcccaactacaagggctgtcagcctccgcgggccttctcgagcaaatgcggcacatggagacacaggcaaaagatctgcgtaaccaactacttaattatcggtccgcaatttccaaccacgggtccaagattgaaggattagaaagagagctgaccgacctcaaccaggaatttgaaaccctgcaggaaaaagcacaggtcaactctagaaaagcccagactctgaacaataacgtcaacagagcgacccaaagtgccaaggaactggacgttaagatcaaaaatgtaatacgcaatgtgcacatgcttaatcggatccgtacatggcagaagacccaccaaggggaaaacaatggcttagcaaatagcattcgcgactctctgaatgagtacgaggcaaaactttccgacttgcgggccaggctccaggaggctgccgctcaggccaagcaagcaaacggcctgaaccaggaaaacgaaagggcgctcggagcgatccaaagacaggttaaggaaattaattcattgcagtctgatttcacaaaataccttacgacagcagatagctctttgcttcagaccaacattgccctgcaactcatggagaaaagccagaaggagtatgagaagctggcagcatccttgaatgaagctcgtcaggagctgtccgacaaagtgagagagctgtcacggagcgctggtaagacctccctcgtcgaggaggccgagaaacacgcccgctcactccaagagctagcgaagcagctcgaggaaattaaacgtaacgcttctggcgacgagttggtgcgatgtgcagtggatgctgcgaccgcgtacgagaatatcctgaacgccataaaggctgcagaagatgccgctaatcgggcggcatccgcctcagagtccgctcttcagacagtcatcaaagaagacttaccccgcaaggcaaagaccctgtcctccaacagcgacaagctcctgaatgaagccaagatgacccaaaaaaagcttaaacaggaggtgagccctgctctgaataatcttcaacagacgttgaacatcgttaccgtgcaaaaggaagtgattgacaccaatctgacaaccttgagggacgggctccacgggattcagcggggtgacatcgatgccatgattagttctgccaagagcatggtgagaaaagctaacgatattactgacgaggtcttggacggcctgaacccgatacagactgatgtggagagaatcaaggacacatacggccggacacaaaatgaggattttaagaaggctctcacagacgcagacaattccgtcaacaagctgacaaacaaactgcctgatctgtggagaaagatcgagtctatcaaccaacaactcctgcctctgggtaatataagcgacaacatggatagaatacgggagctgatccagcaggctcgagacgccgccagtaaagtcgccgtgcccatgagattcaatgggaaatcgggtgtggaagtacgattgcctaacgatctggaggatcttaaggggtacaccagcttgagcctttttctgcagcggcctaactcccgagaaaacggagggacagaaaacatgtttgtaatgtacctaggtaacaaggacgcaagtagggactacattggcatggcagtggtcgacggtcagctcacatgtgtctataatttaggcgacagggaagctgaactgcaggttgatcagattctgaccaagtcagaaacaaaggaagctgtaatggaccgggtgaagtttcagcgcatataccagttcgcccgcttgaattacacaaaaggagccacttcttcaaaacccgagaccccaggtgtgtatgacatggatgggcgcaactctaatactctgcttaacctggacccggagaacgttgttttttacgtcggcgggtacccgccagatttcaaactaccatcacgcctgtctttccccccttacaaaggttgtattgagttggatgacctgaacgagaacgtcctgagtttgtataactttaaaaagacttttaatctcaatactacggaggttgaaccctgtaggcgccggaaggaggagtctgacaagaattacttcgaaggcactggttatgctagagtacccacccagccacatgcaccaatccccaccttcggccagactatccagacgacagtggatcgtgggcttttgttttttgccgaaaatggtgaccggtttatttctctgaacattgaggacgggaagctgatggtccgctacaaactgaactctgaactcccaaaagagagaggtgtgggggatgccatcaataacggcagggatcattccattcagataaaaattgggaaactccaaaagagaatgtggatcaatgttgacgtccagaacacaattatcgacggcgaagtctttgatttcagcacttattatctcggggggattcctatagcaatccgcgaaagattcaatattagcactcctgcttttagaggttgcatgaaaaacctcaaaaagacctccggggtggttagattgaacgatacagtgggcgttaccaagaaatgcagtgaggactggaagctggtgcgctccgcatcattctccagaggtggtcagctgtcttttaccgatttagggctgccccctaccgaccacttacaagcatccttcgggttccagacattccagccatccggcatccttttggatcaccagacctggaccaggaacctgcaggtgacgctggaggatggctatatcgagctgtccacctccgacagcgggtcccccatatttaagagccctcagacatacatggacggcctgctccattatgtgagcgtgattagtgacaactcaggattgcgtctgctcatcgacgaccagttgctgcgcaactccaagcgtttgaaacacattagcagtagcaggcagagcctccgcctgggcggatccaattttgaaggatgcatctccaacgtgttcgtgcagaggctctcattgagcccagaggtgttagatctgacctccaatagcttgaaacgagacgtctccctcgggggatgcagcctcaataagcctccatttctgatgctgctcaaaggaagcactcgctttaataagactaagaccttccgaatcaatcagctgctgcaggatacacccgtggcctccccacgaagtgtgaaagtgtggcaagatgcctgctcccctctgcccaagacacaggccaaccacggtgctttgcagtttggcgacataccaacctcccatctcttattcaaacttcctcaagagctcctcaagcctcgttctcagtttgcagtcgatatgcagactacctcctcacgggggttagtgttccacacaggcacaaaaaacagtttcatggccctatacctctccaaaggcagactcgtattcgctctcggcacggacggcaaaaaattgcgaatcaagtctaaggagaaatgcaacgacggtaaatggcataccgttgtgttcggccatgatggcgagaaaggacgcttggttgtcgatgggctgcgagcccgcgaagggtccctgcctggtaacagcactatctcaatccgcgccccagtgtacctgggttctcctccttctgggaagccgaaatctctacccaccaactcttttgttggttgtctgaaaaattttcagctggacagcaagcccctgtatacacccagctcctcatttggcgtgtccagctgtctcggaggaccgttggaaaaaggaatttatttcagcgaagagggaggacacgtggtcttggctcacagtgtactgctcggtccagagttcaaactcgtcttctccatccgccccaggtccctcaccgggatcttaatccacatcggcagtcagccaggaaaacacctgtgtgtatatttggaggctgggaaagtcaccgcatctatggactcgggcgcgggcgggacttccaccagtgtcaccccaaagcagtcactatgcgacggccagtggcactccgttgctgttacaattaaacagcatatcctgcaccttgaactggacacggactcatcttatacagcaggacaaatccccttcccacccgctagcacccaggaacctctgcatctgggaggagcccccgctaacctaacaactttacgaatcccagtgtggaaatccttttttggttgtcttagaaatatccacgtgaatcacattcccgtgcctgttacggaagccttagaagttcagggtcctgtgagcctcaatggctgcccagatcagtag

SEQ ID NO: 121888 - DNA, 1065 bp, synthetic construct
  misc_feature 1..1065: note = Description of Artificial Sequence: Synthetic coding sequence
  source 1..1065: mol_type = other DNA
atgcagggactccttttcagtactctgcttctagccggtctggcacagttttgctgcagagtgcaaggcactggacccctcgatacaaccccagaagggaggccaggggaagtgagcgatgcacctcagagaaaacaattttgccattggccttgtaagtgcccccaacaaaaacctcgatgtccacccggggtgtcactggtgcgagatggctgtggttgctgcaagatttgtgccaagcagcctggcgaaatctgcaatgaagcagacctttgtgatccccacaaggggctttactgtgactacagtgtagaccgtcctcgttacgagacgggtgtctgtgcctatctagttgcagtggggtgtgagttcaaccaagttcattaccacaacggtcaagtgttccagccaaacccgctgttttcctgcctctgcgttagcggagctattggatgcacaccattattcatcccgaagctggctggaagccattgctccggtgccaaggggggaaagaagtcagaccagtctaattgtagtctcgagcccctgctgcagcagctgtccacctcctacaagaccatgccggcctaccgaaatctccccttgatttggaaaaagaagtgcttggtgcaagccaccaagtggacgccatgttccagaacttgcggcatgggcatctccaacagagtgactaacgaaaacagtaattgcgaaatgagaaaagagaaaaggttgtgttacatccaaccatgcgacagcaatattctgaagaccattaaaatcccaaaaggaaagacctgccagccgaccttccagctgtctaaggcagagaagtttgttttctcaggttgctccagcacccaatcctacaagccaaccttctgcggaatatgcctggacaagcgttgttgcatccccaataaaagtaaaatgatcacgatccagtttgactgtcccaatgagggtagctttaaatggaagatgctttggatcaccagctgcgtgtgccaaaggaactgccgcgaacctggagacattttttctgaattaaaaattctttag

SEQ ID NO: 121889 - DNA, 267 bp, synthetic construct
  misc_feature 1..267: note = Description of Artificial Sequence: Synthetic coding sequence
  source 1..267: mol_type = other DNA
atggctctctcctctgcttggcgcagcgtcctccctctctggttactttggagtgccgcctgcagtcgggccgctagtggggacgataacgccttccctttcgatatcgaggggagcagcgctgtgggtaggcaggatccgccagagaccagcgaacctcgggtagccttaggacggcttcctccagccgcagaaaaatgcaatgccggctttttccataccctgtcaggagagtgcgtgccatgcgactgcaacggcaactcatag

SEQ ID NO: 121890 - DNA, 363 bp, synthetic construct
  misc_feature 1..363: note = Description of Artificial Sequence: Synthetic coding sequence
  source 1..363: mol_type = other DNA
atggctttgtctagcgcctggagatccgtcctccctctctggctgctctggtccgcggcctgctcaagggctgcgtctggtgatgataatgcgtttcctttcgatatagagggaagctccgccgttgggagacaggatccacccgaaacgagtgaacctcgcgtggccctggggaggctgccccctgcggccgaagtgcagtgtccatgccattgtcatccagcgggcgctccagcccccccacgggccgtacctcactcctccttttctctctctccacccttgtctagtccccagtgcctggaatctttcacctgggcacggtccgtgagaaaactcgaaattaagagcttccctctgtag

SEQ ID NO: 121891 - DNA, 549 bp, synthetic construct
  misc_feature 1..549: note = Description of Artificial Sequence: Synthetic coding sequence
  source 1..549: mol_type = other DNA
atggccctgtcctcagcctggaggtccgtgctacccctgtggttgttatggagcgccgcgtgctcgcgggcggcaagcggcgacgacaatgccttccccttcgatattgaaggatcgtctgcagtaggacgccaggaccccccggagacctccgagcctagagttgccctcggcagattaccacccgccgcggagaagtgcaatgctggattcttccacacactgtcaggtgaatgtgtgccgtgtgattgtaacgggaactccaacgagtgcctagatgggtcagggtattgcgtgcattgtcagcgcaacacaaccggagagcactgcgagaaatgtttagacgggtacattggtgacagcattaggggagccccccagttttgtcaaccctgtccatgtccattgccccacctagcaaactttgccgagtcctgctaccgcaaaaacggtgcagtgcgctgcatttgcaatgaaaattacgctgggccgaattgcgagaggccttctccacagagcaccagggggttccctctgaacgactcctag

SEQ ID NO: 121892 - DNA, 537 bp, synthetic construct
  misc_feature 1..537: note = Description of Artificial Sequence: Synthetic coding sequence
  source 1..537: mol_type = other DNA
taaatttttgaggattgcgacgaggtcaccggacagtgtcggaactgcttgaggaacactacgggattcaaatgtgagagatgtgccccaggttactatggtgacgcacgcattgccaagaattgtgccgtttgcaactgtggtggaggcccatgcgactctgtgacaggcgagtgccttgaagaggggtttgaacctcctacaggtatggactgtcccaccatttcttgtgacaagtgtgtttgggatctgactgatgccctgcgtctggctgctttgagtattgaagaaggaaaaagtggcgtgctcagcgtgtcaagcggcgcagccgctcaccggcatgtgaatgagatcaatgcaaccatctacctgctaaagaccaagctttccgaacgtgagaatcagtacgctctcaggaagatacaaatcaataacgccgaaaacaccatgaagtccctcctgagcgatgtagaagagttagtggagaagcactggaacaagccaaggaggcggctggagctgcaggaaggggtgtag

SEQ ID NO: 121893 - DNA, 5451 bp, synthetic construct
  misc_feature 1..5451: note = Description of Artificial Sequence: Synthetic coding sequence
  source 1..5451: mol_type = other DNA
atggccttgagcagtgcttggcgctcagttctgcccttgtggctcttgtggtccgccgcctgttcgcgggctgctagtggtgacgacaacgctttcccattcgatatcgaggggtctagcgccgtagggcgacaggatccacccgaaaccagtgagccgcgggtagctctgggtaggctgcccccagcggccgaaaaatgcaatgccggcttttttcacaccctgtccggggaatgcgttccatgcgattgcaatgggaacagtaatgagtgccttgatggttcaggctactgcgtgcattgccagagaaacactacaggtgaacactgcgagaaatgtcttgatggatatattggcgacagtattagaggggccccacagttttgccagccgtgtccctgtcctctcccacaccttgctaatttcgcagagagctgttatcgaaagaacggcgctgtacggtgtatttgcaatgaaaactacgctggccccaattgcgagaggtgcgcacctggctattatggtaaccctttattgattggaagcacctgcaagaagtgtgactgctcagggaactctgaccctaatctgatcttcgaagattgtgatgaggtcaccgggcagtgtcggaattgcttgaggaacacgaccggctttaagtgtgaaagatgcgcaccaggctactacggggacgcacggatagcgaagaattgcgccgtgtgcaactgtggaggcggcccctgtgacagcgtcaccggagagtgtcttgaggaggggtttgagcctcctacagggtgtgacaagtgcgtgtgggatctcactgacgcactgcgcctggctgctctgagtattgaggagggtaagagtggcgtgctctccgtgtcctctggtgcagctgcacatcgtcacgtcaacgagatcaatgccactatctacctgctaaagaccaagctctcagaacgggagaaccagtacgcgctaaggaagattcaaatcaacaacgctgaaaacaccatgaaatctctgctgagcgatgtggaggaattggttgagaaagaaaaccaggccagccgcaaaggccagctggtacagaaggagagcatggataccatcaatcacgccagtcagctcgtcgagcaggctcatgacatgagggataaaattcaagagatcaacaataaaatgctctactacggtgaagaacacgagctgagccccaaagaaatatctgaaaagctcgtgttggcgcaaaaaatgctcgaggaaattaggagccggcagcctttcttcactcaacgggagctggttgatgaagaagccgatgaagcctatgagctgctctcccaagccgagtcttggcagcgattgcataacgagacccggacactattcccggttgttttggagcagctagatgattacaacgccaagctgtcagaccttcaggaagcccttgatcaggcactgaactatgtgcgggatgccgaagacatgaatagggccacggctgcacgccagcgggaccacgagaagcagcaggaaagggtaagggagcagatggaggtggtcaatatgagcctgagcacatccgctgattccctgacaacccccagactgaccctgtccgagctcgatgacataattaagaacgcatccggcatttatgctgaaatcgatggcgcaaagtccgaactacaagtgaagttgtcaaatttgagcaacctttcccatgacctggtgcaggaggctatcgaccacgcacaggacttacaacaggaggctaacgaattatcaaggaagctccactcctccgacatgaatggccttgtgcagaaagccctggatgcttcaaacgtgtacgaaaacatagtaaactacgtcagcgaagccaatgagaccgctgagtttgccctaaacacaacagacaggatttatgacgcagtgtcgggcatcgacacccaaatcatctaccataaagacgagagcgagaatctattaaaccaggcccgggaactacaggccaaagccgaaagttcgagcgacgaggccgtggctgacacctccagaagggtggggggagctctggcgcgcaaatccgctcttaagactcgcctgtccgacgcagttaaacaactgcaagctgcagagcggggcgacgcccagcaaagacttggccagagccgccttatcacagaggaggccaaccgtactacgatggaggtccaacaggccaccgctcctatggcgaataatcttacaaattggtcacaaaatctgcagcacttcgattcttctgcctataatactgctgtgaattccgcacgagatgccgtgaggaacttgacagaggtggtgccccaactcctggaccaactacgaaccgtggaacagaagaggcctgccagcaacgtgagcgccagtatacagcgcatcagggagctgattgcccagacacgatctgtggctagtaagatccaggtctcaatgatgttcgacggacagtcagcagtagaagtgcactcgcgcacgtctatggatgacttgaaggcattcacaagccttagtctctacatgaagcccccagtgaaaaggcccgagttgacagagacagccgaccagttcatcctgtacctggggagcaagaacgccaagaaggagtacatggggctagccattaaaaacgacaaccttgtctatgtttataatctgggcaccaaagacgtggaaatacctcttgactcaaaacctgtatcaagttggcccgcatatttttctattgtcaagatcgagagagttggtaagcacggaaaagtctttcttactgtgccctctctctccagtaccgcggaggagaagtttattaaaaagggcgagttcagcggcgatgactctctcctggacttggaccctgaagacacggtgttttacgtcggcggcgtgccaagtaatttcaaactcccaactagcctgaatctgcccggcttcgtaggttgcctggaactcgcaactttaaacaacgacgtgatcagtctctataacttcaaacacatttacaatatggacccctccacttctgtcccttgcgcacgcgacaagcttgccttcacccagagcagagccgcttcatatttttttgacgggagtggttatgctgtcgtacgtgacatcaccaggagaggcaaatttgggcaagtcaccaggtttgatattgaggttaggacacctgctgacaacggtctgattctgttaatggtgaacggctccatgttttttaggttggagatgaggaacggctacctccatgtgttctacgacttcggtttcagcggtggccctgttcatctggaagacacattaaagaaagcacaaattaacgacgccaaatatcatgaaatcagcatcatttaccacaatgacaagaaaatgattctggtagtggaccggaggcatgtcaagtcaatggacaacgagaaaatgaagattcccttcacagacatttatatcggaggcgcgccaccagagattttgcagagtcgagccttgcgcgcccatctcccccttgacataaacttccgagggtgcatgaaaggtttccaatttcagaagaaggatttcaacctgcttgagcagactgagactttgggtgttggttacgggtgcccagaagatagtctgatctcgagacgtgcctactttaacggtcaatcttttattgcgtcaatacaaaagatctcttttttcgatggatttgaggggggcttcaacttccgcacattgcagccaaacggcctgttattctactacgcaagtggcagtgacgtcttttctatctctctggacaacggtaccgtcatcatggatgttaaggggatcaaagtgcagtcagtggataagcagtacaatgacggcctatcacatttcgtgatctcttccgtgtctcctacccggtacgagcttatcgtagataaatcccgggtaggttccaaaaaccctaccaagggaaaaattgagcagactcaggcatccgagaaaaaattttattttggagggtcccctatcagcgcacagtacgcaaatttcacgggttgtatctctaatgcgtacttcacaagggttgatagggatgttgaggtcgaggactttcagcggtacactgaaaaggtccatacctctttgtacgaatgtcctatcgaatcgagccccctcttcctgctccacaagaaggggaaaaatctctcgaaaccaaaagcgagtcagaacaagaaaggcgggaaaagtaaggatgctccctcgtgggacccagttgccctgaaacttcccgagcggaacacacctcgcaatagccactgccacctcagcaatagtcctcgtgccattgagcatgcctaccagtatggcgggactgccaattcaagacaagagtttgagcacctgaagggagatttcggcgctaaatcgcagttttccattagattacgaacgcgaagctcccatggcatgatattctacgtgtcagaccaggaggaaaacgactttatgactctgttcctggctcatggaagactggtatacatgttcaatgtcgggcataagaaacttaagattcggagccaggagaagtataatgacggcctctggcacgatgtaatcttcatcagggaacgctcaagcggcagactcgtcatcgacgggctgcgagttctcgaggagagcttgccaccgacagaggccacttggaaaattaagggccccatctatttgggcggagtggcacccggcaaagctgtgaaaaacgttcagatcaacagcatatacagtttctctggctgtcttagcaacttgcagttaaacggtgcttccatcaccagcgcttcacaaactttcagtgttacaccctgctttgaaggccccatggagacaggcacttacttcagcacagaaggaggatatgtagtgctcgacgaaagcttcaatatcggcctgaagtttgagatagcctttgaggtgcggcctcggagcagcagcggtacactggtgcatggccactctgtgaatggtgaatacctgaacgtccacatgaaaaatggccaggtgatcgtcaaggtcaataatgggattcgtgatttcagcacctccgttactcccaaacagtccctgtgcgatggacgatggcaccggataactgtgatacgcgattctaacgtcgtccagttggatgtggactccgaggttaaccatgtcgtcggtccactgaacccaaaacccatagatcacagagaacccgtcttcgtcggtggagtgcccgaaagcttgctgacacctaggctggcaccctctaagccttttacggggtgcattagacacttcgtgattgacgggcatcctgtctcctttagcaaggccgcgctggtgtctggtgcggtgagtataaatagttgcccagctgcctag

SEQ ID NO: 121894 - DNA, 5451 bp, synthetic construct
  misc_feature 1..5451: note = Description of Artificial Sequence: Synthetic coding sequence
  source 1..5451: mol_type = other DNA
atggccctgtccagcgcctggagaagtgtccttcccctctggttactgtggtccgccgcctgctctagagcggcctcaggggatgacaatgctttcccctttgatatcgaaggctcatctgcagtgggacgccaggacccccccgagactagcgagccccgagttgcgttgggccgcctgccgccggccgctgaaaaatgtaacgccggttttttccacaccctgtctggcgagtgcgttccttgtgattgtaatggtaactcgaatgaatgcctcgacggttcaggctattgcgtccactgccagaggaacaccactggcgagcattgtgagaaatgtctggacggctatattggagatagtattagaggggcgccacagttctgccagccttgcccatgtcctctcccacaccttgcaaatttcgctgagtcctgttatcggaagaacggggccgttagatgcatctgcaacgagaactatgccggcccaaactgcgagaggtgcgcacctggttactacgggaatccacttctgattggctctacatgtaagaagtgtgactgcagcggaaactccgacccaaacctgatctttgaagattgcgacgaagttaccggccagtgtagaaactgtctgaggaatacaaccgggttcaaatgcgaaaggtgcgctcccggatactacggagacgcccggattgccaagaattgtgcggtatgcaattgcgggggagggccatgcgattccgtgactggtgaatgcctcgaagaaggttttgagcctcctacagggtgcgataagtgtgtttgggatctgactgatgccctgcgcctagctgccctatccattgaggaggggaaatctggtgtgctaagtgtgtctagtggcgccgcagcacatcgccatgtcaatgagattaacgctaccatctatctgctcaagactaaactcagcgagcgcgagaatcagtatgctttgagaaagatacaaatcaataacgcagaaaacacgatgaagagcctcctctcagacgtggaagaattggtggaaaaggaaaatcaggccagccgaaaggggcagctcgtgcaaaaagaatcaatggacaccataaatcatgcctcacaactcgttgagcaggcccacgacatgcgagacaagatccaggagatcaacaacaagatgttatattatggggaggaacatgagctgtcccccaaggagatctccgagaagctggtactggctcagaagatgctggaagaaatccggtcccgtcagcccttttttacccagcgtgagttggtggatgaagaggcagatgaggcctatgagctcttgagtcaggctgaaagttggcagcggcttcataatgaaacccgaacccttttcccagtggttctagagcagctcgacgattacaatgctaagttatccgatctgcaagaggcactggaccaggcccttaactacgtaagagacgctgaggacatgaacagggcgactgctgctcggcagcgcgatcacgagaagcagcaggaaagggtgcgcgaacagatggaggtagtgaacatgtctctgtccacctccgcagactccctgaccaccccgcgcctaacactcagtgagctggatgatatcatcaagaacgcatcaggaatttatgccgaaatcgacggcgccaagagcgaacttcaggtgaagctgtccaatctgagtaacctgtctcatgacctggtgcaggaggctatcgaccacgcccaagacctgcagcaagaggcaaatgagttgtccagaaagttgcactcctcagacatgaatggtctggttcagaaagccctggacgctagcaatgtgtacgaaaatattgtcaattatgtatccgaggcgaatgagaccgctgagtttgccctaaatacgacagatcgaatatacgacgccgtctctggaattgatacacagatcatctaccacaaagatgagtctgagaatctcctgaaccaggctagggaactgcaggccaaggccgaatcaagttctgacgaggccgtagctgatacctcgcgaagagtcgggggggccctggcaagaaagagtgctctgaagacaagactgagtgatgccgtgaagcagctgcaggcggccgagaggggcgatgcccagcagcgactgggacagtcccgactgatcactgaggaagcaaacagaacgaccatggaagtacaacaggctactgcccccatggccaacaacctcaccaactggagtcagaaccttcaacatttcgactcttctgcttataacaccgccgtgaatagtgcccgtgatgcagtccggaatctgacggaagtggtcccccagcttctggaccagctgcgcaccgtagagcagaaacgtcccgcctctaatgttagtgcatctatccaacggattagagaactgattgctcagactcggagtgtggcctcaaagatccaagtctctatgatgttcgatggtcagtctgccgtcgaagttcattctcgcacctcgatggacgacttgaaggcctttacttcactgtccctctacatgaagccacccgtcaagaggcctgaacttacagagaccgcggaccagtttatcctgtatttgggttccaagaatgccaaaaaagaatatatgggcctcgctatcaaaaacgataatctcgtgtatgtgtacaacttgggaactaaggatgtcgaaatccctctggattctaaacccgtgagctcatggcccgcatatttctcgatcgtgaagatagagcgcgtaggcaaacacggaaaagttttcctgacggtcccttctctttcttctactgccgaagagaagttcataaagaagggagaatttagcggagacgacagtctactggacttggacccagaggatacagtgttctacgtggggggggtcccaagcaatttcaaattgcccacctccctgaacttaccgggattcgtcggctgcctcgagctcgccaccctgaataatgacgtgattagtctctataacttcaaacatatctacaacatggatccatccacatcagttccttgcgccagagataaattggcattcacacagagcagagcagcatcatacttttttgacggctccggatacgctgtcgtgagagatattacacggcgcgggaaatttgggcaggtgacgcgctttgacatcgaagtccgaaccccggcagataatgggctcatcttactgatggtgaacgggtctatgttctttcgcttagaaatgaggaatggatatctccacgtattttatgattttggcttctccggaggtcccgtccacctggaggacacactcaagaaagctcaaatcaatgacgccaaatatcacgaaatctcgatcatttaccacaacgacaagaagatgattctagtcgttgatcgacgacacgttaaaagcatggataatgagaagatgaagatcccgttcaccgatatatacatcgggggagccccgcccgagattttgcaaagcagagctttgagggctcacctgcctctagatatcaatttccgaggatgcatgaagggcttccagttccagaagaaggacttcaatctcctggaacaaacagaaactctcggggttggatatggctgtcccgaggatagcttgataagtcgacgggcttactttaatggccaatcgtttatcgcctctatccaaaagatctctttttttgacggctttgaggggggatttaatttcagaaccttgcagcccaacgggttactcttctactatgctagcggcagcgatgtcttttcgattagcctcgataatggaacggtgattatggacgtgaaagggattaaagtccagtccgtggataaacagtacaatgacggcctctcacacttcgtgattagctccgtttcacctactcgctacgaactcattgtcgataaatccagagtggggagcaaaaatcccactaaaggcaagattgaacagactcaggcatcggagaagaagttctactttggtggctccccgatttcagcccagtatgccaattttaccggatgcatctcgaacgcttattttaccagagtagatagggatgtcgaggtggaggacttccaacgatatactgaaaaagtgcacacctccctgtacgaatgccctatcgagagcagccctctgtttctgctccataagaaaggtaagaatctgtccaaaccaaaagcttcccagaacaaaaagggcggcaagagcaaagatgcccctagctgggacccagtggctcttaagctgccagagcggaataccccgcggaactctcattgtcacctcagtaactccccccgtgcaatcgaacacgcttaccagtacggtgggaccgcaaactctaggcaggagtttgagcaccttaagggagatttcggagctaaaagccagttctcaatcaggcttaggactcgctcttcccatgggatgattttctacgtcagcgatcaggaagaaaacgatttcatgacactgttccttgcgcatggccggttggtgtatatgttcaatgtaggccacaagaaactcaagattcggtcacaggagaagtacaatgacgggctttggcatgatgtgatcttcattagggagcggagctcgggaaggttggtgatcgacggcctgcgcgtgttggaagagtctctgcctcccactgaagcaacatggaaaatcaagggacccatctacctcggaggtgtggccccaggaaaagccgtgaagaatgtgcaaattaacagtatatattctttcagcgggtgtttgtccaacctccagctgaatggagccagcattactagtgcaagccaaacctttagcgtcactccatgctttgaaggacctatggagactggcacgtactttagtactgaaggagggtatgttgtcttagatgagagttttaacatcggcctgaagttcgagatagcgttcgaagttaggccaagatcctcttccggcacactggtgcatgggcactccgttaatggggagtaccttaatgtgcatatgaaaaatggtcaggtcattgtgaaagtgaacaacggcatacgggacttctctactagtgtgacgccgaagcagagtctatgtgacggccgctggcatcggatcacggtgattcgggattcaaacgtggttcagctcgatgttgactctgaagtaaatcatgttgtaggtcctctaaaccccaagcctatcgaccatagggaaccagtgtttgtggggggcgttcctgaaagtctcctcactcccagattggccccaagtaagccctttactggatgtattcggcactttgttatcgacggccatcccgtcagcttcagcaaggctgccctggtgagtggcgccgtgagtataaacagctgtccggccgcgtag

SEQ ID NO: 121895 - DNA, 390 bp, synthetic construct
  misc_feature 1..390: note = Description of Artificial Sequence: Synthetic coding sequence
  source 1..390: mol_type = other DNA
atggcgttgtcctcagcatggcgcagcgtgctgccactttggctgttgtggagcgccgcctgttcccgggccgcatctggcgatgataatgcctttccatttgatattgagggctcaagtgccgtgggtaggcaggaccccccagagacatccgagcccagggtggcccttgggaggctaccacccgctgctgaaaaatgcaacgcaggcttttttcacacactcagtggcgaatgcgtgccctgcgattgcaatggaaatagcaacgagtgtctggacggctcaggttattgcgtgaccacagacggcgaagaccccgggttcagcgcctccgcactgagttttatactgagctcacagggggcgcgcgaggcaagggccccaacatag

SEQ ID NO: 121896 - DNA, 363 bp, synthetic construct
  misc_feature 1..363: note = Description of Artificial Sequence: Synthetic coding sequence
  source 1..363: mol_type = other DNA
atggctctgagctctgcttggcgctccgtcttaccactgtggctgctgtggagtgctgcctgttcacgggctgcaagtggagatgacaatgcattcccattcgatatagagggcagttctgccgttgggcgccaggaccccccagagaccagcgagccaagagtcgccctcggtcggttaccgcctgccgctgaggtgcagtgtccatgtcactgtcatcccgcaggagcacctgccccaccacgagccgtcccccactcctccttttctttaagtccccccttgtcttccccgcaatgtcttgaaagttttacttgggccaggtccgtgagaaaactggagattaagagcttccctttgtag

SEQ ID NO: 121897 - DNA, 1125 bp, synthetic construct
  misc_feature 1..1125: note = Description of Artificial Sequence: Synthetic coding sequence
  source 1..1125: mol_type = other DNA
atggctcttagcagtgcatggcgatccgtcctgccactatggttgctttggtcagccgcctgctcacgggcagccagcggggatgacaacgcgttccctttcgatattgaggggtcctccgctgtggggaggcaggatccaccagaaacatccgaaccaagagtggctctcggccggctacccccggccgcagagaagtgcaatgccgggttcttccatactctctctggcgagtgcgttccttgcgattgtaacggcaattctaatgagtgcctggacggctccgggtattgtgtgcattgtcagcgtaataccacaggagagcactgtgaaaaatgtcttgatgggtacattggtgattcaatacgcggcgcgccacaattttgtcagccttgtccatgccccctccctcatttggctaattttgccgaaagctgctaccgcaaaaatggggcggtgcggtgcatatgcaacgagaattacgcgggccccaattgcgaaaggtgcgcccccggctactacgggaatcctctccttatcggaagtacctgtaagaaatgtgattgtagcggcaatagcgaccctaatctcatcttcgaggactgcgatgaggtaaccggtcaatgcaggaactgtctgcgcaacaccactggctttaaatgcgagcgctgtgctccaggttactacggcgatgcccgcatcgctaaaaactgtgcagtttgtaattgtggaggaggaccctgtgactccgtgacaggcgagtgcctagaagaagggttcgagcccccaacaggaatggattgcccaaccatttcatgtgataaatgcgtgtgggatctgactgatgctttgaggctcgccgccttgtccatcgaggaggggaagagtggcgtgctaagtgtgagctcaggcgcagcagctcatagacacgtgaacgagatcaacgccaccatttatctgctgaaaaccaaactgtccgaaagggagaatcaatacgccctgcgaaagatccagatcaataatgccgagaacactatgaagtcgctgctttcagacgtcgaggaactggttgagaaacactggaataagccaagacgccggctcgaactgcaagaaggtgtatag

SEQ ID NO: 121898 - DNA, 363 bp, synthetic construct
  misc_feature 1..363: note = Description of Artificial Sequence: Synthetic coding sequence
  source 1..363: mol_type = other DNA
atggcactgagcagcgcctggaggagcgttttgcctctgtggcttttatggtctgctgcctgttctagggcagcaagcggcgacgataatgctttcccattcgatattgagggtagttccgctgtcgggcggcaagatcctcccgaaacatccgagccccgcgtggccttaggtcgcctgcctcctgccgcggaagtgcaatgcccctgccattgccaccctgctggcgcaccagcacctcccagggctgtccctcattccagtttttcactgagcccgcccctgtcgagcccacagtgtttagagagttttacctgggctcgaagcgtcaggaagttagagataaagtcgttcccactgtag

SEQ ID NO: 121899 - DNA, 324 bp, synthetic construct
  misc_feature 1..324: note = Description of Artificial Sequence: Synthetic coding sequence
  source 1..324: mol_type = other DNA
atggccctttcctcggcgtggcgttctgttttaccactttggttgctatggtccgctgcgtgttcccgggccgcctctggcgacgacaatgcgttcccttttgacatagagggtagctctgcagtcgggcgccaggaccctcccgagaccagtgaacctcgggtggccctcggcaggctaccccccgcagccgaaaagtgcaatgcaggctttttccataccctgagcggggagtgtgtgccctgcgactgtaacggaaattccaatgaatgcctggacggtagcggctactgcgttcattgccagcgcaacaccacaggatag

SEQ ID NO: 121900 - DNA, 996 bp, synthetic construct
  misc_feature 1..996: note = Description of Artificial Sequence: Synthetic coding sequence
  source 1..996: mol_type = other DNA
atggccttatcaagcgcttggagatcggtgctccccctgtggctcctgtggagcgcagcttgttcgcgggccgcttcaggagatgataacgccttccccttcgacattgaaggctcctcggccgtgggacggcaggatccccctgaaacaagtgaaccaagggtggctttgggccggctgcctcctgccgccgaaaagtgcaatgccggattttttcacactctgagcggggagtgtgtgccttgcgattgtaacggcaacagcaacgagtgccttgatggatctggctattgcgtgcattgtcagcggaacaccacgggtgaacactgcgaaaagtgtctggatggatacattggggactccatcaggggggcgccacagttctgtcagccatgcccttgccccctgccccatctggccaactttgccgaaagctgctatagaaaaaacggagctgttaggtgcatttgcaatgagaactatgccggcccgaactgcgaaaggtgcgcgcctggctactacggcaaccctctcttgatcggatctacatgcaagaaatgcgactgctcaggcaacagcgatccaaacctcatcttcgaggattgcgatgaagtcactggccaatgcagaaactgtctgcggaatacgacaggcttcaagtgcgagagatgcgcacccggctactacggggacgcccgcattgcgaaaaactgcgcagtctgtaattgtggcggaggaccctgcgactcagtgaccggggagtgcctggaagagggcttcgaacctcccaccggcatggattgcccgacaatctcttgtgacaagtgtgtgtgggacctgacagacgcacttaggctagctgctctgtccatcgaggagggaaaaagcggggtcctgtcagtgagttctggggcagccgctcatcgacatgtgaacgagattaacgccaccatatacctgctgaaaaccaaactaagcgaacgtgaaaatcagtag

SEQ ID NO: 121901 - DNA, 246 bp, synthetic construct
  misc_feature 1..246: note = Description of Artificial Sequence: Synthetic coding sequence
  source 1..246: mol_type = other DNA
atggccctttcatcagcttggcgaagtgttctcccactgtggctgctttggtccgcagcctgcagcagagccgcctccggagacgataatgccttcccatttgacattgagggctctagtgctgtaggaagacaagatccccccgaaacttccgagcccagggtcgccctcggcaggctgcccccagccgcggaaaaatgcaacgctggcttctttcacaccttgtctggtgagtgcgtaccctag

SEQ ID NO: 121902 - DNA, 5451 bp, synthetic construct
  misc_feature 1..5451: note = Description of Artificial Sequence: Synthetic coding sequence
  source 1..5451: mol_type = other DNA
atggcgctgtcatctgcttggcgctctgtcttgcccttgtggctactctggtcagcagcctgtagcagggccgcctctggagatgataatgccttcccctttgacatcgagggatctagtgcagttggcagacaggacccccccgaaacatctgaaccgcgcgttgctctgggtaggctgccccctgccgctgagaaatgcaatgctggattcttccacactctatccggagagtgcgtgccatgcgactgcaacggcaattctaatgagtgtctcgatgggtccggatactgcgtgcactgccagcggaacaccaccggtgagcactgcgaaaagtgtctagatggatacataggggatagcataaggggggccccacaattctgtcaaccatgtccttgccccctgccccatctggccaatttcgccgaaagctgctatcgcaagaatggggccgtgcgttgcatctgcaatgagaattatgccggtcccaactgcgagagatgcgccccgggctattatggtaatccattgctaattggaagtacttgtaagaaatgtgattgttcaggcaatagcgacccaaacctgattttcgaagactgtgacgaagtgacgggccaatgtcgaaactgcctgcggaacactaccggatttaagtgtgaacgttgcgccccgggctattatggcgacgccagaatcgctaagaattgcgctgtctgcaactgtggaggaggcccgtgcgattccgttacgggggaatgcctagaggaaggcttcgagcccccaaccggctgtgataaatgcgtgtgggacctgacagacgctttgcgacttgctgccctgagtattgaggagggcaaatcgggggtcctttccgtgtcaagcggtgcagcagcccataggcatgtaaacgaaatcaacgccaccatttatttactgaaaaccaaactgagcgagagggagaatcagtatgcccttcggaagatccagataaataacgctgagaatacaatgaaatccctgctcagtgacgtggaggaacttgtagagaaggaaaatcaggcctccagaaagggacagctagtgcaaaaagaaagcatggacacaataaatcatgcatcgcagctggtcgagcaagcacatgatatgcgggataagattcaggaaattaataacaaaatgttgtattacggcgaggaacacgagttgtcccccaaggagatttccgaaaaattggtgctcgcacagaaaatgctggaggagatcagaagtcgccagcccttctttacccagcgtgagctcgtggatgaggaggccgatgaggcctacgaacttctgagtcaggctgaatcctggcaaagactacacaacgaaactagaaccctgtttcctgtggttctggagcagctcgacgattacaacgcgaaactcagcgatctgcaggaagcactcgatcaagctttaaattacgtccgagatgcagaagatatgaatagggcaacagctgcaaggcaacgggatcatgaaaaacagcaggagcgggtgcgggaacaaatggaggtcgtgaacatgtccttgtcaactagtgctgactctctgactacaccccgcctgacgctgtcagaactcgacgacataatcaaaaacgccagtggcatctacgccgagatagacggtgccaagagtgaactgcaggtcaaactgtcaaatctgtcaaatctgtctcacgatctggttcaagaggctatcgatcatgctcaggacctacagcaggaagcgaatgagttatccagaaaactccactcctccgatatgaatggcctggtgcaaaaagcactggatgcctcgaatgtgtacgagaatatcgtgaattatgtcagcgaggcaaatgaaacagccgagtttgccctgaatacaaccgatcgcatttatgacgccgtcagtgggatcgatacacagataatttatcacaaagatgagtctgagaacttgctcaatcaggctagagaattacaggcgaaagccgagagtagcagcgacgaggcggtcgccgacacctctaggcgcgttgggggtgctctcgccaggaagtctgccctgaaaaccagactgtccgatgctgtaaagcagttgcaggcggccgagcggggcgatgcgcaacagaggctggggcagtctcgactgatcaccgaagaggcgaaccggaccacaatggaggttcagcaagccactgcccccatggccaataatctgacaaattggtcacagaacctgcagcactttgactctagcgcatataacaccgcggttaattcagcccgcgacgctgtacgaaatctgacggaagtggtgcctcagctgctggaccagctgagaactgttgagcagaagcgtcccgcatcaaacgtgagtgcttctattcagcgcatcagagaactcatcgctcagacccgctccgtggcctctaaaatccaggtaagcatgatgttcgatgggcagtccgctgtagaggtgcatagcagaacaagtatggatgacctgaaagcttttacatcgttgtccctgtatatgaagccccctgtgaagagaccagagcttaccgaaacagccgatcagtttatcctgtacctgggttctaagaacgccaaaaaggagtacatggggctggcaatcaaaaatgacaacttggtgtacgtctataacttggggacaaaggacgtcgaaatccccctggattccaaacccgtgtcttcatggcctgcatacttctcaattgtcaaaattgagcgtgttggcaagcacggtaaggtgtttttgaccgtgcctagcttatcttccacagctgaagagaaatttatcaaaaagggagagttctccggagacgattctctgttggatctggatcctgaagatacggttttttatgttggtggggtgccctcaaatttcaagctgcctacttccttgaacttacctggctttgtaggctgtttagaactcgccacactgaacaacgacgtgataagcctttataacttcaaacatatttataatatggacccttccacaagcgtgccatgcgcgagagacaaattggccttcacccaatctagggcagctagttatttctttgacggatccgggtacgccgtcgtcagagacataacacgtcgaggcaaatttgggcaggtgacccgtttcgatatcgaggtgcgcaccccagccgataacggtctgattctcctgatggtgaacggatccatgttcttccgcctcgaaatgaggaatggttatctgcatgtgttttatgacttcggcttcagcggtggccctgtgcacctggaggacacattaaaaaaggctcagattaacgacgctaaataccacgagatatccattatttaccacaacgataaaaaaatgatcctggtggtggacagacgccatgtcaaatcaatggacaacgagaaaatgaagatccccttcacagacatctacatcggcggcgcacctcctgagatcctccagagccgcgcactgcgggcccacctgccactcgatattaacttccgaggctgtatgaagggctttcagttccagaagaaggattttaatctccttgaacaaaccgagactctgggggtggggtacgggtgcccagaagattcattgattagtcgaagggcctattttaacgggcagagtttcatcgcatccatccagaaaatcagtttctttgacggctttgagggcggctttaatttccggacactgcagccgaatggcctactgttctattacgccagcggctcagacgtgttttccatttctttggataatggcacggtgatcatggacgttaagggaatcaaagtccaaagtgtggataaacagtacaatgacggactctcccacttcgtaatttcttccgttagcccgacacggtacgagctcattgtagataaatcgcgggtgggatccaaaaacccaactaagggtaagattgaacagactcaggccagtgaaaagaaattttattttggaggatcaccaatctcagctcagtatgcaaacttcacaggatgcatatcaaatgcctatttcacaagggtggaccgggatgttgaagttgaggattttcaaaggtacaccgagaaggtgcatacttctctgtacgagtgcccgattgagagttcccccctgtttttgctgcataaaaaaggcaaaaacttatccaaaccaaaggcctcccagaataaaaaaggtggaaaatcgaaggacgctccaagttgggaccctgtggctctgaaacttccagagcgaaacacaccccggaactcacattgccatctgtccaattcccctagggcgattgaacatgcctatcagtacggggggactgccaattcacggcaggagttcgagcacctgaaaggagattttggcgccaaaagtcagttttctatcagacttcggacccgatcttctcacggcatgattttttatgtgagtgaccaggaggaaaacgactttatgaccctgttcttggcccatggtcgacttgtgtacatgtttaacgtggggcacaaaaaattaaagattcgctctcaggagaagtacaatgacggactgtggcacgacgtgatctttatccgcgagaggtcctccggacggcttgtcatcgacggcctgagagtgctggaagagtctttgcctccgacagaagcgacatggaagataaaaggccctatctatcttggcggagtggcccctggtaaggccgtgaaaaacgtgcagataaacagcatctactccttcagcggctgtctgtcaaaccttcagcttaatggtgccagtatcactagtgcgagccagacatttagcgtgactccgtgtttcgaaggaccaatggaaaccggaacctacttctctaccgagggaggctacgtggtgctagacgagtcgttcaatattggattgaagtttgaaatagcttttgaagtgcggcctcgctctagtagcgggacgctggtacatggccactcagtcaacggggaatacctgaacgtgcacatgaagaacgggcaggttattgtgaaggtcaacaacggcataagagatttttcaacgtcggtgacccccaaacagtctctctgcgacggtcggtggcataggattactgtgatccgggattctaatgtcgttcagctggatgtcgacagtgaggtgaaccacgtcgttggtcctctcaacccaaagcccatcgatcacagggagccagtctttgtgggtggcgttccagaaagcctgctgacccccagattggcaccaagtaagccctttaccgggtgcatacgccactttgttatcgacgggcaccccgtgtctttcagcaaagccgcattggtttcaggagccgtttcgataaattcttgccccgctgcttag

SEQ ID NO: 121903 - DNA, 975 bp, synthetic construct
  misc_feature 1..975: note = Description of Artificial Sequence: Synthetic coding sequence
  source 1..975: mol_type = other DNA
atggctctaagcagcgcctggaggagtgtcttgcccctttggctgttgtggagtgcagcttgctcacgcgccgcatcgggcgatgataatgcattcccttttgatatcgagggctcgtccgcagtagggcggcaggacccgcccgagacatcggagcctagagtggccctcggaagactgccacctgcggcagagaagtgtaacgccggtttttttcacacactgagcggagaatgcgtgccgtgtgattgcaatggaaacagcaatgaatgtttagatggctcaggatattgcgttcattgccagcgaaacactactggagagcactgtgagaaatgtctggatggctatatcggtgatagcatcaggggcgctccccaattctgccagccctgtccatgtccactcccccatctcgccaattttgctgagtcttgctaccggaagaacggcgctgtaaggtgtatatgtaatgaaaattacgctgggccaaactgcgagcgatgtgcaccaggatattatgggaaccccctgctgattggcagcacttgcaagaagtgtgactgctccggcaactctgacccgaatctgatcttcgaggactgtgatgaggtcactggccaatgtcggaattgtttgcggaataccaccgggttcaagtgcgaaaggtgcgccccaggctactatggcgatgctaggatcgctaaaaattgtgctgtttgcaattgtggtggcgggccgtgtgactcagtaaccggtgagtgccttgaagaagggttcgagccccctacgggctgcgacaaatgcgtttgggacctgacagacgccctgcgcctggcggcgttgagtatcgaagaaggcaaatcgggggtcctttccgtctcatctggcgctgcagcacacagacacgtcaacgaaatcaacgcaactatctatctgctcaagaagactaagcagaaaaataataagaaatag

SEQ ID NO: 121904 - DNA, 11088 bp, synthetic construct
  misc_feature 1..11088: note = Description of Artificial Sequence: Synthetic coding sequence
  source 1..11088: mol_type = other DNA
atggctaagcggctctgtgccggatcagccctctgtgtgcgcggcccgcgcgggcctgcccccttgctactggtgggactggctctgctgggggccgcccgggcccgggaggaggcaggaggtggtttctccttacaccccccctactttaatctggccgagggagcccgcattgcagccagtgctacgtgcggcgaggaggcacccgcccgcgggtcgcccagacctacagaagatctgtattgtaagctggtgggaggtcctgtggctggaggggaccctaaccaaacaattaggggacagtactgtgatatttgtactgcagccaattcaaacaaagctcaccctgcatcaaacgccattgacgggacggaaagatggtggcaatccccacccctgtcccgcggactggaatataatgaggtgaacgttacgctggacttaggccaggtattccatgtggcctacgttctgatcaagttcgcaaactctccgcggcccgatctatgggtgttggaaagaagtatggattttggtagaacgtatcaaccatggcaattctttgcgtcatccaaacgggactgtcttgaaagatttggtccccagactctggagcgaataacaagggacgatgctgccatttgcactaccgagtattcacgcatcgtgcctctggaaaacggggaaattgtggtctcactggttaacgggcggcccggagctatgaacttttcatacagtcctttgctgcgggagttcacaaaagccacaaacgtcagactaaggttcttacggactaacaccttgttggggcatctgatgggcaaggcactaagggaccccaccgtgacaaggcggtactactattcaatcaaggatatttcaataggaggcaggtgtgtgtgccatgggcacgcagacgcatgcgacgctaaggaccccactgatccattcaggctgcaatgtacatgtcagcataacacctgtggggggacatgtgatcggtgctgcccagggttcaaccagcagccctggaagcccgcgacagccaattccgccaacgagtgtcagtcgtgtaactgttacggacatgctaccgactgctactatgaccccgaagtcgacagacgccgtgcatctcagtctctggacgggacttaccaaggcggaggcgtgtgcatcgactgtcagcaccatactactggggtcaattgtgaacggtgtttacccgggttctatcggtccccaaaccatcccctggattcaccacacgtgtgtcgccggtgtaactgtgaatccgactttaccgatgggacttgcgaagatctgaccgggcggtgctattgtaggcctaacttttccggagagcgttgtgatgtatgtgccgaaggcttcacgggatttccgagctgctacccgaccccatcatctagcaacgacacccgtgaacaagtgctaccagcagggcagattgtaaactgtgactgcagcgctgccggcacgcaaggcaatgcttgtaggaaagatcccagggtcggacgatgtctctgtaagcccaacttccagggcactcactgcgaactctgcgcgcctgggttctacgggccaggctgccagccatgtcagtgctcctcacccggggtggcagacgatcgctgcgaccccgacacgggccagtgtcggtgtagggtgggatttgaaggggctacatgcgatcgctgcgcacctggttatttccactttccactttgtcaactctgcggatgtagccctgccgggactctccccgaggggtgtgacgaagccggccgttgcctgtgtcagcccgagttcgctggtccacactgcgatcgctgtcggcctggctatcacgggtttcccaactgtcaggcttgcacatgcgatccacggggggctctggaccagttatgcggtgcaggcggcctttgcaggtgtcgccccgggtacactgggacagcatgccaagagtgttctccagggtttcacgggttccccagttgcgtgccctgccattgcagcgcggaaggttcactccacgcagcctgtgatcctagatccggccagtgctcttgtaggccccgggtgaccggactaagatgtgatacatgtgtgcctggcgcatacaatttcccttactgcgaagctggctcttgtcaccctgcaggactcgctcccgttgacccagctctccctgaggcccaagtgccctgcatgtgtagggcccacgtcgaggggccctcctgtgatcgctgcaaacctggcttctgggggctgagtccttctaacccggaaggatgcaccagatgttcctgtgacctgcgaggcaccctcggaggggtggcagagtgccaacccggtacaggccagtgcttctgcaaaccacatgtatgtggccaggcctgtgcctcctgcaaagacggtttttttgggctggaccaggcagattattttggatgccggtcgtgtcggtgcgatattggcggagcactcgggcaaagttgcgaacctcggacaggggtgtgtcggtgtaggcccaatacccagggaccaacctgttccgaacctgctcgagaccactacttgccagaccttcaccacctaagactggagcttgaggaagcagcaaccccagaaggacacgcagtgcggttcggctttaaccctttggagtttgagaacttctcatggagaggctatgctcagatggctcctgtccaacccaggatcgttgccagattaaacctgacaagtccagaccttttttggctcgtgtttcggtatgtgaatcgcggggcgatgtccgtgtcaggacgcgtttccgtccgagaggaaggacgaagcgcaacttgtgctaactgcacagcacaatcgcagcctgttgcctttcctcctagcaccgagccagcttttatcaccgtccctcaacgtggatttggagagccattcgtgttaaatcccgggacctgggccctacgcgttgaagctgagggcgtgttgttggactatgtcgtgctgctgccgtctgcttactacgaagccgctctgcttcaactgcgtgtcacagaagcttgcacttacaggccgagtgcccagcagtctggagacaattgtttgctctacacccatctgccccttgatgggttccccagcgcggccggactggaagcactctgcagacaggacaactcactgccacgcccctgccctaccgagcagctgtcaccctcccaccccccccttattacctgcactggttcagacgtcgacgtccagcttcaagtggcggtcccgcagcctggccgctatgcactggtggtggagtatgccaacgaggacgctagacaggaggtgggggtggcagttcacacaccccagcgggcgcctcagcaagggttactgtcgctccacccatgtctctattctaccctgtgtcgcggaacggccagggacactcaggatcacctggctgtcttccatctcgacagcgaagccagcgtgagacttaccgcagagcaggcgcggttcttcctgcatggggttactctggtgccgatcgaggaattcagccccgagttcgtggaacccagggtgtcttgcatatcctctcatggcgcttttggccctaatagcgccgcctgtctgccatcacgctttccaaagcccccgcagccaatcatcttgcgggattgtcaggtgattcccctccctcccggcttgcctttaacacacgcgcaggacctcacacctgcaatgagtccagcaggtcctcgcccccggccgccaactgctgttgaccctgatgccgagcctacactgctacgtgagccccaggccactgttgtttttactacccatgttcctacattggggcggtacgccttcctgctgcacggctaccagcccgctcatccgacatttcccgtcgaggtgctcatcaatgccggccgggtctggcaaggccatgcgaacgccagcttctgcccacacgggtacggttgccgcaccttggtcgtgtgcgaaggccaggcattgcttgacgtgactcattcagagctcactgtcacggtacgggtcccaaagggacgctggctatggctggattatgtgctggtcgttccagagaacgtatattcctttggatacctgagagaagagccactggacaaatcatacgactttatttcccactgcgctgctcaggggtaccacatctcacctagtagttctagtcttttttgcagaaatgctgcagcaagtctgtcactgttttataacaacggagctcgcccttgcgggtgtcacgaagtgggagctacgggaccgacatgtgagccatttggggggcagtgtccctgccatgcccacgtgatcggacgggactgtagtcgatgcgccaccggatattggggttttccaaactgcagaccttgcgactgcggggccagactgtgcgatgagttaacaggtcagtgcatctgtccccctaggacaattccacccgattgcctcctctgccaaccgcagacattcggatgccatccactggtgggctgtgaggaatgcaattgcagtggtcctggcatacaggaactgaccgaccctacatgcgatactgactcagggcagtgtaaatgtcggcccaatgtgaccggacgtcgctgcgatacgtgtagccccggattccacggatatccaagatgccggccctgcgattgccacgaggcaggcaccgccccgggcgtgtgtgatcctctcacaggacagtgttattgcaaggaaaacgtccaggggcctaaatgcgaccagtgctctctaggaactttctcgctcgatgcagcaaaccccaaaggctgcacccgctgtttttgttttggcgccaccgagcgctgtcggtcgtcatcatatacccgtcaggaattcgttgacatggaggggtgggtgctgctgagtaccgacagacaggtcgtgcctcacgaacgtcagcctggaactgagatgcttagggccgatttaagacacgttccggaagcagtgcctgaagcatttcccgagctatattggcaagcccccccttcctacctaggagaccgtgtttcttcctatgggggcactttgaggtacgagctccactctgaaactcagaggggtgacgttttcgtgcctatggagtcaagacctgacgtagtactccaaggaaatcagatgagcatcaccttcttggaaccagcttacccaacccctggacacgtgcatcggggacagctacagctcgtggagggcaacttccgccacaccgagacgaggaacaccgtcagccgcgaggagttgatgatggtattggcgtctctggaacagctgcagattagagccctgttttctcagatctcctccgcagtgtttctgcgtcgggtagctctcgaggtggcaagtcctgctggccaaggggctctggcgtccaacgttgagctgtgcctgtgcccagcatcatataggggagacagctgccaagaatgtgcccctgggttctatagagacgtgaaggggcttttccttggcagatgtgtgccgtgtcaatgtcacggccattcagacagatgtctgccaggctctggggtttgcgtggactgccagcacaacaccgagggcgcacactgcgaaaggtgtcaggccggcttcgtgtcctccagggacgaccccagcgccccttgcgtgagctgcccctgcccactgtcagtacctagcaataatttcgcagaggggtgcgtccttaggggaggcaggacacagtgcctctgcaaaccaggatacgccggtgcttcctgtgaacggtgcgcccccggtttctttggaaacccactcgtcctgggcagcagctgccagccttgtgactgttcaggaaacggcgatccgaatctactattctcagattgtgatccgctgaccggcgcttgccgtggttgtctccggcacacaactggaccccgctgtgaaatctgtgcgccaggtttttatggaaatgctctgctgccaggcaattgtaccagatgcgactgtacaccttgcggcaccgaagcctgtgacccccattctggacactgcctgtgcaaggcaggcgttaccggacgacgttgcgacaggtgccaagagggccactttggcttcgatggatgtggcgggtgccgaccgtgcgcctgcggacctgccgccgaaggaagtgaatgtcaccctcagagcggccaatgccactgcagaccggggaccatgggtccccaatgccgggagtgcgctccagggtactggggcctgccagagcagggatgtaggcgctgccagtgccccggcggcaggtgtgacccgcacactggtcggtgcaattgcccccccggtctgtccggcgaaaggtgtgatacctgcagccagcagcaccaggttcccgtcccagggggccccgtcggccattcaatccactgcgaggtgtgtgatcactgcgtcgtcttgttattggatgacctagaaagagctggcgccttgctgcccgccattcacgagcaactacggggaatcaacgcaagcagcatggcctgggcacgactgcatcgcctaaacgcgtccatcgccgatctacaaagccagctgcgctcaccactcggacccagacacgagaccgcccagcagctggaagtcctagaacaacagtcgacttcccttggtcaggacgcaagacgtctgggagggcaagctgttggcacaagggatcaggctagccagctgctagctggcaccgaagcaacacttggacacgccaagaccctgctcgcagcaattcgcgcggtagataggacattgtccgaactcatgagtcaaacagggcacctaggtctggctaacgcctccgccccctctggggagcagttactgaggacgctggcagaggtggaacgcttgctctgggagatgcgcgctcgtgaccttggggcgccccaggcagccgcagaggcagagctagccgccgctcagcgtctcctagcgcgtgtacaggagcaactcagcagcctttgggaggaaaatcaggctctggccacgcaaactagagaccgattggcccagcacgaggctggactgatggatctgcgggaagcccttaaccgcgcagtggatgccacccgggaagcccaagaactcaattcaaggaaccaggagcgcctggaggaggccctccagcgaaaacaggagctgtctagagacaacgccaccttgcaggcaacgctccacgccgcccgagatacgctggctagtgtgtttcgcttgttgcattctctcgaccaggccaaggaagaattggagcgtctggctgcaagcttggacggggccagaactcccctgctgcagagaatgcagacattctccccagcaggttcaaaattgcgcctcgtggaagcagcagaggcacatgcacagcaattgggccagttagccctgaatctgtcatctattatcctcgatgtgaatcaggatcggctgacgcaaagggcaattgaagcttccaacgcatattcgagaatcctgcaagcggtgcaagccgccgaagatgcagcaggccaggctctccaacaggccgaccatacttgggccacggtggtgcggcagggtctcgtagacagagctcaacagctgctggctaactcgactgcattagaagaggcaatgctacaggagcaacagcgcctgggccttgtgtgggctgctctccaaggagctcggacacaacttagggatgtgcgcgctaagaaggatcagctggaggcccacattcaggctgcacaggccatgctagcaatggacacagatgagactagcaaaaagattgctcatgccaaagctgtagcagcggaagcccaggacaccgccacgcgggttcagagccaacttcaagccatgcaggagaacgtcgaacggtggcagggccagtacgaaggccttaggggccaggaccttggccaggccgtgctggacgctggacattctgttagtacacttgaaaagacgctcccacagctgctggcaaagctgtctattctagaaaacaggggggtgcacaacgccagtctggcgttgtccgcatccattgggagagtgcgggaactcatcgcacaggcacgcggggcagccagcaaggtgaaggttcccatgaagtttaacggacggagcggcgtgcagctgcgcactcctcgagatcttgctgatctggctgcatacaccgccctcaagttctaccttcaggggcccgagcctgaaccaggccaaggcactgaggaccggttcgttatgtatatggggtcgaggcaggcaactggagactatatgggcgtctcgcttcgggacaagaaggttcactgggtataccaattgggtgaggctgggcctgccgtgcttagtatcgacgaggacattggggaacagtttgcagcagttagtctggatcgcacactgcaattcggccatatgagcgttacggtagaacggcagatgattcaggaaaccaaaggtgacactgttgccccaggagctgaaggactgttaaatctgcgccccgatgacttcgtcttctacgtgggtggataccctagtactttcacacctccacccttgctacggtttccgggatacaggggttgtattgaaatggacacacttaacgaggaggtagtgagcctctataatttcgagaggactttccagctggacaccgcggtggaccggccgtgcgcccgaagcaaatccacgggtgacccatggctgactgatggctcatacctggacgggactggatttgccagaatctcttttgatagccagatcagtacgacgaaaagattcgagcaggagctgcgacttgtgtcatattctggggtgctgttcttcctcaaacagcagtctcaatttttatgtctggcggtgcaggaaggatctcttgtcctcctgtacgactttggagcaggacttaagaaagccgtacccctgcagccacctccaccactcacatccgcttctaaggctatccaagtgttcctactgggcggcagcagaaagcgagtacttgtgcgagtggaaagagcaactgtgtactcagtggaacaagacaatgacctggagttggctgacgcctactaccttggcggagtcccaccagatcagctgcctccttcactccggcgtctattcccgaccgggggctccgtgagaggttgcgtgaaaggtatcaaggcactcggaaagtacgtggacttaaagcggctgaacaccactggcgtatcagccggctgtactgctgaccttctggtcgggagggcaatgactttccacggtcacggatttctcaggctggcactgtcaaatgttgccccccttaccggaaatgtatattcaggatttggctttcattctgctcaagacagcgctcttctctattaccgcgctagcccagatggactgtgtcaggtgtctctccaacagggaagggtatcactacaactcctgcggacagaggtaaaaacgcaggctggctttgctgacggcgccccccactatgtggcattttattctaacgctactggagtgtggctttatgtggatgatcagctgcaacaaatgaaacctcaccgtggccctccacccgagctgcagcctcagccagagggtcccccgcggctcctcctcggcgggttacccgaatctggcaccatttataatttttctggctgcatcagtaatgtatttgtccagaggctcctggggccacaaagagttttcgatctgcagcaaaacctcgggagcgtgaatgtgtccacgggctgcgctcccgccttgcaggcacagacccctggcctcggccctaggggcctccaggctaccgcaagaaaggcaagcagaagatcacgacagcccgcccggcatccagcttgtatgctgcctcctcacttgcggaccactagggactcttaccagtttggagggtcactctcctcccatcttgagtttgtggggatcctggcccggcaccgcaactggccttcacttagcatgcacgtgttaccacggtcatcgcgggggctgctcctgtttactgctaggctgagacctggcagcccgagtcttgctctattcttgtccaacgggcattttgtcgcacagatggaagggctcggaacaaggctccgggctcaaagccggcagcgtagtagacccgggaggtggcataaggtgagtgtgcgctgggagaagaatcgcatcctactcgtgaccgatggggcccgtgcatggtctcaggagggtccccatagacagcaccaaggcgcggagcaccctcaaccgcacaccttattcgtgggcggcttgcctgccagctcccacagctccaagttgccagtaaccgtcggttttagcggctgtgtgaagcgcctgagacttcatggaaggccccttggcgcaccgaccagaatggctggggtgaccccttgcattctcggtccccttgaagccggacttttcttccctggaagtgggggcgtgataaccctggacttgcccggggctaccctgccagacgtggggctcgagttggaggtccgtcctctggctgtcacaggtttgatctttcacctcggccaagcccggacgccgccttacttacagcttcaggtaacagaaaaacaggtcctccttagggccgatgatggggccggagagttcagcacttctgtgacccgcccttcagtgctgtgcgacggccaatggcatcgtcttgctgtcatgaaaagcggaaatgtgctgcgactcgaagtggatgcgcagagcaatcataccgtagggcctcttctcgcggctgccgctggagctcccgctcccctatacttaggaggtctgcctgagccgatggctgttcaaccatggcccccagcctactgtgggtgcatgcgccgcttggccgttaacagatcacccgtggccatgactcgaagcgtcgaggttcacggcgctgtgggagccagtggctgtcctgcggcttag

SEQ ID NO: 121905 - DNA, 1503 bp, synthetic construct
  misc_feature 1..1503: note = Description of Artificial Sequence: Synthetic coding sequence
  source 1..1503: mol_type = other DNA
atggccaaacggttgtgcgcaggctctgctctttgcgtgagaggcccgaggggccccgcccctctgctgttagtgggactggcccttttgggagcagcgcgtgctcgcgaggaggcaggggggggctttagcctacatccgccatactttaatctggcagagggagccaggatcgctgcttcggcgacttgcggcgaggaggcccccgcccgcggctccccaagacctacagaggacttatattgtaaactggtcggcgggcctgtggccgggggtgatcccaatcaaacaatccgcggccagtactgcgacatatgcaccgcagcaaactcaaacaaggcccatcccgcctctaacgcaattgatggcactgaaaggtggtggcagagcccccccctcagcagaggactcgaatacaatgaagtgaatgtgacactcgatctgggccaggtcttccacgtcgcctatgtcctgatcaagtttgccaactccccgaggcctgatctgtgggttcttgagcggtcaatggatttcggacggacataccagccgtggcaatttttcgcgagcagtaagcgcgattgcctggagagatttggccctcagacattagaacggataacaagggacgacgccgcgatatgtaccaccgagtattcacgcatagtccctcttgagaatggcgaaatagtcgtgagcttggtgaatggtaggcccggagccatgaactttagctattcaccgttactacgggaattcactaaggcaactaatgttcgcctgaggttcctgcgtactaatactctcctgggccacttgatgggcaaagccttgcgggatccaactgtgacaaggcgctattactactcaattaaggatatttcgatcggcggccggtgcgtgtgccatggccacgccgacgcgtgcgacgcaaaggaccccactgatccatttcggttgcagtgtacctgtcagcataacacatgtggcgggacctgcgatcgctgttgtcctgggtttaaccagcagccatggaaacctgccacagcaaactctgccaatgaatgccaatcctgtaactgttacggacacgcaacagattgctattatgacccggaggtggatcggcggagagcctcccagagtcttgacggtacctatcaaggcggtggagtgtgtatcgactgtcaacaccacacaactggtgtgaactgtgagcgctgtctgcccggattttaccggagcccaaaccaccctctggattctccacacgtgtgtcggagatgcaattgtgaaagcgactttaccgacggaacatgcgaagatcttaccggacgctgctattgcaggcccaattttagtggagaaagatgcgacgtttgtgccgagggtttcacaggatttcccagttgctatccgactcccagctcttctaacgatactagagaacaggtcctgcccgcgggccaaatagtcactaacaccaagatttcctgggtctag

SEQ ID NO: 121906 - DNA, 1587 bp, synthetic construct
  misc_feature 1..1587: note = Description of Artificial Sequence: Synthetic coding sequence
  source 1..1587: mol_type = other DNA
atggctaaaaggctgtgtgcaggaagcgccctgtgtgtgcgcggaccccggggaccggctcctctgctcctggttggacttgcccttctcggagccgcaagagcccgtgaggaggcaggcggcggattctccttgcaccccccatacttcaacctcgctgaaggtgcacgtatcgctgcctctgctacatgcggcgaggaagccccggccagaggctccccccgaccaacggaggatttgtactgcaagctggtgggtgggcctgtagccggaggggacccgaaccagactatccgggggcagtactgtgatatttgcaccgctgcaaattcaaataaggcccatcccgcttccaatgccatcgatggcacagagcggtggtggcagtcccctcctctgagcaggggtctggagtacaatgaggtgaacgtaacgttagatctgggccaagtgtttcatgtcgcctatgtgctcattaagtttgccaattcgcctcgacctgatctgtgggtattggagaggtcaatggactttggaaggacctaccagccttggcagttctttgcctcaagcaaacgggattgccttgagcgcttcgggccacagacactcgaaagaatcacacgggacgacgccgcaatttgtaccaccgaatactctcggattgtgcccttggagaatggggagatagtggtctccctcgtcaacggtcggccaggggctatgaatttctcctacagccccctgctgcgcgaattcaccaaagccacaaacgtgcgcttgagattcttgaggacgaatacgctgctcggacatctcatgggcaaagccttaagagatcctacggtgacccgcaggtactactattcgattaaagatattagcattggcggtagatgcgtgtgccatggacacgcagacgcttgtgatgctaaggatcccacagacccattccgactgcagtgtacctgccagcataatacttgtggcggtacgtgcgatagatgttgtcctgggtttaaccagcagccatggaaacccgcaacagctaacagcgcaaatgagtgccagtcctgcaattgctatggtcacgccaccgactgttactacgacccagaagtggataggagaagggcctctcagagcttggatgggacttatcagggaggcggtgtctgtattgactgccagcatcacacaacgggcgtgaactgtgaaagatgccttcctggtttctaccggtctccgaaccaccccctcgactccccacacgtttgtaggaggtgcaattgcgagagcgattttacagatggtacatgcgaggacctaaccggtcgctgttattgccgtcccaacttctccggggagcggtgcgatgtgtgtgcggagggcttcaccggattccctagctgctaccctacaccgtccagctctaatgatacacgagaacaagtcttgccagccggacagatcgtcaacggggtgagcctttgccgccctggctggtcagcggtcgcgcgatcacgcctgacgagcacgagtgctagttgggtgcaagcgatcctgctgccccagagtcccgagtag

SEQ ID NO: 121907 - DNA, 2187 bp, synthetic construct
  misc_feature 1..2187: note = Description of Artificial Sequence: Synthetic coding sequence
  source 1..2187: mol_type = other DNA
atgtgggtgactaaattactgcctgcgctactgctgcagcatgtcctgcttcacttactgctgctgccaatagcgattccgtacgcggaaggccagaggaagagaaggaataccattcacgagttcaaaaagagcgccaaaacgaccctcatcaagatcgatcctgcattaaagatcaagactaaaaaggtgaacactgcagaccagtgtgcaaatcgttgtacaaggaacaagggccttcccttcacttgtaaggcattcgtgttcgataaagcccgcaagcagtgcttgtggtttccctttaactcaatgtcgtcgggcgttaagaaggagttcgggcacgaatttgatctttacgaaaacaaagattatattcgtaattgcattatcgggaaggggaggtcctacaaaggcacagtgtccataaccaaatccgggattaaatgtcagccctggagttctatgatcccacatgaacattccttcttgccgtcgtcctaccgtggaaaggacctccaggaaaattattgtaggaacccccggggtgaggaaggaggcccgtggtgcttcacctcaaacccagaggtgagatacgaggtatgcgacattccccagtgctccgaagtggagtgtatgacatgtaacggggaaagctacaggggactgatggaccacaccgagtccggcaaaatttgtcagcgatgggatcatcagacccctcacagacataagtttctgcccgagaggtacccagacaaaggattcgatgataactactgcaggaaccctgacgggcaacccagaccgtggtgctatacactcgatccccatacaagatgggagtactgcgccatcaagacctgcgctgataataccatgaatgacacagatgtgcctttggagacaactgaatgcattcaaggccaaggtgaaggttatcgaggaaccgtcaacaccatatggaatggcattccttgccagcggtgggacagtcagtacccacacgaacacgacatgacacccgagaacttcaaatgcaaggatctgcgcgaaaactactgccggaatcccgacggatctgagtctccatggtgtttcaccaccgacccgaacatccgggttggttactgctcccagatcccaaattgcgacatgtcccatggccaggactgttacaggggcaatggcaagaattacatgggaaatctcagccaaactcgttctgggctgacctgttctatgtgggacaagaacatggaggatcttcatcgccacattttctgggaacccgatgcatcaaagctcaatgaaaactactgccggaatccagatgacgacgcgcacggaccctggtgttataccggtaaccccctgatcccctgggactattgccccatatcaaggtgcgaaggcgacactacaccaacaatagtgaatttggaccacccggtgatctcctgtgcgaaaacaaagcaactgagagtggtcaatggtattcccacaaggacaaacattggttggatggtctccctccggtacagaaataagcatatctgcggaggctccttaatcaaggaaagttgggtactgaccgctagacagtgcttcccttcaagggatctgaaagattatgaagcttggctcggcattcacgacgtgcacgggcgcggggatgagaagtgtaagcaggtcctgaacgtgtcccaactcgtatatgggcccgagggcagcgatctggtgctgatgaagctggcgcggcctgcagtgcttgacgactttgtttcaacaatcgatttgcctaattacggttgcactataccggagaagacgagttgctccgtatacggttggggttacacagggctgatcaactatgatggcctgctccgcgtggctcatctctatattatgggcaacgaaaaatgctcacagcaccacaggggtaaggtcactctcaacgagtccgaaatttgcgccggcgccgagaagattgggtcagggccttgtgaaggagattacgggggacccctcgtctgcgagcagcataagatgagaatggtgctgggcgttattgtgcccggtaggggttgtgccattcctaataggccagggatctttgtgcgagtcgcatattacgccaagtggatccacaagatcattttaacttacaaggtccctcaaagctag

SEQ ID NO: 121908 - DNA, 276 bp, synthetic construct
  misc_feature 1..276: note = Description of Artificial Sequence: Synthetic coding sequence
  source 1..276: mol_type = other DNA
atgggattactgcaattgctagcattctccttcctggcattgtgccgcgctagggtgcgggctcaagagcccgaattctcttatggctgcgccgaaggctcttgctatcctgcgactggggatctgcttattggaagggctcaaaagttgagcgtgaccagtacttgtggtctgcacaaacctgagccgtattgcatcgtatcgcacctgcaggaagacaagaagtgtttcatctgcaattcccaagatccatatcacgaaactctgaatccctag

SEQ ID NO: 121909 - DNA, 2553 bp, synthetic construct
  misc_feature 1..2553: note = Description of Artificial Sequence: Synthetic coding sequence
  source 1..2553: mol_type = other DNA
atgggtctgttacaactcctcgctttttcatttctggccctctgccgggcccgggtgcgcgcgcaggagcctgaatttagttacgggtgtgccgaaggttcatgttaccccgcaacgggcgatttgttgatagggagagctcagaagctgtctgtaacctctacatgcggtcttcacaagcctgagccctactgtatcgtgtcccatttacaggaggataagaagtgttttatttgcaattcacaggacccatatcatgagaccctcaacccagactcccacctgattgaaaatgtggtcactactttcgccccaaacagactgaagatctggtggcagtctgagaatggcgttgaaaatgtgacaatccaactcgatttggaggcagaatttcacttcacgcatttgatcatgacgttcaagacattcaggcctgcagctatgctgatagaacgcagctctgactttggcaagacctggggcgtgtatagatactttgcctatgattgtgaagcgtcttttccaggaatttctaccggaccaatgaagaaagttgatgatattatttgcgatagcaggtactctgatattgagcctagcaccgagggcgaggtgatcttccgggcgctcgaccctgccttcaaaatcgaggacccatattcacctaggatccagaatctcctgaagataacaaatttacggattaaattcgtgaagcttcacacactgggagacaatcttctagacagcagaatggagataagagagaagtattattacgctgtgtatgatatggtagtgcggggcaactgcttttgctacggccacgcctccgaatgcgcaccggttgatggtttcaacgaggaggtggaagggatggtccatggtcactgtatgtgtaggcacaacacgaagggtctgaattgtgaactgtgtatggatttttaccatgacttgccatggaggcccgctgaagggaggaacagcaatgcttgcaagaaatgtaactgcaatgaacattctatatcatgccacttcgatatggcagtgtatctggccaccgggaacgtgagcggtggtgtctgtgacgattgccaacataatacaatgggccgcaattgcgagcaatgtaaacctttctactaccagcacccagagcgggacatacgtgatcccaatttttgcgaaaggtgcacttgtgatcccgctggaagccagaacgagggtatctgcgactcctatacagatttctccaccggactgattgccggccaatgccggtgcaagctgaacgtagagggagagcattgcgatgtgtgcaaagaaggtttttatgacctgagtagcgaggacccttttggatgcaagtcatgtgcctgtaaccctcttgggaccattccagggggcaatccctgcgattcggaaaccggtcactgttattgcaagaggttagtgactggacagcactgcgaccagtgtctgcccgagcactggggtctgtccaacgacctcgacggctgcagaccgtgtgactgcgatctcggaggcgccctgaataacagctgtttcgccgagagtggacagtgtagctgtaggccgcatatgatcggacgtcagtgtaatgaggtggaaccaggatactatttcgctacactcgaccattacttgtacgaggccgaggaggccaatttaggccccggtgttagcatcgtagaaaggcagtacattcaagataggatcccttcttggaccggtgcagggtttgtaagagtcccagagggggcctatttagagttctttatcgataatatcccgtattcaatggaatatgacattttaattagatatgaaccacagttgccggaccactgggaaaaagccgttattaccgtccaacgcccggggcgcatccctacgagcagcaggtgcggcaacactataccagatgacgacaatcaagtcgtgagcttgtctcctggcagccgctacgtcgtgctgccccggcctgtgtgcttcgagaaaggtacgaactacactgtgcgcctcgagctccctcaatataccagctctgactcggatgtggagtctccttacacgctaatagattccttggtgcttatgccctattgcaagagtctggacatctttactgtcgggggatccggggatggggtggtgaccaattctgcatgggagacattccagcggtatcgatgcctggagaatagcagatcagtggtcaagacacctatgacagatgtctgtcgcaacatcatcttctcaatttctgctctgctccaccagaccggcctagcatgcgagtgtgatcctcagggatcacttagctcagtgtgtgatcccaatggcgggcagtgtcaatgtaggccaaacgttgttggacgtacctgcaacaggtgcgctcctggtactttcggattcggcccatccggctgtaagcggcgcttccttaagtcaatcgtgatgcattctttcaggctcacgcagcctctgtggcagggatccatagcagcagaaccaatgcttccctcatag

SEQ ID NO: 121910 - DNA, 5397 bp, synthetic construct
  misc_feature 1..5397: note = Description of Artificial Sequence: Synthetic coding sequence
  source 1..5397: mol_type = other DNA
atggagctgacctctagggagagaggtaggggtcaacccctgccctgggaactgaggcttggtctcctcctgagcgtgcttgcagctactttagcccaggcccctgcccctgacgtgcccggctgctcccgaggatcgtgctacccggccaccggggacctgttggtcggtagagccgaccggctgaccgcatctagtacttgcggactgaatggtccccagccttactgcattgtgagccatctacaggatgaaaaaaaatgttttctgtgcgactctcgcaggccattctcagctagagataatccccactcccataggattcagaatgtggtcacttccttcgctcctcagaggagggccgcctggtggcagtcagaaaacggtattcctgccgtaaccatacagctcgatctcgaggccgagttccattttactcacctcatcatgacctttaagacctttcggccggccgcaatgctggtggagcgcagcgccgatttcggacggacttggcacgtgtatagatacttctcctacgattgcggagccgacttcccaggcgtgcctctcgcaccccctcggcattgggatgacgtggtgtgcgagtcgagatactcagaaatcgaaccgtctaccgaaggcgaggtgatttaccgtgtgctcgatcctgctatcccaattccagatccctactcctcaagaattcagaaccttttgaagatcacaaatctccgagtgaatttaactagattgcataccctgggtgacaatctcctcgacccacggcgggagattagggagaagtattactatgccctctacgaattagtcgtcaggggcaactgcttctgttacgggcacgcatcagaatgcgcccccgctccaggagcaccggcgcacgcagagggtatggtccacggtgcttgtatctgtaaacacaacacaaggggtctcaactgcgagcaatgccaggatttttatcgggacttaccttggaggccggcagaggacggacattcccacgcctgtaggaagtgcgaatgtcacggccacactcattcctgccattttgacatggccgtttaccttgcctctggcaatgtgtccgggggggtgtgcgacggctgccagcacaacaccgccgggcgccactgcgaactgtgtagaccttttttctacagggatccaactaaggacctacgggatcctgcggtgtgccgatcttgcgactgtgaccccatgggctctcaggacggaggccgctgcgacagccacgacgatcctgcactggggctggtcagcggacagtgtagatgtaaagagcacgtggtgggaacccggtgccagcagtgtcgagatggatttttcgggctgagcatcagtgatcggctaggctgccggcgctgccagtgcaacgccaggggcaccgtgcctggcagcactccatgcgaccctaatagcgggtcctgctattgcaagaggctggtaacaggaagagggtgcgatcgctgcttacctgggcattggggactctcacatgatctgctcgggtgtcgaccctgcgattgcgatgtcggtggggccctagacccccagtgtgacgaaggtacagggcagtgccactgcagacaacatatggtcggccgccgttgtgagcaggtacagcctggttacttccggccctttttggaccacctgatatgggaggcagaagacactagaggacaggtacttgacgttgtggaacgcctcgtgacacctggcgagacgccatcatggacaggatcgggattcgtgcggctgcaggagggacagacattggagtttctagtggcctcagtgcccaaagccatggactacgaccttttactccgcctggagccacaggtgccagagcaatgggccgagttggagctcatcgtgcagagacccgggcccgtgcctgctcactctttgtgtgggcacttagttccaaaagatgatcggatccagggcacattacaaccccacgcccgctacctgattttcccaaacccagtttgtttggaaccgggtatttcctataaactgcacctgaagctggtccgcacaggtgggtccgcccagcctgagactccttattccggacctgggttgcttatcgattccttagtgctgttgccccgggtccttgtgttagaaatgttcagcggcggcgacgcagccgctttggagaggcaggcaacattcgagcgttaccaatgccacgaagaagggcttgtgccttcaaagacttcaccatcagaggcctgcgctcctctgttgatctccctttcaacgctgatttataacggcgcacttccttgccagtgcaaccctcaaggctctctttcttcggaatgtaatccacatggaggccagtgtctatgcaaacctggagttgtgggacgacgttgcgatctctgtgcccctggctactatggattcgggcctacaggttgccaagcctgtcagtgctcccacgaaggcgcattgtcttcactttgcgagaagacctccggccagtgtctatgtcgcaccggtgcctttggactacgctgcgatcggtgccagagaggccaatggggcttccctagctgtcggccatgtgtgtgcaacgggcacgcggatgaatgtaacacccataccggcgcatgtttgggttgccgtgaccataccgggggggagcactgcgagaggtgtattgccggtttccacggggatcctaggttgccctatggaggccagtgtaggccttgcccctgtcctgaaggtccaggatcacagcggcactttgcgacatcttgccaccaagacgagtattcacagcaaatcgtctgccactgccgtgcggggtacacagggctgcgttgcgaagcgtgcgccccaggccacttcggagatccctctaggccgggggggcgctgtcagctttgcgagtgcagtggcaacatcgaccctatggaccccgacgcgtgtgatccccatacaggccagtgtctccgctgcttgcaccacacagagggcccccactgtgcccactgcaaacccggattccatgggcaggccgcccgacagtcttgtcaccgctgcacctgcaatctcctcggaacgaacccacagcagtgtcccagcccagatcaatgccactgcgatcccagttctggacagtgcccttgcctgcccaacgtccagggcccatcctgtgatcggtgcgccccaaatttttggaatttaacatctgggcacggctgccagccatgcgcatgtcatccctcccgggctcgaggtccaacctgtaacgagttcactgggcagtgtcattgcagggctggctttgggggtcgaacctgtagtgaatgtcaagagctgcactggggggacccagggctacagtgccacgcctgcgactgtgattcccgaggaattgacactcctcagtgtcatcggttcacaggccattgctcatgtagacctggcgtgtccggcgtccgttgcgaccagtgcgcgcggggcttctctggcattttccctgcctgtcatccctgtcatgcctgtttcggagactgggatagggtcgtgcaggacctcgccgcgagaactcaaagacttgagcagcgggcccaggaactacagcaaactggggtcctcggcgcctttgaaagctctttttggcatatgcaggagaagctcggcattgtgcaagggattgtgggcgctcgcaacacttcggccgcctctactgctcagctggtcgaggccactgaggagttgcgaagagagatcggcgaagcaactgagcacctcacacagctagaagccgatttgacggacgtgcaggatgagaacttcaatgccaatcatgctctatcaggcctggagagggataggcttgccctgaacctcaccttgcgtcagttggaccaacacttggacctgctgaaacactccaactttttgggcgcctacgattcaatccgccacgcgcatagccagagtgccgaggcggagcgccgcgctaacacttccgccctggctgtgccatcacctgtgtccaatagtgcgtccgcacgccatcggaccgaggccttgatggatgctcagaaggaggatttcaactccaaacacatggctaatcagcgcgccctggggaagttgtccgcccacacacacaccctctccttaacagacataaatgagcttgtgtgcggcgcaccgggcgatgcaccctgcgctacctctccctgtgggggagcgggatgcagagatgaggacggccagccccggtgcggcggcctgtcgtgtaatggagctgccgccacggccgacctggctctagggcgggcacggcatacgcaggccgagctccagagagcccttgccgagggaggttcaatcctgagccgcgtggctgagacgcgaagacaggctagtgaagctcagcagcgggcgcaagctgcccttgataaggctaatgcctctcggggccaggttgaacaagcaaatcaggaactgcaagagcttatccagtctgttaaggatttcttaaaccaggagggggctgaccccgatagtatcgaaatggtggctactcgcgtactggagttatctatacccgcctccgccgaacagatccaacatctagctggcgccattgctgaaagggtcagatccctggccgatgtggacgccatactggccaggacagtcggcgatgtgaggagagccgaacagttactccaggacgccaggcgggccagatcctgggcagaagacgagaagcaaaaagccgaaactgtacaggcagccctcgaagaagcccagcgagctcagggcatcgcccagggagccatccgcggggccgttgctgacaccagggacacagaacagacactataccaagtgcaagagcggatggccggagctgagagagcactaagctccgccggggagcgcgcacgccaactggacgcactgctggaggctcttaagcttaagcgggccggaaattccctcgcagcctcaactgccgaagagacggccggaagcgcacagggtagggcccaagaagctgaacagctcctgcgcggccctttaggagatcagtaccaaaccgtcaaggcactggccgagcggaaagctcagggggtcctcgctgctcaggcccgggctgagcaactaagggacgaagctcgggatcttctgcaggccgcccaagacaagctgcagcgattgcaggagctggagggtacatacgaggagaacgaaagagccctggaatctaaagctgcccagcttgatggcttggaagcccggatgagatccgtgctgcaggcaataaacttgcaggtgcagatttacaacacctgccagtag

SEQ ID NO: 121911 - DNA, 1143 bp, synthetic construct
  misc_feature 1..1143: note = Description of Artificial Sequence: Synthetic coding sequence
  source 1..1143: mol_type = other DNA
atgcaagaaaagctgggcatcgttcagggcatcgttggcgcacgcaatacgagcgccgccagcactgcccagctcgttgaggctactgaggagttgcgcagagaaattggcgaggccactgagcacttaacccaattggaggccgatctgaccgatgtgcaggacgaaaattttaacgcaaatcatgccctgagcgggctagagcgtgatagacttgcgctgaacctaacactgcggcagctggatcagcacctggatttactaaaacactccaactttttgggagcctacgacagcatccgacatgcacactcccagtcagcggaagccgagagacgggctaacacatctgcactcgccgttccatcacccgtatccaattcggcctcggctaggcatcggaccgaagctcttatggatgcccagaaagaagatttcaacagcaagcacatggcaaaccagcgggcacttggtaaactctccgctcatacccacaccctgtctctgaccgacatcaacgaactagtgtgcggagcccccggtgatgctccctgcgctacgtcgccttgtgggggcgcgggttgccgcgacgaagacggccaaccaaggtgcgggggcctctcctgcaacggcgccgccgccactgcggacttggccctcgggagagccaggcatacccaggcagagttgcagcgcgccctggccgagggcggttccattctctccagggtcgccgagaccaggcgacaggcctccgaggcccagcaaagggcccaggcagccctcgacaaagccaatgcctcaaggggacaagtcgaacaggccaaccaggaattgcaagagctgattcagagcgtcaaggacttcctcaatcaggaaggtgcagaccccgacagcatcgagatggtggcaactcgcgtcttggagctttccattccagcttctgctgaacaaattcagcacctcgccggggcgatagcagaaagggtgaggtctctcgctgacgtcgacgccatactcgcccagggcattgcgcagggagccatccggggggctgtagccgacacacgagataccgaacagccggtcccggggaccggcgaggacggccgatgccgggctggtaccgagttgtgtcgctag

SEQ ID NO: 121912 - DNA, 5397 bp, synthetic construct
  misc_feature 1..5397: note = Description of Artificial Sequence: Synthetic coding sequence
  source 1..5397: mol_type = other DNA
atggagcttacctctagggaaaggggtagaggacaacctctgccctgggagctccgtttgggccttctgctcagtgtactggccgccacactggcccaggcaccagccccagatgtccccggctgtagcagaggcagctgctaccccgccactggggacctgctggtcggccgcgccgacaggttgactgcttcaagcacttgtggtttgaatggaccacaaccgtattgcattgtaagtcatctacaagatgagaaaaagtgttttttgtgcgattcgcgccggcctttcagcgctagggataaccctcattcccacagaatacagaacgtggtcacatcattcgccccccagagacgcgccgcatggtggcagtccgagaatggaatcccggccgttaccattcagctggacctggaggccgaattccatttcacacacttaatcatgacgtttaagaccttcagacccgctgccatgttggtggaacggtcagcagacttcgggaggacctggcacgtttatcgctatttttcctacgactgtggggcggattttcccggcgtcccgctggcccctcctcggcattgggacgacgtggtgtgcgagtcaagatactcagaaatcgagccaagcacagagggagaggtcatctatcgggtgctcgatccggcgatccccatccctgatccatacagctcacgaatccaaaacctgctgaaaatcactaatctgagagtaaatctgacccgcttacacacactgggggacaatctgttggacccaagaagggagatcagggagaaatattattacgccctttatgagctcgtggtgcggggtaactgcttttgctacggacatgcctctgagtgcgccccggcccccggagctcctgcccatgcggaagggatggtgcatggtgcttgcatatgcaagcacaacaccagggggttaaactgcgagcagtgtcaggatttttaccgggacttaccatggaggcctgccgaagacggccactcacacgcctgccggaagtgcgaatgtcatgggcacacacactcatgccatttcgatatggcagtgtatctggcctccggcaacgtgtccggcggagtgtgtgacggctgtcagcataatactgcgggtcggcattgtgagctgtgccgtccatttttttaccgtgacccaactaaggacctgagggatccagcagtgtgcagaagttgcgactgtgatcccatgggatctcaggatggcggaaggtgcgacagccacgacgacccagctttaggactcgtgtcaggtcagtgccgttgtaaggaacatgttgtcggaaccagatgccagcagtgcagggacggcttttttggactctcaatttctgataggctaggctgtaggcggtgccagtgtaatgcacgtggtactgtccccggcagcacaccttgcgaccccaactctgggagctgttattgtaaaagactggttaccggccgcggatgtgacaggtgtcttccaggacactgggggctgtcacatgaccttttaggatgcaggccttgcgattgcgatgtgggcggggccctcgatccccaatgcgacgagggaacggggcagtgtcactgtcggcagcatatggtaggcaggcgctgtgaacaagtccagcccggttactttcgccccttcctagaccacttaatctgggaggccgaggataccagaggccaggtgctggacgtggttgaacgcctggttacccccggcgagacaccttcttggacagggtctggctttgtccggctgcaggaggggcaaaccctggagtttcttgtagcctctgtgcccaaggccatggattatgatctcctcctgaggctggaaccacaggtgcccgaacagtgggcagagcttgaactaatcgtgcagaggccaggaccggtacccgcccacagtttatgtggtcatctggtgccaaaagacgacaggattcaggggactttgcagccccatgctcggtatctcatattcccgaatcccgtgtgtctggaacccggtatctcatataaactccacctgaagctggttcgcacaggaggatcagcacagccagagacaccatacagtgggccgggcctactcattgactccctcgttctcttgccccgggtactggtcctggaaatgttttcaggaggggacgcggcagccttggaaagacaagctacctttgaacggtatcagtgccacgaggagggtctcgtgccttccaaaacatcgccttcagaagcctgtgcccctctgctgattagcctaagtactctgatctataatggagcattgccatgccagtgcaatccgcagggaagcctttcaagtgagtgcaacccccacgggggccagtgtctgtgcaaacctggagtggttggacggaggtgcgacctgtgcgcacctggctactacggttttggaccaacagggtgtcaggcctgccagtgctcacatgaaggagctcttagctccctgtgcgaaaaaacttccgggcaatgtctgtgccggacaggggcttttggtctgaggtgtgatcggtgtcagaggggacagtgggggttcccgtcatgtagaccctgcgtctgtaacggtcacgccgacgagtgcaacactcatacaggcgcttgtctcggctgcagggaccataccggaggagagcactgtgagcggtgtatagccggattccatggtgaccctcggctcccctacgggggccagtgcaggccctgtccatgtcccgaagggcctggctcacaacgacattttgctacctcctgtcatcaagacgagtactcccagcagatcgtttgccactgtcgtgccggctataccgggctccgatgcgaagcgtgcgcacccggacattttggtgatccatccaggccaggtgggaggtgtcagttgtgcgagtgttcggggaacatagatccaatggaccctgacgcatgtgatccacacaccggacagtgtctgcgttgtttgcaccacaccgaaggaccgcactgtgcgcactgtaagcctggttttcacggacaagcggctcgccagagctgtcatcgttgcacatgcaatctgctcggtacaaatccccagcagtgtccctcacccgatcagtgccactgtgacccttcctcaggccagtgcccatgtctgccaaatgtgcaaggcccctcttgcgaccgctgtgctcctaatttctggaaccttacctcaggacatggctgtcagccctgtgcgtgtcaccctagccgggcaaggggacctacgtgcaatgaatttactggtcagtgccattgcagggctggctttggggggcgtacatgctctgagtgccaggaattgcactggggagaccctggtctccagtgccacgcctgcgactgtgatagccgtgggatcgacaccccgcagtgtcaccgcttcaccggccattgtagctgccgccccggcgtctccggcgtcaggtgtgatcagtgtgccagggggttctcgggcattttccccgcctgccatccctgtcatgcttgttttggggattgggatcgggtcgtccaggaccttgccgcgcggacacagcgcctagagcaaagggcccaggaactccagcaaaccggggtcctaggagcctttgaaagtagcttttggcatatgcaggagaagctggggatagtgcagggcattgtcggtgctagaaacacaagcgcagcgagcaccgctcagctggtagaggctaccgaggagctgcgtcgtgagatcggagaggcaaccgagcacctgactcaactggaggcagacctgaccgacgtgcaagacgagaacttcaacgcgaaccatgccctgagcggactcgaaagagatcgcctcgcccttaatttgaccctgaggcaactggaccagcacctggatcttcttaaacattctaacttccttggggcctatgacagcattcgccatgcccacagccagtccgccgaggcggagcgcagagcgaacacatcggctctggccgtgccctcaccagtcagtaactcagcttccgcgcgccatcgcaccgaggcattaatggacgctcaaaaagaagatttcaattctaagcatatggccaaccagagagccctggggaagttgagcgcccatacacataccctgtctctgactgacataaacgagttagtctgtggagccccgggggacgcaccatgtgccacatccccttgtgggggcgcaggctgccgagacgaggatgggcagcctagatgcgggggactcagttgtaacggggcggctgcaactgctgacctcgcactgggcagggcgcgtcatactcaagccgaactgcagagagccctggcggaaggaggatctattctgtccagagtcgccgagaccaggaggcaggcctctgaggcacaacaacgcgcgcaggcagccctagacaaagcaaatgcatctagagggcaggtcgagcaggccaaccaagagctgcaagagcttatacagtctgttaaggactttctcaatcaggaaggcgctgacccagactccattgagatggtggccacacgggtcctggagctcagtattcccgcgtctgccgaacagatccagcacctggcaggcgctatcgccgaacgtgtgcggagtctggccgacgttgatgcgatcctcgcgcgtactgttggcgacgtgcgccgcgctgaacagcttctgcaagatgccaggcgggctagaagttgggcagaagacgaaaaacagaaagccgagacagttcaggctgcccttgaggaggcacagagggctcagggaatcgcccagggtgcaatccggggagctgtggccgacacacgtgataccgaacagacactgtatcaggtgcaggagagaatggccggggcagagcgggcactgagctctgccggcgagcgcgcacgacagctcgacgccctgctcgaggcgcttaaactgaagagggcgggcaatagtctggctgccagtaccgctgaggaaaccgcaggaagtgcacagggacgtgcgcaggaagcggagcagctgctgagagggcctctgggtgaccagtaccaaaccgtgaaagcccttgctgaacgcaaagcacaaggagtcctggcagctcaggctcgcgctgagcagctccgggacgaagccagagacctcctgcaggccgctcaagacaaactgcagagattacaggagctggaagggacctacgaggaaaatgagcgcgccctggaatccaaggcagctcagcttgatgggttagaagctcgaatgcgatctgtcctgcaagcaattaatctccaggttcagatatacaacacctgccagtag

SEQ ID NO: 121913 - DNA, 3519 bp, synthetic construct
  misc_feature 1..3519: note = Description of Artificial Sequence: Synthetic coding sequence
  source 1..3519: mol_type = other DNA
atgcgacctttcttcctcctctgtttcgccctcccagggctgctccatgcacagcaagcttgttcgagaggtgcctgttatccccccgtcggcgacttgctggtcggcagaacccgttttctgcgggctagcagcacttgcggcctgaccaagccggaaacctattgtacccaatacggagagtggcagatgaaatgttgtaagtgtgactcacggcaaccacacaactactacagccatcgtgttgaaaatgtcgcgagtagcagcggcccgatgcgatggtggcagtcccagaacgatgtgaaccccgtctcactgcagctcgacctggaccggagatttcagctgcaggaggtcatgatggagtttcagggaccgatgccagccgggatgctgattgagcgctcaagtgactttgggaagacctggcgcgtgtaccagtacctggcagctgattgtaccagtacttttcctcgcgttagacaggggcggcctcagtcttggcaggatgtgcgctgccagtccttgccgcagcgaccaaacgctcggctgaacggaggaaaagtgcaacttaatctgatggaccttgtgtcaggaatacccgcaacccagtcacagaagattcaggaggtgggagaaatcaccaacctgcgcgtgaactttacacggctcgcaccggtcccccaacgggggtatcacccaccatcagcgtactatgcggtgagccagctgaggctgcagggatcttgcttctgccacggccacgccgatagatgcgctccgaagccaggagcctccgcaggcccgtctaccgcagtacaggtgcacgatgtttgcgtctgccaacacaatacagccggccctaactgcgagcgatgcgcccccttctacaacaaccgcccttggcgcccagccgaggggcaggacgcccacgaatgccagcgctgtgattgtaatgggcattccgaaacatgccatttcgatccagcggtgttcgccgcctctcagggggcttacggcggagtctgtgataactgtagagatcataccgaagggaagaactgtgaacgatgccagctgcattattttagaaatcggaggccaggcgctagtatccaggaaacctgtataagttgcgaatgtgacccggacggagccgtgcccggcgccccatgtgaccccgtcaccgggcagtgcgtctgcaaagagcatgtgcagggagaacgatgtgacctctgcaagccgggttttaccggcctgacatacgctaacccccagggctgccataggtgtgattgtaatatcttggggagccgccgggatatgccctgtgacgaggagtctggtcgctgtttatgtctgccaaatgtagttgggcctaaatgtgaccaatgcgccccgtatcactggaagctcgccagcgggcaagggtgtgagccatgcgcttgtgatccacataactctctttcccctcaatgtaaccagtttaccggccaatgtccctgtcgggaagggttcgggggtctgatgtgcagtgcggccgccattagacaatgccctgatcgcacatacggcgacgttgccaccggctgtagagcctgcgattgtgatttcagaggtaccgagggccccgggtgtgacaaggcatcaggcagatgcctttgcagaccgggcctgacagggccacgatgtgaccagtgtcagcgtggatactgtaatcggtatcccgtgtgtgtagcatgtcacccgtgtttccagacctatgatgccgaccttagggaacaggcactccggttcggccggctaagaaatgccacagcatctctttggtccggcccgggtctggaggataggggcctggcctctcgtatccttgatgccaagagcaagattgagcaaatcagggcggtgctgtccagtcctgctgtaaccgagcaggaagtcgcccaggtggcctctgccattctgtccctgcgacgtaccctacagggtctacaattggacctgcctctcgaagaggagacgttgtccctcccaagggacctggagtctctcgatcggtcattcaacggtctgttaacaatgtatcagcgcaaaagagaacagttcgagaaaatctcatcggccgacccgagcggggcatttcggatgctgagtaccgcatatgagcagagcgctcaggccgcacaacaggtgtcagattccagtcgcctgctcgaccagctacgggattccagaagagaagctgaaaggctcgtgaggcaagctggaggggggggtgggaccgggtcacccaaactggtggcactacgcctggagatgtctagtctgcccgatctgacgcccacatttaataagctttgcggcaactctagacagatggcctgcactccaatcagttgccccggggagctgtgtccacaggataacggtacagcttgcggatctaggtgcagaggagtattgccccgagccgggggggcttttctgatggctggacaggtggctgagcagttacgaggcttcaatgcccagcttcagagaactcgacagatgatccgagccgctgaggagtctgcatctcaaatccaatcctccgctcaacggttggagacccaagtcagcgcctctaggtcacaaatggaagaagacgtcaggcgcactcgtcttctgattcagcaggttagggacttcctcactgatcctgacaccgacgcggcgaccatccaggaagtgagcgaagccgtcttagctttatggctgcccactgactccgccactgtgttgcagaaaatgaacgaaatacaggccattgccgcccgcctcccaaatgtcgatcttgtgttgagccagactaaacaggatattgctcgagctcggagactgcaggcagaggccgaagaggctcgcagtcgggctcacgcagtagaggggcaagtcgaggacgtcgttgggaacttgcggcaggggaccgtagctttacaggaggcacaagacactatgcaaggcactagccgcagcttgcgtctgatccaggatagagtggccgaagtacagcaggtcctgcgtccagcagagaagctggtgacttcgatgactaagcagctcggtgacttttggaccaggatggaagagctgaggcaccaggctcgacagcagggagcagaagccgtgcaggctcaacagcttgccgaaggcgctagcgagcaagcactgtctgcacaagagggctttgaaagaattaaacagaagtacgcagagcttaaagatcgattgggccagtcaagcatgctaggcgaacagggcgcacgtattcagtcagtgaaaacagaggccgaggaactgttcggggagactatggaaatgatggacaggatgaaagacatggagttggagttactcagagggagccaggcaataatgctgaggtcagctgacctcacaggactggagaaaagagtggagcagatcagggaccacatcaatggccgggtgctgtattacgcaacttgcaagtag

SEQ ID NO: 121914 - DNA, 3519 bp, synthetic construct
  misc_feature 1..3519: note = Description of Artificial Sequence: Synthetic coding sequence
  source 1..3519: mol_type = other DNA
atgaggcccttcttcctcttgtgctttgccctgccgggactactgcatgcacagcaggcctgttctagaggtgcatgctacccccccgtgggggacctcttggtaggacggacacgctttctgcgggcatcaagcacctgtggactaaccaagcctgaaacatactgcactcagtatggtgagtggcagatgaaatgttgcaaatgcgattcgcgacagcctcacaattactacagtcatagggtggagaacgtagcttcgtctagtggtcccatgcgatggtggcagtcacagaacgacgtcaatccagtttcactgcagttggatttggacaggcggtttcagctgcaagaggtgatgatggagtttcagggccccatgcccgcagggatgcttatagagagatccagtgatttcgggaagacatggcgagtgtaccagtatctagcagccgattgtacaagcaccttccctagagtgcggcaaggtcgcccacagagctggcaagatgtgagatgccagagcctcccccagcgccctaacgcgcgcttaaacgggggaaaggttcagctcaatctaatggatttggtcagtggcattcccgctacccagtcccagaaaatccaggaagtgggcgagataacaaacctgagagtgaacttcaccaggctggcccctgtgcctcaaagggggtatcatccacctagtgcgtactatgctgtgagccagctgcggctgcagggcagctgcttttgccatggtcatgcagataggtgcgcccccaagccaggcgcctcggctggacccagtacagccgtgcaagttcacgatgtatgcgtttgccagcataatacagccggccccaactgcgaaagatgtgcccctttttataacaatcggccatggagaccagcggagggccaggacgcccacgagtgccagcggtgtgactgcaacggccactccgagacctgccattttgacccagctgtgtttgcagcaagtcagggggcctatgggggcgtgtgcgataactgtcgcgatcataccgagggcaaaaactgtgaaaggtgccagcttcactatttccgcaaccgcaggccgggcgcttcaatacaagagacttgtatttcttgcgaatgtgacccggacggcgcagtgcccggggcaccttgtgaccccgtgactggtcagtgcgtttgtaaggagcatgtgcaaggggagcgatgtgatctgtgtaagccaggcttcaccggactgacatacgccaaccctcaagggtgtcaccgttgtgattgtaacattctgggtagcaggcgcgatatgccatgcgacgaggaatcaggccgctgcctgtgcctgccaaatgtggtgggacccaaatgcgatcagtgtgctccttatcactggaaactggcctctggtcaaggctgtgagccgtgtgcctgcgatccccataattcactttctccccagtgcaaccaattcactggtcaatgcccttgtcgcgagggcttcggaggtctgatgtgttcggcagctgcaatacggcagtgcccagatcgcacgtatggagatgtggcaaccggatgccgtgcttgtgattgcgacttccggggcactgagggaccaggctgtgacaaggctagtggacgctgtctatgcaggcctggactgaccgggcccaggtgtgaccagtgccaaagagggtattgtaaccgttaccccgtatgcgtcgcctgccatccttgtttccagacatacgacgctgacttgcgggaacaagcactgcgctttgggaggctgcgcaatgccactgccagcttatggagcggaccgggtctcgaggatcgcggactggcttccagaatcctcgatgcaaaaagcaagatagaacagatccgcgcagtgctgtcctctcctgcagtgactgagcaagaggtggcccaggttgcgagcgccatcctgtccctgcggcgaactcttcagggactgcaacttgatctacctctggaagaggaaacactttcgctcccacgtgatctggaaagccttgaccgctcttttaatggtctcctgacaatgtaccaacggaagagggagcagttcgagaagatttcgtccgccgatccatccggcgccttccggatgctgagcaccgcatacgagcagtcagcccaggccgcccaacaagtgtccgactcgtctaggctcctggaccaactgcgagattccaggagggaggccgagcgcctggtgagacaagctggaggtggtggaggcaccggctcccctaaattggtggccctgcggcttgaaatgtctagtctgcccgatttaacacctacgttcaacaaactgtgtggcaattcgcgacagatggcctgtacacccatatcctgtccaggcgagctctgcccacaggataacggcactgcatgcggctcccgatgcagaggcgttctgccgagggctgggggcgcattcctgatggccgggcaggtggccgagcagctcagggggttcaacgcacaattgcaaagaacgcggcagatgatcagggccgcggaagaatcagcctctcagatccagagctcagctcagaggctggagacccaagtgtctgcatcccgcagccaaatggaggaagatgtacgccgcacccggctccttatccaacaggtgagagacttccttaccgaccccgatactgacgctgccaccatacaggaggttagcgaggccgttcttgcgttgtggctgccaacagattcagctacagtgctgcagaagatgaatgagattcaagcaattgccgcccgattgccgaacgtggaccttgtgttgtcccaaacaaaacaggacatcgctagggcacgtagactccaggccgaggcggaggaagcccgctcccgggcccacgccgttgagggccaagtcgaggacgttgtcggaaaccttcgacagggaacagttgctctgcaggaggctcaggacacgatgcaaggtacctctcgctcactgcgtctaattcaagatagggtcgcagaagtccagcaggtgttgcgaccggctgaaaagctcgtcacgtcaatgaccaaacagcttggggacttctggactcgcatggaggaactgcggcaccaagcacgacagcaaggtgccgaggcggttcaagcacaacagctcgcggagggagcatccgaacaggccctctcagcacaagaaggattcgaacgcataaagcaaaagtatgctgaactgaaggacagattaggccagtcatcaatgctgggagagcaaggagcccgcattcagagtgtgaaaacagaggccgaggagctcttcggagagacaatggaaatgatggaccgtatgaaggatatggagcttgagctgctccggggctcacaggccatcatgttgcggtctgcagacctgaccgggctggagaagagagtcgaacagataagggatcacattaacggcagagtcttgtattatgctacatgtaagtag

SEQ ID NO: 121915 - DNA, 3519 bp, synthetic construct
  misc_feature 1..3519: note = Description of Artificial Sequence: Synthetic coding sequence
  source 1..3519: mol_type = other DNA
atgcgcccattcttccttctgtgcttcgccctgccggggctcctgcatgcccagcaggcgtgctcacggggggcatgctatccacctgtcggagacctcctagttgggaggacgcgcttcctgcgggccagtagtacctgcggcttgaccaagccagagacctattgtactcagtatggagaatggcagatgaagtgctgtaaatgtgattcgcggcagcctcacaattactattcacatagggtggagaatgtggccagcagctctggcccaatgcgatggtggcagtcccagaatgacgtcaaccctgtgagtctccagcttgatctggacagaaggtttcagctccaggaggtgatgatggagtttcagggacccatgcccgctggcatgctcattgagcggagtagcgactttggaaaaacgtggagagtctaccagtatctcgccgccgattgtacgtccacattcccccgagttcgccaaggtaggccccagtcatggcaggatgtacgatgtcagagcttgccccagcgtccgaacgctcgcttaaatggcggcaaggtgcagctcaatttgatggatctggtcagcggaattcccgcaactcagagccagaaaatccaggaggtgggtgagataactaatctaagggtaaacttcactaggctggctccagttccacagaggggatatcaccccccaagtgcgtattacgctgtgtcccagctgagacttcagggttcttgcttttgtcatggtcacgccgacagatgtgcccccaagcctggcgcttccgccggccccagtaccgccgtgcaggtgcacgatgtttgtgtgtgtcaacataatactgctggcccaaactgcgagcgatgtgctccattctacaacaatagaccctggagaccagctgaagggcaagatgcccacgaatgccaacggtgcgattgtaatggccattcagagacctgtcattttgatcccgctgtgttcgcagcgtcccagggtgcctatggcggcgtctgcgataactgtcgtgatcacactgaaggtaagaactgtgagcgatgccaactgcactatttcaggaacagacgcccgggcgcctctatacaggagacctgtatcagttgtgaatgcgacccggatggcgccgtgcccggggccccttgcgacccagttaccgggcaatgcgtatgcaaagaacacgtgcagggagaacgttgcgacctttgtaaaccaggatttaccgggctgacgtatgccaatcctcaaggatgtcaccgttgcgattgcaacatcctcggctctcggcgggatatgccgtgtgacgaggagagcggccggtgcctctgtctgcctaacgtcgtgggacctaagtgcgaccagtgcgctccctaccactggaagttagcatccggacagggatgcgagccttgcgcctgcgatccccacaattcgctgagtccccagtgtaaccagtttaccggacaatgcccctgcagggaggggtttgggggtttaatgtgctccgccgctgcaattcgccaatgcccagatcgaacgtacggcgatgttgccaccgggtgcagagcctgcgactgcgatttcaggggaacagagggaccaggatgcgacaaagctagcgggcgttgcttgtgccgacctggactaaccggcccaagatgtgatcagtgccagcggggctattgcaatcggtatccggtctgtgttgcctgccatccttgcttccagacgtatgatgccgatctcagagaacaggccttaaggttcggaagactcagaaacgccaccgcgagtttgtggtctggtcctggcttggaggataggggactagcctcacggatcctagacgccaaatccaaaattgagcaaattcgggcggtcttgagttctcctgcggtgaccgagcaggaggtagcacaagtggcttctgccattttatccctgagacgcactctccaggggctccagctagatctgcccttggaggaggagaccctcagtttaccccgggacctagagtcgctcgatcgaagcttcaatggtctgctaacaatgtaccagcggaagagagaacagttcgaaaaaattagcagtgctgatccctccggggcattcagaatgctgagcactgcgtacgagcagtccgctcaagcggctcagcaggtttctgactcctctcggctgttggatcagctacgcgacagccgacgggaggcagagaggttggtccgacaggccggcggcgggggcggtacaggcagccctaagctcgtggccttgaggttagagatgtcatccctgccagatttgacacctacttttaacaaactgtgcggaaacagccgccaaatggcttgtactcccataagctgcccaggcgaactatgtccgcaggataacggcactgcgtgcgggtctaggtgcaggggcgtgcttcccagggcaggaggtgcctttcttatggcaggacaagtagcagaacaactgcgcggctttaatgctcagctgcagcgcacacgccaaatgataagagctgctgaagagtccgctagtcagatccagtctagcgcccaacgactagagacccaggtctctgccagtagatcacagatggaagaggacgttcgtcgaactcggctgctcatccagcaggtgcgagatttcctgactgaccccgataccgatgccgctacgatccaagaggtgtccgaagccgttctcgctctctggctgcccacagatagcgctactgttctgcaaaagatgaacgagattcaggccattgcggccaggttgccgaacgtggacttggtcctgtcgcaaaccaaacaggacattgccagggcgcgtcggctccaggctgaagccgaggaagcaaggtcaagggctcatgcagtcgagggacaggtggaggacgtcgtgggcaatctgagacagggcaccgtggctctccaagaagcccaggacactatgcaaggcacttcacggtcactgaggttaatccaggaccgcgtggctgaggtgcaacaggtgctgcgacctgccgagaaacttgttactagcatgaccaaacaactaggtgatttttggactaggatggaagaacttaggcaccaggcgagacagcagggagctgaggccgtccaggctcagcaactggcagagggcgcaagcgaacaggccctgagcgcacaagaaggattcgagcgaatcaagcaaaaatacgccgagctcaaggatcggttaggccagtcatccatgttaggggaacagggtgcccggatccagagtgtcaagacggaggctgaagagctatttggcgagacaatggaaatgatggaccgcatgaaagacatggagctggagttgctacgcgggtctcaggcaatcatgctgcgaagtgccgacctcacggggctggaaaagcgagttgaacagatccgggaccacatcaatgggagggttctatattatgcaacttgcaaatag

SEQ ID NO: 121916 - DNA, 567 bp, synthetic construct
  misc_feature 1..567: note = Description of Artificial Sequence: Synthetic coding sequence
  source 1..567: mol_type = other DNA
atgcgccctttctttctcttatgttttgccctacccggtctgcttcacgcccaacaggcgtgcagccgaggcgcatgttatccgccagtgggcgacctactggtaggccgaacccgctttcttcgagcctcctccacgtgtggtctcacgaaacctgagacctattgcacacagtacggcgagtggcagatgaaatgctgtaaatgcgactcacggcagcctcacaactattattcccacagggtggagaatgtggcaagcagttctggccctatgcgatggtggcaatcccagaacgacgtcaatcccgttagcctgcagctcgacctggaccgtagatttcagctccaagaggttatgatggaattccagggcccaatgcctgcaggcatgctaatcgagagatcttcggatttcggaaagacatggagagtttaccagtacctggcagccgattgtacatcaacattccccagggttaggcagggcaggccacagtcatggcaggatgtgcgttgccaatctctaccccagcgccctaacgcccggctcaatggtgggaaatag

SEQ ID NO: 121917 - DNA, 483 bp, synthetic construct
  misc_feature 1..483: note = Description of Artificial Sequence: Synthetic coding sequence
  source 1..483: mol_type = other DNA
atgaatgagatccaggccattgctgctcgactccccaacgtagacctggtccttagtcagaccaaacaggacattgcccgggctcgaaggttacaggcagaggcggaagaggctcgatcccgcgcccacgctgtggaaggtcaggtggaggatgttgtaggtaacttaagacagggaactgtagccctgcaggaggcacaggacactatgcagggaacgtctcggtctcttcggttgatacaggaccgcgtggccgaggtgcagcaagtgttgagaccagctgaaaagcttgttacttccatgacaaagcagctcggtgatttctggaccagaatggaggagcttcggcatcaggcccgtcagcagggtgccgaagccgtccaggcacagcaactggctgagggggcctcagagcaggctctttctgctcaggagggcttcgagcgaatcaagcagaaatacgccgagttgaaagacagatag

SEQ ID NO: 121918 - DNA, 4830 bp, synthetic construct
  misc_feature 1..4830: note = Description of Artificial Sequence: Synthetic coding sequence
  source 1..4830: mol_type = other DNA
atgcgcggcagtcatagagccgcgccagctctgcgtccacgtgggaggctgtggccggtgttagcagttctggcagcagctgcagctgctggctgcgcccaggctgcaatggacgaatgcactgacgaaggcggcaggcctcagcgttgcatgcccgaattcgtgaacgcggcatttaacgtgactgtggttgctacaaacacctgtgggacacctcctgaggagtactgtgtgcagaccggggtgaccggtgtgacaaagagttgccatctctgcgacgcaggtcaaccccaccttcagcacggcgcggcattcctcaccgactacaacaatcaggctgacactacttggtggcaaagtcagaccatgctggccggggtgcagtacccaagttcaatcaatcttaccctgcatctcgggaaggcttttgatatcacttacgtgcgcctgaaattccacacttcacggcctgaaagcttcgctatatataaacgcacaagggaggacggaccttggatcccttaccagtattatagtggctcttgtgagaatacatactctaaagccaatcgcgggttcatacggacggggggagacgagcagcaggcgctgtgcaccgatgagttttcagatatcagcccactaacaggaggcaacgtcgccttctccacgttagagggacggccatcagcctataacttcgacaattctccagtactacaggaatgggtgactgcaactgatattcgcgtgactctaaaccgtctgaacacctttggtgacgaggtatttaatgatcccaaggtccttaaatcctactactacgcaatcagtgacttcgctgttggcggtcgctgcaaatgcaatggtcacgctagcgaatgcatgaagaatgagtttgataagctggtctgtaattgtaaacacaatacttacggcgtggattgcgaaaaatgcctccccttttttaacgataggccatggcgcagggccactgcagagtccgcctccgagtgcctcccctgtgattgcaatggaagatcccaggaatgctatttcgaccccgaactgtataggagtacaggccacggaggacactgtaccaattgccaggataacaccgatggcgcccattgcgaaagatgcagagagaactttttcaggcttggaaataacgaggcctgctcgagttgccattgctcccctgtgggtagcctatccacacaatgtgattcctatggaagatgcagctgcaagccaggcgtgatgggagataagtgtgaccgatgtcagcctggcttccactctttaacagaggccggatgtaggccctgttcctgcgatccctcagggtccatagacgagtgtaatatagaaaccggccggtgcgtatgcaaagataacgtagaaggatttaattgcgagagatgtaaaccaggcttctttaacttggaaagttctaatcccagaggctgtaccccatgcttttgtttcggccattcttctgtgtgcaccaacgccgtgggatatagcgtctactctatttcctccaccttccagattgacgaggatgggtggcgggcagagcaaagagacggatcagaagcgtcactggagtggtcctcagagcggcaagacatcgcagtcatcagtgattcctattttccccgctatttcatcgcccccgctaaattcctcgggaagcaggtcctgtcctacggccagaatctgtcatttagtttccgcgtggaccgaagagatacaaggctcagcgccgaagatttggtattagaaggcgccggcctgagggtgagcgtgcctctgatcgcccagggaaactcatatccttctgagactaccgtgaagtacgtcttcaggctgcatgaggccacagactacccatggcgtccagctctgactccgttcgaattccagaagctcctaaacaacttaaccagcatcaagatccggggtacctacagcgagaggagtgccggctacctagatgacgtgaccctggcttccgctagacccggtcctggcgtccctgctacatgggtcgagtcatgcacttgtccagtcggatacggcggtcagttttgcgagatgtgccttagcggataccgccgggagacccccaacctgggcccatattcaccatgtgtactttgtgcctgcaatgggcactctgaaacctgcgatcccgaaactggagtatgcaactgtagagacaacacagctggaccccactgtgaaaaatgctctgacggctactatggtgattcaacagccggtacatcttcagattgtcagccgtgtccttgccctgggggaagctcttgtgctgttgtaccaaaaactaaggaggtggtttgtactaattgccccactggtactacgggaaagcgctgtgagctgtgtgacgatggctatttcggcgatcctctgggccggaatggtcccgtgaggctatgtcggctgtgtcagtgcagcgacaacattgatccaaatgctgtaggaaactgcaaccgcctgactggagaatgtctgaagtgcatttacaacacagccgggttttattgcgatcgatgtaaagatgggttctttggtaatccgctcgcaccaaatcctgcagataaatgtaaggcctgcaattgtaatctgtatggcaccatgaaacagcaatcatcctgtaatcctgttaccggacagtgcgaatgcctcccacacgtcaccggacaggactgcggggcttgcgaccctgggttctataatttacagtctgggcagggctgcgagcgctgcgactgtcatgctctgggctctacaaatggccagtgcgatattcgcactgggcaatgcgagtgccagccgggaatcactggccagcactgcgaacgatgcgaggttaaccacttcgggttcggccccgaagggtgcaaaccttgtgactgccacccagaaggctccctgagcttgcaatgcaaagatgatggccgttgcgagtgcagggaggggtttgtggggaatagatgcgaccagtgcgaagagaattacttctataatcgtagctggccagggtgccaggagtgtcctgcctgctaccgtttagtgaaagacaaggtggccgaccatcgggtgaaactgcaagagttggagagtcttattgctaacctcggcactggggacgagatggttactgaccaggcctttgaagatcggctgaaggaggccgagagggaagtgatggatcttctcagggaggctcaggatgttaaggatgttgatcagaacctcatggatcgcctgcagagagtgaacaacaccctttcatcacagattagtcgactacagaatatcagaaataccatagaggagacagggaatcttgctgagcaagctagggcgcatgtggaaaatacagaaaggttgatcgagatcgcgtctcgtgaactggaaaaggccaaagtggctgcagccaatgtttccgttacacagccggaatctaccggagatcctaataatatgacactccttgcggaggaggccagaaagctggctgaacgacataaacaggaggccgacgacattgtgagagtcgctaagactgccaatgacacgtccaccgaggcttacaacctcctactgagaacgctcgctggagaaaaccagacagcattcgaaatagaggagctgaacagaaagtacgaacaggcaaagaatatcagtcaggacctggaaaaacaggccgccagggtacacgaagaagccaagagggcaggcgacaaagcggtggagatttatgcctccgttgctcagctttctccgttggacagcgaaacactcgaaaacgaggctaataacattaagatggaagccgaaaatttggaacagctcatagatcagaaactgaaagactatgaagacctccgcgaggatatgagaggaaaagagctagaagtgaaaaatcttttagaaaaaggcaagactgagcagcagaccgctgaccagctgctggcaagagccgatgcagcgaaggcccttgccgaggaggcagccaagaaaggtagagacactctccaggaagcaaacgacatcctgaacaacctgaaggacttcgacaggcgcgtgaatgataacaaaaccgccgccgaggaggcgttgcgtaaaattccagctatcaatcaaacgatcacagaggccaatgaaaagacccgcgaagcacaacaggccctcggaagcgctgctgccgatgcaactgaagccaagaacaaggcccacgaagctgagcggattgccagcgctgtgcagaaaaacgcaactagtacaaaagccgaggccgagcgaacattcgccgaggtcactgacctcgataacgaggtgaataatatgctcaagcagcttcaggaagctgaaaaagaactgaagagaaagcaggacgacgcagatcaggatatgatgatggcggggatggccagccaggcagcccaagaagctgagattaacgcacggaaggctaagaattcggttacatccctgctgagcatcatcaacgacctcctggagcagcttggtcagttggacacagtcgacttgaataagttgaatgaaattgaaggcactttgaataaagcaaaggacgaaatgaaggtttccgatctcgatagaaaggtttcagacctggaaaatgaggccaagaagcaggaagcagccatcatggactataaccgggacattgaggagatcatgaaggatattcggaacctcgaggatatcagaaagacgctccctagcggatgcttcaacactccctccatcgagaaaccttag

SEQ ID NO: 121919 - DNA, 3582 bp, synthetic construct
  misc_feature 1..3582: note = Description of Artificial Sequence: Synthetic coding sequence
  source 1..3582: mol_type = other DNA
atgcctgccctttggcttggctgttgcctgtgtttctcgttattgctccccgccgcccgagccacttcccggagagaagtctgcgactgtaacgggaagtcccgccagtgcatttttgaccgggaattacatcgtcagacggggaacggattccgatgcttgaactgcaatgataatacagacggcatacattgtgagaaatgtaaaaatggcttctatcgccatagggaacgagatcgctgcctgccatgtaattgcaactcgaaaggcagtctcagtgcccgatgtgataacagtggtaggtgttcctgtaaaccaggagtgacaggcgctagatgcgatcggtgcctgcccggcttccacatgctgaccgacgcaggatgcacccaagatcagcgactgctggattctaagtgcgattgtgaccccgccgggatcgctgggccttgcgatgctggtcggtgcgtgtgcaaacctgccgtaactggggaaaggtgcgacagatgtcgttctgggtattataacctggatggggggaaccctgaggggtgcacacaatgcttctgctatggccactcggcttcttgcaggtctagcgctgaatatagcgtgcacaaaatcacaagcactttccaccaggatgtggacggatggaaggcagttcagcgcaacggctccccagccaaattgcagtggagccagagacatcaggatgttttcagctccgcacaaagacttgaccccgtctattttgtggctccagctaagttcctcggcaatcagcaggtttcttacgggcagtctcttagttttgattaccgcgtggataggggaggtaggcacccaagcgcccatgacgtgatcttggaaggagctggcttgcgcatcacagcccccctgatgccactgggtaagaccctgccctgcgggttgacaaagacctatacgtttcgcctgaatgaacaccccagtaataactggtcgcctcagctgtcatacttcgaatacaggcgcctgctccgcaatttgacagcactgcgcatccgggcgacctacggagagtactcaactggatacatagataatgtaactttaatcagcgcccgaccagtttcaggggcccctgccccgtgggtggaacaatgtatctgtcctgtgggttacaaggggcagttctgccaagactgcgcatcgggctacaaacgggatagtgccagacttgggccctttggcacctgcattccctgcaactgtcagggcgggggcgcctgcgaccccgacacaggggactgttactctggcgacgaaaacccggatatagagtgtgcagattgtcctattggcttttacaacgatccacacgatcctagatcttgcaaaccatgtccctgtcataacgggttctcttgctccgtgatgcctgagaccgaagaggtggtgtgtaacaactgccctcccggcgtgactggtgccagatgcgagctgtgtgccgacgggtactttggcgacccattcggtgaacatggccctgttcgaccatgccagccgtgtcagtgcaataacaatgtggatcctagtgctagcggcaattgcgacagactgacaggtcgctgcttgaagtgcatccataacactgctggcatatattgcgaccagtgcaaagctggttactttggggacccgcttgcccctaaccccgccgataaatgtagggcctgcaattgtaacccgatgggcagtgagcctgtgggttgtcgttcagacggtacttgtgtttgcaagcccgggtttggaggccctaattgcgagcacggagccttttcatgcccagcctgttataaccaggtaaagatccagatggatcaatttatgcaacagctgcagcgtatggaagccctaatctctaaagctcaaggcggggatggagttgtgcccgacaccgagctcgagggtagaatgcaacaagctgaacaggcccttcaagatatccttcgcgacgcacaaatctccgagggcgcatctaggtctctgggtcttcagctcgccaaggtgcgcagccaggagaattcgtatcagtcccgactggacgatcttaaaatgaccgtggagcgcgtcagagcccttgggtctcagtaccagaatagagtcagagacacacatcgcctgattacacagatgcagctgtcgctcgccgagtccgaggcctcgctaggaaataccaatatccctgccagtgaccattacgtcgggcccaatggattcaaatccctagcgcaagaggccacaaggttagccgagtcacacgttgagtccgcctctaacatggaacaactgactagggagactgaggactattctaaacaggccctgagcctggtcaggaaggctctccatgaaggcgtaggcagtggaagtggaagccccgacggcgctgtagtccagggccttgttgagaaactggagaagactaagagcctcgctcagcaactcactagagaagccacccaggccgagatcgaagccgatagatcatatcaacacagcctgcggctactggactctgtcagtcgtctacagggagtgagcgatcagagcttccaggttgaggaggccaagcggatcaaacaaaaagccgattcacttagtagccttgtgacgcgacatatggatgagtttaaaaggacccagaagaacctgggaaattggaaggaggaggcccagcagctcttacagaatggtaagtccgggcgggaaaagtctgatcagcttctctcacgggctaacctcgcaaagtcccgggcgcaggaagccttgtcaatgggcaacgctaccttctacgaagttgagagcattctgaagaacctgcgcgagttcgacctgcaggtggataacagaaaagcggaggctgaagaggctatgaaacgtctgtcttacatctcccagaaagttagcgatgcatcagataagacacagcaagccgaaagggctctcggctccgcagccgccgatgcccagcgggcaaaaaacggcgccggcgaagccctagagatctcttcagagattgagcaggagataggcagtctgaatttagaggccaatgtcaccgccgacggcgcgctcgctatggaaaagggcctagcgtcactgaagtccgagatgcgggaggttgagggggaactggagcgcaaagagttagaatttgacacgaatatggatgctgtgcagatggtcatcaccgaagctcagaaagtggacacaagggccaaaaacgctggtgtcacaatccaggatacactgaataccttagacggattactgcacctgatggaccagcctctttctgttgacgaggaggggctcgtgctgcttgagcaaaaactcagccgtgccaagactcagatcaactcacagctgaggcctatgatgagcgagttagaggagagagcaagacaacaacgtggccacctccacctactagaaacatccatcgacggcatccttgcagatgtcaagaacctcgagaatattcgcgataacctacctccaggatgctacaacacacaggctctggagcagcagtag

SEQ ID NO: 121920 - DNA, 3336 bp, synthetic construct
  misc_feature 1..3336: note = Description of Artificial Sequence: Synthetic coding sequence
  source 1..3336: mol_type = other DNA
atgccagcgctgtggctgggttgttgcctatgcttttccctgcttctcccagctgcccgggccaccagcaggagagaagtgtgtgattgtaacggaaaatccaggcagtgcatctttgatcgcgagctgcatcggcagactggcaatggctttaggtgcctgaactgtaacgataacaccgatggaattcattgcgaaaagtgcaaaaacgggttctataggcatcgggagcgagataggtgtctaccttgtaattgtaattccaaaggctcattgagcgcccggtgtgacaactcgggacgctgtagctgtaagccaggggtaacaggggctagatgtgatagatgtcttcctgggttccacatgctgaccgacgcgggatgcactcaagaccagcgtctcctggatagtaaatgtgattgcgaccctgctggcattgccggaccctgtgatgcaggcagatgcgtgtgtaaaccagccgtcactggcgaacgctgcgatcgttgtaggtccgggtactacaatctggacggtggaaacccagaaggctgcactcagtgcttttgttacggacactccgccagctgtcggtcttctgccgaatacagcgttcacaaaataacgagcaccttccaccaagacgtggacggatggaaggccgtacagcgaaacggatcacctgctaaactacagtggagccagaggcaccaggatgtgttctcttccgctcagagacttgacccagtctactttgtcgcgccagcgaagttcctgggcaatcagcaggtgtcttatggccaatcattatcttttgactaccgggtcgatcggggcggcaggcatccaagcgctcatgacgtgatactagagggcgccggattgaggataacagcaccgctaatgcccctgggcaagacgctaccatgtggcctgacgaagacctacacctttaggttgaatgagcatcccagcaacaattggtcaccccagttaagttactttgagtatcggcgactactgaggaatctgactgccttacgcattcgcgctacctatggggagtacagtacaggatacattgataatgtgacgctgattagtgctcggccagtctccggtgccccggcaccatgggtggagcagtgcatttgtccagtcggttataagggtcagttttgtcaggattgcgcctccggctacaaaagagacagtgccaggcttggaccattcggcacatgcataccctgtaactgccagggcggcggggcctgtgatccggatactggcgactgctattcaggtgatgagaaccctgacatcgagtgtgctgactgcccaatcggattctacaatgatccccatgatccacggagctgtaagccatgtccttgccataacggcttctcttgtagcgtcatgcccgagaccgaggaggtggtttgcaataattgccctccgggagtgacaggtgcgagatgcgaactgtgcgctgatggatactttggggacccttttggagaacacggtcccgtgaggccatgtcaaccctgccagtgcaacaataacgtggacccttccgctagcgggaactgcgaccggctgactggacgctgcctgaagtgcatccacaacactgctggcatctactgtgaccagtgtaaggccggatattttggggaccctttggctcccaacccagctgacaagtgtcgagcctgcaattgtaatcctatggggtcagaacccgtgggatgcagaagcgacgggacgtgcgtctgtaaaccaggttttggcggacctaactgcgaacatggcgcattttcttgtcctgcatgctataatcaagtgaagattcagatggaccaattcatgcaacaactgcaaaggatggaagcactgatatctaaggcacagggtggtgacggcgtggtcccagataccgagctggaagggcggatgcagcaggctgaacaggctctccaagatattctcagagacgcccaaatctccgagggcgcctcccgatccctcggcctgcaacttgccaaggttcgcagccaggagaacagttaccagtctcgcctggacgacctgaagatgaccgtggagcgggtccgggcactaggatcccagtatcagaaccgggtccgcgacacccatcgactcataacacagatgcaactgtccctggctgagtccgaggcgtccctggggaataccaacatcccagcctccgatcactacgtcggacctaacgggttcaagagtctggcacaggaagccacacggttagcggagagccatgtggaatccgcctcaaacatggagcaactaacgcgagaaaccgaggactacagcaaacaggccttgtcccttgtgaggaaagcgcttcatgaaggagtggggtccggttcagggtctcctgacggtgccgtggtgcagggacttgtggaaaagctggagaagactaaaagcttggcccagcagttgacccgagaggcaacccaggctgagatcgaagccgatcgtagctatcaacacagcctacgcttgctggacagcgtgtctcggctgcagggggtctccgaccagtcttttcaagtggaggaagctaagcgtatcaagcaaaaggctgactcactctcatctctggtgacacggcatatggatgagtttaagagaacccagaagaatttgggaaactggaaagaagaagcacagcagctgctgcagaacggcaaatcgggccgggagaagtccgaccagctgctcagccgggcaaatctggctaaatccagggcccaggaagcgcttagcatgggaaatgctactttttatgaagtggagtcgatccttaagaatctcagggagtttgacttacaggtcgataaccggaaggctgaggctgaagaggccatgaaacggctctcctacatctcccaaaaggtaagcgatgcctctgataagacgcaacaggccgagcgagcattgggctcggctgcagctgatgctcagagggccaaaaatggcgccggagaagctctggagattagcagcgaaatcgaacaggaaataggaagcctgaacctggaggcaaatgtcaccgctgatggggctttggcaatggagaagggcctggcgagcctgaaatccgagatgcgcgaggtggagggagagctggaaagaaaggagttagagttcgataccaatatggacgccgtccaaatggtcatcactgaggcacagaaagtggacacccgtgctaaaaatgcaggcgtcacaatccaggatactctgaacaccttggacggcttgctgcatctgatgggaatgtag

SEQ ID NO: 121921 - DNA, 3033 bp, synthetic construct
  misc_feature 1..3033: note = Description of Artificial Sequence: Synthetic coding sequence
  source 1..3033: mol_type = other DNA
atgccagctctttggctcggctgttgcctctgtttctcgctattgctgcctgctgcccgagcgacttccagacgggaggtttgcgattgtaacggaaagtcacggcagtgtatctttgatcgagagctgcacaggcaaaccggcaacggtttcaggtgtctgaactgcaacgacaacacggacggtattcactgcgagaaatgcaagaacggcttctacaggcaccgggaaagagaccgatgcttgccctgcaattgtaacagcaagggctcactgtcagcgagatgtgacaacagcgggcggtgcagctgcaagcctggtgtgaccggagccagatgtgaccgctgcctcccaggcttccatatgctcaccgacgcggggtgcacacaggatcagcggctgctggatagtaagtgcgactgcgacccagcgggaattgccggtccttgcgatgctgggcggtgcgtgtgcaagccagccgttacaggagaacggtgcgaccggtgcaggagcgggtactacaacctggacggtggaaaccccgaaggctgcacacaatgtttctgctacggtcattcggcctcatgtcgcagctcggctgagtatagtgtacacaagattacaagtacatttcaccaagacgtcgacggatggaaggccgtccaacgaaacggttctccagctaaactgcagtggagtcagcgacatcaggatgtgttcagtagcgctcagcggctggatcccgtgtatttcgtagcaccagccaagttcttaggcaaccagcaggtgtcctacggccagtctctttccttcgactacagagtggatagagggggccgacaccccagtgcccacgatgttatccttgagggcgccggactgcgcatcacagcgcccctgatgccactcggcaagactctgccttgtggattgacaaagacctataccttccggctgaatgaacatccttccaataattggtcaccccagctgtcttattttgaatacagacgcctgctgcgcaacctgaccgctctccgcattcgcgctacctatggagagtatagcactggatatatcgacaatgttacgcttatttctgccagacccgtgtccggggcccctgcaccctgggtggagcagtgcatttgccccgtggggtataagggtcaattttgccaggactgcgccagcggttacaaacgcgacagcgcgagactgggcccctttggaacctgtattccatgcaactgtcagggaggtggcgcttgtgaccccgatactggagattgctattccggagacgagaatcccgatatcgaatgcgccgattgtccaatcgggttctataatgacccacatgacccccgctcatgcaagccctgcccttgccacaacggatttagctgtagtgtgatgcctgagaccgaagaagtcgtgtgcaataactgtcctcctggtgtaaccggcgcgcggtgcgagctttgcgccgatggctacttcggagatccgtttggtgaacatggacctgtgcgaccctgtcagccctgtcaatgtaacaacaacgtcgatccttcagcgagcgggaattgcgaccgcctgacgggtcgatgccttaaatgtatccacaacactgcaggcatttactgcgatcaatgcaaggctgggtattttggtgatccacttgccccgaacccagccgataaatgccgagcctgcaattgtaacccaatggggtcagagcccgtgggctgccggtccgatggtacctgcgtctgcaaacccggcttcggcggcccaaattgtgaacacggcgcgtttagctgtccggcttgttacaaccaggtcaagatccagatggaccagttcatgcagcagctgcagaggatggaggccctcatcagtaaggcccaaggaggagacggcgttgtacctgatactgaactcgaagggcgcatgcagcaggcggagcaggccctccaggacatcttacgcgacgcacagataagcgagggggccagcaggtccctagggctccaattggctaaggtgagaagtcaggagaactcctatcagagtcgcttggacgatctgaagatgactgtcgagcgtgtcagagcactgggtagtcagtaccaaaatcgagtcagagacacacatcggcttatcacgcagatgcagctaagccttgccgaaagtgaggctagcctggggaacacaaatatcccagccagcgatcactacgtgggcccgaacgggtttaagtccttggcccaggaggctactagactggccgaatctcacgtggagtcagcttccaatatggagcagcttactagagaaacagaagattactctaagcaggccctgagtcttgtgcgtaaggccctgcacgagggagttggctcaggctctggctcacctgatggagccgtggtgcagggcctcgttgaaaagctggaaaagactaaatccctggcccagcagctcacccgggaagcaacacaggccgaaattgaggcagaccgttcctatcagcatagcctgcgcttgctggatagcgtgtccaggctgcagggggtgtctgaccagagctttcaggtcgaagaagcgaagcgaatcaaacaaaaggccgattccctctccagcctcgtgacgagacatatggatgaatttaaacgtacacagaagaatctgggaaactggaaagaggaggcccagcagctgctccagaatggaaaaagcggcagggagaagtccgatcagctgttgagtcgggctaatctcgctaaatcccgcgctcaggaggctcttagcatggggaacgccactttttatgaggtggaaagcatcttaaaaaacttgcgggaattcgacttgcaagtagacaaccgtaaggctgaggcttttcccagccaggatcccgaccagcaacccaccgccgcccatgacgtccgagcaggaagagagggtacttcggctgaggggccgccaccgttcgctggcgataagcatcgttgggactcaggctag

SEQ ID NO: 121922 - DNA, 1590 bp, synthetic construct
  misc_feature 1..1590: note = Description of Artificial Sequence: Synthetic coding sequence
  source 1..1590: mol_type = other DNA
atggccgccgccgccctgctgcttggtctggccttgcttgccccccgggccgcaggagcaggaatgggtgcctgttatgacggggcaggaagaccgcagagatgccttccagtgtttgagaatgccgcgtttggtcgtctggctcaggcctctcatacctgcggatcacctccagaggatttttgtcctcatgtcggagcagcgggcgcaggggctcattgccaaaggtgtgacgcggccgacccacaacgccaccacaacgcatcatatttgaccgacttccactcgcaggatgagtctacctggtggcagagccctagtatggcatttggcgtccagtaccccaccagcgttaatatcacattaaggctcgggaaagcctacgagattacctatgtgcgactgaaattccacaccagccggcccgagagttttgccatttacaaacgctcgcgcgctgacgggccatgggaaccttaccagttctattcggcatcgtgccagaagacttacggccggcccgagggacagtacttgcggcctggcgaggacgagcgagtcgccttctgtacttctgagttctccgatatctcacccctatcagggggaaatgtggctttctcaactttggagggcaggcccagcgcttacaatttcgaagagtcaccaggtttgcaggaatgggttactagcacggaactactcatttcccttgataggctgaatacctttggagatgacatcttcaaagaccccaaggtactccagtcttactattacgcagtgtctgatttctctgtcggcggtagatgtaagtgtaatggccatgcatccgaatgtgggcccgacgttgctggacagctcgcctgtaggtgtcagcacaacaccactggaaccgattgcgagagatgcctgcctttcttccaggaccgcccttgggcgaggggaactgctgaagccgcccatgagtgtttgccatgcaattgttctggccgcagtgaagaatgcactttcgacagagaactattcagaagcacagggcacggaggacggtgtcatcactgcagagatcacaccgccggacctcactgcgagcgctgccaggagaacttctatcattgggatcctaggatgccgtgtcagccttgcgactgtcagtccgccgggtcactgcatttgcagtgcgatgacacaggaacatgtgcctgtaaaccaactgtgacaggatggaaatgcgacaggtgcctgccaggatttcacagtctgtccgagggggggtgtcggccgtgcacatgcaatcccgccgggtcattagatacgtgtgaccctcggagtggccggtgcccctgcaaggaaaatgtggagggcaatctctgtgaccggtgcaggcctggcacttttaatctccagccgcataaccccgccggccgttcatgcaggtccagagctagtcgcgtcacatcacctcggagcgctcctacaaaccggacatggcgccctttctgcaccgcctgcccccgcacggttcccgcaggaagcgagggctgccctgacccacggcatacgctgccccatcttttgttcacatag

SEQ ID NO: 121923 - DNA, 4728 bp, synthetic construct
  misc_feature 1..4728: note = Description of Artificial Sequence: Synthetic coding sequence
  source 1..4728: mol_type = other DNA
atggccgctgcagcgctgctcctggggctggcacttttggccccaagggccgctggggcagggatgggcgcatgttacgacggcgccggccgaccccagcgttgtctccccgtttttgagaatgctgccttcggccggctggctcaagcatcccatacctgcgggtccccccctgaagacttctgtcctcacgttggcgccgctggcgcaggcgctcactgccaaagatgtgatgccgctgatccgcagcgacaccacaatgccagctacctgacggactttcattcccaggacgagtcaacttggtggcagagcccaagcatggccttcggcgtccaatacccgacgtctgtgaatattacattgaggctggggaaagcttatgaaattacctatgttagactgaaatttcatacctccaggcccgaatccttcgccatttacaaaaggtcgagagcggatggcccttgggaaccctaccagttttattccgcgtcatgccaaaagacctatggacgccccgaggggcaatacctgcgaccaggcgaggacgaacgcgtcgcattttgtacatccgagtttagtgacatctctccccttagcggtggaaacgtggcattttccaccctggaggggcgtcccagcgcttataactttgaagaaagccctgggctccaagaatgggttacaagtacagagttgctaatcagtctcgacaggctcaacaccttcggggacgatatatttaaagatcccaaagttctccaatcctactactatgcagtgtctgactttagcgtgggcggccgatgtaagtgcaatgggcatgcttccgagtgcggtcctgatgtggccggtcaactcgcatgcagatgccagcacaacactacgggaaccgactgcgaacgctgcttgcccttctttcaggatcgcccatgggcaaggggaaccgccgaagcagcccatgaatgcctcccctgcaattgctcagggcggagcgaagaatgtaccttcgaccgcgaactgttccggtccacaggacatggcggtcggtgtcaccattgcagagaccacaccgctgggccccattgtgagaggtgccaggagaacttctatcattgggatccaaggatgccctgtcagccgtgtgattgtcaatcggccggttcactccacttgcaatgcgacgacacaggcacgtgcgcttgcaagccgaccgtaacgggatggaagtgtgaccgctgtctgccgggcttccacagtctgagtgaaggggggtgtcgaccatgcacctgcaatcctgctggatctctggacacatgtgatccccggagcgggcgttgcccttgcaaggagaatgtggaagggaatctctgcgaccgatgcaggccaggaacattcaatctacagccccataatcccgcaggctgcagtagctgtttctgttatggacactccaaggtttgcgcaagtacggcccagttccaggtgcatcatattctctctgactttcatcagggcgccgagggttggtgggccaggagcgttggtggctccgaacaccctccacagtggtcgcctaatggtgtgctgcttagtccggaagacgaagaagaactgactgctcctgaaaagtttttaggggatcaacgattttcatatggacagccactgatactcacgttccgggtgccacccggcgattctcccctccctgtgcagcttaggctggaagggaccgggctggctctttcactgaggcactctagcctctcaggtccccaggatgccggccatcccagggaagtagaacttagatttcacctgcaggagacaagcgaagacgttgcgcctcctctgcctcctttccatttccagcggcttctggcaaacctgacttcactcagattacgagtgagtccgggcccaagtccggctgggccagtgttcttaaccgaggtgcgactgactagcgcaaggcctgggttgtctccaccggcatcctgggttgagatctgttcatgcccaacaggttatactggccagttttgcgagagctgcgcgccaggttacaagcgcgagatgccgcagggcggcccttatgcgagttgtgtgccatgtacctgcaaccaacacggaacatgcgacccgaatactggaatttgcgtttgctcccaccatactgagggaccgagctgcgagcgctgtctgcctggtttttatggtaacccatttgccgggcaggcagatgattgccagccgtgcccctgcccaggtcagtccgcatgtactacaattcctgagagcagagaggtcgtctgcacacattgcccaccagggcaacgggggcgaagatgtgaagtgtgtgacgacgggttttttggcgaccccctggggctgtttggacatcctcaaccttgtcatcaatgccagtgctcaggcaatgtcgacccaaatgcagtcgggaactgtgaccccctctctggacactgtctgaggtgcttgcataacacgactggagatcactgcgagcactgtcaggagggattttacgggtcagccctggcacctcgccctgcggacaagtgcatgccctgttcttgtcatcctcaaggcagcgttagcgagcagatgccatgtgatccagtgactggtcagtgcagctgtcttccgcatgtaactgctagggactgcagtcggtgttatccaggattctttgacctacagcctgggagaggatgtaggagttgtaaatgtcaccctcttggcagccaagaagaccagtgccaccctaagaccgggcagtgtacttgtcgcccaggggtcactggtcaagcttgtgaccgctgccagctcggcttttttggtttcagtatcaaggggtgccgtgcctgtcggtgcagccccttaggcgctgctagcgcccaatgtcacgaaaatggtacttgcgtgtgccgcccaggtttcgagggttataagtgcgaccggtgccatgataattttttcctaaccgccgatggtacccattgccaacagtgccccagttgctacgccttagtcaaagaggaagccgctaagctgaaggccagacttacacttaccgagggttggctgcagggatccgattgcggttcaccctggggacccctggatatcctgctgggtgaagcacctaggggggatgtgtatcagggacatcatctcctgcctggcgctcgcgaggcattccttgagcagatgatgtccctcgagggagcagtgaaggccgctcgtgagcaattacagcggctgaataagggagcccggtgcgctcaagctggcagtcagaaaacctgtacccagctcgccgacctggaggcggttctagagtcttccgaagaggagattctacacgccgctgctattctggcaagcttagaaatcccccaggagggtccttcccagcctaccaagtggtcccacctggccacagaggcgcgcgcgctagcccgatctcatcgcgatacggcaactaagatcgcagccactgcttggcgcgcgctcctggccagcaacacatcctatgccctactttggaatctgctggaaggcagagtggcattagaaactcaacgagacctggaggataggtatcaggaggtgcaggccgcgcaaaaagcactccggactgcggtggcagaagtgctgcctgaggcggagtcagtcctagctacggtgcagcaggtgggcgcagacacggcaccctatttggctttgctggcctcaccaggggctctgcctcagaaatctcgggccgaggacctggggctcaaggccaaggcattagaaaagacggttgcctcctggcagcatatggctaccgaagccgccaggactctgcaaactgcagcccaggcaacccttcggcagactgagcctcttaccaagcttcatcaggaagcccgggccgccctgacccaggcttccagctccgtgcaagctgcaaccgtcacggtcatgggagcacggacgctcctggctgacctcgaaggaatgaagctgcagtttccccgccctaaagaccaggccgctctgcagagaaaagcggatagcgtctcggatcgattgttggccgacaccagaaaaaaaacaaagcaggctgagcgcatgttaggaaatgccgctcctctgtccagtagcgctaagaaaaaaggccgagaggcagaggtgctcgccaaagatagcgctaagttggctaaagcattactgcgggaacggaagcaggctcataggagagcatcccggctgacatcccagacgcaagcaaccctccagcaggcctctcagcaggtgctggcctctgaggctcggagacaagaactagaagaagcagaacgcgtgggcgcaggactttctgagatggaacagcagatccgcgaaagtaggattagcctagagaaggacatcgaaaccctgtccgagctactggcacggctgggcagtctggacactcaccaggcgcctgcccaggctctgaacgaaacacagtgggcactcgagcgcctgcgtctgcaattgggctcgcccgggtcattgcagcggaagctaagtcttcttgaacaagaatcacagcagcaagagctgcagatccagggctttgagagcgatctagccgagattcgggccgacaagcagaatctggaggccatcttgcattccttgcccgagaactgcgctagctggcagtag

SEQ ID NO: 121924 - DNA, 459 bp, synthetic construct
  misc_feature 1..459: note = Description of Artificial Sequence: Synthetic coding sequence
  source 1..459: mol_type = other DNA
atgcgcctccctctgtctcacagccctgaacatgtcgagatggcacttcttagcaacatcctcgcggcttattcttttgtgagcgaaaacccagaacgggctgcactgtatttcgtctcgggagtgtgcatcggcctggtgctgaccttggcagccttagtgatccgtatttcctgtcatactgattgtaggcgtagaccaggcaagaagttcctgcaggatagagagtcctcttctgatagtagcgattccgaagacgggagcgaggacaccgtttcagatctgtccgttcgccgccacaggcgattcgagcggaccctcaacaaaaacgtcttcaccagcgccgaggaactagaacgcgcccagcgcctggaagaacgggagcggatcattcgggaaatatggatgaacggccagccagaggtaccaggcactcgctcgctaaacagatactattag

SEQ ID NO: 121925 - DNA, 1200 bp, synthetic construct
  misc_feature 1..1200: note = Description of Artificial Sequence: Synthetic coding sequence
  source 1..1200: mol_type = other DNA
atggcgcagcgggccttcccaaatccttacgctgattacaataaaagtcttgcagaaggctatttcgatgccgcggggaggctgacacctgaattctcccaacgactgaccaacaaaatccgagagctgctgcaacaaatggagagaggtctgaagagcgccgatccccgcgatggaactgggtacacaggctgggcagggattgccgtgctgtacctacatctctacgatgtctttggagacccggcatatctccagttggcacatgggtatgtgaagcagtcacttaactgtcttacaaaaagaagcatcacgttcctctgcggtgacgcagggcctctagccgttgcggcagtgctgtatcataaaatgaataacgaaaagcaggcggaagactgcatcactcggcttattcacctgaacaagattgaccctcacgccccaaacgagatgctgtacggtaggatcggatacatctacgcgctgctatttgtgaataagaacttcggcgtcgagaagatcccgcagtcacatattcaacagatctgtgaaacgattctgacctcaggggagaatttagcacgcaaaagaaacttcactgctaagtccccactaatgtatgaatggtaccaagaatattatgtgggcgccgctcatggcctcgcgggaatctattattacctgatgcaaccctccctgcaggtttcccagggcaaactccactctctcgtgaaaccgtctgtcgactatgtgtgccagctcaagttccctagtggcaactacccaccatgtatcggggataacagggatctgttagtgcattggtgtcatggcgcgcccggcgtcatctatatgctcattcaggcctataaagtattcagggaggaaaaatatctgtgcgacgcttatcagtgtgcggacgtgatctggcaatatggactgctgaagaaaggatatggcctctgccatgggtctgctggcaacgcttacgcgtttctgacattgtataacctaacccaggacatgaaatacctctaccgggcatgcaagttcgcagaatggtgcctcgaatatggcgaacacggctgtcggaccccagacactcctttttccctgtttgaaggaatggccggcacgatttattttttggccgatctccttgtccctaccaaagctcgattccccgcgttcgaactgtag

SEQ ID NO: 121926 - DNA, 1200 bp, synthetic construct
  misc_feature 1..1200: note = Description of Artificial Sequence: Synthetic coding sequence
  source 1..1200: mol_type = other DNA
atggctcaacgcgccttcccaaatccctatgccgactacaacaagtctctggctgagggttactttgatgccgccgggaggcttaccccggagtttagccagaggctgactaataagatccgggaacttctgcagcagatggagcgcggcctcaaatctgctgacccgcgggacgggacaggttatactggctgggctggcatcgcggtcttgtatctccacctttacgatgtctttggggatccagcctacctgcagctcgcccatggttatgtcaagcaatccctgaattgtcttactaagagatcaattacctttctatgtggggatgctggaccacttgcggtggccgccgttctgtaccacaaaatgaacaatgagaaacaggcagaagattgcattacgcggcttattcacctgaataagattgacccacacgcccctaatgagatgctgtacgggaggattggttacatttacgctttgctcttcgtgaacaagaacttcggcgtcgaaaaaattccccaatcccacatccagcagatttgtgagactattctgacaagtggagagaacctggctagaaaaaggaatttcaccgctaagtctcccctgatgtacgagtggtatcaagaatactacgtgggggcggctcacgggctcgctggcatctattactatctgatgcagccaagcctgcaagttagccaagggaaattgcacagcttggtcaagcctagtgttgactacgtgtgtcaacttaagtttccttccgggaattaccccccttgtataggcgataatagggacttgctggtgcactggtgtcacggagccccaggcgtgatctacatgcttatccaagcgtacaaagtcttccgggaggaaaaatacctgtgtgacgcctatcaatgtgctgacgttatctggcagtatggcctcctgaaaaaaggatacggcctgtgtcatggaagcgccggaaacgcctatgcctttctgaccctttataacctgactcaggacatgaaatatctgtacagggcatgcaagttcgccgaatggtgcctggaatacggcgagcacggttgcagaacccctgataccccttttagcctgttcgaaggtatggccggaacgatatactttcttgctgatttgctggtcccaaccaaagctcgcttccctgccttcgaactctag

SEQ ID NO: 121927 - DNA, 1200 bp, synthetic construct
  misc_feature 1..1200: note = Description of Artificial Sequence: Synthetic coding sequence
  source 1..1200: mol_type = other DNA
atggcgcagcgggcatttcctaatccttatgcggactacaataaatctttggcagagggatatttcgacgccgcaggccgtcttacccccgagttctctcagaggctcactaacaaaatcagagagctgcttcagcagatggagcggggtcttaagtcagctgatcctagggacggaactggctacaccggttgggcagggatagccgtcctttatctgcatctttatgatgtgttcggagatcctgcctatttgcaactggcccatgggtacgtaaagcaatccctgaattgcctgacaaagcggtctatcacctttctctgtggagacgccggacccctcgcagtggccgctgtgctataccacaaaatgaacaacgagaagcaggctgaagactgcataacccggctgattcatctgaataaaatcgacccacatgcacctaatgagatgctgtacggtaggattgggtatatttatgctctccttttcgtgaataagaactttggcgtagagaagataccccagtctcatatccagcagatctgtgaaaccattctgactagcggcgagaaccttgctcgcaaaaggaacttcaccgccaaaagcccattaatgtatgaatggtaccaagagtactatgtgggggccgcccacggactggccggaatctattactacctcatgcagcccagcttgcaggtgtcgcaaggcaagcttcattccctcgtgaagccctccgttgattacgtgtgtcaacttaaattccccagcgggaactaccctccctgtatcggcgacaatcgcgatcttctggtacattggtgtcacggtgcccccggagtcatttatatgctcatccaggcttataaagtgtttcgcgaagaaaagtacctctgtgacgcctaccagtgtgctgacgtgatctggcaatatggtctgctgaagaagggctacgggttgtgccatggaagtgccggtaatgcatacgcatttttgacattgtacaatctcacgcaagacatgaaatacttgtatcgggcctgcaaatttgccgagtggtgtcttgaatatggggagcatggctgccgaacgcccgatactccattttctctctttgagggaatggccgggacgatctattttctcgccgacctcttagtgcctaccaaagccaggttcccggcttttgagctatag

SEQ ID NO: 121928 - DNA, 591 bp, synthetic construct
  misc_feature 1..591: note = Description of Artificial Sequence: Synthetic coding sequence
  source 1..591: mol_type = other DNA
atggcccagagagcatttcccaacccatatgctgattataataaatcgctcgccgagggttatttcgatgctgcaggtagattgacaccagaatttagtcagcgattgacaaataagatcagagagcttcttcagcagatggagcgcggattgaaatctgccgacccccgcgacggaaccggatataccggctgggccggcattgctgtcctgtacctgcatctgtacgatgtttttggggatccggcctacctgcagcttgcccacggttatgtgaaacagtcccttaattgcctgacaaaaaggagcattacattcctttgtggcgacgctggcccacttgccgtagctgccgtcctttaccacaagatgaataatgagaagcaggctgaagactgcattacaagactgatccacctcaacaagatcgatccccacgctccaaacgagatgctgtatggacgaatcggttatatctacgcgctgctctttgtgaacaaaaactttggggtggaaaagattcctcagtctcatatccagcagatttgtgagacgatccttacatcaggcgaaaaccttgctcgcaaatag

SEQ ID NO: 121929 - DNA, 1200 bp, synthetic construct
  misc_feature 1..1200: note = Description of Artificial Sequence: Synthetic coding sequence
  source 1..1200: mol_type = other DNA
atggcccagcgcgctttccctaatccctatgctgattacaacaaatccctcgcggaggggtacttcgatgcggccggtcgcctcacgccagagttttcacagaggctcacaaacaaaattcgggagttgctgcagcaaatggagcgaggtttgaaatcagcggacccgcgggacggaaccggctacacaggctgggccggcatcgctgtgctatacctgcacctgtacgacgtgtttggagatccggcatatcttcagctcgcgcatggttatgtgaaacagtccctaaattgcctgactaaaaggagcatcacctttttatgcggcgatgccgggcccttggctgtggctgccgtcctgtatcacaaaatgaataatgaaaagcaggccgaagactgtatcacaaggctcattcaccttaataagatcgaccctcatgctcccaacgagatgttatatggacggattggatacatttatgcactgctctttgtcaacaaaaactttggggtggagaagattccacagtctcatattcagcagatctgcgagacgattctcacgtccggagagaatctggcccgcaaacgcaattttacagcgaagagcccactcatgtatgagtggtatcaggagtactatgtgggagccgctcacggactcgcaggaatatactactacctgatgcagccttcgctacaggtttcacagggcaaattgcacagtcttgtgaagccgtccgtggactacgtgtgtcagcttaagttcccgtctgggaattaccccccctgcatcggcgacaaccgggaccttcttgtgcactggtgtcatggagcgcccggcgtgatctatatgttgattcaggcttacaaagtgtttagggaggagaagtatctgtgcgacgcatatcagtgtgctgacgtgatctggcaatatgggctccttaaaaagggatatgggctgtgtcacgggagcgcaggcaatgcatacgcattcttgaccctatacaatctgacccaggatatgaagtatctatacagagcttgcaagtttgcagagtggtgtttagaatatggggagcacggctgtaggacacccgacaccccattctccctattcgaagggatggcaggcacgatctacttcctggccgatctcctggtcccaacaaaagctaggttccctgccttcgagctttag

SEQ ID NO: 121930 - DNA, 1353 bp, synthetic construct
  misc_feature 1..1353: note = Description of Artificial Sequence: Synthetic coding sequence
  source 1..1353: mol_type = other DNA
atgggagagaccatgagtaagcgactgaaactccacctcggaggggaagccgagatggaggagagagccttcgtaaatcccttccccgactacgaggcagctgctggggctctgctggcctccggggcagccgaagaaacgggctgtgtgagaccccccgccaccacagacgagcctggactgccatttcatcaagatggcaaaattatccacaacttcatccggcgcattcagacgaagattaaagatctgctgcagcagatggaagagggactgaaaaccgccgacccccatgactgttcagcttacaccggttggactggcatcgctctgttgtacttgcagctctacagagttacctgcgatcagacttatctgctgaggagtctcgactatgttaaaaggactctcaggaatctgaacggccgaagagttacttttctttgtggagatgccggcccccttgccgtgggtgctgtaatatatcacaagctgcgatccgactgtgaatcccaggaatgtgttaccaagctactgcagctgcagcgctccgtcgtatgccaggagtctgaccttcccgatgaactcctgtatgggcgcgcaggttatctgtacgctcttttgtacctgaatactgagatcggaccaggcaccgtctgtgaatccgcaattaaggaggttgtcaacgctattattgaatctggaaagaccctgagcagagaagagcgtaagacagagaggtgccccttactttatcagtggcatcgcaagcagtacgtgggtgcagcgcacggaatggccggaatatattacatgcttatgcaacctgctgccaaagtcgaccaagaaacactgacagagatggtgaagccaagcatcgactatgtgcggcataaaaaatttcgcagcggcaactacccttcttccttatcaaatgaaactgaccgactggtgcactggtgccatggtgcgcctggcgtgatccacatgttgatgcaggcctataaggtcttcaaagaagaaaagtatctgaaggaggccatggagtgctcagacgtaatttggcagcgagggctgctgcgcaagggatacggcatatgtcatgggactgccggtaatggatactcattcctctcgctctaccggctgacccaggataagaagtacctgtaccgtgcttgcaaattcgctgagtggtgcttagactacggtgcccacggatgtcggattccagatagaccttatagtctgttcgagggtatggctggcgcaatccatttcctgtcagacgtactagggccagagacttccagattcccggcctttgaattggacagttctaaacgcgactag

SEQ ID NO: 121931 - DNA, 2199 bp, synthetic construct
  misc_feature 1..2199: note = Description of Artificial Sequence: Synthetic coding sequence
  source 1..2199: mol_type = other DNA
atgactgaaggcacatgcttgcggagacggggagggccatataaaacagagccagcaaccgacctcggaaggtggaggctcaattgtgagcggggccggcaaacgtggacgtacctgcaggatgaacgggccggaagggagcagactggcctggaagcctacgcccttggcctggacaccaaaaactattttaaggatctaccgaaagcacatacggctttcgaaggcgctttaaacggcatgactttctacgtgggtctccaggccgaggacggccactggacaggcgactatggtggccccctgttccttttgcctgggctactcattacctgccacgttgctcgcattcctttgcccgccggttaccgcgaagaaatcgttagatatttaagaagtgttcagctgcccgacgggggatggggtctgcatatcgaggacaagagcactgtcttcgggaccgcgttgaattacgtcagtctaagaatactgggagtcggcccggacgacccagacctcgtgcgggcgagaaacattctacacaaaaaaggaggcgctgttgcaataccatcttggggaaagttctggttggccgtgctgaacgtttatagctgggagggtctgaacactctttttcccgagatgtggttatttcctgactgggcgccggcacacccttcaacgctttggtgtcactgtcgccaggtgtacctgccaatgagttattgctacgccgtgagattgtctgccgctgaagatccgttggtacagtcacttaggcaggaactgtatgtagaagacttcgccagcatcgattggctggctcagcgcaataatgtcgcacccgatgaactctacactcctcatagctggctactgcgagtcgtctatgccctgctgaacctgtacgaacatcaccactcggcacacctcaggcagcgagcagtgcagaagctttacgagcacatcgtggccgacgatcgtttcaccaaatccatttccattggacccatatcaaagaccataaacatgctggtcagatggtacgttgacggaccagcctccacagcatttcaggaacacgtgtccagaattccggactacttgtggatgggattggacgggatgaaaatgcaggggaccaatggctcccagatttgggacacagcctttgcaatacaggctctgctcgaggccggcgggcatcaccgacccgagttcagttcttgcctccagaaagcacatgagttcctccgtctctcacaggtccctgacaacccgccagactaccaaaaatactaccggcagatgaggaaaggggggttttctttctcaaccctcgattgtggctggatcgtatccgactgcaccgcagaggcattgaaggcagtcctcctcctgcaagaaaaatgcccacacgttacagagcatatccctagagaaaggttgtgtgatgcagtcgccgtgttgcttaatatgagaaatcccgatggtggcttcgctacatacgaaactaagagggggggccacctgctggaacttctgaatccgtctgaggtgttcggggacattatgatcgattatacttacgtggagtgtacctccgcagtaatgcaagcactaaaatacttccacaaacggttcccagaacatagggccgcagagatcagggaaaccctgacgcagggactcgagttctgccgacgtcagcagagagccgatggctcttgggagggctcttggggggtatgttttacctatggaacgtggtttggccttgaagcctttgcctgtatggggcagacttatcgcgacggtaccgcttgcgcagaggtgtccagggcctgtgattttttactctctcgccagatggctgacggggggtggggggaggatttcgagtcttgcgaggagcgccggtacctccagtctgcacagtctcagattcataacacatgctgggccatgatgggcttgatggctgtgcgccacccggacattgaagcacaggagaggggtgtccgctgcttgcttgaaaagcagctgcctaatggggattggccgcaggagaatatagccggcgtatttaacaaatcatgtgcaatcagttatacctcttacagaaacatctttccaatctgggcgcttggccgttttagccagctttatcccgagcgcgctctcgctggccacccctag

SEQ ID NO: 121932 - DNA, 2199 bp, synthetic construct
  misc_feature 1..2199: note = Description of Artificial Sequence: Synthetic coding sequence
  source 1..2199: mol_type = other DNA
atgactgaagggacctgcctcaggagaagggggggcccctacaagacagagcctgccactgatctggggcggtggcggctgaattgcgagagaggtcgccaaacctggacatacctccaggacgaaagggcgggacgagagcagactggtctggaggcttacgctctgggcttggacacgaagaattacttcaaagatctgcccaaagcacacacagcgttcgaaggagcccttaatgggatgaccttttatgttggactgcaggctgaggacgggcactggacaggtgactacggcgggcctctttttctgctgcccggcttgctgatcacatgccacgttgctcggattccactccccgccggttacagggaggaaattgtgcgatacctgcgctcggttcagctgcctgatggaggatggggcctgcatatcgaggataagtccactgtgttcggcacagccttgaactatgtgagtttgcgcatcctgggtgtagggcccgacgatcccgatctagtccgggcgcggaatatcctgcacaaaaaaggcggagccgtcgccattccttcatgggggaaattttggcttgccgttctgaatgtatactcttgggaaggactgaatacgttgtttcccgagatgtggctcttccccgattgggcaccagctcacccctcaactctctggtgccattgtcgccaggtgtatctgccaatgtcttactgttacgctgttcggctgagcgcagctgaagatccgcttgtgcagtcactgagacaggaactatacgtcgaggacttcgcttcaatcgattggctggctcagcgcaataacgtggcccccgatgagctgtacacaccccacagttggctgctgcgcgtcgtttacgctcttttgaacctttacgagcaccaccatagtgcacacctgaggcagagagccgtgcagaaactttatgagcacatcgttgccgacgataggtttaccaaatccatctctatcggccctatctctaagactatcaacatgctggtccggtggtacgtggatggccctgcctctaccgcctttcaggagcatgtatctcgaatcccagactacctgtggatgggactggacggcatgaaaatgcaaggcaccaatgggtcccagatatgggatactgcgtttgctatccaagctcttctggaggcaggggggcaccatagacctgagttcagtagctgtctgcagaaagcgcatgagtttctcaggctctctcaggtgcccgacaatcctcctgattaccaaaaatattaccgtcagatgaggaaggggggcttcagctttagcacactagactgcggttggatcgtgtctgactgcacagcagaagccctgaaagccgttctccttctgcaggagaaatgcccccatgtcacagagcatatcccacgggaaaggctatgcgacgctgtggcagtgctcttgaatatgaggaaccccgatggaggcttcgctacgtacgaaaccaagcgcggaggccacttactggagttgctgaatccaagtgaggtgtttggcgatattatgatcgactacacgtacgtggaatgcacatctgccgtgatgcaggctctgaaatatttccataaaagatttcccgaacaccgggcagccgagatacgggagaccttaacgcagggactggaattttgtcgcaggcagcagagagccgacggatcctgggagggtagctggggggtctgcttcacctatggcacgtggtttggactggaagcttttgcctgcatgggccagacctatcgcgacgggacagcctgtgccgaggtttctcgagcgtgtgattttctgttgtcccggcaaatggctgacggggggtggggagaggacttcgaaagctgcgaagaaagaagatacttgcagtcggcgcagtctcagattcataacacttgttgggctatgatgggcttaatggctgttaggcaccccgacatcgaagcccaggagcgcggcgtccggtgcctgctggagaaacagctgcctaacggcgattggcctcaggagaatatcgccggagtgtttaataaatcatgcgctatctcatacacctcatatagaaacatattccctatctgggccttaggtcggttttctcagctctaccctgaacgggcactggcgggccatccgtag

SEQ ID NO: 121933 - DNA, 1959 bp, synthetic construct
  misc_feature 1..1959: note = Description of Artificial Sequence: Synthetic coding sequence
  source 1..1959: mol_type = other DNA
atgaccttttatgtgggtctacaggctgaagatggccactggaccggagattacgggggacccctgttcctgctgcctggcctcctcatcacctgccatgtagcccgcatcccgctcccagcggggtacagagaagaaatagtaagatacctccgcagcgttcagctgcctgatggaggctggggtctgcatatcgaggacaagagtacagtcttcgggaccgctctcaactacgtctcccttaggatccttggggtcgggccagacgaccccgacctcgtaagagcgagaaacatccttcacaagaaaggcggagccgttgccatcccatcctgggggaaattttggctggccgtgcttaacgtttactcttgggaaggtctgaacaccctttttccggagatgtggctgttccccgactgggccccagctcacccctccactctttggtgccactgtagacaggtttacctgcccatgagttactgctacgctgtcagactgtcggcagctgaggatccgctggtccagtcccttcgtcaggaactttacgtggaagatttcgcatccatcgactggctcgctcagcgcaacaatgtggcccccgatgaactctatacacctcattcatggttattacgagtggtctatgcactacttaatctgtacgagcaccaccattccgcacatctgcgacagagagctgtgcagaaactctatgagcatattgttgcagacgatcggtttactaaaagtattagcatcggcccaatctcaaaaacaataaatatgcttgtgaggtggtatgttgatgggccggcctccaccgctttccaggagcacgtcagccgaattcctgactacctctggatgggactcgacggaatgaagatgcagggaacaaacggtagtcaaatatgggacactgccttcgcaatccaagctctgctagaagcagggggccaccatcgacctgagttttctagctgcctgcagaaagcccatgagtttttaagattgagtcaggtcccggataaccccccggactatcagaagtactacaggcagatgcgaaaaggcggtttttctttttcaaccctcgactgtggctggatcgtatcagactgtaccgctgaggctctgaaggccgtgctgctgctccaggagaagtgtccccacgtgacggaacatatcccccgggagagactttgcgacgccgttgccgtgctgctgaacatgcgcaaccctgacggcggctttgcaacatatgagactaagcggggcggccatctgctggaattgctcaatccctcggaagtgtttggggatatcatgatcgattacacgtacgtcgagtgtacatctgcagtcatgcaggcccttaagtactttcataagcgttttccggaacaccgggcggccgagattagggaaaccctaactcaaggtctagagttttgccgcaggcagcaacgtgccgacggatcatgggagggaagctggggcgtgtgtttcacatacggcacatggttcgggttggaggctttcgcctgtatgggacaaacgtatcgggacggcaccgcgtgcgcagaggtgtctcgagcctgtgatttcctgctgagccggcagatggccgacggtggctggggggaggatttcgaaagttgtgaagagcgtagatacctccagagcgcacagtcacaaatccataatacttgttgggccatgatggggttgatggccgtgcgtcatccagacattgaggcgcaggagcggggtgttcggtgtttgctggaaaagcagctcccaaatggagactggcctcaggagaatatcgccggagtgttcaataagtcatgcgccatctcgtatacaagctatcggaatattttccccatttgggctctgggtcgctttagccagctctatcccgagcgcgccctcgccggtcatccctag

SEQ ID NO: 121934 - DNA, 2166 bp, synthetic construct
  misc_feature 1..2166: note = Description of Artificial Sequence: Synthetic coding sequence
  source 1..2166: mol_type = other DNA
atgaccgaggggacctgcctaaggcgccgtgggggtccctacaaaaccgagcctgcaacagacctaggacgctggcgactaaattgtgagcgcgggcgccaaacctggacctatttgcaggatgagcgggccggtagagagcagaccggtctagaggcgtacgcattgggactggacactaagaattattttaaagatttgccaaaggcacatacggccttcgagggggccttgaacggaatgaccttttatgtcggcctccaggccgaggatggccactggactggggattatggtgggcctctctttttgctgcccggcctgctcatcacctgccatgttgcccgaatccccttgcctgctggatacagagaggaaattgtgagatatcttcgccacattgaggacaagagcaccgtattcggaacagccctgaactacgtttccctccgcattctcggagtaggccctgatgatcccgaccttgtgagggcccgaaatatccttcataaaaaggggggagccgtcgctattccatcctggggcaaattttggctcgcagtgctcaatgtctatagctgggagggactgaatacactatttcctgaaatgtggctgtttcccgactgggctcctgcccacccgagcaccttatggtgccactgtaggcaagtgtatctgcctatgagttattgttatgccgtgagactgtctgccgctgaagacccacttgtacagtcgcttcgccaggaactgtatgtggaggatttcgcctccattgactggctggctcagcggaacaatgttgcccctgatgaactctacaccccccatagttggctcctcagggtggtctacgcgttgctgaacttgtacgagcaccatcacagtgcccaccttaggcagcgggcggtccaaaagttgtacgaacacattgtagccgacgatcgttttacgaagagtatctctattggacccatatctaagactatcaacatgcttgtgaggtggtatgtcgatggtcctgcatcaactgccttccaagaacatgtgtcgagaatcccagattatctctggatgggattggacggaatgaaaatgcagggaaccaacggctcgcagatttgggataccgcttttgcgatccaagcgttactcgaggccggtggtcatcaccggcccgagttctcgtcttgtctgcagaaagctcacgagtttctgcgactcagtcaggtgccggacaatcctccagattaccagaagtactaccgccagatgaggaagggagggttctccttctcaaccctcgattgcggatggattgtttcagactgtactgccgaggccctcaaagccgtgcttctgctgcaagaaaaatgtccgcatgtgaccgaacacataccgcgagagcggctgtgtgatgctgtagccgtgctgcttaatatgcgcaaccccgatggagggttcgccacttacgagacaaaacggggcggccatctgctggagttacttaacccgtccgaggtgttcggcgacattatgatcgattatacgtacgtagagtgtacttcagctgtgatgcaggcccttaaatattttcataagcgctttccagagcacagagctgccgaaatcagagagacactgactcaagggctcgaattttgccggcggcagcagcgcgcagacgggagctgggagggctcttggggggtctgttttacatacggcacctggttcgggctagaggcattcgcgtgcatgggccaaacatatagagatggaacagcgtgcgccgaagtgtcccgggcgtgtgacttccttttatcccgtcagatggccgatggtggatggggagaggactttgagtcatgtgaggaacgaagatatttgcagagcgctcagtctcaaatccacaatacatgctgggctatgatgggcctcatggccgtgagacaccccgacatcgaagcccaggaacgtggagtgagatgtcttctggagaaacagcttcctaatggagactggccccaggagaacatcgccggagtcttcaataagtcctgcgccataagttatacatcttataggaacatcttccccatttgggcccttggccgcttttctcagctgtacccggaaagagcgttggctggtcatccatag

SEQ ID NO: 121935 - DNA, 1977 bp, synthetic construct
  misc_feature 1..1977: note = Description of Artificial Sequence: Synthetic coding sequence
  source 1..1977: mol_type = other DNA
atgggaaggaggcgagcccccgcaggaggatccctggggcgtgccctgatgcgccatcagacacagcggtcaagatcccacaggcacacagatagctggcttcatacaagtgagttgaatgatggctatgattggggcaggcttaatctccagagtgtgactgagcaaagcagcctcgacgacttcctggccaccgccgaacttgctggcacagagttcgttgcagaaaagttgaacatcaagtttgtgcctgccgaagcacggaccgggcttctgtcctttgaagagtcccaacgcataaaaaagctgcacgaagagaataagcagttcctgtgtataccacgccggcccaactggaaccagaatacaactccagaggagttgaagcaagcggaaaaagacaactttctcgagtggcggaggcagcttgtgaggcttgaagaggaacagaaactgatactcacccctttcgagcggaacctcgatttttggcggcagctgtggcgggtgattgaaaggagtgatatcgtggttcagatagtcgacgccagaaaccccctgctcttccggtgtgaggacctcgaatgctatgtgaaggagatggacgccaataaggaaaacgtgatactaatcaataaggcggatctcctgaccgcagagcagagaagcgcttgggctatgtatttcgagaaggaagacgtgaaagtgatcttttggagcgccctggccggagcgatacccctgaatggagattctgaggaagaagccaaccgggacgaccgtcagtccaatacgaccaagttcggccatagcagttttgaccaggccgagatctcgcattcggagtccgagcacctccctgcgagggactccccttccctgtccgagaacccaactactgacgaggacgactcggagtacgaggattgcccggaggaggaagaagacgactggcagacatgctctgaggaagacggacccaaggaggaggattgtagccaggattggaaagagtcctccaccgcagactcagaggcacgtagtcgtaagacgccccagaagcgacagatacacaattttagccacctggtgtcaaaacaagagctgctcgagttgtttaaagaacttcacacaggtagaaaggtgaaagatgggcaactgactgttggtcttgtgggctatccaaacgtgggcaagagtagcactattaatactattatgggcaacaaaaaagtgtctgtatcagccactccaggccacacaaagcatttccagaccctgtatgtagaacctgggctttgtctctgtgattgtccaggactggtaatgccatcctttgtgtctactaaggcggagatgacctgcagcggcatcttgccaattgaccaaatgagggatcacgtccctcctgtcagccttgtctgtcaaaatatacccagacatgtgcttgaagctacctacggcattaacattattaccccaagggaggacgaggacccgcatcgcccgcctacgtccgaggagctgctgaccgcttatggttacatgagaggttttatgaccgcccatgggcaaccggatcagccaagatccgctcggtacatcctgaaagattatgtgtctggcaaactactctactgtcatccaccgcctggcagagaccccgttacatttcagcatcaacaccagcggctccttgagaacaagatgaactctgacgagatcaagatgcaactgggaaggaacaagaaggccaagcagatcgagaacatagtcgacaagacttttttccatcaggagaacgtacgggcacttaccaagggagtgcaggctgtcatgggatacaagcccggcagtggcgttgtaacggccagcacagcgtcctctgaaaacggagccgggaaaccttggaaaaaacatggcaaccgcaataaaaaggaaaagtcgagacggctctacaagcacctggacatgtag

SEQ ID NO: 121936 - DNA, 333 bp, synthetic construct
  misc_feature 1..333: note = Description of Artificial Sequence: Synthetic coding sequence
  source 1..333: mol_type = other DNA
atgagctgtcagcagagtcagcagcagtgtcagcctccacccaaatgcaccccaaagtgtccgcccaagtgtcctactcctaagtgcccccccaagtgcccacctaaatgccccccggtaagctcttgctgttctgtgagctctggtggatgttgcggctcgtcatccggtggagggtgttcctcgggcggcggcggctgctgcttatcccaccatcgaagacaccgctctcaccgtcacagactgcagagcagcgggtgttgcagccagccctctggaggttccagttgttgcgggggcgattcgggccagcatagcggcggatgttgttag

SEQ ID NO: 121937 - DNA, 333 bp, synthetic construct
  misc_feature 1..333: note = Description of Artificial Sequence: Synthetic coding sequence
  source 1..333: mol_type = other DNA
atgtcctgccagcaaagccagcaacagtgtcaaccacccccgaaatgcactccgaaatgcccccctaagtgtccaacccccaaatgtccccccaagtgtccccccaaatgccccccagtctccagctgctgtagtgtgagctccggcgggtgttgcggcagttcatcaggaggcgggtgctcaagcggtggtggcggatgttgccttagccatcaccggcggcacaggtcccacagacaccgcttgcaaagcagtgggtgttgtagccaacccagcgggggctcctcctgttgcggaggagatagcggacaacactccggaggatgctgttag

SEQ ID NO: 121938 - DNA, 357 bp, synthetic construct
  misc_feature 1..357: note = Description of Artificial Sequence: Synthetic coding sequence
  source 1..357: mol_type = other DNA
atgtcttgtcagcagaaccagcagcagtgccagcccccacccaaatgtatccctaagtgcccgccaaaatgcttaacaccacggtgcccacccaagtgtccgccgaagtgtcccccggttagcagttgttgctctgtatcgagcggaggctgttgcgggtccagtagcggcggaagctgcggctcctctagtggcggctgctgtagcagcggaggtggcgggtgttgcttgtcccaccacaggcgccgcagatcacattgccataggccacaaagtagtgggtgttgtagccagccttcgggtggatcttcatgttgcggcgggggatctggccaacacagcgggggctgctgttag

SEQ ID NO: 121939 - DNA, 333 bp, synthetic construct
  misc_feature 1..333: note = Description of Artificial Sequence: Synthetic coding sequence
  source 1..333: mol_type = other DNA
atgagctgccagcaaaaccaacagcagtgccagcctccaccaaagtgtatcccaaagtgtccgccaaagtgtctgactccccggtgtccaccaaagtgcccacccaagtgtccccctgtgtcttcctgctgttcagtgtcctctggcgggtgctgcggatcgtctagcggcgggtgttgctcatccggtggtgggggctgttgcctgtcacaccatagaaggagacgctctcactgtcataggccccaatcctcaggatgttgttctcagccctccggaggatcttcctgctgtggaggtggcagcgggcagcattcaggaggatgttgttag

SEQ ID NO: 121940 - DNA, 357 bp, synthetic construct
  misc_feature 1..357: note = Description of Artificial Sequence: Synthetic coding sequence
  source 1..357: mol_type = other DNA
atgagttgtcaacagtcccagcagcagtgccaaccccctcctaagtgcacacctaagtgtccgccaaagtgcccaacaccaaagtgcccgcccaagtgtcctccaaagtgtccacccgtcagctcttgctgcagcgtctcaagtgggggctgctgtggctctagttctggcggcagctgcggctccagctcaggcggttgttgttccagcggcggagggggctgctgcctaagccaccatcggaggcgccgctcccactgtcaccgcccacagtccagcgggtgttgtagtcaaccttcgggcgggagtagctgttgtggcggtggatcaggccaacacagcggaggatgttgctag

SEQ ID NO: 121941 - DNA, 345 bp, synthetic construct
  misc_feature 1..345: note = Description of Artificial Sequence: Synthetic coding sequence
  source 1..345: mol_type = other DNA
atgagctgccagcaaagccagcaacaatgccagcctccccctaagtgcactcccaagtgtacccccaaatgtcctgctccaaagtgtccaccaaaatgccctcccgtgagctcatgctgttcagtttctagcggcggatgctgcggctcctcttcaggcggcggctgcgggtctaactcaggcggttgttgcagttcggggggaggtggttgttgtctgtctcaccacaggcgccatcggagccatcggaggcgacctcagagctccgattgttgcagccagccctcgggcgggagtagttgttgcggtggggggagtagccagcactctgggggatgttgctag

SEQ ID NO: 121942 - DNA, 357 bp, synthetic construct
  misc_feature 1..357: note = Description of Artificial Sequence: Synthetic coding sequence
  source 1..357: mol_type = other DNA
atgagctgccaacaatcccagcaacagtgccagcctccgcctaagtgcacaccaaagtgtccaccaaagtgccccactccaaaatgcccgccgaagtgccctccaaagtgcccacctgtgtcttcatgctgctccgtctcctcaggtggatgctgtggcagctcatccggcggatcttgcggatcctccagcgggggctgctgctcgagcggaggcggaggctgttgcctgtctcatcaccgccaccataggtcacacagacacagacctcagtctagcgattgctgtagtcagccttctggcggttcctcttgttgtggaggcggatccggacagcatagcggcggctgctgttag

SEQ ID NO: 121943 - DNA, 357 bp, synthetic construct
  misc_feature 1..357: note = Description of Artificial Sequence: Synthetic coding sequence
  source 1..357: mol_type = other DNA
atgtcgtgccaacaaagtcagcagcagtgccaacctccacctaagtgcactccaaaatgccctccgaagtgtcctacccctaaatgtccccccaagtgtcctcctaaatgtccgccagtatccagctgttgctcagtttcgagcggggggtgctgcggcagctcatctggtggctcttgcggatcctcgagtggtggctgctgtagcagtggtggaggcggctgttgcctgagccatcataggcatcataggtcccaccgccatcggccgcaatcgtccgactgctgctctcaaccatctggggggagctcatgttgcgggggtggtagtggacagcactcagggggatgctgctag

SEQ ID NO: 121944 - DNA, 357 bp, synthetic construct
  misc_feature 1..357: note = Description of Artificial Sequence: Synthetic coding sequence
  source 1..357: mol_type = other DNA
atgtcatgccaacaaagtcaacagcagtgccagccgccacccaaatgtacaccaaaatgcccgccgaagtgccctaccccaaagtgcccacccaaatgtccgcctaagtgcccccctgttagttcgtgttgttccgtgagctccgggggatgttgcgggtcctcgtccggcggatgctgcagtagtggggggggaggttgttgtagctctgggggtggcggatgttgcctgagtcaccaccggcggagacgatcacaccggcaccgcccccaaagctcggactgttgctctcagccttctgccgggtcttcctgttgcggtggcggctccgggcagcactctgggggatgctgttag

SEQ ID NO: 121945 - DNA, 321 bp, synthetic construct
  misc_feature 1..321: note = Description of Artificial Sequence: Synthetic coding sequence
  source 1..321: mol_type = other DNA
atgtcttgccagcagaatcaacaacagtgtcagcctcctcccaagtgcccgcccaaatgcccacccaaatgtcctcctaaatgtcgtccgcagtgtccagcaccctgtcctcccccggtgtcatcatgctgcggcccttcatctggcggctgttgtgggtcgagttctggcggttgttgctcctccggtggcggaggctgttgtctaagtcatcaccggccccggctattccatcggcatcggcatcagagtcccgactgttgcgaatgtgagccctcgggcggctccggctgttgtcattcttcaggggattgctgttag

SEQ ID NO: 121946 - DNA, 333 bp, synthetic construct
  misc_feature 1..333: note = Description of Artificial Sequence: Synthetic coding sequence
  source 1..333: mol_type = other DNA
atgagctgccaacagaaccaacaacagtgccagccacctccaaaatgtccacctaagtgtacccctaagtgccctcctaagtgccccccgaagtgccttccccagtgccctgctccttgctcccccgctgtgtcttcgtgttgcggtcccataagcggcggttgctgtgggccctcctctggcggatgctgcaactctggtgccggaggatgttgcctttctcaccaccgaccaaggctctttcaccggcgcaggcaccagagtcccgattgttgcgaaagtgagccttcaggcgggtccgggtgctgccactcaagcggaggatgttgctag

SEQ ID NO: 121947 - DNA, 333 bp, synthetic construct
  misc_feature 1..333: note = Description of Artificial Sequence: Synthetic coding sequence
  source 1..333: mol_type = other DNA
atgtcctgccaacagaaccaacagcaatgtcaaccaccaccaaaatgtcctcctaagtgcacacctaaatgccctccaaagtgtccaccgaaatgccttccacagtgcccagccccatgctcacccgctgttagcagctgttgcggtccaatatcagggggatgctgtgggccttctagcggtggctgctgcaactccggcgccggaggttgttgtctgtctcaccacaggccacgcctgtttcaccgacgacgtcaccagtcgccggattgctgcgaaagtgagccttccggcgggtccggctgttgtcactcctccggcggctgttgttag

SEQ ID NO: 121948 - DNA, 333 bp, synthetic construct
  misc_feature 1..333: note = Description of Artificial Sequence: Synthetic coding sequence
  source 1..333: mol_type = other DNA
atgagctgccaacagaatcagcagcagtgccagccgcccccaaaatgtccaccgaagtgcactcccaagtgtccacctaagtgccctcctaaatgcccgccacagtgtcccgccccctgcttccctgccgtgtctagctgctgcgggcccagctccgggtcgtgttgcggccctagcagcggcggctgctgctcgtctggcgccggcggatgctccttgagccaccatcgacctcggctgtttcataggcgcagacatcaatccccagactgttgcgaatctgaaccctctggcggttctggctgctgtcacagtagcggaggatgctgctag

SEQ ID NO: 121949 - DNA, 333 bp, synthetic construct
  misc_feature 1..333: note = Description of Artificial Sequence: Synthetic coding sequence
  source 1..333: mol_type = other DNA
atgtcttgccaacagaaccagcagcaatgtcaaccaccccccaagtgcccccccaaatgtactccaaaatgtcctcctaagtgcccccccaagtgtccaccacagtgtcccgccccatgttcgccagctgtgtcgagctgctgtggcccgtcgtccggctcttgttgcgggccgagcagcggcggctgctgctcttccggaggcggcggctgctgtctatcgcatcacagaccacgcctctttcatcggcgcagacaccaatcccccgattgttgtgaatctgaacccagtggtgcctcaggctgctgccactcctcaggcggctgttgctag

SEQ ID NO: 121950 - DNA, 270 bp, synthetic construct
  misc_feature 1..270: note = Description of Artificial Sequence: Synthetic coding sequence
  source 1..270: mol_type = other DNA
atgtcctgtcagcaaaatcagcaacaatgtcagccccccccaaaatgccccgccaaatcaccagctcaatgtctgccacctgcgagcagctcatgtgctcccagttccggcggctgtgggccgtcttctgagagaagctgctgcttgtcacaccacagatgcaggcgaagccacaggtgccgttgtcagtcgtccaacagttgcgaccgcggctctggccagcagggaggctcttctagctgtggccactctagtgccggctgctgctag

SEQ ID NO: 121951 - DNA, 288 bp, synthetic construct
  misc_feature 1..288: note = Description of Artificial Sequence: Synthetic coding sequence
  source 1..288: mol_type = other DNA
atgtcgtgtcagcagaaccagcagcagtgccaacctctccccaaatgtccatctcctaaatgtccgcctaaatcctccgcacagtgtctgccccccgcctctagctgttgcgctccacgaccgggttgctgcgggggtccgagctcagaggggggatgctgcctaagtcaccatcgctgctgcagatcccatcgatgccggagacagtccagtaattcttgcgatcggggttctggacagcaggatggcgcgtccgattgcggctacggcagcgggggctgttgttag

SEQ ID NO: 121952 - DNA, 285 bp, synthetic construct
  misc_feature 1..285: note = Description of Artificial Sequence: Synthetic coding sequence
  source 1..285: mol_type = other DNA
atgagttgtcagcaaaaccaacagcagtgtcagccaccaccatcctgtcctagcccaaagtgcccccctaaatctcccgcccagtgcttgcctccaccttcttccgactgcgcgctgtcatcgggcggctgtggaccaagtagtgagtctggctgctgtctgagtcatcaccgacacttcagaagccatcagtgccgtagacagcgctctaatagctgtgatcggggttccggacagcagggtggggggagttgcagaggccacgggagtggaggttgttgctag

SEQ ID NO: 121953 - DNA, 279 bp, synthetic construct
  misc_feature 1..279: note = Description of Artificial Sequence: Synthetic coding sequence
  source 1..279: mol_type = other DNA
atgagctgtcagcagaatcaacagcagtgccagccaccaccgaagtgtcctagccctaaatgccctccaaaatccccagtgcagtgcctgccacccgcttcttctggatgtgccccatcaagcggtggatgtggaccgagctccgaaggcggctgctttctgaaccatcataggagacaccacagatgcagacgccagagacctaactcgtgcgataggggatctggccaacaaggcggtgggtctgggtgcgggcacggtagcggcggctgctgttag

SEQ ID NO: 121954 - DNA, 279 bp, synthetic construct
  misc_feature 1..279: note = Description of Artificial Sequence: Synthetic coding sequence
  source 1..279: mol_type = other DNA
atgtcatgccaacagaatcagaagcagtgccagccaccaccaaaatgtccttccccaaagtgcccacctaaaaatcccgtgcagtgcctacccccggccagtagtgggtgcgcaccatcttccggcggttgcggtccatcctcagaggggggatgtttcctaaaccatcataggcggcaccaccggtgccggcggcagagatcgaattcatgcgatcgcggaagcggacaacagggaggcggcagcggatgctgtcatggctcgggcgggtgctgctag

SEQ ID NO: 121955 - DNA, 300 bp, synthetic construct
  misc_feature 1..300: note = Description of Artificial Sequence: Synthetic coding sequence
  source 1..300: mol_type = other DNA
atgtcctgccagcaaaatcaacagcagtgtcagccaccgccaaagtgccccatccctaagtacccacccaagtgtccgtcaaagtgtgcctccagttgccccccccccatctccagctgctgcggttccagctcgggagggtgcggctgctgtagctccgaagggggggggtgctgtctgtctcatcaccgtcatcacagatcccattgtcacaggccaaaatctagcaattgctatggctctggtagtggtcagcagtccggtgggagcggctgttgtagtggtggcggttgttgttag

SEQ ID NO: 121956 - DNA, 300 bp, synthetic construct
  misc_feature 1..300: note = Description of Artificial Sequence: Synthetic coding sequence
  source 1..300: mol_type = other DNA
atgagctgtcaacagaatcagcagcagtgccagccacccccgaagtgccccattcccaagtatccacccaagtgcccaagcaaatgtgcaagtagttgtccaccacctatttcaagctgctgcggttcgtctagtggcggatgtgggtgctgctcttcagaaggcggaggatgttgcctgtcccaccacagacatcacagaagccactgtcaccgacctaaaagcagcaattgctacggctccggttctggacagcagagcggcggctccggctgttgtagtggcggaggttgctgctag

SEQ ID NO: 121957 - DNA, 357 bp, synthetic construct
  misc_feature 1..357: note = Description of Artificial Sequence: Synthetic coding sequence
  source 1..357: mol_type = other DNA
atgagctgtcagcagagtcagcagcagtgccaacccccgcctaaatgcacacccaagtgtcctcctaaatgtacccccaagtgcccaccaaaatgtcctccaaaatgtcctcctcagtgctctgctccctgcccaccccctgtgagtagttgctgtggctcctccagcgggggatgctgtagctctgaaggagggggttgctgtctttctcatcatcgaccacgtcagtcactccgtcgaagacctcagtcatcctcctgttgcggctcaggctctggtcagcagagtggtggctccagctgctgccacagctcgggcggctcaggctgctgccactcctcaggcgggtgttgttag

SEQ ID NO: 121958 - DNA, 297 bp, synthetic construct
  misc_feature 1..297: note = Description of Artificial Sequence: Synthetic coding sequence
  source 1..297: mol_type = other DNA
atgagttctgatgataagtctaaaagtaatgacccaaagaccgaaccaaaaaattgtgacccaaagtgtgaacagaaatgcgaatctaagtgccagccctcctgtctgaaaaagcttctccagaggtgtttcgagaagtgcccttgggagaaatgccctgccccccccaaatgtctcccctgtcctagtcaatcaccgagctcctgcccaccacagccatgtacgaagccttgccccccaaaatgtccatcatcatgtccccacgcttgtcctcccccatgcccacctcccgaatag

SEQ ID NO: 121959 - DNA, 1860 bp, synthetic construct
  misc_feature 1..1860: note = Description of Artificial Sequence: Synthetic coding sequence
  source 1..1860: mol_type = other DNA
atgtgctcttgtcataaaggctatacaagaactcctgatcataaacactgtcgggacattgatgagtgccagcagggtaacctgtgcgtgaacggtcagtgtaagaacacagaaggaagctttcgctgtacctgtggacaggggtatcagctgtctgccgctaaagatcagtgcgaagatatagatgaatgccaacatcggcatctgtgtgcccatgggcaatgccgtaatacagaagggagctttcagtgtgtctgtgatcagggatatcgggcctcaggactcggcgaccactgcgaagacatcaacgagtgcctggaggataagtcggtctgtcaacgtggagattgtatcaacaccgccggctcctacgattgtacatgcccggacggatttcaattggacgacaacaagacgtgccaagacatcaatgagtgcgaacaccccgggctgtgcggaccacagggggaatgcctgaatacagaaggctccttccactgcgtatgtcagcagggcttctccatatccgccgatgggcggacttgtgaggatgtgaacgagtgcgagctgctgagtggcgtgtgcggagaagccttttgcgagaatgtggaggggtctttcctgtgtgtttgtgcggatgagaatcaggaatactcgccaatgaccggccagtgccgctcacggactagcactgatctcgatgtggacgtcgaccagccaaaggaggagaagaaggagtgttactataaccttaacgacgcctcactgtgcgataacgttttggcacccaacgttaccaagcaagaatgctgttgtacttcaggagtgggctggggtgataactgcgagatctttccttgccctgttctcggtactgctgaatttacagagatgtgtcctaaagggaagggcttcgttcccgctggcgaatcttctagtgaagcaggaggagagaactataaagatgctgacgaatgccttttgttcgggcaggagatatgtaagaacggattttgtctgaatacgcgacctggatacgagtgttattgtaagcagggaacttactacgaccccgtcaaactgcagtgtttcgatatggatgaatgccaggatccctcctcctgcattgacggacagtgcgtgaacactgagggctcttacaattgcttctgtacccacccaatggtgttggacgcttcagagaaacgctgcatccggccagccgaaagtaacgagcaaattgaggagaccgatgtctatcaagacctatgttgggagcacctgagcgatgagtacgtttgctcccgccccttagtcgggaagcagacaacgtatactgaatgctgttgtctgtatggagaagcttgggggatgcagtgtgccctgtgtcctcttaaagattccgacgattacgcgcagctgtgcaatatccctgtgacgggccgccgccagccatatggtagagacgctctggtcgactttagcgagcagtatacacctgaggccgacccctattttattcaggatcgcttcttgaattcctttgaggagctgcaggcagaagagtgcggaatccttaatggctgtgagaacggcaggtgcgtgagggttcaggaaggatatacgtgtgattgcttcgacgggtaccacctggatacagctaagatgacttgcgttgacgtgaacgagtgcgatgaactgaataataggatgagtctgtgtaaaaacgctaagtgtatcaacacagatgggagctacaaatgtttgtgcctcccggggtacgtcccctcggataagcccaactattgtacccctcttaacactgctctgaaccttgagaaggactccgaccttgagtag

SEQ ID NO: 121960 - DNA, 5169 bp, synthetic construct
  misc_feature 1..5169: note = Description of Artificial Sequence: Synthetic coding sequence
  source 1..5169: mol_type = other DNA
atggcaggggcctggctcagatgggggctgctcctctgggcgggccttttagcttcctctgcccacggccgcttaaggaggattacgtacgttgtgcaccccggtccggggctcgcagctggagctcttcccctgagcggaccccctaggagcagaacctttaatgtggcactgaacgcacgatattcccgtagttcagctgctgctggcgccccatctcgcgcctcccccggcgtaccctcggagcggaccagacgcacatccaaacccgggggggccgccttgcagggtctgagacctccccctcccccccctcccgagcccgcaaggcctgcggttcccggcggacagctgcaccccaacccggggggacaccctgcagccgcccccttcactaagcaagggaggcaggttgtcagatccaaggtccctcaagaaacgcagtctggaggcggtagtaggctgcaagtacaccaaaaacagcagcttcaaggtgtcaatgtgtgtggaggccggtgctgccacggatggtctaaggctcctgggtctcagcgatgtaccaagccgtcctgcgtgccaccgtgtcagaatggcggcatgtgtctacgaccgcaattatgtgtctgtaaacctgggacaaaggggaaagcatgcgagaccattgctgcacaggacacaagctctcccgtcttcggtggtcagtcccctggcgctgcaagctcgtgggggccgcccgaacaggcagccaaacacacatcctcaaagaaggccgacacattaccgcgagtgagtcctgtcgcccagatgaccctgacattgaaaccaaaaccgtctgtcggcctgccccagcagatccattcacaggtaactccacttagctcacaatctgtggtgatccatcacggccagacacaggagtatgtgctcaaacctaaatacttccctgcccagaaaggcatcagtggagaacagtcgacagaaggcagcttcccactaagatatgtgcaggaccaggtcgctgcaccctttcagttgtccaaccatactggtcgtattaaggtggtcttcactcctagcatctgcaaggtgacatgcaccaagggcagttgtcagaattcctgtgaaaaaggtaatactacaactctgatcagcgagaatgggcacgcagccgatacacttactgctaccaacttccgggtcgttatttgccacctaccttgtatgaatggcgggcagtgttccagtcgcgacaaatgccaatgccctcctaatttcacaggcaagctgtgccaaattcctgtgcatggggcatcggtccctaagctctaccagcattcgcaacaacccggaaaggctctgggtacccacgtgattcattccacacacacattgccactgactgttacatctcaacaaggagtgaaagtaaaatttccaccaaatattgttaatattcacgtcaagcaccctcctgaagccagtgtgcagatccaccaagtgagtagaatcgatgggcctacagggcagaagacaaaggaggcacagcctggacagtcccaggtgagctaccagggtcttcctgtgcaaaagacacagactatccattccacatactctcatcagcaagtgatcccacatgtttaccctgtggctgcgaagacccagctgggacgatgctttcaggaaacgattggaagccagtgtggaaaagccctgcccggcctgtccaaacaggaggattgctgtgggactgtgggaaccagctggggctttaacaaatgccagaagtgcccgaagaagccttcttaccacggatacaatcagatgatggaatgtctccctggctacaagcgtgtgaacaacacattttgtcaagatattaacgagtgccagcttcagggagtgtgtccaaatggtgaatgcctaaataccatgggctcatacagatgtacatgtaagatcgggttcggtccagacccgacgttttcctcctgtgtccctgatccacctgtaattagtgaggagaaaggaccctgctatcgacttgtctcatcaggtaggcagtgcatgcatcctttgagtgtgcacctgacaaaacagctgtgctgttgtagcgtcggaaaggcctggggaccccattgcgaaaagtgccccctccctggcaccgccgcattcaaggaaatttgccccggtgggatggggtatacagtgagtggggtccataggaggcgcccgatccatcaccatgtcggcaaggggcctgtcttcgttaaaccaaagaacacgcagcctgtggcgaagagcactcacccgccccctctgcccgccaaggaggagcccgtcgaggccctcacattctctcgcgagcacggacccggggtggcagagcccgaggtcgcaacggcaccacccgagaaagaaattccctctctcgaccaggaaaaaaccaagctcgagccaggccaaccgcagttgtctccaggtataagcactattcatctccatcctcaattccccgggatagttatcgaaaaaactagtcccccagtcccagttgaggtggccccggaagcttcaacctccagcgcttcacaggtaattgctcccacacaggtgacggagatcaatgagtgcacggtcaatcctgacatttgtggcgcagggcattgcattaatcttcccgtccggtatacatgcatttgctacgaaggatatagattctctgagcagcagcggaaatgtgtggatattgatgaatgtacccaggtgcagcacttgtgtagccagggaaggtgcgagaacactgaaggatctttcctatgcatttgcccagcgggctttatggcgtccgaggagggtaccaattgcatcgatgtagacgagtgcctgcggcccgatgtgtgtggagaaggccattgtgttaacactgttggagctttcagatgcgagtattgtgattctggctatcgaatgacgcagcgtggaagatgtgaagacatcgacgaatgtctgaatccctccacctgtcctgacgagcagtgcgttaatagccctggcagctaccagtgcgttccctgtacagagggctttcggggctggaatggccagtgcctcgacgtggacgagtgcctggagcctaatgtctgcgcaaatggcgactgttctaaccttgagggctcatatatgtgcagctgccataagggctacacccggacacccgatcataaacattgtcgggacattgacgaatgtcagcagggtaacctctgtgtcaatggtcagtgtaaaaacaccgagggcagttttagatgtacatgtgggcagggctatcagctctcagccgccaaagaccagtgtgaagatattgacgagtgtcagcataggcacctgtgcgcacatggccaatgcagaaatactgagggctcatttcagtgtgtatgcgaccagggatacagggcgagcggattgggagatcactgtgaagatataaatgagtgtcttgaggacaaaagcgtctgccagcggggcgattgcataaatacagctggtagctacgactgtacatgtcctgatgggtttcaattggacgataacaaaacatgccaagatatcaacgagtgcgaacaccccggtctgtgtggcccccagggggaatgcctgaacactgagggatcatttcattgcgtctgtcaacaggggtttagtatcagcgccgatgggcgaacctgtgaggacatcgatgaatgcgtgaataatacagtgtgcgatagccacggcttctgcgacaataccgcaggttcatttaggtgcctctgctaccagggtttccaagcgccccaagatggacaggggtgcgtggacgtcaacgaatgtgagctactctctggagtgtgtggcgaagcattttgtgaaaacgtggaaggctcgtttctgtgtgtctgtgctgacgaaaaccaggagtactctcctatgacgggccagtgcagaagcaggacatctacagatctagacgtcgacgtcgatcaacccaaggaggaaaagaaagaatgctattataacttgaacgatgctagcctgtgcgacaatgtgctcgctcctaacgttactaaacaggagtgttgttgtacttccggagtgggctggggggacaattgcgaaatcttcccatgtccagtcctgggaacagccgagtttacagaaatgtgcccaaaaggaaagggttttgtgcccgcaggagaatctagctctgaggctgggggcgagaactataaagacgcagacgagtgtcttctcttcggccaggaaatttgcaaaaacgggttttgcctgaacaccagacccggttatgaatgttactgcaagcagggtacatactacgatcccgtgaaactccagtgcttcgacatggatgaatgtcaggatccctcaagttgtatcgatggccagtgtgtgaacacagagggatcatacaactgcttctgtacccaccccatggtgctggacgctagtgaaaagcggtgcattcgacctgccgagagtaatgagcagatagaagagacggatgtgtaccaggatctctgctgggagcacttgtctgacgaatacgtgtgtagccggccccttgtcgggaagcagaccacttatactgaatgttgctgcctctacggcgaggcctgggggatgcagtgtgccctttgcccccttaaagacagtgacgactacgctcagttgtgtaacattccggttacagggcgacggcagccgtatggcagagacgctctggtggactttagcgagcaatacacccctgaagccgatccgtacttcatccaagacaggttcctcaactcttttgaggaactgcaggcagaggagtgtggaattctgaatgggtgtgagaatggcaggtgcgtgagggtgcaggagggctatacttgcgactgcttcgatggctaccacctcgatacagccaaaatgacttgcgtggacgtgaacgagtgtgacgaactaaacaaccggatgagtctgtgcaagaatgcgaaatgtattaatacagacgggtcctataaatgtctgtgtctgcccggttacgtgccctcagacaagcctaattactgcacccctttaaatacagctctgaatctggaaaaggactcagatctagagtag

SEQ ID NO: 121961 - DNA, 4191 bp, synthetic construct
  misc_feature 1..4191: note = Description of Artificial Sequence: Synthetic coding sequence
  source 1..4191: mol_type = other DNA
atggacactaaactcatgtgtctgttgttcttttttagcctgccacctctgcttgtgtctaaccacactgggcgtatcaaggtcgtattcactccctctatttgtaaggtgacatgcacaaaggggtcctgccagaactcctgtgaaaaaggcaacactactacgctgattagcgagaatggccatgccgccgatacactgacagcgacaaatttccgtgtggtgatctgccacctcccttgtatgaatggcggccagtgctccagccgcgataagtgtcagtgcccgcctaattttaccggaaagctctgccagattcctgttcatggggcttcagtgcccaaactctaccaacacagtcagcaaccggggaaagccctcggaactcatgtgattcattcaacacacacattgcctcttactgtgacctcacagcagggcgtgaaggtgaagttcccccctaacatagtgaacattcacgtcaagcatccccccgaagcttccgtgcagatccaccaggtgtcgagaatcgacggtccaacaggccagaaaacaaaggaggcccaaccaggacagtcccaggtttcgtatcaaggattacccgtgcagaagacacagaccatccactcaacttattcacaccagcaggtgatcccacacgtctatcctgtggccgcaaaaacccagttgggccggtgctttcaagaaactataggatcccagtgcggcaaagctctacctgggcttagcaaacaggaggactgctgcggcacagtgggcacctcctggggcttcaacaaatgccagaagtgccccaaaaaaccctcctatcatggctataatcaaatgatggagtgcctgcctgggtataaacgcgtgaataacacgttttgccaggatattaatgagtgccagctccaaggagtgtgccctaacggagagtgcctgaacaccatgggcagctaccgctgcacgtgcaaaatcgggttcggcccggatccaacattctcctcctgcgtgcccgaccctccggttatcagtgaggagaaggggccctgctaccgcctggtatcatccggccggcaatgtatgcatcctttaagtgtacaccttaccaagcagctgtgctgttgctctgttggtaaggcctgggggccccattgcgagaaatgccccttacccggaacggccgcgtttaaagagatttgccctggcgggatgggatacacagttagcggagtgcaccgacgacgccccattcaccaccatgttggaaaggggcctgttttcgtcaagccgaaaaacacccaacccgtagcgaaaagtacgcaccccccaccactgccagccaaggaggaacccgtggaggccctcacctttagcagggagcatggacccggggttgcagagcctgaggttgcaacagcgcctccggaaaaagaaatccctagtcttgaccaggagaagaccaagctggaacctggccagccacagctcagtccaggtatcagcacgatccatctgcaccctcagtttcctggcatagtcattgaaaaaaccagtcctcccgttcccgttgaagttgctcccgaagctagtacatcctctgccagtcaggtaattgcccctacgcaggttacagagatcaatgaatgcactgttaacccagacatttgtggcgccggacactgcattaatctcccagtgcgatacacttgtatatgctacgaaggttatcgattcagtgagcagcagcggaaatgtgtggatatcgacgagtgtacgcaggtccagcacctgtgctcacagggacgatgcgaaaatactgaggggagctttctgtgtatttgccccgcaggcttcatggcttctgaagaagggaccaactgtatcgacgtggatgagtgtttaagacctgacgtctgcggggagggtcattgtgtgaataccgtcggtgccttccggtgcgagtattgtgactcggggtatcggatgacccagcggggacggtgtgaagatatcgatgaatgtttgaatccttccacttgtcccgacgagcaatgtgtcaactcaccgggaagctatcagtgtgttccttgcacagaagggtttcgcggctggaacggtcaatgtctggacgtggacgaatgcttagagcctaatgtgtgcgccaatggcgactgtagcaatctcgagggctcttacatgtgttcttgccacaagggctacacacggacccccgaccacaagcattgccgggatattgacgagtgccaacagggaaacctttgcgtgaatgggcagtgcaaaaatacagagggttcgttccgttgcacctgcggccagggataccagctgtccgcagccaaagaccagtgtgaggacattgatgagtgccagcacaggcatctctgtgcccacggtcaatgccgcaataccgaggggtctttccagtgcgtgtgcgaccagggatacagggcctcaggtcttggcgaccactgcgaggacatcaatgagtgcctggaagataaaagcgtctgtcagagaggggactgcatcaatactgcaggcagctacgattgcacatgcccggacggcttccaactggacgataacaaaacatgccaggatatcaacgaatgtgagcacccggggctctgtggtccccagggcgagtgtcttaataccgaaggcagttttcattgcgtgtgtcagcagggctttagcatttctgcagacggccgtacttgcgaagacatcgacgaatgcgttaacaataccgtttgtgacagccacgggttttgtgacaacacagccggatctttccgatgcctctgttaccagggattccaagcaccacaggacggacagggatgcgtggatgttaatgaatgtgagctgctctcgggcgtttgtggcgaagcattttgtgaaaacgttgaagggtcttttctctgtgtgtgtgccgatgagaatcaagagtacagtcccatgacaggacagtgtagatctcgcacgtccactgatcttgacgtagacgtggatcaaccaaaagaggaaaagaaggagtgctattacaatctgaacgacgcctctctctgcgacaacgtgctggcccctaatgtcacaaaacaggaatgctgttgtacttctggcgtaggctggggagataattgcgaaatatttccttgtcctgtcctggggactgcagaatttacagaaatgtgtccaaagggaaaagggtttgtccccgcaggagaaagctctagcgaggccggtggcgaaaattacaaggatgcagatgagtgcctgctgtttggtcaggagatctgcaaaaacggattttgcctcaacactaggcctggttatgaatgctattgcaaacagggcacctattacgacccagtgaaattgcaatgctttgacatggacgaatgccaggatccttcctcttgcatagatggacagtgcgtcaacacagagggttcctacaattgtttttgtacgcaccctatggtcttggatgccagcgagaagcgctgcattaggccggctgaaagcaacgaacaaattgaggaaacggatgtttatcaagacctttgctgggagcatctctccgatgagtacgtctgctcccgtccgctggtcggtaaacagaccacttatactgagtgttgttgcctctacggagaggcctgggggatgcaatgtgccctctgcccccttaaggacagcgacgactacgcccagctgtgtaacatccctgtgactgggagaaggcaaccttatggaagggacgctctcgttgacttttccgagcagtatacccccgaagctgacccatatttcattcaggaccgattcctcaatagcttcgaggagctgcaagctgaggagtgcggaatcctgaatggctgtgagaacggccggtgtgtccgtgtgcaggagggttatacctgcgactgttttgacggatatcacctggatactgcaaagatgacctgtgtcgatgtcaatgagtgcgatgagcttaataataggatgagcctgtgcaaaaacgcgaagtgcattaacacagacggaagctacaaatgtctatgcctgcctggttatgtgccctccgataagccaaactactgtacaccactgaataccgcgctgaatttggaaaaagacagtgatctggaatag

SEQ ID NO: 121962 - DNA, 5166 bp, synthetic construct
  misc_feature 1..5166: note = Description of Artificial Sequence: Synthetic coding sequence
  source 1..5166: mol_type = other DNA
atggctggcgcttggctccgttggggcctgttattgtgggcaggactgttagcttcaagcgcccacggtcgtctgaggaggatcacctacgtcgtccatcctggtccgggcctcgcagccggggcactccccctcagcggcccaccgagaagcagaactttcaatgttgcactcaacgcacgctactcacggtcgagcgccgccgcgggcgccccatctagagcttcccctggcgtacccagcgaaaggacacgaagaacatctaaaccagggggtgctgccctccaaggcctccgaccaccccctccacccccaccagagcccgctaggcccgcagtgcctggcgggcaacttcacccaaatcctgggggccacccagccgcggctccttttacaaagcagggtcgccaagtggtgagatcaaaagtcccgcaggagacccaatctggcggtggtagccgcttgcaggtgcatcaaaaacaacaactgcagggcgtaaatgtctgcgggggaagatgctgccacggctggtccaaagcgccagggtctcagagatgtacaaaaccctcttgtgtgccaccctgtcagaatggcggtatgtgccttcgaccacaactatgtgtgtgtaagcccggcacgaagggaaaggcttgcgagactatcgccgcccaagacaccagctcccccgtgttcgggggacagtcccccggtgcagccagtagctgggggcccccagaacaggccgccaaacatacgtcgtctaagaaggccgatactctccctcgggtctctccagtggcacagatgactttgactctgaaacctaagccatcagttggcctcccccagcagattcattcacaggtgacccccctgtcttcacaatccgttgttattcaccatgggcagacccaggagtacgtactgaagccaaaatacttcccagcgcagaagggcatttcaggagaacaaagcactgagggatccttcccactgagatacgtgcaggaccaggtggccgcccctttccagctctccaaccatacaggcagaatcaaagtcgtgttcacaccaagtatttgcaaagtaacctgcacaaaaggatcctgtcagaatagctgtgagaaagggaatactacaaccttgatttcagaaaacggacacgctgcggacacactgactgctacaaatttccgcgtggtgatttgccatttaccatgtatgaacggaggccaatgctctagccgcgataaatgtcagtgccctccgaatttcacgggtaagctctgccagatccctgtacatggtgcgagcgtcccaaaactgtaccagcactcacagcagcccgggaaagcactcggaacccacgtcatccactcgactcatacgctgccactcaccgtgacctcacaacagggggtcaaggttaagttccccccgaatatcgtgaatatacacgttaaacatccccccgaggccagcgtgcaaatccatcaagtgagccgcatcgatgggcccacagggcagaagacaaaagaagcccagccgggacagtcacaggtctcctatcagggccttccagtccagaagactcagaccattcattccacttactcccatcaacaggtcatccctcacgtctacccagtggccgcaaagacccagttaggacgctgctttcaggaaactatcgggagccaatgtggtaaagctcttcccggcctgtcgaagcaagaggattgctgcggaaccgtcggtactagttgggggtttaataaatgtcagaaatgccctaaaaagcccagctaccacggatacaaccagatgatggagtgtctcccaggctataaacgtgtcaacaataccttttgtcaggatataaacgaatgccagttacagggagtgtgtcctaatggggaatgtctgaacaccatgggttcctatcgctgtacatgcaaaattggattcggcccagaccctaccttctcctcttgcgtcccagacccgcccgtgatttccgaagaaaagggtccttgctataggctcgtgagcagcggtcgccagtgtatgcatccccttagcgtccatctgactaagcagctgtgttgttgtagcgtgggcaaggcttgggggccacactgtgaaaagtgtcccttgcccgggactgccgcatttaaagaaatctgtcccggcggtatgggctatacagtgagcggagttcacaggcgacggccaattcatcaccacgtggggaaaggcccagtgtttgtaaaacccaaaaatacacagccagtagctaaatcaacacaccctcctccattgcccgctaaggaggaacccgtagaggccctcactttcagtagggaacatggacctggagtagcagaacctgaagtcgctaccgcgcctcctgaaaaggaaatcccctctctggatcaggaaaaaactaaactggaacccgggcagccacaactgagcccgggcatctctaccatccacctgcacccccaattccccgtggtcatcgaaaagacatccccaccagtcccggtggaagtggcaccagaagctagtacaagtagtgcgtctcaagtgatagcaccaacccaagtaacagagataaatgaatgtacagtgaaccccgatatatgcggcgctggccattgtattaatctgcccgtaagatatacttgtatatgctatgagggttatcgcttctcagagcagcagcgtaaatgtgtcgacatcgatgaatgcacacaagtgcagcatctctgcagccaagggcggtgcgaaaacactgagggctctttcctttgcatctgccccgctggctttatggcttccgaggaaggcaccaattgtatcgatgttgatgaatgcctgcggcctgatgtgtgcggggaaggtcattgtgttaacaccgtcggagcctttagatgcgagtattgcgatagcggctatcgaatgactcaaagggggcggtgtgaggacattgacgagtgcctgaatccgtccacatgtccagatgaacagtgtgttaactctccaggcagctaccagtgtgttccgtgcaccgaagggtttcgagggtggaacgggcagtgcttagacgtcgacgaatgcctcgaacccaacgtatgtgctaatggcgattgcagcaatttagagggctcctacatgtgttcctgtcacaaagggtatacacgtaccccagatcacaagcactgcagggacatcgatgagtgccagcagggtaatctgtgcgtgaacggccagtgtaagaacaccgaaggatcctttcgctgcacctgcggacaaggataccaattatcggcagctaaagaccagtgcgaggatattgacgaatgccaacaccgccatctgtgcgctcacggccagtgcaggaacaccgagggctcgttccaatgcgtttgcgatcagggttatagggcaagcggattaggagaccactgcgaagacattaacgagtgcctcgaggacaaatcagtttgtcagagaggagactgtatcaatacagccggcagctacgattgcacatgcccagatggattccagctagacgacaacaagacgtgccaggacattaacgaatgcgagcaccctggcctgtgtggcccacagggagagtgtttaaacacagaaggcagcttccactgcgtatgccagcaaggttttagtataagcgcagacgggagaacttgtgaggacattgacgaatgcgtcaataacacagtgtgcgacagccacggcttctgtgacaacacggccggctcattccggtgtttgtgttatcagggctttcaggccccacaggacggccagggatgcgttgatgttaatgaatgtgaactgctgtccggagtgtgcggcgaggccttctgcgaaaacgtggagggcagctttttgtgcgtatgtgccgatgaaaatcaggaatacagccccatgacaggtcagtgcagatcccgcactagtacggatctggatgttgacgtcgaccagcccaaagaggagaaaaaggaatgctactacaacctcaacgacgcatctctgtgcgacaatgtgctagcacctaatgtgacaaaacaggaatgttgttgtaccagcggagtggggtggggcgacaactgtgaaattttcccttgtccagtcctgggaaccgcagaatttacggagatgtgtcctaaggggaaggggtttgttcctgcaggggaatcaagcagtgaagctggcggcgaaaactataaggatgccgacgagtgcctgttgtttggacaagagatctgcaagaatggtttttgtctgaatacaaggccaggctacgaatgttactgcaaacaagggacttattatgatcccgtgaaacttcagtgctttgatatggatgaatgtcaagaccccagctcctgcatcgacggccaatgcgttaatacagaagggagttacaactgtttctgcacacatccgatggtgttagacgccagcgagaagagatgcatccggcccgccgagtccaacgaacagatcgaagagacagacgtataccaggacctctgctgggagcacttgagcgacgaatacgtgtgttccaggccactcgtgggcaagcagacgacctacactgaatgctgctgcctctatggggaggcctgggggatgcagtgcgccctctgtccactcaaagattccgatgattacgcacaactgtgcaatatccctgtgaccggtaggagacaaccttatgggcgcgatgctctggtggattttagcgagcagtacaccccagaggcagacccttacttcattcaagatcggtttctgaactcattcgaagagctgcaggctgaagaatgtggaattctcaatggctgcgagaatgggcggtgtgtaagggttcaggagggatacacctgcgactgctttgacgggtaccatctagatactgctaagatgacgtgtgtggacgttaatgaatgcgacgagctcaacaacaggatgtcactgtgcaagaatgcaaaatgtatcaatacggatggtagttataagtgtctgtgtctgccaggctacgttccctccgacaagcctaattactgtacgccactgaataccgccctgaatctggagaaggatagcgatttagagtag

SEQ ID NO: 121963 - DNA, 4188 bp, synthetic construct
  misc_feature 1..4188: note = Description of Artificial Sequence: Synthetic coding sequence
  source 1..4188: mol_type = other DNA
atggatacgaaactgatgtgcctgttgttttttttttctttgccccccctactcgtgagcaatcacaccggtagaattaaagtcgtcttcactccctctatctgcaaagtaacatgcactaagggcagctgtcaaaatagttgcgaaaaaggcaacacaaccactctcatctctgagaacgggcatgccgccgatacgctcaccgctactaactttcgggtcgtgatttgccacctaccctgtatgaacggaggacagtgtagcagtagggataagtgtcagtgccctcccaattttaccggcaaactgtgccagatcccagtccacggtgccagcgttccaaagctttaccagcattctcagcagcccgggaaagccctcggcacccatgtcatacacagtactcatactctgcccctgaccgtgacctcccagcagggtgtcaaggtcaaatttccccctaacatcgtgaacatccacgttaagcatccgcctgaagcaagtgtccaaattcaccaagtatcccggattgacgggcccaccggacagaaaaccaaagaggcccaaccaggtcagagccaggtgtcataccaaggtctcccagttcaaaaaacgcagacaattcactcaacttactcgcatcaacaggtgatcccacatgtttaccctgtggctgcaaaaacccagcttggcaggtgtttccaggaaaccattggatctcagtgcggtaaggccctcccgggcctgagcaagcaagaggattgctgtggcaccgtgggtacgagctggggcttcaacaagtgccagaagtgtccaaaaaaaccttcctaccacggatacaatcaaatgatggaatgcctcccaggatacaagagagtgaataacacattctgccaggacattaatgagtgccagctgcagggagtgtgtcctaacggggagtgtctgaacactatgggcagctaccgttgtacttgtaagatcggatttgggcctgatcctacgtttagttcatgtgtgccagatccccccgtcatcagtgaagaaaagggaccatgttatcgccttgtaagttcggggaggcagtgtatgcacccgctctcggtccacttaaccaagcagctctgttgctgctccgtgggcaaagcctggggaccccattgcgaaaaatgtcctttgcccggaacggctgccttcaaggaaatttgccccggaggcatgggctataccgtcagcggcgttcacaggcggagacccattcaccaccatgtggggaaaggaccagtcttcgtcaagccaaaaaacacacaacccgtggccaagtctacgcacccaccaccactgcccgcaaaagaggagcccgtcgaggcccttaccttttctagagagcacggaccaggcgtcgcggagccagaggtggccacagcaccccccgagaaagagattcccagccttgaccaggagaaaactaagcttgaacccggccagccccaattaagccctggtattagtaccatccatctgcatccccagtttccagtggtgatcgaaaagacctctcctccagtgcccgtggaagttgcccctgaggcatccactagctctgcatcgcaggtgatcgcccccacccaggtaaccgaaattaacgaatgtaccgtcaatcctgacatctgtggagctgggcactgcattaacctccccgtgagatatacctgcatctgttacgaaggctataggttctcagagcagcagcgaaaatgtgtggacatcgacgagtgtacccaagttcagcatttatgttcccaaggtaggtgcgagaatacggaaggctcgtttctctgcatatgtcccgccggattcatggcctcagaagagggaaccaactgtatagatgtggacgagtgcttacgccccgatgtgtgcggggaagggcactgcgtgaataccgttggtgcgttccgctgcgagtattgcgacagtggataccgcatgacccaaaggggcaggtgcgaggacatcgacgagtgcctgaacccgtccacatgccccgacgagcagtgtgtgaactcacccgggtcttatcagtgcgtaccttgtaccgagggcttcagaggctggaacgggcaatgcctagacgtcgacgagtgtttggagcctaacgtttgcgccaacggagactgctccaacctggaaggctcatatatgtgttcgtgccacaagggatacactcggacacctgatcataaacactgtcgcgacattgatgagtgtcagcagggcaatctgtgtgtaaatggccagtgtaagaacacagaaggatcctttaggtgcacttgcggccagggataccaactgagcgccgctaaggaccagtgcgaggacatcgacgaatgtcagcaccggcacctttgcgcacacggacagtgtaggaacactgaaggcagcttccagtgtgtgtgcgaccagggttatagggccagcgggctcggagatcattgcgaggacataaacgagtgcctggaagataagagcgtgtgccagcggggagattgcatcaacaccgccggatcatacgattgtacatgccctgatgggttccagctcgatgacaacaagacctgtcaagatatcaacgagtgcgagcacccaggcctttgtggcccccagggtgagtgtctgaataccgagggaagcttccactgcgtctgccagcagggcttctccattagcgcagatgggcgaacatgtgaagacattgacgagtgtgtaaacaacacagtctgtgatagccatgggttctgcgataacactgcaggttcctttcgatgtctgtgctatcagggtttccaggcaccgcaagatgggcagggatgcgtggacgtgaatgagtgcgagctgctttcaggagtctgtggtgaggctttttgcgagaacgtggaagggtcattcttatgtgtgtgcgcggacgagaaccaagaatacagcccgatgacaggccagtgcagatcacgaacctccactgatctggacgtagatgtcgaccagcccaaagaagagaagaaggaatgttattacaacctgaatgacgctagcctgtgtgacaacgtgctagcccctaatgtgaccaaacaggagtgctgttgtacatccggagtgggctggggagataactgcgagatctttccttgccctgtcctgggcactgccgagtttaccgagatgtgccctaagggtaaaggcttcgtgcccgctggcgagagttcatctgaggcagggggggagaattataaggacgcggacgaatgtctcctcttcggacaggaaatctgcaagaatggattctgcttaaatacccgcccaggttacgaatgttactgtaagcaaggcacttattacgacccagttaaattgcaatgttttgacatggacgaatgccaggatcccagctcgtgtatagacggacagtgtgtaaatacagaaggcagttataactgcttctgtacacaccccatggtgttggacgcctctgaaaagcgttgcattcggcctgccgaatctaatgaacaaatagaggagactgatgtgtaccaggatctttgctgggagcatctttccgatgaatatgtgtgtagtcggccactcgtgggtaagcagactacatatacagaatgttgttgcctgtatggcgaggcgtggggtatgcaatgtgctctgtgcccactgaaggactctgacgattatgcacagctgtgcaacattcctgttacaggtcggcgtcagccctacgggagagacgctctggtcgattttagcgagcagtatactccagaggctgacccatatttcattcaggaccgatttctcaactccttcgaagagcttcaggccgaagagtgtggaatcctcaacggctgtgagaacggccgatgcgtgagggtgcaggagggctatacctgcgattgctttgatggctaccaccttgacacagctaagatgacctgcgttgacgtaaatgagtgcgatgaactgaacaaccgtatgagcctctgtaaaaatgctaaatgcatcaatacggacggctcgtacaaatgtctgtgcctgcccggctacgttccaagtgacaaaccaaactattgcaccccactgaataccgctctcaatcttgagaaagacagtgacctggagtag

SEQ ID NO: 121964 - DNA, 4062 bp, synthetic construct
  misc_feature 1..4062: note = Description of Artificial Sequence: Synthetic coding sequence
  source 1..4062: mol_type = other DNA
atggacacgaagttgatgtgtctgctgttttttttctccttgccacctctcctagtgtctaatcataccggacgcatcaaagttgtgtttaccccaagtatttgtaaagtcacatgtacaaagggctcttgtcagaactcctgcgaaaagggtaacaccacaaccttgatcagtgagaacgggcatgctgccgacaccctgacggctacaaacttccgcgttgtcatctgccatctgccctgcatgaatgggggccagtgcagtagccgggacaagtgtcagtgtccaccaaattttacaggaaaactgtgtcaaattccagtgcacggcgccagtgtgcctaagttatatcaacactcacagcagcccggaaaagccctcggcactcacgtgatccactccacccacacactccctttaaccgtcacctctcagcaaggcgtgaaggttaagtttcctcccaatatagtaaacatccacgtgaagcatccgccagaggcttcagtgcagattcatcaggtgagccggattgatggcccgacgggacagaagacaaaggaagctcagcccggacagtcccaggttagttatcagggcctgcccgtccaaaagacgcagaccattcattccacgtatagtcaccagcaggttatcccgcacgtctacccagtcgcagccaaaactcagctgggcagatgctttcaagaaaccatcgggagccagtgcggcaaggcgctgcccggattgtcaaaacaggaggactgttgcggaactgttggcacatcatgggggttcaacaagtgtcaaaagtgtcctaagaagcctagttaccatggttacaatcaaatgatggagtgcctgcctggatacaaaagggtcaacaacacattctgccaggatatcaacgagtgtcaactccagggggtatgccccaacggcgagtgcttgaacacgatgggcagctaccgttgtacctgcaaaatcgggtttggaccggatcccactttctcatcttgcgtgccagacccacccgtgatctccgaagaaaagggaccctgctataggctggtgtcttctggccgccagtgcatgcaccctctgtccgttcacctgaccaagcagctgtgctgttgttcagtgggcaaggcatggggcccacactgtgagaagtgtcctcttcctggtaccgccgccttcaaggaaatctgtcctggtgggatgggctacacagtcagcggggtccatcggcgtagacccatccatcaccatgtggggaagggaccggtctttgttaagcctaaaaacactcagcctgtggcgaagagcacccaccccccccctctccctgccaaggaggaacctgtcgaggctcttaccttcagccgggagcacgggcccggcgtggcagagcctgaagttgcaacggccccacccgagaaagaaatcccgtctctagaccaagagaagactaagctcgagcccggccagcctcagctgtcccctggcatttccaccatccatcttcacccacagttccctgtggtaatagaaaaaaccagcccgcctgttcccgtggaagtagctcccgaagcttctacttcaagcgcctcacaggtgatagccccaactcaagttacagagatcaacgaatgcaccgtgaatccggacatttgcggggccggtcactgtatcaatctgccagtccggtatacctgcatctgctacgaaggctacagattctcagagcagcaaagaaaatgcgtcgatatcgacgagtgcacgcaggtgcagcacctgtgctcccaaggcagatgtgagaataccgaaggcagcttcctctgcatttgtcctgccggattcatggcctcggaggaaggcacaaactgcatagatgtggacgagtgtctccgcccagatgtgtgtggagaagggcattgcgtcaatactgtgggagcatttaggtgtgaatactgcgactccggttataggatgacgcaaaggggtaggtgtgaggatattgatgaatgtctgaaccccagtacatgcccagatgaacagtgcgtcaattcgccgggttcctatcagtgcgtcccctgcactgagggcttccgagggtggaacgggcaatgcctggatgttgacgagtgtttagagcccaatgtttgtgccaacggcgattgtagcaatctcgaagggagctacatgtgttcctgccacaaagggtacactaggacacctgatcataagcactgcagggacatcgacgagtgccagcaggggaacttatgtgttaacggtcaatgcaagaatacagaggggtcctttcggtgtacctgcggccagggataccagttatccgccgccaaggaccagtgcgaagacattgatgagtgccagcaccgccatctgtgcgcccacgggcagtgccgcaacaccgagggaagctttcaatgcgtatgcgatcagggataccgagcgtctgggttaggtgatcattgtgaagacattaacgagtgtctcgaggataagagtgtatgccagcggggcgactgtattaacactgccgggtcttatgactgtacttgccccgatggcttccagctcgatgataataagacatgtcaggatattaacgagtgtgaacatcccgggctatgtggcccacaaggggagtgtctgaacacagagggatcatttcactgcgtttgccagcagggctttagcatatcggctgacgggcgcacttgcgaagatgtgaatgagtgtgaattattgagcggtgtttgtggagaagctttttgtgagaatgtcgagggctcttttttatgcgtctgcgccgacgaaaatcaggaatattcacctatgactggtcagtgcagatcaaggacctcgacggatttggatgtggacgtcgatcagcccaaagaggaaaagaaggagtgctactataacctaaatgatgcttcactttgtgacaatgtgcttgcgcccaatgtgacaaaacaagaatgttgttgcacatccggcgttggctggggtgacaattgtgagatctttccctgtcctgtgctgggaaccgccgagtttacagagatgtgtcctaaaggaaaaggcttcgttccggctggggagtcgagctccgaggctgggggcgagaattataaagacgccgatgagtgtctgctctttggacaggagatatgcaaaaacggcttttgcttaaacactcggcctggctacgagtgttattgtaaacagggaacatattacgatcctgtgaagctccaatgctttgacatggacgaatgtcaagacccctctagttgcatcgacggccagtgtgtaaatacagagggatcttacaattgtttctgcacccatcccatggtgctggacgcttcagagaaaagatgtatccgtccagccgaaagcaacgaacagatcgaagaaaccgacgtctaccaggacctgtgttgggaacacctcagtgacgagtatgtatgcagcagacccctggtgggaaaacagactacatacaccgagtgttgctgtctgtatggcgaagcctggggcatgcagtgcgctctttgtccactgaaggactctgacgactatgctcagctgtgcaatattcccgtgacagggagaaggcagccctacgggcgtgatgccctggtggatttcagcgaacaatacacccccgaggcggatccctatttcattcaggatagattcctgaactcctttgaagagctccaggcagaggaatgcggtattcttaatgggtgcgaaaatgggaggtgcgtgcgcgtgcaagaaggttatacttgcgactgcttcgacggataccacctggacactgcgaagatgacgtgtgttgatgtgaacgaatgcgacgaattaaacaaccggatgtccctgtgtaaaaacgccaaatgcatcaataccgacggatcgtataaatgcctctgtttgcccggatacgtccccagcgacaagcctaactattgtacacccctgaatacagcacttaatcttgagaaagactccgatctggaatag

SEQ ID NO: 121965 - DNA, 4029 bp, synthetic construct
  misc_feature 1..4029: note = Description of Artificial Sequence: Synthetic coding sequence
  source 1..4029: mol_type = other DNA
atggacacaaagttgatgtgtctgctctttttcttctctctgccaccactgctggtatccaaccatactggcaggatcaaggtggtattcacccctagtatttgcaaagtcacgtgcaccaaaggatcttgtcagaatagctgcgagaaagggaacacaaccaccttgatcagcgaaaacggacacgcggctgatacactcacagcaaccaactttcgcgtcgtcatatgccacctcccttgcatgaatggagggcaatgttcttcgcgtgataaatgccagtgtcctcccaattttactggaaaattatgccaaatcccggtgcatggcgccagtgtgccgaaactgtaccaacacagccagcagcccggaaaagctctggggacacacgtaatacactccacgcatactttgcctctgaccgtcacctcccagcagggtgtgaaagtgaagtttccaccaaatattgtcaacatacatgtaaaacaccctccggaggctagcgtgcagatacaccaggtgagtcggatcgacggtcccaccggccagaaaactaaagaagcacagccgggacaaagccaggtctcctatcagggattgccagtgcaaaaaactcaaacgatccattcaacatatagccaccagcaagttattcctcatgtgtatcctgttgctgcaaaaacgcagctagggagatgctttcaggagaccatagggtcccagtgcggtaaagctttgccgggcctctcaaagcaggaagactgttgcgggacggtcggaaccagctggggtttcaacaagtgccagaagtgcccaaagaaaccctcctatcacggatataaccagatgatggaatgcttgcctggatataagcgggtgaacaataccttttgccaagacattaacgagtgtcagctccaaggagtttgtcctaacggcgagtgcctgaatacgatgggctcctataggtgcacctgtaagatcggttttggtccggaccctacattcagctcctgtgtgcctgaccccccggtcatcagcgaagaaaaggggccatgttatcgtctcgttagtagcggaaggcagtgcatgcacccattgtcagtacatctcactaagcagctatgctgctgctctgtcggcaaagcatggggccctcattgtgaaaaatgtcctctccctggaacggccaaagaagagcccgtcgaagcattgacattctcccgtgagcacggccccggcgtggccgagcctgaagtggcgacagcgccgcccgagaaagagataccatcacttgatcaggaaaagactaagttggagcctgggcagcctcaactgagtccagggatctctaccatccacctgcaccctcagtttccagtggtgatcgagaagacatccccacccgtgcccgtggaagtggcccccgaggcttcgacctcctcggcctctcaggtcattgcccctacgcaggttacagagatcaacgagtgcacagtcaatcctgacatctgcggcgccggtcactgcataaatcttccagtacgctacacctgtatttgttacgaaggttataggttttcagagcaacaacgaaagtgcgtggacattgatgagtgcacacaggtgcagcacctctgttctcagggccggtgcgagaacactgagggtagcttcctgtgtatctgcccagcagggtttatggcatcagaggaaggcactaactgcatagatgtcgacgaatgtctgaggcctgatgtgtgtggcgaaggacactgtgtaaataccgtaggcgcctttcgatgcgaatactgtgattcagggtacagaatgacccaaagaggaaggtgcgaggatatcgacgagtgtctgaacccgtcaacctgtcctgacgaacaatgcgttaactctcctggaagctaccagtgtgttccctgtactgagggttttcgtggatggaatgggcagtgcctggacgtggatgaatgtctcgagccgaacgtgtgtgcaaacggtgattgctccaacttggaaggctcttatatgtgctcttgtcataaaggctacacgcggacaccggatcacaagcactgtcgcgacatcgacgagtgccagcagggtaacctctgtgtcaatgggcagtgcaaaaatacagagggctcctttcgatgtacctgcggacagggataccagcttagcgctgcaaaagatcagtgtgaagacatagacgagtgccagcacagacacctttgtgcgcacggtcaatgcagaaacacagagggcagcttccaatgcgtgtgtgatcagggctaccgagcctctggactcggcgaccattgtgaggatattaatgaatgtttagaagataagtctgtctgccagcgaggtgattgcatcaatacagcgggaagctatgattgtacttgcccggatggctttcagttggacgataataagacttgtcaggacatcaacgagtgtgaacaccccggcctctgcggtccccagggggagtgccttaatactgaggggagtttccactgcgtgtgtcagcaggggttttctatttctgctgacggaagaacatgcgaggatatagacgagtgtgtgaataataccgtatgcgacagccatgggttttgtgacaataccgccggttcctttcgctgtctgtgctaccaggggttccaagccccacaagacggccaggggtgcgtcgatgttaacgagtgtgagctcctttctggtgtttgcggagaagctttctgtgagaacgtagagggctccttcctgtgtgtatgtgccgacgaaaatcaggaatactcgcctatgaccggacaatgtagatcccgcacctctactgatctagatgtcgatgtagatcagcccaaggaagaaaagaaagagtgttattacaacctaaacgacgcatccctgtgtgacaatgtcctcgcacccaacgtgaccaagcaagagtgttgctgcacatctggggttgggtggggtgacaactgcgaaatttttccgtgcccggtgctcgggaccgccgagtttacagagatgtgccctaaaggcaaaggctttgtgccggctggagagtcctctagcgaggcggggggggagaactacaaggatgcagatgagtgtttgttgttcggtcaggagatctgcaaaaacggcttctgcctgaacacaagaccgggctacgagtgttactgtaaacaaggcacctactacgatcccgtcaaactccagtgtttcgacatggatgagtgccaggacccttcttcctgcatcgacggacagtgtgttaatactgagggatcttacaattgtttttgtacacaccctatggtcctcgatgcctcagagaagcgctgcataaggcctgccgaatccaacgagcagatcgaggagacggacgtgtatcaggacctctgctgggagcatctgtcggatgagtacgtgtgttctaggcccctggttggtaagcaaacaacctatacagagtgttgctgtttgtacggagaggcctgggggatgcaatgtgctctgtgccctctgaaagacagcgatgactacgcgcagctctgcaacatccctgtgaccggaagacgccagccctacggacgtgatgccctggttgatttctcagagcagtatacacctgaggcagatccctactttatccaggatagatttttaaatagctttgaagagctgcaggcagaggaatgtggtatcctcaacgggtgcgaaaatggaaggtgtgtgcgggtccaggagggctatacttgtgactgttttgatggttaccacctggacaccgccaagatgacgtgtgttgacgttaatgagtgcgatgagctgaacaacaggatgtccctgtgtaagaacgctaagtgcattaacactgacgggtcttacaagtgtttgtgtctgcctggttacgttccatctgacaagcctaactactgcacgccgcttaatacagctctcaacttggagaaggacagcgacctagagtag

SEQ ID NO: 121966 - DNA, 5466 bp, synthetic construct
  misc_feature 1..5466: note = Description of Artificial Sequence: Synthetic coding sequence
  source 1..5466: mol_type = other DNA
atgaggccacgaactaaagcccgcagcccaggcagggcgttgcgcaatccatggagagggtttctcccactcacactggctctgttcgtaggggccggccacgctcagcgggaccccgttggacggtatgagccagccggcggcgatgctaacaggctgcgacgacctggtgggagctatccagccgctgccgcagcaaaggtgtacagtctgtttcgggagcaggacgctccagtggcaggtctgcaacctgtggaacgagcccagccaggatggggatccccccgaaggccgactgaggccgaagcgagaagacctagccgcgctcaacaatccagaagggtgcagccacccgctcaaacccgcagaagtacgcccctgggtcagcagcagcccgccccacgcacccgcgccgctcccgccctgcctcgcttaggcactcctcaaagatcaggcgccgcaccaccgaccccaccccgggggcgactgaccgggcgaaatgtttgcggcggtcagtgctgcccaggttggaccacggcaaatagcacgaaccactgcatcaaacctgtgtgcgaaccgccctgtcagaatcggggcagttgctcgagaccccaattgtgtgtgtgtcgttccgggttccggggcgcaaggtgcgaagaggtgatccccgacgaagagtttgatccacagaactccagactggccccacgacgctgggccgaaaggtccccaaacctgcggaggagtagcgcagcgggcgagggaactctcgctcgggctcaaccgcctgcacctcagtcaccgcctgcgccgcagagtcctcccgccggcacactgtccgggctctcacagacccacccatctcagcagcacgtgggcctctctcgaactgttaggctgcaccctaccgcgacggcaagctctcagctgtctagtaatgcccttcctcctgggccagggctcgaacagagggacggaactcagcaggctgtgcccctcgaacacccaagctctccttgggggttgaatctcacagagaagatcaagaaaattaaaatcgtgtttacccctacgatttgcaaacagacttgcgcaaggggacattgtgctaatagttgtgaacggggagacaccaccactctgtacagtcaaggcggacatggacacgaccccaagagcgggttccggatctatttttgccagattccatgtcttaatggaggtcgctgcataggcagggatgaatgctggtgccctgctaacagtaccggaaagttttgtcatctgcccataccccaacctgatagggagcccccagggagagggtcacgcccccgagcactgttggaagcccctctgaagcaatcgaccttcactctgccattgagtaatcagctagcgagcgtgaatccctcgcttgtcaaagtgcacatccatcacccacccgaagcatctgtgcagattcatcaagtggcccaggtcaggggtggagtggaggaggcccttgtggaaaacagtgtcgagactagacccccaccctggttgccagcgtcacccgggcacagcctgtgggactcaaacaacatccccgcaaggtcgggtgagcctccgcgtcctctccctcctgccgcaccccggccccgtggcctgttagggcgctgctatctcaatacagtgaacggccagtgcgcaaatccattgctcgaattaaccactcaggaggattgctgtggatctgtaggggctttttggggcgtgaccctgtgtgccccttgtccccctagaccagcatcccccgtgatcgagaacggccaactcgagtgccctcaggggtacaagcggttgaacctaacccattgccaggacataaacgagtgccttactctcggactgtgcaaagatgctgagtgtgtaaataccagaggaagctacttgtgcacatgccggcccgggttgatgctggatccctcccgcagtaggtgcgtgagtgacaaggccatcagcatgctgcagggcttatgctacaggagtttgggaccagggacttgtacattacccctagcacagagaattaccaagcagatctgttgctgctcccgcgtaggcaaggcctggggaagcgaatgtgagaaatgtcctctcccaggtacagaggccttcagggaaatatgcccagcggggcacggatatacctatgcaagctctgacattcgtctgagcatgcggaaagctgaagaggaggaactggcccgtcccccccgggagcagggccagagatccagcggagccctccccggacctgccgaacggcagccactgcgggttgtgaccgacacttggctggaggcggggacgatcccagacaagggagactcccaggccggtcaagtgacgacatccgtgactcacgcgcccgcctgggtgacgggcaacgcaactacccctcccatgcccgagcagggaattgcagagatccaggaggaacaagtcacgcctagtactgacgtgcttgtgaccctgagtactccagggattgataggtgtgctgcgggagcaacaaatgtgtgtggcccaggcacctgcgtcaatctgcccgatggataccgttgtgtgtgctcccctggctaccagctgcatcctagccaagcttactgtacagatgataacgaatgtcttagagacccgtgcaagggcaagggcagatgtattaatagggtgggaagttattcctgcttttgctatcctggctacaccctggcaacgagcggcgctacacaggagtgccaggatatcaatgaatgcgagcaaccgggggtttgctctggcggtcagtgcacaaatactgaaggctcatatcactgtgagtgcgaccaagggtatataatggtacggaaggggcactgccaggatatcaatgaatgtcggcacccaggcacatgccccgatggccgctgcgttaacagcccagggagctatacttgtctggcctgcgaggaagggtacagagggcagagcggcagctgtgtagatgtcaacgaatgtctgactcccggagtatgtgctcacggtaagtgtactaatctcgagggttcctttcgctgttcttgtgaacagggatatgaggtcactagtgacgaaaagggatgccaagacgtcgatgagtgcgccagcagagcctcatgtcccaccggtctttgtttaaatacagagggtagcttcgcatgcagcgcctgtgagaatggctactgggtcaatgaagatgggaccgcctgtgaagatctggatgagtgcgctttccccggagtgtgtcccagcggcgtgtgtactaacacagcagggagtttctcatgcaaagactgtgatggcggctacagaccaagtccgctgggagattcatgtgaagatgtcgatgaatgtgaggacccacagagttcctgccttggcggtgaatgtaaaaataccgtggggtcttaccaatgtctttgccctcaaggatttcagctagccaacggcaccgtatgtgaagacgtgaatgagtgcatgggcgaagagcactgtgcaccacatggggaatgtctaaactctcacggtagtttcttctgtctgtgtgcaccaggattcgtcagcgcggagggcggaactagctgccaggacgtcgatgagtgtgccacaaccgatccatgtgtgggaggacattgcgttaacacagaaggaagcttcaactgcctctgcgaaacagggtttcaaccctccccagaaagcggcgaatgcgtagatatagatgaatgcgaagactacggggacccagtgtgcgggacttggaagtgtgagaacagcccaggatcataccggtgcgtgctgggctgccaaccggggtttcacatggccccaaacggcgattgtatagacattgacgaatgcgcaaacgacaccatgtgcggatcacacggcttttgcgataacactgacgggtcttttcgctgcctttgcgatcaaggatttgaaatttcccccagcgggtgggattgcgtcgatgtgaatgagtgcgagctgatgttagctgtttgcggcgcagcgctctgcgaaaatgtcgagggcagttttctatgtctgtgtgcatctgacctggaagaatatgatgcacaggaaggtcactgtaggccacgcggagcaggtggacagagtatgtccgaggcgccaaccggagaccatgcccctgcaccgactagaatggattgctattccggccaaaagggccacgctccttgctcctccgtcctggggaggaatactacccaggccgagtgctgttgcactcagggcgcttcatggggagacgcgtgtgatctgtgcccctctgaagattcagctgaattcagcgagatatgcccttccggaaaggggtacattccggtggaaggcgcctggacatttggacagactatgtacactgatgctgatgaatgtgtgatctttggacctggcctttgccccaatggccgatgtctgaatactgtccccggatacgtttgtctgtgcaaccctggatttcactatgacgcctcacacaagaaatgtgaagaccacgatgaatgccaagacctggcttgcgagaacggagagtgtgtgaacaccgagggcagcttccactgtttttgctccccgccgctgaccctcgatctctctcagcagcgctgcatgaacagcacctcctccactgaggacctcccagaccatgacatacatatggacatatgttggaaaaaggtcacaaatgatgtttgcagcgagcccttacgcggacatcggaccacttatacagaatgctgctgccaggatggggaggcttggtctcaacaatgtgccctgtgtcctcccagatcctctgaggtatatgcacagctatgtaatgtggcccgcattgaggcagagagagaggctggagtgcacttccggcccggctacgagtacgggccaggacctgacgatctgcattattccatctacggtcccgatggggcccccttttacaattacctcggcccagaagatacggtccctgagccagcgtttcccaataccgccggacatagcgctgacaggacacctatcctggagtcacctctgcaaccttcagagctccagccacactacgtggcatcccatcccgaaccacccgctggattcgaggggttgcaggctgaggaatgcggcattttgaatggctgcgaaaatgggcggtgcgttagggtccgggagggatacacatgcgactgcttcgagggattccagttggatgctgcccacatggcctgcgtagatgtaaacgagtgcgatgacctcaacgggcccgccgttctgtgtgttcacgggtactgcgagaataccgaaggctcctaccggtgccactgttcgcccggctacgtggctgaggctgggcctccccattgcacggccaaggagtag

SEQ ID NO: 121967 - DNA, 3912 bp, synthetic construct
  misc_feature 1..3912: note = Description of Artificial Sequence: Synthetic coding sequence
  source 1..3912: mol_type = other DNA
atgccaggaccccggggcgccgccgggggtctcgcgccagaaatgaggggggccggggccgcagggcttcttgcccttttactgctcttactcctgctgcttctcggtctcggtggcagagttgaaggtggccccgcaggcgagcgcggcgctggtggaggtggagcactggcccgggaacgctttaaggttgtttttgccccagttatctgcaagcggacttgtcttaaggggcagtgtagggatagctgccagcagggctcaaatatgacgctcatcggagaaaatggacactctacagacacactcactggtagcggcttcagggtggtggtctgccctctgccctgcatgaacgggggccaatgcagctcaaggaaccaatgtctttgcccccccgattttaccgggcggttctgtcaggttcccgccggaggcgctggtggaggtactggggggagtggccccggtctatcgaggacaggggccttgtcgaccggcgcccttccaccactggcgccggagggtgattcagtggccagcaagcacgccatttatgccgtgcaggtcatagctgacccccctggcccgggcgaggggccacctgcccagcatgctgctttcctcgtgcccctgggacctggtcaaatctcagcagaggtccaggcacccccacctgtcgtcaatgtaagggtgcatcacccccctgaggcgtctgtgcaggtacaccgaattgagagctctaacgctgagagcgcagctccaagccagcatctcctgccccaccctaaaccaagccaccctcgcccccctacgcagaaaccactgggacgttgttttcaggacacactccccaagcaaccttgtgggtcgaaccctctgcctgggctaaccaagcaagaagactgttgcggttccattggaaccgcttggggtcaatcaaaatgtcacaaatgtccgcaactgcaatacactggcgtccagaaacccgggcctgtccggggtgaggtgggggccgactgccctcagggatacaagcggctcaattccacccactgccaggacattaatgaatgtgccatgccaggggtgtgtaggcacggagattgcctaaataatccgggatcctacaggtgcgtttgtcccccaggccactcccttggccccagcaggacccagtgtattgcagacaagcctgaggagaagagcctttgttttaggctcgtaagcccagagcatcagtgtcagcacccactgacaacccgtttaacccgacaactatgctgttgttcggtgggaaaggcctggggtgcccgttgtcagcgctgtccgacggatggtacagcagcctttaaagagatatgcccagccggcaaaggctaccacattctcaccagtcaccagaccctgaccattcagggcgaatcagactttagcttgttccttcacccagacggtcccccgaagcctcagcagcttccagagtctcccagccaggccccacctccagaagacacggaagaggagcgcggagtgacgactgactcccctgtaagcgaggagcgtagtgtgcagcaaagccaccccacagctactacaacccctgcacgaccctatcccgagctcatttcccgcccctcaccgcccacaatgcggtggttcctgccagatctcccgccttctcgctccgcagtagagattgctccaacacaggtcactgaaaccgacgagtgccggttgaatcagaacatatgcggtcacggagagtgtgtccctggcccccccgattacagctgccactgcaatcccgggtatcggagccatccccaacaccggtactgtgtagacgtaaacgagtgcgaagctgaaccatgtgggcccggacgcggcatctgtatgaacacaggcggatcatataactgtcattgcaaccgcggttaccgcctgcatgtgggcgctggaggccggagttgtgtagacttgaacgagtgcgccaagccccacctgtgtggtgatgggggcttctgtatcaatttccctgggcactacaagtgtaattgttaccccgggtatcggctaaaggcttcccggccacccgtttgcgaggacatcgatgaatgcagagatccctcatcctgtcccgacggaaagtgcgaaaataagcccggaagctttaaatgcattgcctgccaaccgggctataggagtcagggcggcggagcttgccgcgacgtcaatgagtgtgcggaaggttcaccttgctctcccggctggtgtgagaatctgccaggatcatttcggtgtacgtgcgcccaaggttacgcccctgcccctgacggtaggagctgcctcgatgtggacgaatgtgaagctggtgacgtctgtgataacggcatctgctcaaacactcccggaagcttccaatgccagtgcctctctggctatcacctgtctcgagatagaagtcactgtgaagatatagacgagtgcgattttcccgcagcttgtattggaggggactgcatcaacaccaacggatcgtatcgctgcctgtgtcctcagggtcatcggctggtgggaggcaggaagtgccaggatattgacgagtgctcacaggacccctcactgtgtttaccacatggtgcatgtaaaaatctacagggtagttacgtctgtgtgtgcgacgagggcttcacacctacccaggatcagcacggatgtgaagaggtcgagcaacctcatcacaagaaggaatgctatctgaatttcgatgacaccgtcttctgtgattcagtgctggccacaaatgtgacccagcaggagtgttgctgctccttgggagcagggtggggagatcactgcgagatatacccctgccccgtctacagttccgccgagtttcactctctgtgtccggatggcaaggggtatacacaggacaacaacattgtgaactacggcattcccgcccatagggacatcgatgagtgtatgctgtttgggtctgaaatctgtaaagagggtaaatgtgtcaatacacagccaggctatgagtgctactgcaaacaaggattctactacgacggcaatctccttgagtgtgtagatgtcgacgagtgcttagacgagtcgaattgtcgaaacggcgtgtgcgaaaatacgcggggaggctatcggtgtgcatgtactccgcccgccgagtattctcctgcccagcggcaatgtttatctcccgaggagatggatgtggatgagtgtcaagatccggccgcttgtcggcccggacggtgcgtcaaccttccgggaagctacagatgtgagtgtaggccaccctgggtcccgggtccgtctggccgggattgtcaactgcccgaatcacctgctgagagagccccagaacgtcgcgacgtatgttggtctcagaggggcgaagatggcatgtgcgcaggtcctctagccggaccagctcttacgttcgacgactgctgttgccgtcagggtagagggtggggcgcccagtgtcggccgtgcccaccgagaggcgcaggctctcattgccctacttcccagtcagaatcaaactctttctgggatactagccctcttctgctgggaaagcctcctcgagatgaagattcatctgaagaggattctgatgagtgcagatgtgtatccggccggtgcgtccccagaccaggtggagccgtgtgcgagtgccctggaggctttcagctggatgcaagcagagcccgctgcgtggacattgatgaatgcagagagttgaaccagcgaggtctgctttgcaaatcagaaaggtgcgtcaacacttccggatcatttagatgcgtctgtaaagctgggtttgctaggtctcggccccacggggcatgcgtgcctcaacgcaggagatag

SEQ ID NO: 121968 - DNA, 792 bp, synthetic construct
  misc_feature 1..792: note = Description of Artificial Sequence: Synthetic coding sequence
  source 1..792: mol_type = other DNA
atgctcttcggcagcgagatttgtaaagaaggaaaatgtgttaacacccagcctgggtatgaatgctactgcaagcagggattctattacgacggtaatttgttggaatgtgtggatgtagatgagtgtttggacgagtctaattgtaggaacggtgtctgcgagaacactcggggtggataccggtgtgcttgcacacctccagctgagtactcgccggcccagcggcagtgcctcagtccggaagagatggatgtggacgaatgccaggatccagcagcctgtagacccggccggtgtgtgaacctgcccgggagttaccggtgtgaatgtaggcccccgtgggtgcccggccccagtggaagggactgtcagcttcccgaaagccccgcagagagagctccagagcggagggacgtgtgttggagccaacggggagaggatgggatgtgcgcgggaccactagcagggcccgctctcactttcgatgactgctgctgcagacagggaagaggctggggcgctcagtgccggccatgtccccctcgcggggcaggcagccactgtcccacaagtcagagtgagtcaaattcattttgggatacaagccccctactgctgggtaaaccgcccagggatgaagatagctcagaggaggacagcgatgaatgtcgctgcgtgtcggctgccgcctgccggggtagagctgccccatgtgcttcagtcccagctgccagctctagtaccccgcctgccccggcagcgtggataagcacttcggctgagtcatag

SEQ ID NO: 121969 - DNA, 3771 bp, synthetic construct
  misc_feature 1..3771: note = Description of Artificial Sequence: Synthetic coding sequence
  source 1..3771: mol_type = other DNA
atgcctggcccaaggggcgctgcaggcggacttgcccctgagatgcgcggggcaggcgctgccgggctgctcgcattattgctcttgctgctgctattgttattgggactgggcggacgagtggagggtgggccggcaggcgagaggggtgccggtggggggggggcgctcgccagagaaaggttcaaagtcgtttttgcacctgtgatctgtaagcgcacctgtctcaaaggacagtgcagagattcatgtcaacagggaagcaacatgacgctgatcggcgaaaacggccacagcaccgacactctgaccggcagtggattccgcgttgtagtgtgtcccctcccctgtatgaacggtggccagtgcagctcgcgtaaccagtgcctctgtccccccgattttacaggaaggttctgccaggtgcccgccgggggcgctggcggggggaccggcggctccgggcctggactttctcgaactggcgctctgagtacaggggctctgcctcctctcgctcctgaaggagactccgtggcttccaaacacgcgatttatgctgtgcaggtcattgccgaccctcctggccccggagaaggcccacctgcacagcacgctgccttcctcgtccctttgggtcccggccagatatctgcggaggtgcaagccccaccccccgttgtgaacgtgcgcgtgcatcatcccccagaggcttccgtgcaagttcataggattgagtcttcaaacgcagagagcgccgcccctagccaacacttgctaccccaccccaaaccaagccaccctagaccaccaacccagaagcctctcggccgctgctttcaagatacactcccaaagcagccatgtggcagtaatcctctgcctggactgaccaagcaggaggactgctgcggatccattggcactgcgtgggggcagagtaaatgccataaatgtccgcagttgcagtacactggagtgcagaaacccggccccgtgaggggtgaggtgggagccgattgccctcagggttataagagattaaactccacccattgccaggatattaacgaatgtgctatgcctggcgtgtgccgtcacggagattgtctgaataacccgggctcctaccgctgcgtttgcccacctggccacagcctagggccatctcgaacacaatgcattgccgataagcctgaggaaaaatctctgtgtttcagattggtgtcacctgagcatcagtgtcagcatcccctcacaacccgcttgacccgccagctctgctgctgcagcgttggcaaggcatggggggcacgatgtcagcgatgccccaccgacgggacagctgccttcaaggaaatatgccctgccgggaagggatatcacattctgacaagccatcagaccctcactattcagggcgagtccgacttctccctcttcctgcacccggatggaccacccaagccacagcagcttcccgaaagtcctagccaggcacctccgcccgaagataccgaggaagagcgcggcgtcactaccgacagccccgtgtccgaagagcgtagcgtgcagcagtcccaccccacagcaaccacaacacctgcccgtccatatccagaattgatatcaagacctagtccccccacaatgaggtggttcctgcctgacctccccccctcccggtctgctgtcgagatagcacctacgcaagtgaccgaaaccgacgagtgcagacttaatcaaaatatctgtgggcacggggagtgtgtgcccggccctccagactactcatgtcactgcaacccaggctatcgctctcaccctcaacataggtactgtgtggacgtaaatgagtgtgaagcggagccctgcggaccaggccgaggtatttgcatgaacactgggggctcatacaattgccattgtaacagggggtataggctgcacgttggcgccggcggcagatcctgtgttgacctgaatgagtgcgccaaaccacacctctgcggggatggcggattttgtattaacttcccagggcattacaaatgcaactgctacccggggtataggctcaaggcctcccggccgcccgtttgtgaagatatcgatgagtgcagggacccttcgagttgccctgatggtaagtgtgagaacaaaccaggttcattcaagtgcatagcatgccagcccggttaccgttcacaaggaggcggtgcctgtcgcgacgtgaatgagtgcgccgaaggaagtccatgtagccccggctggtgcgagaatctgccaggcagctttcggtgcacatgtgctcaggggtacgcacctgccccagacgggcggtcgtgtctggacgtggacgagtgtgaggcaggtgatgtttgtgataacggcatatgtagtaacacccctggcagcttccaatgtcagtgcctcagcggctatcacctcagccgcgaccgttctcactgcgaagacattgatgagtgtgacttcccggccgcttgtattggaggcgattgtatcaatactaacggaagctaccgctgcctttgcccccagggacacagacttgtggggggccgtaagtgccaagacatcgacgaatgcagccaggatccatcactctgccttccacacggcgcttgtaagaatctgcagggatcttatgtctgtgtctgcgacgaaggtttcacaccaacacaggatcagcacggatgtgaagaagttgaacagccacatcataaaaaggagtgttatcttaattttgacgatacagttttctgtgacagcgtcttggccactaacgttacacagcaggaatgctgttgttcgctgggcgccggctggggcgatcattgtgagatctacccctgcccagtatattcttccgcggaattccattcattgtgccctgatgggaaaggatatacacaggataacaatatagtaaactatggcatccccgctcatcgggatatcgatgagtgcatgctctttgggtcagagatttgtaaagaaggcaagtgtgttaatacccagcccgggtacgagtgttactgtaaacaggggttttattatgacggtaatttgcttgagtgcgtcgatgtcgatgagtgtctcgacgaaagtaattgtcggaacggcgtgtgtgagaatactagaggcgggtaccggtgtgcttgcaccccacccgccgaatatagtcccgcccagagacagtgtctgtcccccgaggagatggaaagagcccccgagcggcgcgatgtgtgctggagccaacggggggaagatggaatgtgcgcaggaccacttgctggccccgctttgacgttcgacgattgttgttgtcgtcaaggcaggggatggggagcccagtgcagaccctgtcctcccagaggggcggggtcccattgccccactagtcagagtgaaagcaactctttctgggacacctcaccccttctgctgggtaagccccctagggatgaggacagttcggaggaggatagcgatgaatgcaggtgcgtgagtgggcggtgcgttcctagacccgggggggcagtgtgtgaatgcccaggaggattccaactcgatgcatcccgggccaggtgtgtcgatatcgatgaatgtagggaactgaaccagagaggcttgttatgcaagtctgaacgttgcgtgaatacatcggggtctttccgatgcgtctgtaaagccgggttcgcaaggagccgccctcacggggcatgcgtgcctcagagacgtagatag

SEQ ID NO: 121970 - DNA, 921 bp, synthetic construct
  misc_feature 1..921: note = Description of Artificial Sequence: Synthetic coding sequence
  source 1..921: mol_type = other DNA
atgctctttggatcagaaatctgcaaggagggcaaatgtgtcaacactcagcccggctatgagtgttactgtaaacagggattttactacgacggcaacctgctcgagtgtgtggatgttgatgagtgcttggatgagtctaattgtagaaatggggtctgcgagaacacaaggggcggatacagatgcgcatgcacccctcctgccgagtattccccggctcagagacagtgtctcagccccgaagagatggatgtggatgagtgccaggaccctgccgcctgccgccctggccgatgtgtcaatttgccaggttcatatagatgcgagtgcaggcccccctgggtccccggtccttctggacgggactgtcagctcccggagagtccagccgagcgcgcccctgagaggcgggacgtgtgttggagccagcgcggcgaagacggtatgtgtgccgggccactcgcgggcccagccctgaccttcgacgactgctgctgccgacaaggccggggctggggcgctcagtgtcggccatgccctccccggggagccgggagtcactgccctacttctcagagtgaatctaattcattctgggatacatcccctcttttgctaggaaagccaccacgcgacgaagattcatccgaggaggactccgatgagtgcagatgtgtctctggacggtgtgtgccacgaccaggcggcgcggtctgtgaatgtcccggtggattccagctggatgcctctcgcgctcgatgtgtggacattgatgagtgtagggaactcaatcagagagggttgctatgcaagtctgagcgctgcgtcaacaccagcggctcctttagatgtgtatgcaaagccggtttcgcacgatccaggccacacggggcctgtgtcccacagagacggcggtag

SEQ ID NO: 121971 - DNA, 3414 bp, synthetic construct
  misc_feature 1..3414: note = Description of Artificial Sequence: Synthetic coding sequence
  source 1..3414: mol_type = other DNA
atgaccctaatcggtgagaatggacactccacggacactctcacgggatccggttttcgtgtcgtagtttgtcctctgccatgcatgaacggggggcagtgctcttctcggaaccagtgcctgtgcccccccgacttcacggggaggttttgtcaagtgcccgccgggggagctggtggaggaaccggcggcagcggtcctggactgtccaggacaggcgcactgtctacaggcgctctgcccccacttgcccccgagggcgactccgtggcctccaagcacgctatctacgccgtgcaagtaattgcagacccccctggacccggagaaggcccccccgcccagcacgccgcttttctggtaccactgggcccggggcagatttccgccgaagtacaggctccgcctccagtggtgaatgtgcgtgtgcaccatccaccggaagcgagtgtacaggttcataggatagagtcatccaacgccgagtcagcggccccctctcaacacctactgccacaccccaagccatctcatcccagaccacccacacagaagccactgggcaggtgttttcaggacaccttgccgaaacagccttgcgggagtaaccctctaccaggcttgactaagcaagaagattgctgtgggagtatcgggaccgcttggggacagagcaaatgccacaaatgcccccaactgcagtataccggcgtccagaagcccggacctgtgagaggcgaggtgggggccgattgtccccagggatacaagcgcttaaattccactcattgtcaggacatcaatgaatgtgctatgccaggagtctgtaggcacggagattgcctgaacaacccgggcagctacaggtgcgtttgcccgccaggccacagtttaggaccctcaaggactcaatgtatcgccgacaagcctgaggagaaaagcttgtgctttcggcttgtatctcccgagcaccagtgtcagcatccgctgaccactaggctcacccggcagctgtgctgttgctctgtggggaaggcatggggtgctcgttgccagcgatgtcccaccgatgggacagccgcctttaaagaaatctgtcccgctgggaaggggtaccatatactgacctctcaccagacactcaccatccagggagagtcagatttctccctgttcctgcatccagatgggccaccaaagccccagcagctgccagaatctccttcccaggcgcccccacctgaggacacagaagaggagcggggcgttacaaccgattcacccgtaagcgaggagcggtctgtgcagcaatctcatccaaccgctactaccacgccagctaggccatacccagaactcatctcccggcccagtcccccaaccatgcgctggtttttgcctgatctgccgccctcacggtcagctgttgaaatagctcctacccaggtgaccgaaactgacgagtgtcggctgaaccaaaacatctgcgggcatggtgagtgtgtgcccggtccccctgactattcttgccattgcaatcctgggtacagatctcacccacagcacaggtactgtgtggacgtgaatgagtgcgaggctgaaccatgtggcccaggcaggggcatctgtatgaatactgggggatcttacaattgtcactgtaacaggggatatcgattgcacgtcggggccggagggagatcatgtgttgacttaaatgaatgtgccaaaccgcatctctgtggtgacgggggtttctgtattaatttccctgggcactataagtgcaactgctatcctggttataggttgaaagcctcgcggcctcccgtctgtgaagatatagacgagtgcagggatccctcaagttgtccagatggcaagtgcgaaaacaagccaggcagcttcaagtgtatcgcatgccagcctggttacagaagtcaggggggcggtgcctgccgcgacgtgaacgagtgcgctgagggctcaccatgctcccctgggtggtgcgagaacctgccaggatcattccggtgtacatgtgcgcaggggtacgcacctgcacctgacggtagatcatgccttgacgtcgacgagtgtgaagcgggagacgtctgtgataacggcatatgcagcaacacaccaggctcgtttcagtgccagtgtttatctggataccacctgagcagagaccgctctcactgcgaagatatcgatgagtgtgacttcccagccgcctgcatagggggggattgcatcaataccaatggttcctatagatgtttgtgcccgcaaggacacagattggtgggcggtaggaaatgtcaggatatagacgagtgctctcaggaccctagcctgtgtcttccacacggggcttgcaaaaacctacagggttcatacgtatgtgtgtgcgacgagggattcactcctacccaagaccagcacgggtgcgaggaagtggagcagccccaccacaagaaggaatgctacctcaactttgatgatacagtcttttgtgactctgtgctcgccaccaacgtgacccagcaagagtgttgctgttctctgggtgcaggctggggcgaccactgtgagatctacccatgtcctgtctatagcagcgcagagtttcactccctgtgtcctgacggcaagggatacacacaggacaataatattgtcaattacggtatacctgcccacagagacatagacgaatgcatgcttttcgggtctgaaatctgtaaggagggcaagtgcgtgaatacacagccaggatatgaatgttactgcaagcagggcttttactatgatggcaatctcctagaatgtgtggacgtggatgagtgcctggacgagtcaaactgcagaaacggggtctgtgaaaacactagaggaggatacagatgtgcttgcacacctccagccgaatattctcccgcacagaggcagtgcctgtctccagaagaaatggatgttgatgaatgccaagatccagccgcttgtcgtccggggagatgcgtgaacttacccggctcttaccgctgcgaatgcagacctccctgggtgccagggccatcaggaagggattgtcagctgccagaatctcctgcagagagggccccggagcggcgggatgtttgttggtcacagagaggagaagacggtatgtgtgcggggccacttgcagggccagcattgacattcgacgattgttgctgccggcagggtagaggctggggtgcacagtgccggccctgtcccccccgcggcgctggttcacactgcccaacatcccagtctgaatctaatagcttttgggacacatcacccctgttacttggtaaaccccctagagacgaggactcctccgaggaagattctgatgaatgtagatgcgtgtcaggttag

SEQ ID NO: 121972 - DNA, 2202 bp, synthetic construct
  misc_feature 1..2202: note = Description of Artificial Sequence: Synthetic coding sequence
  source 1..2202: mol_type = other DNA
atgcccgccgagacggatgagtgccggcttaatcagaatatttgcggtcatggagaatgtgtacctggtcctcccgattactcatgtcactgcaaccccggctacagatcacacccccaacaccggtattgcgtggacgtcaacgaatgcgaggccgagccctgcggcccgggtaggggcatctgcatgaatactggtggctcatataattgccattgcaatagagggtatcggctgcatgtgggtgctggcggtcgatcctgcgttgacttaaacgagtgcgccaaaccccacctttgcggcgacggtggattctgtattaactttcccgggcactataagtgtaattgttaccccggttaccgcctgaaagcctcccgacctcctgtatgcgaggatattgacgagtgccgagacccctccagctgccctgatggaaaatgtgaaaacaaaccaggcagtttcaagtgtatagcctgccaacccggctatcgttcacagggcgggggagcttgccgagatgtcaatgaatgcgcagaaggatctccttgcagtcctgggtggtgcgagaatcttcccggttcctttaggtgtacatgcgctcaaggctacgcgccagctccagatggccgttcttgcctggacgtggatgagtgtgaagctggagacgtctgtgataatgggatttgctcgaatacaccgggcagtttccaatgccagtgcctcagtgggtaccatctgtcccgggatcgctctcactgcgaggatatcgacgaatgcgacttccctgctgcctgtatcgggggagactgtattaataccaacggcagctaccggtgcctgtgtccccaaggtcacagacttgtcggcggaaggaagtgtcaggacattgatgaatgctcccaagatcccagcctctgtctccctcacggcgcatgtaagaaccttcaaggctcatacgtctgcgtttgtgatgagggcttcacacctactcaagaccagcatgggtgcgaggaggtagagcagccacatcacaagaaggaatgttacctcaactttgacgacacagtcttttgtgacagcgttctggctactaacgtgacacagcaagagtgctgttgcagtctcggcgccggctggggcgatcattgcgagatctatccatgtcctgtgtattcctcagcagaattccactcattatgtcctgatggtaaagggtatactcaggacaataatatagtgaactatggaatccctgcacacagagatattgacgagtgcatgttattcggaagcgagatttgcaaggaaggcaaatgcgtgaatactcagccggggtacgaatgttactgcaaacaagggttctattacgacggaaatctgctggagtgcgtggatgtggatgagtgccttgatgaatccaactgtagaaatggtgtgtgcgagaacacccgcggtggctaccggtgtgcttgtacccctcccgcagagtatagtccagctcaacgccagtgtctgtcccccgaggagatggatgtggacgagtgccaagaccccgccgcttgtcggccaggccgttgcgtaaacctcccaggcagctacagatgtgagtgtcggcccccgtgggttcccgggccatcaggacgggattgccagttgccggagagcccagccgaaagggccccggagcgacgggatgtgtgctggagccagcgtggcgaagacgggatgtgcgcaggtcccctggccggacctgctctgacgtttgacgattgttgctgtagacagggccggggctggggagcccagtgtcgaccatgcccgccaaggggcgccggaagtcactgtcctacttcccagagcgaatctaactcattttgggacacatcccccctgttattaggaaagcccccacgcgatgaggatagctcggaagaagacagtgatgagtgtcggtgtgtgtctggtcgatgtgttccaaggccgggcggggcagtgtgcgagtgccccggcgggtttcagctggatgcgagtagagcgcggtgcgtggacatcgacgagtgtagggagctgaatcagagaggtcttctgtgcaaaagtgagagatgtgtgaacactagtggttctttcagatgcgtatgcaaggctggcttcgcccgatcccgcccccatggtgcctgcgttccacagcgaagaaggtag

SEQ ID NO: 121973 - DNA, 2649 bp, synthetic construct
  misc_feature 1..2649: note = Description of Artificial Sequence: Synthetic coding sequence
  source 1..2649: mol_type = other DNA
atgacactcattggagagaacggtcatagcactgataccctgaccggttccggattccgcgtagcagacaaacccgaggagaagagcctgtgttttagattggtgtcccctgagcatcagtgtcaacaccctctgaccactagactcactcgccagctctgctgttgttccgtggggaaggcctggggcgcgaggtgccagcgctgccccactgacgggaccgcggcttttaaggaaatatgcccagcaggtaaaggctaccatattctaaccagtcatcaaacattgactattcaaggagagagcgatttcagcctgttcctccatccggatggcccccctaagcctcagcaactgcccgagtctcctagccaggcgcctcctcccgaagataccgaggaagagcgaggggtcacaacggactcccctgtgtcagaggagcggagcgtccagcagtctcaccctacggctacgactacacctgctcgtccgtaccctgaactgatttcccgaccctctccaccaacgatgagatggtttctgcccgacctgccgccatcccggtcagccgttgaaatagcccccacacaggtgactgaaactgacgaatgtaggttaaaccagaacatatgcggtcacggagagtgtgtgccaggacctcccgattactcttgtcactgcaatcctgggtataggtcgcaccctcagcaccgctattgtgtggatgtgaacgaatgtgaggcagaaccttgcggacctggccggggaatctgcatgaacactgggggatcctacaactgtcactgcaatcgggggtacagactgcatgtcggtgctggcggtcgtagctgtgtcgatctgaatgagtgcgctaaacctcacttgtgcggcgacggtggtttttgtatcaactttcctggccattataagtgcaactgctaccccgggtaccgactgaaggcctcgagaccaccagtttgtgaagacattgacgagtgccgggatccttcctcatgtcccgatggcaagtgtgaaaataaacccggcagtttcaagtgcatcgcttgtcagccaggctacagaagtcaagggggtggagcctgccgtgacgtgaacgagtgcgccgagggcagcccatgcagtccagggtggtgtgaaaacttacctgggagctttagatgcacttgcgcccaaggctacgcccctgcccctgatggtcggtcatgcttggatgtggacgagtgcgaggccggggacgtatgtgacaacggtatttgctcaaacacgccagggtccttccaatgccagtgtttatccggctatcatctgtcaagagatcgaagccattgtgaggatatcgacgagtgtgactttccagccgcatgcatcggcggcgactgcatcaataccaatgggtcctatagatgtttgtgtccacagggtcatagactggtgggaggtcggaaatgccaggacatcgatgagtgcagtcaggacccatcgctgtgcctccctcacggggcctgtaaaaatctccaagggtcttacgtctgtgtgtgcgatgagggctttacgccaacccaggatcagcatggctgtgaggaagtggaacagcctcatcataaaaaagaatgctacttgaattttgacgacaccgtattctgtgattctgtccttgcaactaatgtaactcaacaggaatgctgttgtagcctaggcgctggatggggagaccactgtgaaatttacccctgccctgtgtacagctcagccgaatttcacagcctttgccctgacggcaagggatacactcaggataataatatcgtgaattatggcatccccgcacatagagacattgacgaatgtatgctgtttggctcagagatttgcaaggaggggaagtgtgttaatactcagcctggatacgagtgctactgcaagcaagggttctattatgacgggaacctgctggagtgcgtggacgtggacgagtgtttagacgaatctaattgccggaacggtgtctgcgaaaacactcgaggaggatatcgctgcgcatgtacccctccggccgaatactcaccggcccagcgacaatgtctgtctccggaggagatggagcgggctcccgagcggagagacgtttgctggtctcaaaggggggaagacggtatgtgtgcaggacccctggcagggcctgcactgacatttgacgattgttgttgtagacaaggtcgagggtggggggcgcagtgccgaccttgcccgcctcggggcgccggctcgcactgtccgacaagccaaagtgagagtaactccttctgggacacatcgcccctgttgctgggtaagccccctcgcgatgaagattcatcggaggaagattccgacgagtgtagatgcgtgagtggccggtgtgtgcctaggcctggcggcgccgtgtgtgaatgccctggtgggtttcagctggatgcatcccgggcgcgttgtgttgacattgatgagtgtagagagctgaatcagcgcggtctgctgtgcaagtccgagagatgtgttaatacaagcgggtcattcagatgcgtgtgcaaagcagggttcgctcgctccaggccacacggagcatgtgtgccccagcgccgccggtag

SEQ ID NO: 121974 - DNA, 4761 bp, synthetic construct
  misc_feature 1..4761: note = Description of Artificial Sequence: Synthetic coding sequence
  source 1..4761: mol_type = other DNA
atgggcgatgtgaaagccttattgtttgtggccgctgcccgcgcccgacgactcggcggcgcagcggcctcagaaagccttgcagtatcggaggctttctgccgcgtccggtcatgccaacctaagaaatgcgccggaccccaacgctgcctaaacccggtcccggcagtgccctccccatctccaagcgtccgaaaaaggcaggtgtccctaaactggcaaccactcaccctgcaggaggctagagcactgcttaagcgcaggcggccaaggggaccagggggccggggtctgctccgcagacgcccgccacagagggcacctgccgggaaggcaccagtgctgtgccctcttatctgtcataacggaggagtatgcgtgaaacctgaccggtgtctgtgccccccagactttgctggaaagttttgtcaactgcactcaagtggcgcaagaccgcccgctcctgctgtgccggggttgacgcgcagcgtgtacaccatgcctctcgcaaaccaccgggacgacgagcacggagtggcctctatggtgtcggtccacgttgaacaccctcaagaggccagcgtggtggtgcatcaagtggagagggtgtccgggccgtgggaggaggctgatgcagaagcagtcgcaagggccgaagccgcagcaagggccgaggccgctgccccatataccgtcctggctcaaagcgcccctcgcgaagacgggtactcggacgcctctggttttgggtactgttttagagaactgagaggaggagagtgcgcgtctcctctgcccggcctcagaacacaggaagtgtgctgcaggggcgcggggttggcatggggcgtgcacgactgtcagttatgctcggagcgacttgggaattcagagcgagtctccgcccccgacggaccctgcccgaccggctttgaaagagtaaatggatcctgcgaggacgtcgacgagtgcgccaccgggggacgctgtcaacacggcgagtgcgccaataccaggggaggatatacatgcgtctgtccagatgggttcctgctggactcttccagatcgagctgcatttcccagcatgtgatttccgaagctaaggggccctgttttagagtccttagggatgggggctgctctctccccattcttcgtaacattacaaagcagatctgctgctgttccagagtaggcaaagcctggggaagaggttgtcaattatgtccccctttcggatctgaaggttttcgggagatctgtcccgctggtcccggttaccattatagcgcatctgaccttcggtacaacacgcgccctctgggccaggaaccacctcgggtatcactgtctcagcctagaacactccccgcaaccagtaggccgagtgccggctttctgcctacgcaccgtctggaaccgcgtcctgagccccgcccagatcctcgtccaggacccgaacttcccctgccttctatccccgcctggaccggtcctgagatccccgaatccggaccatcctctggcatgtgccagcggaaccctcaggtctgtgggcccggaaggtgtatctcacggccatccggctatacgtgcgcatgcgactcagggtttcgactcagcccccaaggcactaggtgcattgacgtggacgaatgtagacgagtaccacccccctgcgcccccggcagatgtgagaactcccctgggtcatttagatgtgtttgtgggcctggctttagggcaggcccaagggcagccgagtgcctggatgtggacgagtgtcaccgggtgccccctccgtgtgatctaggacggtgcgagaacaccccgggctcctttctctgtgtctgcccagccggttaccaggccgcaccacacggggcttcatgtcaggacgtggatgaatgcacacaaagtcctggcttatgcggacgtggagcctgtaaaaacctgccagggtcctttagatgtgtatgcccagcaggatttcgtgggtcagcctgcgaggaggacgtggacgagtgcgctcaggaaccccctccatgtggacccggacgatgtgacaacacagcaggctcctttcattgtgcatgtcccgcgggctttaggtccagaggccctggagcgccctgtcaggatgtggacgagtgtgctcggtccccccccccctgtacgtatggacgctgcgaaaacactgaaggctcttttcagtgtgtttgcccgatgggcttccaacccaacaccgctgggtcggaatgcgaagacgtggatgagtgtgaaaaccaccttgcctgtcccggccaggagtgcgtaaattccccagggagcttccagtgccgcacttgtccctctggccatcatctgcataggggacggtgtacagacgtcgatgaatgtagcagcggcgcccccccctgcgggccccacggacactgcactaacaccgaaggctccttccgttgttcttgtgcacccggctaccgggcgcctagcgggcgaccagggccatgtgccgacgtgaatgaatgtctagagggggacttctgctttccccacggcgagtgtttgaacacggacggctcctttgcttgcacatgtgcacccggctaccgcccaggcccccggggggcctcttgcctggatgttgacgagtgtagtgaggaggatctgtgtcaaagcgggatttgtaccaacaccgacgggtcatttgagtgtatttgcccgcccggacatcgggcgggcccagacctggcatcttgtctcgacgtggatgagtgcagagagcgaggccctgctctatgcggctcccagagatgcgaaaacagtcctggtagttacagatgcgttcgcgactgcgaccctggctatcacgccggcccggaggggacctgcgatgatgttgacgagtgccaggagtacggacctgagatctgtggcgcccagaggtgtgaaaacaccccaggtagctaccgttgcacccccgcctgcgaccccggctatcagcccacacctggtggcggctgccaagacgtagacgaatgcagaaaccgaagtttctgcggagctcacgctgtctgccaaaatctgccaggttcttttcagtgcctgtgcgaccaatatgaaggggccagggacggcagacactgtgtggacgttaatgaatgcgaaaccttacagggggtttgtggcgctgcgctatgcgagaacgtcgaggggtcgttcctgtgcgtgtgccctaactctccagaggaatttgacccaatgacgggacggtgtgtgcctcccagaacctccgccggtaccttccccggttctcaaccccaagccccagcgagcccagttctgccagctcgtcccccccctcctccgcttccacgccgcccttctacccccaggcagggcccagttggaagtggccggcgcgaatgttatttcgacactgctgcaccagatgcttgcgataacatacttgcacgcaatgtcacatggcaagagtgctgttgcaccgttggtgaggggtgggggtccggatgcagaatccaacaatgcccaggaaccgagactgctgagtaccagagcctgtgtccacacggaagaggatacctggcccccagtggagatctgtctctccgaagagacgtggatgagtgtcagctttttagggaccaggtgtgtaagtctggggtctgtgtcaacactgctccaggctacagttgctattgctcaaacggttactactatcacacacagagactagagtgcatcgataatgatgaatgcgctgacgaagagcctgcatgcgagggcggtcgatgcgtcaatactgtgggctcatatcactgcacttgtgagcccccgctggtgcttgatggatctcagagaaggtgcgtaagtaatgagtcccagagtttggacgataacttgggtgtctgctggcaggaggtcggtgccgacctcgtgtgttcacatccccgccttgatcgccaggcaacatatactgaatgctgctgtctctatggggaggcatggggaatggactgcgctctgtgccctgcacaagactcggacgacttcgaggcgctctgtaatgtgctgcgcccacctgcctacagtcctccccgtcctggcggatttggactgccatatgagtacgggccagatctagggcccccatatcagggcttaccctacgggcctgaattgtaccctccacctgcactcccttatgacccatatccacctcccccagggcccttcgcccggagggaagccccttacggagctccaaggttcgacatgcccgactttgaggacgatggcggcccttatggggaatccgaagctccggcaccgccaggtccagggactcggtggccatatcgctcgcgggataccaggagatctttcccggagcctgaagagccacccgagggaggctcctacgcggggagtctagccgaaccttatgaagagctggaagcagaggagtgcggaatcctcgacgggtgcactaatggaagatgcgtacgcgtgccagaaggctttacttgtcgttgcttcgacggttacaggttggacatgactcggatggcgtgcgtggacattaatgaatgcgacgaggcagaagccgcttcccctctatgtgttaatgcgagatgcctcaacaccgatggttcctttagatgtatctgcaggcccgggtttgcccccacccaccagccacatcattgtgctcctgcacgcccaagggcctag

SEQ ID NO: 121975 - DNA, 561 bp, synthetic construct
  misc_feature 1..561: note = Description of Artificial Sequence: Synthetic coding sequence
  source 1..561: mol_type = other DNA
atgttaggcggggcaggaggagggccaggccttaggacaccttgccccgccgacgtggatgaatgttccgaagaagacctctgccagagcggcatatgcacaaacacagacggaagcttcgagtgtatctgtcccccgggccaccgcgctggcccagatcttgccagttgcctggatgtcgatgaatgtcgcgagcggggtcctgccctgtgtggcagtcagcggtgtgagaactctcctggaagttacagatgtgtgcgagattgcgatccaggttaccacgccggacctgaaggcacctgcgatgatgttgacgaatgcaggaacagaagcttctgcggcgcacatgccgtatgccagaatcttcctggatccttccaatgtctatgcgatcagtacgagggagcaagggatggcagacattgcgttgatgtcaacgagtgcgagacccttcagggagtgtgtggggcggcattgtgcgagaacgtcgagggatcattcttgtgtgtgtgccctaacagccctgaagagtttgaccctatgaccggaaggtgtgtttag

SEQ ID NO: 121976 - DNA, 4872 bp, synthetic construct
  misc_feature 1..4872: note = Description of Artificial Sequence: Synthetic coding sequence
  source 1..4872: mol_type = other DNA
atgccaaggcccggtacttcaggacgcagacccctgctgcttgttctactactgcctctgtttgccgccgccacttcagctgcgagcccctctcctagcccttctcaggtcgtggaagtcccaggggtaccatccagacctgcctctgtcgcagtttgtaggtgctgccctggccaaactagccggcggagccggtgcattcgcgccttttgcagggtgcgctcctgtcagccaaagaaatgcgctggcccccagcggtgcctgaaccccgtcccggcagtaccttcacctagtccgagtgtgcggaagaggcaggtctcactcaattggcagccgctgacactccaggaagctcgagctctcctgaagaggcgacgtccacgcggccccggcggccgagggctcctgcggcgcaggccacctcaacgggcccctgcggggaaggcaccagtactttgccccctgatttgccacaatggaggagtctgcgtgaagcccgacaggtgcctttgccccccggatttcgctggcaaattttgccaactgcacagctctggcgcccggccacccgcccccgcagtgcccggtctgactcgctccgtgtacacgatgcctctagctaatcatcgcgatgacgagcatggggtggccagcatggtgtctgtccacgtcgagcacccacaagaagctagtgttgtcgtccaccaggtagagcgcgtgtctggaccgtgggaagaggctgacgctgaggccgtggccagagctgaggcggcagcaagagccgaagcagcagcaccatataccgttctggctcagtctgccccaagggaagacggctacagcgatgcttccggcttcggatattgttttagagagttaagaggaggtgagtgtgcctcccccctcccaggtttgcggacccaggaggtgtgttgccgaggagcgggcctggcatggggcgttcacgactgccagctatgctctgagcggttaggaaactcagagcgggtcagcgcccctgacggcccctgccccacaggcttcgagagggttaatggttcttgcgaagacgtcgatgaatgtgcaactgggggaagatgccagcacggggaatgcgcgaatactcgagggggttacacatgcgtgtgtcccgatggatttttacttgactccagccgctcctcatgcataagccagcacgtgatcagtgaagcaaaaggcccttgttttcgagtgctgcgcgacggcggctgcagtctgccgatcttgcgcaatattacaaagcagatttgttgttgtagtagggtgggaaaagcatgggggcgaggctgtcagctgtgtcccccgttcggaagcgagggcttccgggaaatatgtccagcagggcccggctaccactacagtgctagcgatcttcggtataatacccgtccattaggacaggagccaccccgcgtgtccctgtcacaaccacgtacccttcccgccaccagtcggccttctgccggcttcctgccaacccatcgcctggagcctcggcctgaacctcgccccgaccccaggccggggcctgaacttccgttgccgtccattcctgcctggacaggacccgaaatccctgagtccgggccgagcagcggcatgtgtcaacgaaacccacaggtttgcggccctggccggtgtataagtagacctagcgggtacacttgcgcctgtgattccggcttcagattgtctccccaggggacacgctgcattgatgtcgatgagtgcaggcgggttccccccccctgcgctcctggaagatgcgaaaattctccagggtcctttcggtgcgtctgcggccccggattccgggccggaccccgcgcagctgagtgccttgacgtagatgaatgccatagggtcccacctccttgtgacttgggacgctgtgaaaatacccccggctcattcctgtgtgtgtgtccagctggttaccaagccgcaccgcacggtgcctcatgccaagacgtcgacgaatgcacgcaaagtccaggcctttgtggacgcggggcctgtaaaaaccttcccggatctttcagatgcgtgtgcccagccggattcaggggatctgcttgcgaggaagacgttgacgagtgcgctcaggagcctcccccgtgtggtcctggcagatgtgataacaccgccggtagcttccactgcgcgtgtcccgcaggcttcaggagtcgcggacccggggccccgtgtcaagacgtggacgagtgcgccaggtctcccccaccctgcacctacggtcggtgtgagaacactgaaggcagtttccaatgcgtgtgtcctatgggcttccaaccgaacacagccggcagcgagtgtgaggacgttgacgagtgcgaaaatcatctcgcctgtccaggccaggagtgtgtcaactccccagggagcttccagtgcaggacctgccctagtgggcatcatctgcacagggggcgctgcacagatgtcgacgagtgcagctctggggctcccccgtgcggacctcatggacattgcaccaataccgagggttcatttcgttgctcctgtgctccgggttacagagccccgtcaggacggccagggccttgcgcagacgtgaacgagtgtcttgagggagatttttgttttccccacggtgagtgtctaaatacagatggttctttcgcctgcacatgcgcacctggctacagaccaggcccacgtggagcgtcttgtctggatgtagatgagtgttccgaggaagatctgtgccagtcagggatttgcaccaatactgatgggtccttcgaatgcatttgcccccccgggcaccgagccggccccgacttggcgtcgtgcctggacgtggatgagtgcagagagagaggtcccgccctttgtgggtcccagaggtgcgagaacagtcccgggtcatatcgatgcgtccgtgattgtgacccaggctaccacgcaggccctgaaggcacgtgcgacgatgtagatgaatgccaggagtatggaccggagatttgtggtgcccagaggtgcgaaaacaccccgggctcctacagatgtaccccagcttgcgaccccgggtaccagcctacgccggggggtggatgccaagatgtcgacgagtgtcgtaataggagtttttgcggtgctcatgcagtatgtcagaatttgccagggagcttccagtgtctctgcgaccagtatgaaggggcccgcgacggccgccattgcgtagacgtgaacgagtgcgaaaccctgcagggggtctgcggggcagcattgtgcgagaacgtggaggggagttttctgtgcgtctgccctaactcccccgaagagttcgaccctatgactgggagatgcgtgccacccaggacgtcagctgggacatttccaggatctcaaccacaggccccagcctccccagtgctccccgctcgaccgcctccacccccactaccgaggagacctagcacgccccggcagggccctgttggaagcggccgcagggagtgctattttgatacagccgctccagacgcctgtgataacattttggcccggaacgtgacctggcaggagtgttgttgcaccgtcggagaaggctggggctcaggctgccggatacaacagtgccctggcaccgagaccgccgagtaccaatctctctgccctcatggacgcggctacctggcaccaagtggagacctatctcttcggagggatgtggacgagtgccagctgttcagggatcaggtatgcaagagcggcgtctgcgtgaacaccgctccggggtactcgtgctactgcagtaacggttactattaccacacacaaagattggaatgtatagacaatgatgagtgtgccgacgaggaaccagcatgtgaggggggacgatgtgtgaacactgttggctcgtaccactgcacctgcgagcctcccttggtgctcgatggttcacagcgccgctgcgtgtccaatgagtctcaatctttagatgacaacctgggtgtgtgctggcaggaggtgggtgccgacttggtgtgtagccacccgcgactggataggcaagcgacttatactgaatgctgttgcctgtacggagaagcctggggcatggattgcgcactgtgtcctgcacaggactctgacgactttgaggctttgtgcaacgtgctccgccctccagcatactcccctcctaggccgggaggtttcggcctcccttacgaatatgggcctgacctgggcccgccctaccagggattgccttacggacctgaattgtatccaccccccgctctgccttatgacccgtatccgccaccccccggtccattcgccagacgagaagccccttatggggccccgcgcttcgacatgccagactttgaggacgatggcgggccttatggcgagagcgaggcccctgctccgcctggtcccggcacgagatggccttaccgatctcgcgacacacgcaggtccttcccggagcccgaagaaccaccggaagggggatcgtacgccggaagcctggccgaaccatacgaagagctcgaagctgaagagtgtgggattctagatgggtgcaccaacggacgatgcgtgcgcgtgcctgaaggattcacttgtcgatgttttgacggctatagacttgacatgaccagaatggcttgtgtggacattaatgaatgcgatgaggctgaagcagcaagccctctatgtgtgaatgctcggtgtctgaatactgacggctctttccgctgtatatgcaggcctggattcgcacccacgcaccaaccccaccactgcgctcccgccagaccccgggcatag

SEQ ID NO: 121977 - DNA, 1155 bp, synthetic construct
  misc_feature 1..1155: note = Description of Artificial Sequence: Synthetic coding sequence
  source 1..1155: mol_type = other DNA
atgactgggaggtgcgtgcctccgcggacatccgccgacgtggatgaatgtcaactgttcagagaccaggtgtgtaagtctggggtttgtgtgaataccgcacctggctatagctgttactgcagcaacggctattattaccatacacaacgccttgaatgcatcgacaacgacgaatgcgctgatgaggaacctgcttgcgagggtggacgttgcgttaacaccgttggatcctatcattgcacctgcgagcctccactggtgttggatggttcacagcggcgatgcgtgagcaatgagtctcagagtttggacgacaatctcggagtctgctggcaggaggtcggagctgatctggtttgcagtcacccacgcctcgaccgacaggcgacgtatacagagtgctgctgcctctatggggaggcatgggggatggattgcgccctgtgtcccgcgcaagacagcgatgacttcgaggccctctgcaacgtgctgcgtccccccgcttattcacccccaaggcctggggggttcgggctcccatacgagtatggccccgacttaggcccgccataccagggcctgccctatgggccagaactgtatcctcccccagccttgccatacgacccctatccaccacctccaggaccgttcgctagacgagaggccccatacggggcaccgcgttttgacatgccagatttcgaagacgacggaggcccatatggagaaagcgaggctccagcccctccagggcctggcaccaggtggccttaccggtcaagggacacgaggcgttcattccctgaaccagaggagccaccagaaggggggtcatacgccgggagtcttgccgagccctatgaggaacttgaggctgaagaatgtggtattcttgacgggtgtactaatggtcgctgcgttagagtgcccgaggggttcacttgccggtgctttgatggatataggctggacatgacaaggatggcctgcgtagatatcaacgaatgtgacgaggcggaggcagccagtcccctgtgcgtgaacgcccgatgcctcaatacggatggcagcttcaggtgtatctgcagaccggggttcgcacctacccatcagcctcatcattgcgcccctgctagacctcgcgcgtag

SEQ ID NO: 121978 - DNA, 4671 bp, synthetic construct
  misc_feature 1..4671: note = Description of Artificial Sequence: Synthetic coding sequence
  source 1..4671: mol_type = other DNA
atggccggtggtgtgcggctgctgtgggtgtcactgctcgtccttctggctcaactgggtccccaacccggcctgggacgcttgggggaaaggctgcgggtgagattcacgcctgttgtttgcggattacggtgcgtccacggaccaactggcagcaggtgtacacctacttgcgcaccccggaatgcgacctctgttgactccggggcccctggcggtgctgcaccaggcggccccggtttccgggcttttctctgtcccttgatttgccataatggcggggtgtgtgtgaagcccgaccgctgcctgtgcccacctgacttcgccggcaagttctgtcagttgcacagctctggtgctagacccccagccccggccgtgcccgggctgaccagatctgtatacacaatgccgctcgcgaatcacagggatgatgaacacggtgtggcatccatggtctctgtccatgtcgaacacccacaggaggcctcggtggtcgtgcatcaggttgaaagagtgtctgggccatgggaagaggccgatgccgaggcagtggctagggccgaagccgctgcgcgcgccgaagcagctgccccatacactgtgcttgctcaatccgccccgcgggaggacggctacagcgatgcttccggcttcggctactgctttagagagttaaggggcggcgaatgtgcctcaccccttcccggactgcgtacccaggaggtgtgttgtcgtggagccggactggcctggggggtccacgactgtcagctctgctcagagcgactaggtaatagcgagcgggtatccgccccagatggaccatgccctactggattcgagcgcgtgaatggaagttgcgaggacgtcgacgagtgtgccaccggaggccgctgccagcacggggaatgtgcaaacaccagaggcggttacacatgcgtatgtccagacggattccttctggattcaagccggtcttcgtgtatttcccagcacgtgatttccgaggcaaaagggccctgtttccgcgttctccgagacggcgggtgctctttaccaattctaagaaatatcaccaaacagatatgctgttgcagccgcgtcggcaaagcttggggaaggggatgccagttgtgcccaccttttggctccgagggatttcgcgagatctgcccggctggccccggttaccactattcggcctctgaccttcgctataatacacgacctctggggcaagaacctcctcgggtgtctctttctcaaccccggactctccccgcaaccagcaggccttccgccggatttctgcctactcacagactcgagccgcggcccgagccccgccccgatccccgcccgggccccgagctgcccctgccctctatacccgcctggacagggcctgaaattcctgagtcaggacctagtagcgggatgtgtcaaagaaatccgcaggtctgtggacccgggcggtgtatttcacgcccatctggttatacctgcgcctgcgactcaggattcagactcagcccccagggaacaaggtgtatcgacgtggacgagtgccgccgggttcctcctccctgcgctccgggtcgatgcgagaactcccccggttcttttagatgtgtctgcggacccggctttcgagctggccctcgcgctgctgagtgtctagacgtcgatgagtgccacagagttccacccccttgcgacctcggacgctgcgagaacactcctgggagtttcctttgcgtttgtcctgcagggtaccaggccgcaccacacggagctagctgccaggatgtggatgagtgtacccagtctccaggactctgcggaaggggagcttgtaagaacctccccggatcctttcggtgtgtctgtcccgctggcttcagagggtccgcttgcgaggaagacgtggatgagtgtgcccaggagcccccaccttgtgggcccggacgctgcgacaacaccgccggctcgtttcactgtgcctgcccagcaggcttccgaagcagaggacctggagccccatgccaggatgttgatgaatgcgcccggagtccccccccctgtacctacggacgctgcgagaacacagagggttctttccaatgcgtgtgtcctatgggatttcaacctaatacggctggtagcgaatgcgaggacgtagacgagtgtgagaatcacctggcctgcccgggccaagagtgcgtcaactcccccggatcctttcaatgcaggacctgtccatctgggcatcacctacatcgagggcggtgtactgatgtagacgagtgtagcagtggcgcaccaccctgcggccctcacggccattgcacaaatactgaaggctccttcaggtgctcctgtgcccccggctaccgcgctcccagcggccgtcccggaccatgtgccgatgtgaacgaatgccttgaaggggacttctgctttcctcacggagagtgtctcaacacggatggctcttttgcttgcacctgtgcacccggttatcgaccaggcccgcgcggtgcctcctgtctggatgtagatgaatgcagcgaggaggacctgtgccaatcaggaatctgcactaacactgatgggtcatttgagtgcatttgtcctcccggccacagggctggacccgacctcgcttcctgcctggacgttgatgagtgccgagaacgcggccctgcactatgcggatcccagcgttgtgaaaattccccaggtagttatcgatgtgttcgagactgtgacccaggttaccatgctggaccagagggcacgtgcgacgacgtagacgaatgccaagagtatggacccgaaatctgcggcgcccagcgatgtgagaacacaccagggagctatcgttgcacgccagcctgcgaccccgggtatcaacctactccaggcggcggatgtcaagacgttgatgaatgcaggaataggtcattttgtggtgcgcacgcagtgtgccagaatttgcccggaagctttcagtgtctgtgtgatcaatatgaaggcgctcgagacggtcgtcattgtgtcgacgtcaacgagtgtgagacactacaaggcgtctgtggcgccgctttatgtgaaaacgtggagggatcctttctttgtgtttgtcctaactcccccgaggagtttgaccccatgaccggacgatgtgtgccaccccgtacatccgcagggactttccctgggtcacagcctcaagcccccgctagcccagtgctgcctgcccgcccacccccccccccgctgcctcggcggccttctaccccacgccaaggccctgtcgggagcggacgccgcgagtgttacttcgataccgctgctcccgatgcctgtgacaacatccttgcccgcaacgtgacctggcaagaatgttgttgcacagtgggtgagggctgggggagtggctgtcgcattcagcagtgtcctggaacggagaccgccgaatatcaaagcctgtgcccacacggtcggggctacctggctccatctggggacctgagcctgaggcgggatgtggatgagtgccagctcttccgcgaccaggtctgcaagtccggtgtttgcgttaatacggcacctgggtattcttgttattgctccaatggctactactaccatacacagaggctggaatgcatcgacaatgacgaatgcgcagatgaagagcctgcctgcgaaggagggcggtgtgtgaacacggtaggcagctaccactgcacctgcgagccgccgctggttcttgacggttctcaaaggcgatgcgtgtctaatgagtctcagtcactggatgacaatctgggcgtgtgttggcaagaagtaggggccgatctggtgtgtagtcacccccgtctcgacaggcaggccacgtacaccgagtgttgttgcctttatggggaagcttggggtatggattgcgctctctgccctgcccaggatagcgatgactttgaggcactgtgcaatgtgctccgccccccagcatacagccctccaaggcccggcggcttcgggctcccttacgagtatggacccgaccttggaccaccctatcagggactgccttatggacctgaactctaccctcctcccgctctgccttatgatccctatccgcctccccctggtcccttcgcacggagggaggcgccttacggcgctcctcggtttgacatgccagactttgaggatgacggcgggccttatggcgagagtgaggcgcccgcacccccgggccccgggactaggtggccttaccgttcacgggataccagaagaagttttcctgaaccagaggaaccccctgagggaggatcctatgctgggtcgctggccgaaccttatgaggaactcgaggccgaggaatgcggcatactggacggctgcaccaacggtaggtgcgtgcgcgtcccggaaggcttcacttgcaggtgtttcgacggctatcgcctggacatgactcgtatggcctgtgttgacattaatgagtgcgatgaggctgaagccgcctctcctctatgcgtaaacgctagatgtctgaacactgacggatcttttaggtgtatctgcaggcccggctttgcccccacccaccagccccaccattgtgcccccgcacgccctcgcgcttag

SEQ ID NO: 121979 - DNA, 2700 bp, synthetic construct
  misc_feature 1..2700: note = Description of Artificial Sequence: Synthetic coding sequence
  source 1..2700: mol_type = other DNA
atgtgccagaggaatccccaggtgtgtggtcccggtagatgcatttcccgacccagcggctacacatgtgcgtgtgactcaggattccgcctcagtccacaaggtacgcggtgcatcgatgtagacgagtgtagacgagttccccccccgtgcgctcccggacgatgtgaaaactcgcctggatccttccgatgcgtctgcgggccaggatttagggctggcccccgcgcagcggagtgtcttgatgttgatgagtgtcatagggttccgccgccgtgcgatctggggaggtgcgagaacacaccaggttcttttctctgtgtgtgcccagcagggtatcaagcagctccacacggagcctcgtgtcaggatgtcgacgaatgtacccagtcgccaggcctgtgcgggagaggagcttgtaaaaacctgcccggtagttttagatgcgtgtgtccagctggctttcgtgggtccgcgtgcgaggaagacgtggatgaatgcgcccaagaacctcctccctgcggacccggacgctgtgacaacacggcaggatccttccactgcgcctgtcctgccgggttcaggagcagggggcccggtgccccgtgtcaagatgtggacgaatgtgccagatctccccctccctgtacgtatggaaggtgcgagaataccgaaggttctttccagtgtgtgtgcccaatgggcttccaaccaaacacagccggaagcgagtgcgaagatgttgacgagtgtgaaaaccatttggcttgcccggggcaggaatgtgtcaattctcctgggtcctttcagtgtcgaacatgcccctctggccaccacctgcatcgagggcggtgtaccgacgtagatgaatgtagctcaggagcccctccatgcggtcctcatggtcactgtaccaacacggagggctctttcagatgctcttgcgctcctggctatcgcgctccaagtgggaggccgggcccctgtgccgacgtcaatgaatgcttagagggagacttttgcttcccccacggtgagtgtctcaataccgatggctctttcgcttgcacctgtgctcctggctacaggcctggcccaagaggcgctagttgtctggacgtagatgagtgctcagaagaggacctttgccagtcaggcatttgcaccaacactgatgggtccttcgagtgcatatgcccacctggccaccgtgcaggacccgatctggcatcttgtctggatgtagacgaatgcagagagagaggcccagcactgtgtggctcccagagatgcgagaactctccaggttcttaccgctgtgttagagattgcgacccagggtaccatgccggcccagaggggacatgcgacgatgttaacgaatgtgaaacgttgcagggcgtgtgtggcgccgctttatgcgaaaacgttgagggttctttcctctgtgtctgcccaaacagccctgaggagtttgatcccatgacagggcggtgtgtgccaccccggaccagtgccgggacttttcccggcagtcagccacaagcccccgcctctcctgttctgcctgcccgccctccaccgcctcctctgccgagacggccctccacgccacgccagggtcccgtgggaagtggccggcgggaatgttactttgacactgccgcccccgatgcttgtgacaacattctggcaagaaatgtgacttggcaggaatgttgctgtactgtcggggaagggtggggaagtggatgtcgaattcagcagtgcccaggaacagagacagcagagtatcagtcactctgcccgcacggaagggggtatttggcgccttccggggacctcagcttgaggcgtgacgtggatgagtgccagctgttccgggaccaggtctgtaagagcggcgtctgtgtgaacacggctccggggtactcctgttattgttcgaatgggtattactaccacacccagcggttagaatgcatcgataacgatgagtgcgctgacgaagaaccagcgtgcgagggagggcgctgcgtgaatacagttggctcctaccattgcacttgcgagccccccctggtcctggatggaagtcaacgccggtgcgtgagtaacgagagccagagccttgatgacaatctcggcgtttgctggcaggaggtgggggccgacctcgtttgcagccacccacggcttgaccgacaagccacatacacagagtgttgctgcttatacggcgaggcctgggggatggattgcgccctgtgccccgcgcaggactctgacgacttcgaggccctgtgtaatgtgttacggcctcctgcctattcccctccaagaccaggaggctttggactcccttatgaatatggccctgaccttggcccaccataccaggggttaccctatggaccagagctctacccaccccccgcccttccctacgatccctaccccccgcctcctggcccgtttgcgaggcgcgaggccccatacggagctccccgttttgacatgccagacttcgaggacgatggtggaccctatggcgagagtgaagcacccgcccctcctggacccggtacccgatggccctatcggtctagggacacccgcaggagctttcccgagccagaagaaccaccagagggtggctcttatgcaggaagcctggcagagccctacgaagaactgtag

SEQ ID NO: 121980 - DNA, 639 bp, synthetic construct
  misc_feature 1..639: note = Description of Artificial Sequence: Synthetic coding sequence
  source 1..639: mol_type = other DNA
atgtggaccagcgccaccgcctgtagacggcgcgtgaccagtggcgcggcccggactcggcaggccgcgtcttgtgcgtgtgcaccacctggaacccgtcttcatagaacggagcccgccgcaagaatgtggatgagcgttccagaggctccacacccagcaccaaccgccggggtcaggacgcaaaaggccgcctcatcggtttctgcaccctgggcctccaaccctactttgctcgcaccgaatgtggacgaatgtgagaaccatttagcttgtcctggccaggaatgtgtgaacagcccaggctccttccaatgtcggacttgtccaagtgggcaccacttacaccggggcagatgcacagatgtggacgaatgttcctctggtgcacctccatgtgggccccacggccactgcacaaatacagagggctcctttaggtgttcttgcgctcctgggtacagagcaccctccgggaggcccggcccttgcgccgacgtgaatgagtgtctggagggagacttttgtttcccacacggtgaatgtctcaacacagacggatcatttgcatgcacctgcgccccaggctaccggcccggaccacgaggggcttcctgcctggggtcttacccgggatag

SEQ ID NO: 121981 - DNA, 669 bp, synthetic construct
  misc_feature 1..669: note = Description of Artificial Sequence: Synthetic coding sequence
  source 1..669: mol_type = other DNA
atggagattcctccgaccaattatccggcctccagagcagctttagtagcacaaaactacattaattaccaacagggcactccccacagagttttcgaagtgcagaaagttaagcaagcttctatggaggacatccccgggagagggcataagtatcacttgaagtttgctgttgaggagattatccagaaacaggtcaaagtgaactgtactgctgaagttctgtatccctccaccggtcaggaaacggctccagaggtgaatttcacattcgagggcgagaccgggaaaaatcctgatgaggaagataatacattctatcagcgactgaagtcgatgaaggagcccttggaggctcaaaatatccccgataatttcggcaacgtatcccccgaaatgacgctggtgctgcacctggcctgggtcgcatgtggctacatcatctggcaaaatagtacagaagatacatggtataaaatggttaaaatccagaccgtcaagcaagtgcagcgaaatgatgatttcatcgagctggactacactattctactgcacaatatcgccagtcaagagatcataccctggcaaatgcaggtgctttggcacccacagtacggtaccaaggtgaagcataatagtcggcttccgaaagaagtgcaacttgagtag

SEQ ID NO: 121982 - DNA, 888 bp, synthetic construct
  misc_feature 1..888: note = Description of Artificial Sequence: Synthetic coding sequence
  source 1..888: mol_type = other DNA
atggggctcccagtttcctgggccccacctgccctctgggtgctgggatgttgtgcacttctgctatcattatgggcactctgtactgcatgtcgcagaccagaggacgctgtggcacccaggaagcgtgcccgtaggcagagggcacgactgcagggtagtgctactgccgctgaggcctccttgcttcggagaacccacttgtgttcattgagtaaaagtgatacgcggctgcacgaactgcacagaggtccacgatcgagccgtgctctgaggcctgcatccatggacttgctcaggcctcattggctcgaggtgtctcgggatataactgggccgcaggcagccccgagcgccttcccacatcaggagctgcctagggctctgcctgcagccgcggcaaccgcagggtgtgccggcttagaggcaacctattcaaatgtgggcttggctgcactgccaggagtctccttagctgcaagccccgtggtcgcagagtacgccagggtgcagaagagaaagggcacccacagatctccacaggaaccccagcaggggaagaccgaagttactcccgctgcacaggtggacgtgctgtacagcagagtctgcaaacccaagcgacgtgatcctggtccaacgaccgacccactggatcccaagggtcaaggagctattctggctctggccggagatctggcttatcagacacttccactgagagctttggacgtcgactctggccccttggaaaacgtgtacgaatcaatacgggaactaggggatcccgcaggccgttctagtacttgtggcgcaggaactccccctgccagttcatgtccatctcttggtaggggctggcgcccacttcccgcctcactcccttag

SEQ ID NO: 121983 - DNA, 324 bp, synthetic construct
  misc_feature 1..324: note = Description of Artificial Sequence: Synthetic coding sequence
  source 1..324: mol_type = other DNA
atgggattacccgtgagttgggctcccccggccttgtgggtcctgggatgttgcgccttgcttctgtcactgtgggctttgtgtactgcctgcagacggcccgaagacgctgtggctccccggaagcgggcccgtcggcaaagggcccgtctacagggtagcgcaacagctgcagaagcgagcttgctgcggaggactcatctctgctcattgagcaagtcagacactagacttcacgagcttcatagaggacctcggagctccagagccctgaggccagcttcaatggacctacttcgtccccactggttagaggtcagctag

SEQ ID NO: 121984 - DNA, 2094 bp, synthetic construct
  misc_feature 1..2094: note = Description of Artificial Sequence: Synthetic coding sequence
  source 1..2094: mol_type = other DNA
atgggcgagcgggccggatcccctggcacggatcaggaacgaaaggccggaaaacatcactactcatacctcagtgactttgagacgccccagtcttcaggacgtagcagtcttgtctcttcttctcctgccagtgtgcggagaaaaaaccccaagcggcagactagcgacggacaggtccatcatcaggcccctcgcaaaccgagtcctaagggactgcctaaccgcaaaggggtgagagtggggtttagatcccagtccttgaaccgggagcctcttcggaaggacacagacctggtcactaagcggatcctgtccgccaggcttctaaaaatcaacgaactgcaaaatgaagtaagtgaactgcaggtgaaacttgctgagctgcttaaggaaaacaagtccctcaaacgtctgcaataccgccaggagaaggctctaaataagttcgaggatgcagagaacgagatttcacagctgatttttagacataacaacgagatcacggctctgaaagaaaggctcagaaagtcgcaagagaaggaacgggcaaccgagaaaagggtcaaggataccgaatccgagctgttcagaactaaattttcactgcagaagcttaaggaaatttcggaggcaaggcatctgccagagcgcgacgatttggcaaagaagctggtaagtgctgagctgaagcttgatgatactgaacggcgtattaaagagctctccaaaaatttggagctgtcaaccaattcatttcaaaggcaactcctggcagagcgcaagagggcatacgaagcgcacgatgaaaataaagtgctgcagaaggaggttcagcgcctctatcacaaacttaaagagaaggagagggagctggatatcaagaacatttactccaataggttgcctaaatccagcccaaataaagaaaaggagctcgcattacgaaaaaatgctgcctgccaaagtgacttcgctgacctgtgtacgaagggtgtccagactatggaggacttcaagccggaggaatacccccttacccccgagaccatcatgtgttacgagaacaaatgggaggagcccggtcacctgaccctggatctgcaatcccaaaaacaggaccgacatggggaggctggtatccttaatcctatcatggaaagggaggagaagttcgttaccgacgaagagctgcatgttgtaaagcaggaggttgaaaagctcgaggatgaatgggagagagaagagctggacaagaagcagaaggagaaggccagccttctggagagagaggagaagccagagtgggaaacaggcagataccaacttgggatgtaccccattcagaatatggacaaactgcagggggaagaggaggagaggttaaagcgagagatgctactggcaaaactcaatgaaattgaccgcgaactccaggactcacgcaacctgaaataccctgttctgccccttcttcccgactttgagtccaaattgcactcccccgagagaagcccaaagacgtatcgcttcagcgaaagcagtgaacgcctgttcaacggccaccatctccaggacatttcattttcaacccctaaaggcgagggccagaattccggaaacgtgcggtcccccgcgagtccgaacgaatttgcttttgggtcatacgtaccaagctttgcaaaaacctctgagcggtccaaccccttttcccagaagagcagcttcctggacttccaacgaaattcgatggaaaagcttagcaaggacggggtcgacctcattacaagaaaagagaagaaggccaaccttatggagcagctgtttggcgcatccggatcctctaccatcagcagcaaatcaagcgatcccaactcggtggccagcagcaaaggggacatagatcctctaaacttcttgcccggcaacaaaggatccagagatcaagagcatgacgaagacgaggggttttttctgagcgaaggacgcagtttcaacccgaataggcaccggttaaagcatgccgatgataagccagctgtgaaggcagcagacagtgtcgaggatgaaattgaggaagttgcactcaggtag

SEQ ID NO: 121985 - DNA, 2094 bp, synthetic construct
  misc_feature 1..2094: note = Description of Artificial Sequence: Synthetic coding sequence
  source 1..2094: mol_type = other DNA
atgggggagagggcgggatcccccggtaccgaccaagagcggaaggccggcaaacatcattattcgtatctgtccgattttgaaaccccccagtcgtcaggccgctcgtctttagtcagtagctcacctgcgagcgtcaggagaaaaaatcctaagcgccagacatctgatgggcaggtgcaccaccaagcgcctcggaaaccatctcccaagggtctgcccaataggaaaggcgtgcgggtgggattcaggtctcaaagtctaaacagggaaccactgcggaaggataccgatcttgtgactaagaggatattgtctgcgcgcctgctgaaaattaacgagcttcagaacgaagtgagcgaactccaagtgaagctggcagagctgctgaaggaaaacaaaagtctcaaacgattgcagtataggcaggaaaaggccttgaataagttcgaggatgccgaaaatgagatctcgcaactgattttccggcacaataacgagatcactgcactaaaggagaggctacgcaagagccaggagaaggagcgcgccacagagaaaagagtaaaagacactgagagcgagctgtttagaacaaagttttcattacagaaactaaaagagatctccgaagcgagacatctgccagaacgggatgatctggctaaaaagctggtgtctgctgaactcaagctggacgatacggaaaggcgcattaaagagctcagcaagaatttggaattgagcacgaacagttttcagaggcagctcctggccgagcgcaaaagagcatacgaggcccatgacgagaataaggtcctgcaaaaggaagtgcagcgcctatatcacaaacttaaagagaaggagcgggagcttgacataaaaaatatctacagtaaccgcctgcccaaaagttccccaaacaaagagaaagagcttgcgctccgcaagaacgctgcttgtcagtccgactttgccgacttgtgcacaaaaggggttcagactatggaggatttcaagcctgaggaatatcccctcacccccgaaaccatcatgtgctatgagaataagtgggaagaacctggacatttgaccttggacctccagtcacagaaacaggaccggcatggggaggcagggattctgaaccccatcatggaaagagaggagaaatttgtgaccgacgaggagctgcatgttgtaaaacaggaggttgaaaaactggaagatgagtgggagcgcgaagagctggacaagaaacaaaaagaaaaggcatcgctgctcgagagggaggagaagcccgaatgggaaaccggtaggtatcagctcggcatgtacccaattcagaatatggacaagctgcagggggaggaggaggagcgcttaaagagggagatgcttttggccaagctcaacgagatcgatagggagctacaggattctcgcaatctgaagtatccggtcctccccctgctgcctgatttcgaatccaaattgcacagcccagagcgctcaccaaagacctataggttttctgaatcctctgagaggctgtttaacggacaccacttacaggatatctctttttctaccccgaagggggagggccagaatagcggcaatgtccgctcccctgccagccctaacgagttcgccttcgggtcgtacgtgccatcattcgctaaaacaagcgagcgttctaaccctttctcccagaagtcaagctttctggattttcagcgaaatagtatggaaaaactctccaaggacggcgttgatctgattaccaggaaagaaaaaaaggctaacctgatggaacagctgttcggcgcttctggctcatcaacgatatcgtcaaaatcctcggatccgaattctgtcgcctcctcgaaaggcgacatcgaccccctgaattttctgccgggaaacaagggctcccgcgaccaggagcacgatgaggacgaaggtttcttcctttcagaaggacgctcttttaatcccaatcgccatcgcctgaagcatgccgatgacaagccggctgtaaaagctgccgactcggtcgaagacgaaattgaggaagtcgccctccggtag

SEQ ID NO: 121986 - DNA, 693 bp, synthetic construct
  misc_feature 1..693: note = Description of Artificial Sequence: Synthetic coding sequence
  source 1..693: mol_type = other DNA
atgaaaaacccgatgttggaagtggtctcactactcttggagaagctgctactgatttctaactttacactgttttccagcggcgccgctggcgaggacaagggccggaactccttttacgagacttcttcttttcaccgcggtgacgtgcttgaagtcccgcgcacacatctcacccactatggtatttatttgggtgataatcgggttgcccatatgatgcccgacatcctgttggcactcaccgacgatatgggtcgcactcagaaggtggtgtctaataagcgcctcatactgggtgtaattgtaaaggtcgcaagtatccgggtggatacagttgaggacttcgcctacggcgccaacattctcgttaaccaccttgacgaatctctgcagaaaaaggcactcttaaacgaagaggtagcaagacgagcagagaaactcctcggctttactccgtattccttgctgtggaataactgcgagcatttcgttacttattgcagatacgggactcccattagcccccaatctgacaagttttgtgaaacagtcaagataatcatcagggatcagagatctgtgttagcctctgcggtgttgggactggcctccatagtctgcaccggccttgtgtcttataccaccctgcccgctatatttattccattctttttgtggatggctggctag

SEQ ID NO: 121987 - DNA, 210 bp, synthetic construct
  misc_feature 1..210: note = Description of Artificial Sequence: Synthetic coding sequence
  source 1..210: mol_type = other DNA
atgaaaaatccgatgctggaagtggtcagcctgctgctggaaaagctgcttctgattagcaattttactttgttttctagcggcgctgctggtgaagataaggggagaaattctttctacgaaaccagcagcttccatcggggtgacgtgcttgaggtccctaggacccatctgacccactatggcatctacctgggtgataaccggtag

SEQ ID NO: 121988 - DNA, 693 bp, synthetic construct
  misc_feature 1..693: note = Description of Artificial Sequence: Synthetic coding sequence
  source 1..693: mol_type = other DNA
atgaagaaccccatgctcgaagttgtctctctcctcctggagaaactgctcctgatctccaactttactttattctcaagcggagctgcaggagaagacaagggaagaaatagcttctacgaaacaagctcctttcatcgcggagacgttctagaggtgccaagaacacacctgacccattacggaatctacctgggtgacaaccgtgtagcccatatgatgcccgatatcttgctagcactgaccgatgacatgggccggacccagaaagtggttagtaataaacggcttatccttggcgttatcgtgaaggtggcttcaatccgagtggacactgtcgaggacttcgcttacggagcaaacattcttgtgaatcacttggacgaaagtctgcaaaaaaaggcacttttgaacgaagaagtcgcaagaagagccgagaagttgctgggatttaccccatacagtttgctctggaacaattgcgagcacttcgtgacatattgtagatacggaaccccaatctcaccacagagcgacaaattctgtgagacagttaaaattatcataagggatcagcggtccgtgctggcatcagccgttctcggactggcctcaatagtctgcacgggcctggtcagttatacgacactcccagctatctttattcccttcttcttgtggatggccggctag

SEQ ID NO: 121989 - DNA, 1110 bp, synthetic construct
  misc_feature 1..1110: note = Description of Artificial Sequence: Synthetic coding sequence
  source 1..1110: mol_type = other DNA
atggtatgggccccacttgggcctccacggaccgactgtctgaccctccttcatacacccagcaaggattcaccaaagatgtccctggaatggttagttgcatggagctggagcctggacggcttacgcgattgcatagctacaggcatccagtccgtaagagactgcgatacgacagccgttatcactgtcgcttgcctgttagtgctgtttgtctggtattgctatcacgtaggtcgagaacaaccccggccatacgtgtcagttaactcactgatgcaggcagcggacgccaatggacttcaaaatggttatgtctactgccagtcacccgaatgtgtccgttgtacccataatgagggcctgaatcagaaactctaccacaatttacaggagtacgcaaaacgctatagctggagcgggatgggcaggattcataaggggattagagagcagggtagatacctaaacagcagaccttctatacagaaacccgaggtgtttttcttgcctgaccttccaactaccccttacttcagtagggacgctcagaagcatgacgtagaggtgctggagcgaaattttcagaccattctctgcgaattcgaaaccctctacaaggctttcagcaattgcagcctcccacagggctggaaaatgaacagcacaccctctggagagtggtttaccttctacctggtcaatcagggagtttgcgtgccacgtaactgcagaaaatgccctcgcacatacaggctgttagggtccctgaggacatgcattgggaataacgtcttcggtaacgcttgcatttctgtgcttagcccggggaccgtaattacggaacactacggacccacgaacatcaggatccggtgccacctgggactaaagacacccaacgggtgcgagctcgtggtggggggagagccgcagtgctgggcagagggccggtgcctgctgttcgatgactcctttctgcacgccgctttccatgaggggtcagctgaagacggcccccgtgttgtattcatggtcgacctatggcacccaaatgtagcggctgcagaacggcaggccttagatttcattttcgctccaggccgctag

SEQ ID NO: 121990 - DNA, 984 bp, synthetic construct
  misc_feature 1..984: note = Description of Artificial Sequence: Synthetic coding sequence
  source 1..984: mol_type = other DNA
atgtcccagcctagtggaggcagagcccctggaactcggatctatagctggagttgtccgacagtgatgagtcccggcgaaaaactcgaccccataccagatagcttcattctgcagcccccagtctttcacccagttgtaccctatgtgacaacgatcttcgggggtctgcacgccggcaagatggttatgctccagggggtggttcccctggatgcacatcggttccaggtcgacttccagtgcgggtgcagcctttgtcctagacccgatatcgccttccactttaatccaaggttccacaccactaaaccacacgtgatatgtaatacactgcatggcggcagatggcagcgtgaggccagatggcctcatctggcactccgcaggggcagctctttccttattctgttcctgtttggcaacgaagaagttaaggtgtccgttaatggccagcacttcttacactttaggtatcgtctccccctatctcacgtggacacattggggatcttcggcgacattctggtggaggcagtcggatttctcaatattaacccctttgtcgaaggaagcagagaatacccagctggacacgaagtgccctgctcacacgccttgcctcagggcctttctcctggccaggtcattatagtgcgcgggcttgtgctgcaggaaccaaaacacttcaccgtttcactgcgcgaccaggccgcccacgcgccagtgactttgcgcgcctcgttcgccgacagaactctggcatggatcagtcgttggggacagaagaaattaattagcgctccattcctgttctacccacagagatttttcgaggtgctgctgctatttcaggagggcgggttaaagttggccttaaacggacagggtctgggagctacaagcatgaatcagcaggctcttgagcagttacgggaattgagaatatctgggtccgttcagctttactgcgtgcactcctag

SEQ ID NO: 121991 - DNA, 1014 bp, synthetic construct
  misc_feature 1..1014: note = Description of Artificial Sequence: Synthetic coding sequence
  source 1..1014: mol_type = other DNA
atgtctcaaccgagtggcgggagggcccccggcacacgcatttactcctggtcttgtccaactgtgatgagccctggggagaagctggaccctatcccagattccttcatactccagccgccagtgttccatcctgtggtaccatacgtcactacaatctttggaggcctgcacgctggcaaaatggtgatgctacagggcgtggtgccgttggatgcccatagcaggtttcaagtggattttcaatgtggctgcagcctgtgtccacgcccagatattgcgttccatttcaacccgaggtttcacactacaaagccccacgtgatctgtaatactctgcacggtgggcgatggcagcgcgaggcaaggtggccacatttggcattgaggcggggctcttcttttttgattctttttctcttcggtaatgaagaggttaaggtgagcgtgaacgggcagcattttctccactttcgataccgtctccctctgtcacacgtagataccctgggtatcttcggagacatcttggtcgaagctgtcggcttcctcaacattaatccgtttgtagaagggtctcgggagtaccccgccggtcacccctttcttcttatgtcccccaggctggaggtgccatgttctcatgccctgccccagggactcagcccagggcaagtgatcatcgttcgagggctggttcttcaagaaccgaagcactttacagtatcattacgcgatcaggcagcacatgcgcctgtgacattgagggcctcctttgctgatagaacattggcctggatatccagatggggacagaagaagttaatatctgcccctttccttttttacccacagaggttctttgaggtcctcttgctgtttcaggaagggggcctaaagcttgcacttaatggtcaagggctgggcgccacctctatgaatcaacaggcgctggagcagctccgggaactgaggattagcgggagtgtgcagttgtattgtgtgcactcttag

SEQ ID NO: 121992 - DNA, 1011 bp, synthetic construct
  misc_feature 1..1011: note = Description of Artificial Sequence: Synthetic coding sequence
  source 1..1011: mol_type = other DNA
atgagccaaccctctggtggccgcgctcccggcacacggatttattcttggtcctgtcccaccgtgatgtcaccaggcgaaaagctcgatccaataccagacagttttattctccaacccccagttttccaccccgtggttccctatgtcacgacgatcttcgggggccttcacgcaggaaagatggttatgctccagggtgtagttcccctggatgcgcatcggtttcaggtcgactttcaatgtgggtgtagcctgtgcccaaggcctgatatcgcgttccacttcaatccccggtttcacactacaaaaccccacgtcatttgcaatactctgcacggaggtcgctggcaacgggaagctaggtggccacatctggccttgaggcggggaagctctttccttattctgttcctgtttggaaatgaagaagtcaaggtttctgtgaatggccaacactttctgcactttaggtatcggcttcctctcagccacgtggacacgttgggtatctttggcgatatcctagtcgaggctgtcggattcctgaacattaacccattcgtcgaagggtccagagagtatcctgctggtcacccttttcttctgatgtcccctcggcttgaggtcccctgctcgcacgcactgcctcagggactgtccccaggtcaggtgattattgtgcggggtctggtgctccaagaacccaaacactttaccgtgagccttagggaccaggcagcacacgcaccagttactctaagggcatcattcgcggatcgaactctggcttggatcagcagatgggggcagaagaagctgatcagcgctccttttttgttctatccacagcgcttttttgaggtgttgttgctgttccaggagggtggactcaagctggctcttaatgggcaaggtttgggagcaacaagcatgaatcagcaagcgttagaacaactgagggagctgcggatctccggaagcgtacagctgtactgcgttcacagctag

SEQ ID NO: 121993 - DNA, 828 bp, synthetic construct
  misc_feature 1..828: note = Description of Artificial Sequence: Synthetic coding sequence
  source 1..828: mol_type = other DNA
atggtaatgcttcagggagttgtacctctggacgcgcaccgctttcaggttgattttcaatgcggttgctccctttgtcccaggcctgacattgctttccactttaaccctaggttccacacaactaaaccccatgtgatttgtaataccttgcacggcggtaggtggcagagggaggcacgctggccacacctggcgctgcgaaggggcagctccttcctcattctatttctcttcgggaatgaagaggttaaagtgtctgtaaatggccagcacttcttacactttcgctaccggttgcccctgtctcatgtggatactctaggcattttcggcgatatcttggtcgaggcagttggattcctcaacatcaaccctttcgtggagggctccagggagtaccctgccggccatccattcctactcatgtcccccaggctggaagtgccctgcagtcacgctctgccacaaggcctttcaccagggcaggttataattgtgcggggactcgtccttcaggagccaaaacatttcacggtgtcccttcgtgaccaggccgcccacgctccggtgaccctccgagctagctttgctgaccgcaccctggcatggatcagccgatggggccaaaagaaactgatttccgctcccttcttattctaccctcagcggtttttcgaagtgcttcttctgttccaagaagggggactgaagttggctctcaacggccaggggttgggagctacctctatgaatcaacaggccttagaacagttgcgagagttgcgcatctccggctctgtgcaattgtactgtgtacacagttag

SEQ ID NO: 121994 - DNA, 801 bp, synthetic construct
  misc_feature 1..801: note = Description of Artificial Sequence: Synthetic coding sequence
  source 1..801: mol_type = other DNA
atggtgatgctgcagggcgtcgtgcccctggatgcacatcgctttcaggtcgatttccagtgcgggtgctctttgtgtccccgacctgatattgccttccatttcaaccctagattccacaccacgaaaccccatgtgatctgcaataccctgcacgggggccgctggcagcgcgaagcccgatggccccacttggccctcagaaggggcagctcatttctcatcctgttcctgtttggaaacgaagaggtcaaagtgagcgtgaatggacaacactttctacatttccggtatcggctcccactctctcatgtggatactctgggcatcttcggtgacattttagtggaagcggttggcttcttaaacatcaatccctttgtcgaaggcagccgggaatatcccgccggccacgaggtcccatgtagccacgcgctccctcaaggattgtcccccggccaggtgataattgtccgcggtctcgtgcttcaggagcccaaacacttcacagtctctttgcgggatcaggccgcacatgcccctgttactttgagagcgtcattcgctgaccgaaccttggcgtggatttctcggtgggggcagaaaaaactaatttccgcccccttccttttctatccccagcgctttttcgaggtgcttcttttatttcaggagggaggcctcaagctggcacttaatggtcaggggctgggagccaccagcatgaaccagcaagcacttgagcagttgcgcgagctgaggatcagcggaagcgttcagctgtattgcgtgcactcgtag

SEQ ID NO: 121995 - DNA, 378 bp, synthetic construct
  misc_feature 1..378: note = Description of Artificial Sequence: Synthetic coding sequence
  source 1..378: mol_type = other DNA
atggccgacgaggagttagaggccctccgccgtcagcgcctggctgagttgcaggcaaaacacggtgatcctggcgatgccgcccaacaggaggccaagcaccgggaggcagaaatgcgcaatagcattctcgcgcaggtactggaccagagtgccagggcccgacttagcaacctagctttagtcaaaccagagaaaaccaaggcggtcgagaactacctgattcaaatggcccgatatggccagctgtccgagaaggtgtctgagcagggactgatagaaatcctcaagaaggtctctcagcagaccgagaagacgaccaccgtgaagttcaaccgcagaaaagtgatggactctgacgaggatgacgattactag

SEQ ID NO: 121996 - DNA, 1530 bp, synthetic construct
  misc_feature 1..1530: note = Description of Artificial Sequence: Synthetic coding sequence
  source 1..1530: mol_type = other DNA
atgggcgtacaggccggactcttcgggatgttaggcttccttggcgttgccttgggcggatcacctgccctcagatggtataggacaagctgtcatctgacgaaggcagttccaggcaatccactcggctatctgagcttcctggctaaagatgcacaggggctcgcactcatccacgcacggtgggacgcccaccgtagactgcagagctgtagttgggaggacgagcctgaactgacagccgcttacggcgccctgtgcgcccacgaaaccgcctggggcagcttcatccacacacccggcccagagctgcagagggccctggctacgctgcagtcccagtgggaggcgtgcagagctttggaagagagccctgccggtgctcgcaagaagcgggccgcgggtcaatcaggagtccctggcggtggccatcagcgagaaaagagagggtggaccatgcccgggacattgtggtgtggggtgggcgacagcgcagggaattcttcagagctgggagtgttccaagggcccgacctctgctgccgcgagcatgaccggtgcccacagaatatttcccccttgcaatataactacggtataaggaactaccgttttcatacaatctctcactgtgactgcgatacgcgcttccagcagtgcttacagaatcagcatgactccatctctgacatcgtgggagtggctttttttaacgttctggagatcccctgctttgttctggaggagcaagaggcctgcgttgcttggtattggtggggggggtgtcggatgtacggaacagtaccgctcgcacgcctacagccccggacgttttacaacgcgtcctggagctcacgtgccaccagtcccactccaagctctcggtcccccgctccacccaaaccaaggcagaaacagcacctccgtaagggaccaccccatcagaaaggatccaaacgtccctcaaaggctaatacgaccgcactgcaggacccaatggtgtcaccccggctggacgtcgcgcccacagggttgcagggaccacagggtggattgaaaccccagggcgcaagatgggtgtgccgatctttcagacggcatctggatcagtgtgaacaccaaatcggaccgcgggagatcgagttccagctcctcaacagcgcacaggagcccctcttccactgcaattgtactagaagactggcgcgcttcctgcgccttcattccccacccgaggtgacgaatatgctttgggagctgttaggcaccacctgctttaagttggccccccctctcgattgcgttgaaggcaagaactgtagccgcgacccacgggccatccgagtgtccgcgcgacatttacgaaggctgcaacaacgccgccatcagctccaggataaagggactgacgagagacagccgtggccttccgaaccattgcggggcccaatgagtttctataatcagtgtcttcagttgactcaagcagctcggaggcccgatcgacagcagaagagttggtcacaatag

SEQ ID NO: 121997 - DNA, 93 bp, synthetic construct
  misc_feature 1..93: note = Description of Artificial Sequence: Synthetic coding sequence
  source 1..93: mol_type = other DNA
atgactggagagctggaggtgaagaacatggatatgaagcccggatccactcttaaaataaccggttcaatcgcggatgggactgatggctag

SEQ ID NO: 121998 - DNA, 1758 bp, synthetic construct
  misc_feature 1..1758: note = Description of Artificial Sequence: Synthetic coding sequence
  source 1..1758: mol_type = other DNA
atgacacctccccgcctgttttgggtgtggctgctcgtagccggaacccaaggggtgaatgacggtgacatgcggcttgccgacggaggcgcaacaaaccaggggcgcgtcgaaatcttctaccgcggccaatggggtacagtatgcgacaacttgtgggatctcaccgacgcctccgtcgtttgtcgcgcgcttggcttcgagaacgctacgcaagcactcgggcgcgcggcatttgggcagggcagcggcccgattatgttggatgaggtccagtgcacaggtactgaggcatctctggctgattgtaagtccctaggctggctgaaaagtaattgtcggcatgaacgggacgcaggtgtagtgtgcacaaatgaaactagaagcactcatacgttagacttatccagagaattatctgaagcccttggccagatcttcgatagtcagcgcgggtgtgatctctctataagcgtgaacgttcagggggaagatgccctgggattttgcggacacaccgttatcctaaccgcaaacctggaggctcaagcgctgtggaaggaacccggatctaacgttaccatgagcgtcgatgccgagtgcgtgcctatggtgcgcgatctactgcgctacttctattctcggcggatcgacatcacgctttctagcgttaagtgcttccacaaactcgcctcagcgtatggggcaagacagctgcagggctattgtgcatccctgtttgccattctgctgccgcaggacccttcctttcagatgccgctcgacctgtacgcatatgccgtggcaaccggagatgccctgctggagaagctttgccttcagtttctggcttggaatttcgaggcactgacacaagccgaagcctggcccagcgtgcctacagatctgctccagcttctgcttccacggtctgatttagccgtgccttcggaattagccctgctgaaggctgttgacacatggtcctggggcgagagagctagtcacgaggaggtggaaggtttggtggagaagattcgcttccccatgatgttgcccgaagaactgttcgagttgcagtttaatctcagcctatactggagccatgaggctttgttccaaaagaagactctacaggccctggagttccacactgtgccgttccagctgctggccaggtataagggcctcaacctcactgaggatacctataagcctagaatatacacaagccctacctggtctgcttttgtgacagacagcagctggagcgcacggaagtcccagctggtatatcagagccgacggggtccactggtgaagtattcttcagactacttccaggcacctagcgactatagatactacccgtatcaaagctttcagacgccgcagcaccccagctttctgttccaggataaaagggtgtcatggtcactggtgtatctgcccactattcaatcgtgctggaactacgggttcagctgtagctcagacgaactcccggtgctggggctcactaagtccggaggctccgacagaactatcgcctatgagaacaaagccctgatgctatgcgagggcctgttcgtggcagatgtgaccgactttgaggggtggaaggctgcaatcccaagcgctcttgacaccaatagcagtaaaagtacatcgtcctttccttgcccagccggtcacttcaacggttttagaactgtgataaggccattttatttaacgaacagttcaggagtggactag

SEQ ID NO: 121999 - DNA, 1722 bp, synthetic construct
  misc_feature 1..1722: note = Description of Artificial Sequence: Synthetic coding sequence
  source 1..1722: mol_type = other DNA
atgacgccacccaggcttttctgggtttggctgctggtggcagggacacagggcgtgaacgacggggacatgcgactggctgatggaggggccacaaatcagggcagggtagagatattctacagagggcagtggggaacggtatgtgataacctgtgggacctcaccgacgccagtgtggtgtgtcgagcactgggcttcgaaaacgccactcaggccctggggcgggcggccttcggtcaaggcagtggtcccattatgctagccgactgcaaatcactgggttggctgaagagcaattgtaggcatgagagggatgcaggcgtggtgtgtaccaacgaaacccgctctacccacactctggacctctctcgagagctcagcgaggctctaggacagatatttgactcacagagaggctgcgatctgtctatctccgtgaatgtccaaggcgaagacgcattaggcttctgtggccacacagtgatcttaacagcgaacctggaggcccaagctctgtggaaggagcctggcagcaacgtcactatgtctgtggacgccgagtgtgtgcctatggttcgcgatctgctgcgttatttctacagccgcagaatcgatattaccctctctagcgtcaagtgttttcataaacttgcatcggcttacggcgcgagacagctgcagggctactgcgcatccctgtttgctattctgctgccacaggaccccagctttcagatgcctctggacctgtacgcttatgcggtagcaaccggcgacgcccttctggaaaaactgtgcctgcagtttctggcatggaattttgaagctctgacgcaggccgaggcttggcccagcgtgcccacagacctcttgcaactgttgttaccccgcagtgatttagccgttccctctgaattagcgttgctgaaagcagtggatacttggtcctggggcgagcgggcgtctcacgaagaggtggagggcctcgttgaaaagatacgatttcctatgatgctgcctgaggagctgtttgagttacagttcaatctgtcactgtactggtctcacgaggctttatttcagaaaaagacactccaagccctggagtttcatacggtgcctttccaattactggcaagatataaaggactaaacttgactgaagatacgtacaagccccggatttacacaagccctacctggagcgcttttgtcactgattcctcatggagcgctcggaaatcccagctagtttaccagtcacgtcgtggaccactcgtgaagtactcttccgattactttcaggcaccctctgattatcgctattacccatatcaaagcttccaaactccccagcacccttcttttttattccaagacaagcgagtgtcatggagcctggtttacctccctacgatccagagctgctggaattacgggttctcttgttcctctgacgagctgccggtgctgggtttgactaagtcaggtggatctgacagaaccatcgcctacgagaataaggctctcatgctttgtgaaggcttgtttgtcgcagacgtcactgattttgaagggtggaaggcagccatccccagcgctctcgatactaattcatctaaatccactagctcgttcccctgccctgcaggacacttcaatggcttccgcaccgtgatcaggcccttttatcttacaaatagctccggagtggattag

SEQ ID NO: 122000 - DNA, 411 bp, synthetic construct
  misc_feature 1..411: note = Description of Artificial Sequence: Synthetic coding sequence
  source 1..411: mol_type = other DNA
atgtctaatgtgcctcacaaaagctccctgcccgaaggaatccgtccagggaccgtactcaggatccggggcctggtccctcccaacgcgagtcggtttcatgttaatttgctctgtggagaggagcagggctctgatgcagccctacattttaatccccggcttgacacaagcgaagtggttttcaatagcaaagagcagggaagctgggggcgggaggaaagaggccccggcgtgccctttcagagaggccaacccttcgaggtgcttatcatcgcttctgatgacgggttcaaagccgttgtgggcgacgctcaataccatcacttcaggcacagactgccacttgcccgggtgaggctggtcgaagtgggaggggatgttcagctggacagcgtcaggattttctag

SEQ ID NO: 122001 - DNA, 954 bp, synthetic construct
  misc_feature 1..954: note = Description of Artificial Sequence: Synthetic coding sequence
  source 1..954: mol_type = other DNA
atgatgctttccctgaataacctgcaaaatatcatttacaatcccgtgatccctttcgttggaaccattcctgatcagcttgatcccggcactctgatcgtcattagaggtcacgtccctagcgatgcggacagatttcaggtcgatctccaaaatggcagttccatgaagccgcgggccgatgttgcattccacttcaacccccgattcaagagggcaggttgcattgtttgtaatacacttatcaacgagaaatgggggcgggaagagattacttacgacaccccattcaaaagggaaaagtcgtttgagattgtcataatggtccttaaagacaagtttcaggttgcagtgaacggaaaacacacactgttgtatggacaccggattgggccagagaagatagacacactgggcatctacggaaaagtgaacattcacagcatcggcttctcttttagctctgatttgcagagtacgcaagccagctctctggaactgacagagatttctcgcgaaaatgtgcccaagtccggcacccctcagctgagactcccttttgctgctcgtctaaatacacctatgggcccagggagaacagttgtcgtcaaaggagaggtgaacgcgaatgcaaaaagcttcaatgtcgacctgctggctggcaagtctaaggatatcgctctgcatctgaatccccgactgaacatcaaggcctttgtgagaaacagcttcttacaggaaagctggggcgaggaggagcgcaacattacatcttttcctttctctcccgggatgtactttgagatgattatttactgtgatgttagagaattcaaggtggctgtaaacggcgtccattcacttgagtacaagcatagattcaaggagctgtcaagcatcgatacgttggagatcaatggcgatatccacttgctcgaggttagatcatggtag

SEQ ID NO: 122002 - DNA, 1080 bp, synthetic construct
  misc_feature 1..1080: note = Description of Artificial Sequence: Synthetic coding sequence
  source 1..1080: mol_type = other DNA
atgatgttgagtttaaacaacttgcagaacatcatttataatcctgttatcccatttgtcggcaccatcccggatcaattggatccaggaactctaatcgtgatccggggacacgtcccaagtgacgccgatcgattccaagtggatctgcagaacgggtcttctatgaagcctcgtgcagatgtcgcgtttcatttcaaccctcggtttaaaagggccggctgtatcgtgtgcaatacgttaatcaacgaaaagtggggaagagaggagataacttatgacactccatttaagcgggaaaagagttttgaaatcgtgatcatggtgttgaaggataaatttcaggtggctgtcaatgggaaacacacactgctctatggacataggatcggccctgagaagatagatacattaggtatctacggcaaagtgaacatccactccataggcttcagtttttcctccgatctgcagtccacgcaggccagtagtctagaattgactgaaatttcccgggagaatgtgcccaagtctggcacaccccagctgccttccaacaggggtggcgatatcagtaagattgcccctaggacagtttatacaaagtccaaggacagcacagtcaatcacacgttgacttgtaccaagatccctcctatgaattacgtgtctaagagacttcctttcgctgctcgcctcaacactcccatgggtcccgggaggactgtggtggtcaaaggcgaggtcaacgccaacgcaaaaagcttcaacgtggatctacttgcagggaaatccaaggatattgccctccacctgaaccccagactaaacatcaaggccttcgtccgcaatagctttctgcaggaaagttggggcgaagaggaacggaacattactagttttccattctctcctggcatgtacttcgagatgatcatctactgcgacgtcagggagttcaaagtggccgttaacggtgtgcacagcttggagtataaacaccgatttaaagagctatcatcaattgacaccctggagattaacggtgatatacatttgctggaagtgcggagttggtag

SEQ ID NO: 122003 - DNA, 1077 bp, synthetic construct
  misc_feature 1..1077: note = Description of Artificial Sequence: Synthetic coding sequence
  source 1..1077: mol_type = other DNA
atgatgctcagccttaataatctgcagaatataatctacaatccggttattccgttcgtggggacgatacccgatcagctggaccccggaactctgatagtcattcggggccacgtcccctccgacgccgaccgtttccaggtggatctacagaatggctcatccatgaaaccgcgcgctgacgtcgccttccacttcaatccaagatttaaaagggcagggtgtatcgtttgcaataccttgataaatgaaaagtggggccgcgaggagattacttatgataccccctttaagcgcgagaagagcttcgagatcgtgattatggttctgaaggacaagtttcaagtggccgtgaacggcaagcacacattactgtacggccaccgcatcggtccagaaaagatcgacacgctagggatttatgggaaagtcaatattcacagtatcggattttcattctctagcgacctgcagtctactcaagctagtagcctcgaattgaccgaaatctcgcgggagaacgtgcctaagtctggcacaccccagctccgactctctttgccctcttgggaccttcaggggcatgggtccgagaccttcaggtctgtcctgtggacacgcgtcttcgagatagccttctgccggcctctggggacggtcgcgtccttccagcgtctgccattcgcagcccgccttaacacacccatgggacctggtagaactgtggtggtgaagggagaggtgaacgccaacgcaaagagcttcaacgtggacttactcgcagggaagtctaaggacatcgccctccacctgaatcctcgtctgaatatcaaggcatttgtgagaaactcctttcttcaagaatcttggggcgaggaagaacggaatattacctccttcccattttctccaggcatgtatttcgagatgataatctactgtgatgtcagagagttcaaagtcgcagttaacggagtgcactctttagagtacaagcaccggtttaaagagttgtcctcaatcgatacactggagatcaatggtgatatccatttattggaggttaggtcatggtag

SEQ ID NO: 122004 - DNA, 954 bp, synthetic construct
  misc_feature 1..954: note = Description of Artificial Sequence: Synthetic coding sequence
  source 1..954: mol_type = other DNA
atgatgctgtccctgaacaatctgcaaaacatcatttacaaccctgttattccatttgtagggaccattcccgaccaactcgatccaggaactcttatcgtcataagggggcacgtgcctagcgatgctgacagatttcaagttgacctgcagaacggctcaagtatgaaacccagggcggacgtggcgttccacttcaatcctcgatttaagcgcgctgggtgtattgtgtgcaacacccttatcaacgagaagtggggcagggaagaaattacatatgacacgcccttcaagagagaaaagtcattcgagatagtcatcatggtgctgaaggataaattccaagtggccgtgaacggaaagcacaccctgctgtacggtcacagaatagggcccgagaaaatcgacacactgggcatttacggaaaagtgaatattcacagcatcgggttcagcttctccagtgacctgcagagcacccaggctagctccctggaactcacagagattagtagggagaatgtacccaagagtgggacacctcagcttaggctgccctttgcggccaggctgaacacacccatgggcccaggcagaacagtggttgtgaaaggggaggtcaatgccaacgcgaaaagctttaacgtcgatctgttggctggcaagtcaaaggatatagcgcttcatctgaacccaagactcaatattaaagcatttgtccgtaatagctttttacaggaaagttggggtgaggaagagcgaaatatcacctcgtttcccttctctcctggcatgtattttgagatgattatttactgcgatgtccgagagtttaaagtggcggtgaatggcgttcacagtctcgagtataaacatagatttaaggaattgtccagtatagacacactagagattaatggagacatccacctgcttgaagtaaggagttggtag

SEQ ID NO: 122005 - DNA, 627 bp, synthetic construct
  misc_feature 1..627: note = Description of Artificial Sequence: Synthetic coding sequence
  source 1..627: mol_type = other DNA
atgatgttgtcgttaaacaatctgcagaatattatctataaccccgtgataccattcgtcggaactatcccggaccagctagatccgggaacactgatagtgattagaggacatgtaccgtctgacgcggaccgatttcaagtagacttgcagaacggaagcagcatgaagccgcgggccgacgtggcgtttcactttaatccacggtttaaaagggcggggtgcattgtttgcaacacactcattaacgaaaagtggggaagggaagagattacttacgacacaccctttaagcgcgaaaaaagctttgaaatcgtgataatggtacttaaagataaatttcaggtggctgtcaatggaaagcatacactactgtacggacaccgaatcggacctgaaaaaatcgatactctagggatatatggtaaggtcaatattcatagcatcggctttagtttttcaagtgatctgcagtcgacgcaggcaagctctttagagcttacagagattagcagagagaacgttcctaagagcgggaccccgcagctacccagcaaccgcggaggtgacatttctaaaatcgccccaaggacagtgtataccaaaagtaaagactcaacggtctag

SEQ ID NO: 122006 - DNA, 903 bp, synthetic construct
  misc_feature 1..903: note = Description of Artificial Sequence: Synthetic coding sequence
  source 1..903: mol_type = other DNA
atgatgctttcactgaataatctgcagaatattatatataacccggtaataccgtttgtgggcaccatcccggaccagcttgatcctgggactttgatcgttatcagaggccacgtcccatcagatgccgaccgctttcaggtggacctccagaatggttccagtatgaagccccgggctgacgtggcttttcactttaatccccggtttaaaagggctggctgtatcgtctgcaatacactcattaatgaaaagtgggggcgggaggagatcacctacgatactcctttcaaacgcgaaaaatcgtttgagatcgtcatcatggtgttaaaggacaagttccaggtcccgaaatcagggactcctcagcttccctccaaccggggcggcgacataagtaagattgcacccaggaccgtgtacaccaaaagtaaggatagcaccgttaaccacactttgacctgcaccaagatacctccaatgaactacgtgtccaagcgccttccctttgctgctagactgaataccccaatgggccccgggagaacagtggtggtaaagggtgaggtgaacgctaatgctaagagttttaatgtggatctccttgctggaaagagcaaggacattgcattacacctcaaccctcgcctgaacattaaggcctttgtgcggaacagctttctgcaagaaagttggggggaggaggagagaaatatcacctcctttcccttctccccaggcatgtactttgagatgatcatctattgcgatgtcagagagttcaaagttgctgtgaatggcgtacattcattagaatacaaacaccgcttcaaagagctctcgtcgattgacactcttgagatcaacggggacattcatctcctggaagtccggtcctggtag

SEQ ID NO: 122007 - DNA, 1080 bp, synthetic construct
  misc_feature 1..1080: note = Description of Artificial Sequence: Synthetic coding sequence
  source 1..1080: mol_type = other DNA
atgatgctgtccctgaacaacctccagaacattatatacaatccagtcatccccttcgttgggacaataccagatcagctcgatcccggaactttgatagttatccgcggtcacgtgccttccgatgccgaccgatttcaagttgacctccagaacggctctagcatgaagccgcgcgccgacgtcgccttccactttaatccaagatttaagcgagcgggctgcattgtgtgcaacacccttattaacgaaaagtggggccgggaggaaattacatacgacactccatttaagcgtgaaaagtcattcgagatagttataatggtgctcaaggacaaattccaggtagctgtcaatggaaagcacactctgttgtatggccaccggattgggccggagaagatcgacacgttaggcatttacgggaaggtgaacattcactcgattggattctcctttagctctgacctccagtctacgcaagccagtagtttggagctcaccgagatttcaagagaaaacgttcctaagtccgggaccccccagctgcccagcaatcgcggcggtgacatatcaaagattgcaccaaggacagtttacaccaagtcaaaggattctaccgtgaaccacaccttgacctgtactaaaattccacccatgaactatgtttccaaacggctcccttttgcagcacggctaaatactcctatggggccgggcaggacagttgttgtgaagggcgaagtgaatgcaaatgccaagagctttaacgtggatctcctcgcaggcaaaagcaaggatatagcactgcacctgaaccctaggctgaacatcaaggccttcgtccgcaactcctttttacaggaatcatggggagaagaagagcgtaatattacctccttccccttttcccctgggatgtacttcgaaatgatcatttactgcgacgtgagagagtttaaagttgcagtcaacggagttcactccttggagtataaacatagattcaaagagctcagtagtatcgataccttagagattaacggtgacatccacttgcttgaagtgaggtcctggtag

SEQ ID NO: 122008 - DNA, 507 bp, synthetic construct
  misc_feature 1..507: note = Description of Artificial Sequence: Synthetic coding sequence
  source 1..507: mol_type = other DNA
atgatgctgtcccttaataacctccagaacattatctataatcccgtcataccattcgtaggtacaattccagaccagctggaccctggaaccttaatcgtcatcagggggcacgtgcccagtgacgctgataggtttcaggtagacctccagaatggcagctcaatgaagccccgtgcagatgtcgcctttcacttcaatccgagatttaagcgggcaggctgcatcgtctgcaacactctgataaatgagaaatggggccgggaggagatcacctacgataccccttttaagcgcgaaaaatccttcgaaatcgtaatcatggtgctgaaggacaagttccaagtggccgttaatggaaaacatacattactgtacggacacaggataggcccagaaaaaatcgatacactcggaatctacgggaaggtaaatattcattccataggcttcagcttcagtagcgacctgcagtccactcaggctagttctctggagcttacctag

SEQ ID NO: 122009 - DNA, 321 bp, synthetic construct
  misc_feature 1..321: note = Description of Artificial Sequence: Synthetic coding sequence
  source 1..321: mol_type = other DNA
atgatgctgagccttaataacctgcaaaacattatctacaaccctgtcatcccatttgtcggcacaatcccagaccagctagacccaggtaccctgattgtcatccgtggacatgtgccctctgacgcggatcgcttccaggtcgatctgcagaatggctccagtatgaagcctagggctgatgtggcgtttcattttaatccacgcttcaagagagccggctgcatcgtgtgcaatacattgatcaatgagaagtggggaagagaggaaataacctacgataccccatttaagcgggagaagagcttcgaaattgtctag

SEQ ID NO: 122010 - DNA, 1080 bp, synthetic construct
  misc_feature 1..1080: note = Description of Artificial Sequence: Synthetic coding sequence
  source 1..1080: mol_type = other DNA
atgatgctgtcgcttaacaatctgcagaacataatttataatcctgtcattccattcgtggggactataccagatcaactcgatcccggtaccctgattgtcatcagaggccacgtaccatctgatgctgaccggtttcaggtcgacttacagaacgggagtagtatgaaaccacgggcggatgttgcttttcatttcaatccacgctttaaaagagcaggatgtattgtttgtaacacactgatcaacgaaaaatgggggcgggaggagatcacatacgatactccgttcaaacgtgaaaagtcctttgaaattgtgatcatggtgctcaaggataaattccaggtggctgtgaatggcaagcacaccctactctacggacatcggatcggcccggagaagattgacacactgggaatttacggcaaggtcaacatccactctatcgggttttcattttcatccgatctccaatctactcaggctagctcgcttgaactgacagaaatctcacgggaaaatgtccccaaatcaggaactccacagctcccctcaaacagggggggtgatataagcaagattgccccacgtaccgtctataccaagtcaaaagatagcaccgtgaaccacactctgacatgcaccaagatccctcctatgaattacgtgtccaaacgtttgcccttcgccgcacgcctcaatacacccatgggacctgggagaaccgttgttgtgaaaggagaggtcaacgcaaatgccaaatctttcaatgtcgacttactcgccggaaaatctaaggacatcgcactccacctgaatccccgcctcaacataaaggcgttcgtgcgcaattctttcctgcaagagtcttggggggaggaggagagaaatatcacgagctttccattcagccccggcatgtacttcgaaatgattatctactgcgatgtacgggaatttaaagtagcagtgaatggtgtacacagtctcgaatataaacacagattcaaggagctgtcgagtatcgacacacttgagatcaatggcgatattcacctgcttgaggtcaggagttggtag

SEQ ID NO: 122011 - DNA, 954 bp, synthetic construct
  misc_feature 1..954: note = Description of Artificial Sequence: Synthetic coding sequence
  source 1..954: mol_type = other DNA
atgatgcttagcctgaacaaccttcagaacataatttacaatcctgtgattccattcgtggggaccatcccagaccagttagatcctggtactctcattgtaattaggggacacgtaccgtctgacgccgaccgatttcaggtggatctacaaaacggctcatctatgaaacctcgtgcagacgtagcattccatttcaaccctcgcttcaagcgcgcagggtgcattgtgtgcaacaccctaatcaatgagaaatggggccgcgaggaaattacctacgacactcctttcaagcgggagaaatcattcgaaatcgtaattatggtgcttaaggataagttccaggtcgccgtcaatggcaaacacactctgctgtacggtcacaggattggcccggagaagattgacaccctcggaatctacggaaaggtgaacattcattctataggattttcattctcgtctgacctgcagagtactcaggcgagttctctggaactgaccgaaatctctcgcgagaatgtgcctaaatcaggtacaccccagctgcgcctacccttcgctgctcgcctgaatacacctatgggcccaggccgaacggtcgttgtcaaaggggaagtgaacgctaacgccaagagctttaacgtggaccttctagctggaaagtccaaagacatagccctgcacctgaacccacgtcttaatattaaggccttcgtgcgaaacagcttcctgcaagagtcctggggagaagaagagcggaacatcacttctttccctttcagtccgggaatgtacttcgaaatgattatttattgcgacgtccgggagtttaaggtagctgtaaatggagtgcattcacttgagtataagcaccggtttaaggagctaagctccatcgataccctcgaaatcaacggagacatacatctgctcgaggtgcgtagttggtag

SEQ ID NO: 122012 - DNA, 1080 bp, synthetic construct
  misc_feature 1..1080: note = Description of Artificial Sequence: Synthetic coding sequence
  source 1..1080: mol_type = other DNA
atgatgctttccctcaataatctccaaaacattatctataatcccgtcattccattcgtagggactatcccagatcagctcgacccaggtacacttatcgtgattcgaggacacgtaccgagcgacgccgatagatttcaagttgatctgcagaacgggtctagtatgaaaccaagggctgacgttgcctttcactttaaccctcggttcaaaagagccggatgtatcgtgtgcaacactttaatcaacgaaaagtggggcagagaagagattacatacgataccccctttaagcgcgaaaagtccttcgagatcgtcatcatggtgttgaaagataagttccaggtagccgtgaacggaaaacacaccctcttatatggacatagaatcgggcctgagaagatcgacaccttagggatttatggcaaggtgaacattcactccatcggtttttcattctcgtctgatctgcagtctacacaggcctccagcctggagctgacggaaatctctcgcgagaacgtgccgaagagtggaaccccccagttaccttctaatagagggggcgatatctctaagatcgctcccaggaccgtatacacaaagtccaaagattcaaccgtgaaccacactctgacatgtactaaaattccaccaatgaactacgtcagcaaaagactaccttttgctgccaggcttaacacacccatgggcccaggacggaccgtggtggttaagggcgaggtgaatgctaatgccaaatcatttaacgttgatctgctggctggaaaatccaaagacatagcactgcatctcaacccccgactgaacattaaggcatttgtccgtaacagctttctccaggagtcctggggagaggaggagagaaacataacatcgttccccttttcaccgggcatgtattttgaaatgatcatttactgcgatgtgagagaattcaaagtcgccgttaacggagtacacagtctggagtacaagcataggtttaaagaactatcctcaatcgataccttagaaatcaacggagatatccacttactggaggttcggtcctggtag

SEQ ID NO: 122013 - DNA, 132 bp, synthetic construct
  misc_feature 1..132: note = Description of Artificial Sequence: Synthetic coding sequence
  source 1..132: mol_type = other DNA
atgatgctcagccttaacaacctgcagaacatcatctacaaccctgtgataccttttgtggggaccatcccagatcagctcgaccctggaacgttgattgtaatcaggggccacgtccctagcgatgcctag

SEQ ID NO: 122014 - DNA, 972 bp, synthetic construct
  misc_feature 1..972: note = Description of Artificial Sequence: Synthetic coding sequence
  source 1..972: mol_type = other DNA
atggcattctcaggatcacaagcaccatacctgtcccctgctgttcccttctctggaactatccagggcggcttacaagatggactgcagattaccgttaacggcacagtgctctcctcttctggtacccggttcgctgtcaacttccagacagggttctctggcaatgacatagcctttcacttcaaccccagatttgaagacggcggctatgtagtgtgcaacactcgccagaatggaagttggggccccgaggagcgtaaaacacatatgccgttccagaagggaatgccatttgacttgtgttttctggtccagagcagcgatttcaaggtgatggtgaacgggatcctgttcgttcagtatttccaccgggtgccgtttcatcgcgtagacacaatcagcgtaaacggctcggtgcagctatcctatatttccttccaaccacccggcgtttggcccgctaacccggctccaattacccagacagtcatccacaccgtccaatcggcacccggccaaatgttctctacgccagctatccctccaatgatgtacccacatcctgcctatcccatgccgtttataactactattctgggaggcttatatccttccaaatctatcttactctccggaacagtgctgccctctgctcagcggtttcatatcaacttatgctctggcaatcatatcgccttccacttaaacccccgatttgacgaaaatgccgtcgtaaggaatacccaaatcgacaacagctggggttccgaggagcgttcactgcccaggaagatgccgttcgtgcgggggcagagcttcagtgtgtggattctgtgcgaagcccactgtctgaaagtggccgtcgatggccagcacctctttgagtactatcacagactcaggaacttgcctaccattaacaggctagaggtggggggagacattcagctgacccacgtacagacctag

SEQ ID NO: 122015 - DNA, 936 bp, synthetic construct
  misc_feature 1..936: note = Description of Artificial Sequence: Synthetic coding sequence
  source 1..936: mol_type = other DNA
atggctttttcagggtcacaagcaccttacctttctcctgcggtgcccttttcgggaacaatccagggaggattacaggatgggttgcaaatcaccgtgaacggaacagttttaagcagcagcggcactagattcgccgtgaactttcagaccggcttttccggcaacgacatcgcctttcacttcaatccccggtttgaggatgggggctacgtggtatgcaatacacggcagaatggctcctggggaccggaagaacggaagactcacatgccttttcaaaaaggaatgcctttcgacctgtgcttcctcgtccagtccagcgatttcaaggtcatggtgaacggcattctctttgtacagtacttccatcgcgtgccctttcatcgagtggacacgatatccgtaaacggcagtgtccagctgtcttacatcagcttccagacccagaccgtgattcacaccgtccaaagcgctcctggacagatgttcagtacgcctgccatcccacctatgatgtacccccatccggcttatccaatgccattcatcacaacaatactgggaggtttgtaccctagtaagtccatcctgttgtcaggaactgtcctgccgtccgcgcagcgattccatatcaacctttgcagtggtaatcatattgctttccacctaaatccgcgctttgatgaaaatgcagtggttcgcaatactcagatcgacaatagttggggcagcgaggaaagaagcttgcctcgcaagatgcccttcgtcagaggccaaagtttttcggtatggatcctgtgtgaagcgcattgccttaaagtggccgtcgatggtcagcacctgttcgaatactaccaccgactgcgtaacttgccgaccattaataggctggaggtcggtggggatatccagctgacacacgtgcagacctag

SEQ ID NO: 122016 - DNA, 741 bp, synthetic construct
  misc_feature 1..741: note = Description of Artificial Sequence: Synthetic coding sequence
  source 1..741: mol_type = other DNA
atggccttctccggcagccaggccccttacctcagtcccgccgttcccttttccggtacgattcagggcggtctgcaggacgggctgcagatcactgtcaatggaaccgtcctcagttcatccggaaccagatttgctgtgaatttccaaacaggattctcgggcaacgacatagcattccacttcaatcctcgttttgaagatggtggatacgtagtgtgtaacacccgccagaacggatcatggggacccgaggagaggaagacccacatgcccttccaaaagggcatgccattcgatctgtgcttccttgtgcagagtagcgattttaaagtgatggtcaacggcatcctgttcgtccaatattttcatagagtcccctttcacagggtggacacaatttctgttaacgggtccgtgcagctgtcgtacattagcttccagccccccggcgtctggcctgcaaatcctgcccccattacccagaccgtgattcacacagtgcagtctgctcctggacagatgttcagcactcctgcaatcccgcccatgatgtacccacacccggcctaccccatgccatttatcaccacaattcttggtggattgtatccctcaaagagtattctcctgtctgggaccgtcctgccgagtgcccaacgatgcggcagctgcgttaaactgacagcaagccgatggccctggatggtctcaacatgccttaataccacgatcgcctag

SEQ ID NO: 122017 - DNA, 1068 bp, synthetic construct
  misc_feature 1..1068: note = Description of Artificial Sequence: Synthetic coding sequence
  source 1..1068: mol_type = other DNA
atggctttcagcggctcacaagctccttacctgtcccccgcggttccattcagcgggactatacagggaggccttcaggatggtctgcaaatcacagtgaacggcactgtgctgtcctcctctggtactcggttcgctgtgaatttccagacaggtttttctggaaatgacatcgcttttcactttaatcctcgtttcgaggatggaggctacgttgtctgcaacacaaggcaaaacggcagctgggggcccgaagagagaaagactcatatgcctttccagaaggggatgccattcgatctttgcttcctggtgcagagctctgattttaaggtgatggtgaatggcatcctatttgtgcagtatttccaccgtgtaccgttccatcgggtggacacaatttcagtaaatggatctgtacagctctcttatatatcatttcagaatccaagaaccgtgcccgtgcaaccagctttctccaccgtgccattcagccagcccgtctgcttccccccgaggccccggggccggagacagaaacctccaggtgtgtggccggcaaacccagccccaatcactcagacagtgatacacaccgttcagagtgctccaggccagatgttttctacccccgctataccacctatgatgtatccccatcctgcctacccgatgcccttcataacgaccattcttgggggcctatatccttctaagtccatccttctctccggtacagtgttaccctctgcgcagcgtttccacatcaacctatgctctggtaatcatatcgcttttcacctcaaccctagatttgatgaaaatgccgtagttcgcaacacacaaatcgataatagctggggctccgaggagagaagtctcccgagaaaaatgcctttcgtacgtgggcagtcttttagcgtctggattctatgcgaagcccattgtttgaaggttgccgtggacggccaacatctctttgagtactatcatcgactgagaaatcttccaaccattaaccgacttgaggtggggggagacatacagctaacccacgtgcagacgtag

SEQ ID NO: 122018 - DNA, 666 bp, synthetic construct
  misc_feature 1..666: note = Description of Artificial Sequence: Synthetic coding sequence
  source 1..666: mol_type = other DNA
atggggccattttctgccccggtagagcctgatggcggatatgtggtctgtaatacccgccagaacgggtcatggggccccgaggaaagaaaaactcacatgccattccagaagggcatgccctttgatctgtgtttcttggtgcagagttctgacttcaaagttatggtgaatggaatcctgtttgtccagtactttcatcgggttcccttccacagggtcgatactatttcagtcaatgggtctgtacaattgagttatatttcattccaaaaccctagaactgtgccggttcagcccgcatttagcacagttccattttcccagccagtgtgttttccaccccgtcccagaggccgcagacagaagccacccggggtgtggcccgctaatccagctcccatcactcagaccgttattcataccgtacagtcggcccccgggcagatgtttagcacaccggcgattccccctatgatgtatcctcatcccgcttaccctatgccatttattaccacaattcttggcggactgtacccctctaaaagcatcctgttgtcaggtacggtgctgccctccgcccagcgctgtggcagctgtgtgaaactaactgctagccggtggccgtggatggtgagcacatgtctgaatacaactattgcctag

SEQ ID NO: 122019 - DNA, 360 bp, synthetic construct
  misc_feature 1..360: note = Description of Artificial Sequence: Synthetic coding sequence
  source 1..360: mol_type = other DNA
atggccttcagtgggtcgcaagcaccctacctttcaccggccgtccccttctctggtactatacaaggtggcctccaagacggcctgcagattacggttaatgggaccgttttgagcagttcagggactagattcgctgtcaacttccagaccgggtttagcggtaatgacatcgccttccatttcaatccccgttttgaggacgggggctacgtggtttgtaatacaaggcagaacggaagttggggacccgaagagcgcaaaactcatatgccattccagaaaggaatgccctttgacttatgcttcttggtccaatcttcagacttcaaagtccaccttctgcttctcctgctctag

SEQ ID NO: 122020 - DNA, 1533 bp, synthetic construct
  misc_feature 1..1533: note = Description of Artificial Sequence: Synthetic coding sequence
  source 1..1533: mol_type = other DNA
atggcaggcagccgccaacgtggtcttcgcgctagggtgagaccattattttgtgcccttctcctgagcttgggtcggttcgtgcggggggatggagtcggaggcgatccagctgtggctttacctcatcgtcggttcgagtataaatactctttcaaaggcccacacctcgtccaatccgacggtacagtcccattttgggctcacgccggcaacgccattccctcctccgaccagattcgggtcgctccttcactgaagtcccagcggggctccgtgtggaccaagacaaaggccgcttttgagaattgggaggttgaggtgacgttccgcgtcacagggcgcggcaggatcggggctgacgggctggcgatctggtacgcagaaaaccagggcttggaaggtccggtgttcggaagcgcagatctgtggaacggtgtgggtatattttttgacagtttcgacaacgatgggaaaaagaacaatccagccattgttatcatcggcaataacggccagatacactacgatcatcaaaacgatggggcatcccaggccctggctagctgccagcgtgactttcgtaacaaaccctatccggtgagagcaaagattacttattatcagaacacgctcaccgtgatgatcaataacggctttacgcctgataagaacgattatgaattctgtgcaaaagtagagaacatgattatccccgcccaggggcacttcggtatctccgccgccacaggcggcctggccgatgatcacgacgtcctgtcattcttaacgttccagcttactgaaccaggtaaagagccacctactcccgacaaggaaatcagtgagaaagaaaaagagaagtaccaggaggaattcgagcacttccaacaagagttggacaagaagaaggaggagttccaaaagggccaccccgacttgcaggggcagccagcagaggaaattttcgaatctgtaggcgatagggagttgagacaggtgtttgaaggacaaaatcggatacacctggagatcaaacagttaaataggcaactggacatgatccttgatgagcagcgtaggtatgtctcttctctgactgaagaaatcagtaagcggggagcggggatgccggggcagcatggacagattacacaacaggaactggatacggtcgtgaagactcagcacgagattctgagacaggtaaatgagatgaagaactcaatgagcgaaacagtgagacttgtgtcagggatgcagcacccaggttcagccggaggagtttatgagaccactcagcacttcatagatattaaggaacatctacatattgtgaaacgcgatattgacaatctggtacagcggaatatgcctagcaacgaaaaaccaaagtgtcctgagcttcctccgttcccctcatgtctctcaactgttcactttattattttcgttgtggtgcagactgtgctcttcattggatacatcatgtaccggagccagcaagaggcagctgccaaaaaattcttttag

SEQ ID NO: 122021 - DNA, 1101 bp, synthetic construct
  misc_feature 1..1101: note = Description of Artificial Sequence: Synthetic coding sequence
  source 1..1101: mol_type = other DNA
atgcagcctttatggctgtgctgggctttgtgggttcttccgcttgctagccccggcgcagctctgactggggaacagctgcttggcagcctcctccggcagttgcaacttaaggaggtgccaactctcgatagggctgatatggaagaactggtgatccctacacacgttcgcgcccagtatgtggcactcttgcagcgctctcacggcgatagatcccggggtaagagattctctcaatcgttccgagaagtggctggtagattcctggctttagaagcatctacccaccttcttgtgtttggaatggagcaaaggctgccccctaacagcgaactggtgcaagcagtgttaaggctcttccaggagcctgtgccaaaagcggccctgcacaggcatggcaggctgagcccccgaagtgccagagccagggtcactgtcgaatggcttcgggtgcgtgacgacggctctaataggacctctctaatcgactcgcggctcgtcagcgtgcacgaatctggttggaaggcctttgacgtgaccgaggcggttaatttctggcagcagctctcacggcccaggcagcccttgctgctccaagtaagcgtgcagagagagcatctaggtcctttggcttcaggcgcccacaaactcgtgcggtttgctagtcagggggctcccgccggcctcggtgaaccacaattagagttgcatactctagacctgggtgactatggcgcacaaggagactgtgatccggaagcccccatgaccgagggcaccagatgctgtcggcaagaaatgtacattgacttgcagggtatgaagtgggccgaaaattgggtgcttgagcctcccggattcctcgcctacgagtgcgtgggaacatgtagacagccacctgaggctctcgccttcaaatggccatttctcggcccacgtcagtgtattgcttctgaaaccgatagcttaccaatgattgtgtctattaaggaaggaggcagaacgcgtccccaggtcgtgtctctgcctaatatgcgggtccagaagtgctcttgcgctagcgacggggccctggttccgagacggttgcagccttag

SEQ ID NO: 122022 - DNA, 1101 bp, synthetic construct
  misc_feature 1..1101: note = Description of Artificial Sequence: Synthetic coding sequence
  source 1..1101: mol_type = other DNA
atgtggccactgtggctttgttgggccctgtgggtgctacctctggcgggaccaggggccgccctgacagaggaacaactgctcggcagtttgctgcgccagctgcaattatcagaggtcccggttctagaccgggccgacatggagaagctcgtaattcccgcacacgtgcgtgcgcagtatgtagttttactgaggcgcagccacggcgataggagtaggggaaagcgctttagtcagtccttccgcgaggttgccggaaggtttctcgcgtcagaggcttccacacacttgctggtgttcggcatggagcagagacttccgcctaactctgaactagtgcaggcggtactccggctttttcaggagcccgtaccaaaagcagctctgcacaggcacggccggctgagccctagatctgcccaggctcgggtgaccgtggaatggctccgagtgcgtgacgatggatccaaccgaacttccctgatcgacagccgccttgtgtccgttcacgaatcaggatggaaggctttcgacgtaacagaagccgtcaacttttggcagcaactctcccgtcctcgtcagccgttgttgcttcaggtgagcgtgcagcgagagcatctcggaccactggcttccggagctcataagctagtacggttcgctagtcagggcgcccctgcggggcttggcgagccccagctagaacttcacacactggaccttcgcgattacggggcccagggcgactgtgatcccgaagcgccaatgaccgagggcactcgatgttgcagacaggaaatgtacattgacctgcagggtatgaagtgggcgaagaattgggtcttggaacctcctgggtttctagcttatgaatgtgtcgggacctgccagcaacctccagaagcattagcattcaattggccctttctcggtcctaggcaatgtatcgctagtgaaacagcctccctcccgatgatcgtctccattaaggaggggggaagaactcgaccccaggtcgtctcgctaccaaacatgcgggtgcagaagtgcagttgcgccagcgatggcgcgctcgtgcctaggagacttcagccatag

SEQ ID NO: 122023 - DNA, 999 bp, synthetic construct
  misc_feature 1..999: note = Description of Artificial Sequence: Synthetic coding sequence
  source 1..999: mol_type = other DNA
atgtggccattatggctatgttgggccttatgggtgttgcccctcgccggtcctggtgctgccttaaccgaagagcagttgttgggctcattactacgacagctgcagctgtccgaagttcctgtgctggatcgtgcagatatggaaaaactggtaatccctgcccacgttcgcgcccaatatgttgtgcttctccggaggtcccatggcgatcggtcaaggggaaagaggttctcgcagtcatttcgcgaggtcgcaggccgctttctggctagcgaggctgcgttgcaccggcatggacggctcagtcctcggtccgctcaagctcgtgtcacggtcgagtggctccgcgttcgcgatgacggaagtaaccgcacaagtctaattgactcaaggcttgtgtcagtccacgagtccggctggaaggctttcgacgtgaccgaagctgtgaacttttggcagcagctgagcagacctagacaaccactgctgttgcaggtcagcgtgcagcgggaacatttggggcccctggcctcaggcgctcacaagctggtgaggttcgctagccagggtgcccccgcagggctgggggaacctcagctcgaactccacaccctggacctccgggattatggggctcagggagactgcgaccccgaggcacccatgactgaaggcacccggtgctgccgccaagagatgtatattgatctgcaagggatgaaatgggcaaaaaactgggttctggaacctccagggttcttagcatatgaatgcgtagggacctgccagcagccccccgaggccctggcttttaactggccatttctgggaccccgccagtgtattgcgtctgaaactgcaagtctacccatgatcgtgtccatcaaagaggggggaaggacgaggccccaagtggtcagcctgcctaatatgagggtgcagaaatgctcatgcgctagtgatggagccctcgtcccccggcggttacagccttag

SEQ ID NO: 122024 - DNA, 1131 bp, synthetic construct
  misc_feature 1..1131: note = Description of Artificial Sequence: Synthetic coding sequence
  source 1..1131: mol_type = other DNA
atggtgtggaaggtggccgtgtttctgtcggtggctctgggcatcggagcagtccctattgacgatccagaggatggcggaaagcattgggtagttatagtggccggcagtaatgggtggtacaattatcggcaccaggcggacgcctgccacgcctaccaaatcatccataggaatgggatcccagacgaacaaattgtggtcatgatgtacgatgatattgcctactcagaagataatcctactcctggcatcgtcatcaatcgcccgaacggcactgacgtctatcagggagtcccgaaggattacactggagaggacgtgactccgcagaatttcctcgctgtgctgcggggcgacgcagaagccgtgaaagggatcggatctggaaaagtcttgaaaagcgggccacaagatcacgtgtttatctacttcacagaccatgggtcaaccggaattctggtgtttcctaatgaagatcttcacgtcaaggatctcaatgagactatccattacatgtacaagcataagatgtacaggaaaatggtattttatatcgaagcgtgtgagtctgggtccatgatgaatcacctgccggacaatattaatgtttacgccacaacagccgctaacccacgcgaaagctcctatgcctgctactatgacgagaagagatcaacctatctcggagactggtactctgtcaactggatggaggactcagatgttgaagacctgactaaagagacattacataagcagtatcacctcgtaaaatcgcacacaaacacaagccacgtgatgcagtatggcaataaaaccattagtaccatgaaagtgatgcagttccagggcatgaaacggaaggcctcatcaccagttcctctccccccagtgactcatctggatttgacccctagccctgacgtgccattgactataatgaagcggaaactcatgaacactaacgacctagaggagagtaggcaattaactgaagaaatccagagacacctggattacgagtacgccctgagacatctctacgtgctggtgaacctgtgtgaaaagccctacccactccacaggatcaaactgagtatggaccacgtttgtctcggacactattag

SEQ ID NO: 122025 - DNA, 1119 bp, synthetic construct
  misc_feature 1..1119: note = Description of Artificial Sequence: Synthetic coding sequence
  source 1..1119: mol_type = other DNA
atggtgtggaaagtggcagtctttctgtctgtagcactagggatcggtgccgtgccaatcgacgatcccgaggacggaggcaagcactgggtggtcatcgtggctgggtccaatgggtggtacaattacaggcatcaggccgacgcttgccatgcctaccagattattcacagaaatggcatccccgatgagcagattgttgtgatgatgtatgatgatattgcctacagcgaggataacccaacgccagggattgtcattaatagaccaaatggaacagacgtgtaccagggggtgcctaaggattacacaggcgaggacgtgactcctcagaactttctggccgtgctgagaggcgacgccgaagcagtgaaagggattggcagtggtaaggtgctcaaatctggccctcaggaccacgtgttcatatattttaccgaccacggatccaccggtattcttgttttccctaatgaagacctgcacgtcaaagacctgaatgaaactatacattatatgtacaaacacaaaatgtatagaaagatggtattctacattgaagcctgcgagagcggaagtatgatgaaccatcttcctgacaatatcaatgtctacgccaccacggccgccaatccacgcgagtcctcctacgcctgttactatgacgagaaacggagcacgtacctgggagactggtactctgttaattggatggaggattccgatgtggaggatctcacaaaagagaccctgcacaagcaatatcatctggtcaaatcccacactaatacaagccacgttatgcagtatggcaacaagacgatttcaacaatgaaggtgatgcagttccagggtatgaaaagaaaagcttccagccccgtcccactgcctcctgtcacacaccttgatcttaccccctccccagatgttccactcacaatcatgaagcgcaaactaatgaataccaatgatttggaagagtcccggcagctgaccgaggaaattcagaggcatctggatgacaagatcgtccacggaccgcgggtcccgtggtctctcctgaagtcatgcctgctggaggccttcccctcagtctccgcccctccaaccgtatgctag

SEQ ID NO: 122026 - DNA, 1302 bp, synthetic construct
  misc_feature 1..1302: note = Description of Artificial Sequence: Synthetic coding sequence
  source 1..1302: mol_type = other DNA
atggtgtggaaagtagcagtgtttttgtcggtagccctaggcatcggagccgttcccattgatgaccccgaggacggcggaaaacactgggtggtgatagtagctggttctaacggctggtacaactaccgtcaccaggccgacgcctgccacgcttaccagatcatccatcggaacggcattccggacgaacaaatcgtcgtaatgatgtatgatgacatcgcttactcggaagataacccaacaccaggtatcgtaattaatcgccccaacgggacggatgtatatcaaggagtgccaaaggattacactggcgaggacgttacaccgcagaatttcctggccgtgttgagaggcgacgcggaggcagtcaagggcataggctctggaaaggtattgaagtctgggcctcaggatcatgtgtttatctacttcacagatcacgggagcaccggaattctggtcttccctaatgaggacctgcatgtcaaggatttgaatgaaacaattcactacatgtataagcacaagatgtacagaaagatggttttttacattgaagcctgcgaatctgggtctatgatgaaccacttgccagataacattaatgtgtacgcaacgaccgctgctaaccccagggaaagtagctatgcttgttattacgacgaaaagaggtccacctacctcggggattggtatagcgtgaactggatggaggactcagatgtagaggacctcaccaaagaaaccctgcacaaacagtaccacctggtcaagtctcacacaaatacttcacatgtcatgcagtatggcaacaagaccatctccactatgaaggtgatgcagtttcaggggatgaagcggaaggcgagcagccccgtacccctgccacctgtgacacacctggatttgaccccctcacccgacgttcccctcacgattatgaagcgtaaactgatgaatactaatgacctcgaagagtcaagacagttgacagaggaaattcagagacaccttgacgcccggcacctgatagagaagagtgttcgcaaaatcgtttccctgctcgcagcaagcgaagctgaggtggaacaactcctgagtgagagagcccctctgacgggccacagctgttaccctgaggcattgctccattttcggacacactgcttcaactggcacagtccaacgtacgagtacgctctgcgacatttgtatgtgttggtgaatctctgcgagaaaccatatcccctccacaggatcaagttgagtatggatcacgtctgtctcggtcactactag

SEQ ID NO: 122027 - DNA, 1302 bp, synthetic construct
  misc_feature 1..1302: note = Description of Artificial Sequence: Synthetic coding sequence
  source 1..1302: mol_type = other DNA
atggtctggaaagtggccgtgttcctgtctgttgcgttggggattggcgctgtgcctattgacgatcctgaggacggcggcaagcactgggtggtgatcgtggctggctctaatggctggtacaattatcgtcaccaagcagacgcctgccacgcataccagataattcaccggaatggtattccagatgagcagatcgtggtcatgatgtacgatgatattgcatactcggaagataatcccactccgggaattgtaataaacagaccgaacggcaccgatgtgtaccagggggttccgaaggattacactggtgaagacgtgaccccgcagaatttcctggccgtgttgaggggagatgcagaggcagtgaaaggcattggctccgggaaagtgcttaagtcaggccctcaggatcatgtctttatctactttaccgaccatggcagcacgggaatcctggtgttcccaaacgaggacctccacgtgaaagatctgaatgagacaatccattatatgtacaaacataagatgtatcgcaaaatggtgttctacattgaagcttgtgagagcgggtccatgatgaaccatctgccagacaatatcaatgtgtacgcaaccacggccgcaaaccccagagagagttcttacgcgtgttattacgatgaaaagaggagtacgtatctcggcgattggtattccgtgaattggatggaagattccgacgtggaggacctgacaaaggagactctgcataaacagtaccacctcgtgaaaagccatactaacacctcccacgttatgcaatacgggaataaaacaatcagcaccatgaaggtaatgcaatttcaagggatgaagaggaaagcatctagtccagtgccactccctcccgttacccatctggatctgaccccaagtcccgatgtgccacttactatcatgaaaagaaagcttatgaacacaaacgaccttgaggagtcacgtcaacttacagaagaaatccagcgccatcttgatgctcgccacctcatcgaaaaatctgtacgaaaaatcgtttcactattagcagcatctgaggcggaggtggagcaactcctttcagagagggctccactaaccgggcacagctgctatcctgaagcactgctccactttcgcacacattgctttaattggcattcccccacgtatgagtacgccctccgtcatttgtatgtactggtgaacctatgtgagaaaccctatcccctgcaccgaatcaaattaagtatggatcacgtttgtctgggccactactag

SEQ ID NO: 122028 - DNA, 1197 bp, synthetic construct
  misc_feature 1..1197: note = Description of Artificial Sequence: Synthetic coding sequence
  source 1..1197: mol_type = other DNA
atggtgtggaaggtcgcggtgttcctcagcgtcgcactcggtatcggcgccgtgccaatcgatgaccccgaagacggaggcaaacactgggtcgtgattgtggcaggtagcaacggctggtataactataggcatcaagcggacgcctgtcacgcctatcagatcatacatagaaatggtataccagatgaacaaatcgtggttatgatgtatgacgtcacaccccagaactttctggccgtgctcaggggcgatgctgaggcggtgaaaggcataggttctggcaaagtactgaaatccggaccccaagatcacgtgttcatttactttaccgaccacgggtccaccggcatcctggtcttccctaatgaagatctccatgtgaaggatctgaatgaaacaattcactatatgtataaacacaagatgtacaggaagatggttttttacattgaggcctgtgagagtggatctatgatgaaccatctccccgacaatattaatgtgtatgcgacaacggccgctaacccgcgggaatccagctacgcctgttattacgacgagaagcggtctacctatttgggggactggtactctgtgaattggatggaggacagcgacgtggaggacctgactaaagaaacgctgcataaacagtaccatttagtgaagagccataccaacaccagccatgtcatgcagtatggcaataagacaatctcaacaatgaaggtgatgcagttccaggggatgaaacgtaaagcttcctcacccgttccacttcctcctgtgacgcatctcgatttgacaccatcaccagatgtgcctctgacaatcatgaagaggaagctgatgaacaccaacgatctggaggaaagtagacagctgaccgaggagattcaacgacatcttgacgcccgccatctcatcgaaaaaagcgtgaggaagatagtttccctcttggcagccagcgaggcagaggtggagcaactcctgtccgaaagggcgcccctgacaggtcacagctgctatcccgaagccctgctgcactttagaactcactgttttaattggcactcccctacctatgagtacgcgctacgccatctttatgtccttgtgaacctgtgtgaaaaaccataccctctacacaggatcaagctaagcatggaccacgtctgtttgggacattactag

SEQ ID NO: 122029 - DNA, 1233 bp, synthetic construct
  misc_feature 1..1233: note = Description of Artificial Sequence: Synthetic coding sequence
  source 1..1233: mol_type = other DNA
atggtctggaaggttgctgtcttcctcagcgtcgctggcagcaacggctggtataattacagacaccaggccgacgcctgccatgcctaccagatcatccaccggaatggcatccccgatgaacaaatcgtggtcatgatgtatgacgatatcgcatatagtgaggacaatcctacccccggtatagtcattaatagacctaatggcacagacgtttaccaaggtgtcccaaaggattacactggcgaggacgtgacgccacaaaattttcttgcggtgttgaggggggacgccgaggccgtcaagggtatcggatccggaaaagttctgaagtctgggcctcaggatcatgtcttcatttattttaccgatcatggcagtactggaatcctggtgttcccaaatgaagacctgcacgttaaggatcttaacgaaacaattcattacatgtacaagcataagatgtataggaaaatggtcttctatatcgaggcatgcgagtctggatccatgatgaatcatctgcctgataatatcaacgtttatgccactaccgcggcaaacccccgtgagagcagctacgcctgctactatgatgagaaacggtccacttatttaggtgactggtacagcgtaaactggatggaggacagcgacgtcgaggatttaaccaaggagacactgcacaaacagtatcatcttgtgaagtcccacacaaatacctctcatgtgatgcagtatgggaacaagaccatcagtacaatgaaagtcatgcagttccagggcatgaaaagaaaagcgagctctcccgtacccttacctccggtcacccaccttgatttaaccccgtctcctgacgtgcctctgactatcatgaagaggaagctcatgaataccaatgacctcgaggaaagccgtcagctgaccgaggagattcagcgacacctggacgcacgtcatctgatcgagaagtccgtcaggaagattgtctcgcttctcgcagcctcagaggcagaggtggagcaactactgtccgagcgcgcacctttgacagggcacagttgttacccagaagccctgctgcattttcggacacattgtttcaactggcactcaccgacctatgagtatgccttacgtcacttatacgttttggtcaatttatgtgagaagccttacccgcttcacaggattaagttgtcaatggatcatgtttgtctgggccattactag

SEQ ID NO: 122030 - DNA, 174 bp, synthetic construct
  misc_feature 1..174: note = Description of Artificial Sequence: Synthetic coding sequence
  source 1..174: mol_type = other DNA
atggtgtggaaggtcgccgtgtttctgtcagttgctctgggaattggggctgtgccaatcgacgaccctgaagacggcgggaagcactgggtggttatagtggccggctctaacggttggtataactacagacaccaagccgacgcatgtcacgcctatcagataatacattag

SEQ ID NO: 122031 - DNA, 60 bp, synthetic construct
  misc_feature 1..60: note = Description of Artificial Sequence: Synthetic coding sequence
  source 1..60: mol_type = other DNA
atggtgtggaaggtggccgtctttctaagtgtggcactcggtatcggggctgtgccttag

SEQ ID NO: 122032 - DNA, 177 bp, synthetic construct
  misc_feature 1..177: note = Description of Artificial Sequence: Synthetic coding sequence
  source 1..177: mol_type = other DNA
atggtttggaaggtcgcggtcttcctgtccgtggccctcgggatcggcgccgtcccgatcgatgaccccgaggatggtggcaaacactgggtcgtgattgttgcgggcagcaacggatggtataactatcggcatcaggcagacgcatgtcacgcttaccagataattcacaggtag

SEQ ID NO: 122033 - DNA, 237 bp, synthetic construct
  misc_feature 1..237: note = Description of Artificial Sequence: Synthetic coding sequence
  source 1..237: mol_type = other DNA
atggtgtggaaggtggctgtcttcctaagtgtcgccctgggaataggcgcagtgccaatcgatgatcccgaggacgggggaaagcactgggttgtcatagtggctgggagcaatggatggtataattaccgacaccaagcagacgcttgccatgcgtaccagatcatacacaggaacggcattcctgatgaacagatagttgtgatgatgtacgatgatattgcttattcggaatag

SEQ ID NO: 122034 - DNA, 237 bp, synthetic construct
  misc_feature 1..237: note = Description of Artificial Sequence: Synthetic coding sequence
  source 1..237: mol_type = other DNA
atggtgtggaaggtggcagttttcctctctgtcgcgcttggtatcggagccgtaccaattgacgatcccgaggatggcggtaaacattgggtggttatagtcgctggcagcaacggttggtacaactatcgtcatcaggccgacgcgtgccacgcataccagataatccaccgcaacggtatccctgatgagcaaattgtggtgatgatgtacgacgatattgcttattctgaatag

SEQ ID NO: 122035 - DNA, 2736 bp, synthetic construct
  misc_feature 1..2736: note = Description of Artificial Sequence: Synthetic coding sequence
  source 1..2736: mol_type = other DNA
atggctgcagcggccgccagcgcaccccagcagcttagcgatgaggagctgtttagccaattgcggagatatggcctgtctccggggcctgtaaccgaaagcactcggcccgtgtacctcaaaaagctgaaaaaactcagggaggaggaacagcagcagcatcggtcgggcggccgcgggaataaaactaggaacagcaataacaacaataccgctgccgcgacagtcgccgctgccgggccggcagccgccgccgccgcaggcatgggtgtcagacccgtgtctggtgacttgtcatatctgcgcacccctggggggctatgccggataagcgctagtggcccggagtctctgctgggtggcccaggcggtgcgtctgccgctccagccgccggttctaaagtgttgctcggcttttcgagcgacgaatccgatgtggaggcttccccccgagatcaagcaggcggcgggggccgaaaggatagagccagtctgcagtacagagggctcaaagctccaccggccccactggccgcttcagaggtcacgaactccaactccgccgagagaaggaagccacactcgtggtggggagctaggaggcccgccgggccggaactacagacccctccgggcaaggatggagctgtggaagatgaggagggggaaggagaggacggcgaggaacgcgacccggagactgaggagcctttgtgggcatctcgcacagttaacggctctagactcgtaccttacagctgtagagagaactattctgacagcgaagaagaggatgacgatgacgtcgccagttcccggcaggtcctgaaagatgacagtctttctcggcatagaccaagacgaactcattctaagcctctccctccactgaccgccaaatccgccgggggacgccttgaaacctcagtgcagggtggcggcggactggccatgaatgacagggctgctgcagctggatccctcgacagatcccggaatcttgaggaggccgccgccgctgagcaaggaggcggctgcgaccaagtggacagctcaccggtgccccggtaccgcgtcaatgcaaagaagctcactccactgctcccgccccctttgacagacatggactcaaccctcgattccagcaccggctccctgttaaaaaccaacaaccatatcggaggaggcgccttcagcgttgattctcctagaatttactcaaacagtctccccccaagcgccgcagttgccgccagctccagtctccgcatcaatcacgccaatcacacgggctcaaaccatacctacttgaaaaacacctataacaaacctaagctgagtgagcccgaggaagaactgctgcaacagtttaagagagaggaagtctccccgaccggcagcttttcagctcactacttatctatgttcctattgacagccgcatgcttgttctttcttatactcggccttacctatttgggcatgaggggaacaggggtatcggaagatggcgaactcagtatagagaatccttttggcgaaacattcggcaagattcaggagtccgaaaaaacacttatgatgaataccctgtacaaactgcacgatagacttgcacagctggccggtgaccacgagtgcgggagcagtagccagagaaccctcagcgtccaggaagccgcagcctatctgaaagacctgggtcccgagtacgagggcatatttaacacgagcctgcagtggatcctggaaaacgggaaggatgtgggcattaggtgcgtgggctttggccctgaggaagagctcacgaacatcacagacgtccagttcctgcagtccactcgtcctttaatgagcttctggtgccgctttagacgcgcattcgtcacagttactcaccgtcttctgctgctgtgcctgggagtagtgatggtgtgtgtggtgctgcgctacatgaagtatagatggacgaaggaagaggaggaaacacgccaaatgtacgacatggttgtgaagattatcgatgtcttgcggagtcacaatgaggcctgccaggaaaataaagaccttcagccctacatgcctattccacatgtgcgagacagcttaatccaaccacatgaccgaaagaagatgaaaaaggtctgggatagagctgtggacttcctggcggccaacgagtctcgggttagaaccgaaactcggcgcattggcggtgctgattttctggtatggaggtggattcagccttctgcatcatgcgacaagatcctcgtcattcccagcaaggtgtggcagggccaggcgtttcacctcgacagaaggaattctccacctaattcactgacgccctgccttaaaattcgcaatatgttcgacccagtcatggagattggagatcagtggcatttagcaatacaggaagccattcttgagaaatgcagcgacaacgatggtatcgtgcacattgccgtggacaagaactccagggaagggtgcgtatacgtaaagtgcctgtctcccgagtacgccgggaaagctttcaaggcattacatgggagctggttcgacggaaagttggtcacagtaaagtacctacgactcgatcggtatcaccacaggtttcctcaggcgctgacttccaacacaccgctcaagcctagcaacaagcacatgaattctatgtctcatctgaggttgcgtaccggcttaaccaatagccagggatcatcttag

SEQ ID NO: 122036 - DNA, 4512 bp, synthetic construct
  misc_feature 1..4512: note = Description of Artificial Sequence: Synthetic coding sequence
  source 1..4512: mol_type = other DNA
atgccaggcccgccagctctgaggaggcgattgctgcttttgctacttgttctcctaattgccggcagcgccggagcagcaccgctaccgcagacaggagccggggaagctccccctgccgctgaagtgtcgagcagcttcgtcatcctctgcgtctgctctttgatcattctcattgttcttattgccaattgtgttagctgctgtaaggacccagagatcgatttcaaggagtttgaagacaattttgacgatgaaatcgactttacccctccagcggaggacactccatctgtgcagagccctgcagaggtttttacactaagcgtgccaaacatatctctcccagccccgagccagttccagccctccgtggaagggctgaaaagtcaggtagcacgacatagcctcaactatattcaggaaatcggaaatggttggtttggtaaagtgctccttggcgagatatacacaggaacttctgtggcccgtgtcatcgtgaaagaattaaaggccagcgcgaatccaaaggagcaagacactttccttaaaaatggcgaaccttactacattctgcagcatccaaacattcttcagtgtgttgggcaatgcgtggaagccataccttacctgctcgtgttcgagttctgtgacctaggagacctgaaggcttacctgcgtagtgaacaggagcatatgaggggcgacagtcagacaatgctcctgcagaggatggcatgcgaggtagccgcaggcctggctgcaatgcataagctgcatttcttgcactccgatctggcgctgcgaaattgctttcttacgtcagacctgaatgtgaaagtcggagactacggtatcggtttctcccgttacaaagaagattacatcgagaccgacgataagaaagttttcccacttcgctggacagccccagaactggtgactagcttccaagaccggctgctgacagcagaccaaacaaagtattccaatatctggagcctcggagtgaccctttgggaattattcgataatgcagcgcagccatactcaaaccttagtaaccttgatgtgctcaaccaagttattcgcgaaagagatactaaactgcccaaaccccagttggagcagccctattctgatagatggtacgaggtgctgcagttttgttggctttcgcctgaaaaaagaccggcagctgaggatgtacatcgactgctgacatatctgaggcttcagtctcagcgagatagcgaagtggacttcgagcagcagtggaacgccctgaaacccaacacaaatagccgggactcaagcaataacgctgcgttccctatccttgaccatttcgctagagatcgactggggagagagatggaggaagtgcttacggtgaccgaaacatctcagggtctttcttttgagtatgtctgggaggcagctaaacacgaccactttgatgagcggtcccgagggcacctggacgagggcctttcttacaccagcatcttttaccctgtggaggtcttcgaaagcagcctaagtgatcccggcccaggtaaacaggacgattccgggcaggatgtacccctgcgagtgcctggcgtggtacctgtgttcgatgcccacaacttgagtgtgggaagtgattattacattcagctggaggagaaatccggttctaacttagaacttgattatccacccgccctcctgacgactgacatggataacccagaacgaactggtcctgagcttagtcagctcaccgccttaagatctgtggagctggaagagtcctccactgatgaagacttctttcaatcttctacggaccccaaggactcctcccttcccggggacttacatgttaccagcggacccgaatccccgtttaacaacatctttaatgacgtggataaaagcgaggatcttccttcccaccagaaaattttcgatctcatggaacttaacggagtgcaagccgacttcaagccagcaacgttgtcaagtagcctagataatccaaaggaatctgttatcactggccactttgagaaagaaaagcctcggaaaatctttgactccgaacctctatgcctctcagataatctgatgcatcaggataacttcgacccgcttaatgtccaggagctcagcgagaattttctctttctgcaggaaaagaacctcctcaagggtagcctgtcctctaaggaacacatcaacgacctgcagaccgagctcaaaaatgccggctttaccgaagccatgttggagaccagctgtcgtaactcactagacactgagcttcagttcgctgaaaacaagccaggattgagcctgctccaggaaaatgtaagtaccaagggagacgacaccgatgttatgctgacgggagataccctgtccacatcgctgcagtcgtccccagaggtccaggtgcccccaacaagctttgagaccgaggagacaccacggcgggtgcccccggactccctgcctactcagggagagacccaaccaacttgtctcgacgttatagtacctgaggactgcctacaccaagacataagtcctgatgccgtaaccgttcccgtcgaaatcctctcgaccgatgccagaactcattcgctggacaaccggtcccaggattctcccggcgagtcagaggagactctgcggctgacagaatcagacagcgtcttggccgacgacattctggccagtcgcgtgagcgtgggaagctcgctccctgaactgggccaggagctgcacaacaaaccattcagcgaagaccaccactctcaccgtcggttagagaagaatctcgaggctgtcgaaacattgaaccaacttaattctaaggacgccgcgaaagaagctggtctcgttagcgcgctgtcctcagatagtaccagccaggattcgcttctagaggacagcctgtccgccccgttcccagcctcagagcccagccttgagacccctgattctctagagagcgttgacgtgcacgaggccctgctcgactcgctgggaagccacacacctcagaagcttgtgcctccagacaagccggctgactcaggctacgagacagaaaacctcgagtctccagagtggacgcttcatcccgcccccgagggtaccgccgactccgaaccagcaaccactggtgacggtggacactctgggctccccccgaatcccgtgattgtgatttccgatgccggcgacggtcacaggggcaccgaggtgaccccagagacctttacagctggctcacaggggtcctaccgagacagtgcctacttttctgataacgatagtgagcctgaaaagaggagcgaggaggtgcctggcacatcaccttctgccctggtccttgtgcaagagcaaccactgcccgagccggtgctgcccgagcagtcgcctgctgctcaggatagctgcctggaggcccggaaatctcagccagacgagtcctgcctgagcgcactgcacaacagtagtgacctggaactgagggctacgccagagccggcccaaacaggcgtccctcaacaggtacacccaactgaagatgaggcatcatccccctggtccgtactcaacgctgagttgtcatcaggggatgattttgagacacaagacgaccggccctgcactttagcgtccaccggaacgaataccaacgagctgctggcttacaccaactcagccttggacaagagtctctccagccattctgaaggtccaaaactgaaagaacccgatatcgagggaaaatatcttggaaaactcggggtctctggcatgttagacttaagcgaagatgggatggatgccgacgaggaggacgaaaattccgatgactctgatgaggacctgagagccttcaatttgcactctctgtccagtgaatcagaagatgagactgaacaccctgtgcccattatcctgtctaatgaggatggccgacacttgcggtcactgctcaagcctaccgctgcgaacgcccctgatccattgcctgaggactggaaaaaagagaaaaaggcagttacctttttcgacgacgtgactgtttacctttttgaccaggaaacacccacaaaggaattgggcccatgtggcggcgaggcctgtgggccagacttgtccggtcccgcgccagcatctggctctccatatttgtccagatgtatcaacagcgaatcatcgactgatgaggagggaggaggttttgagtgggacgatgacttctctcctgacccctttatgagcaaaaccacctccaaccttctgtcaagcaagccaagcttacagaccagtaagtacttttctccgcccccgcctgctcgatccaccgaacaaagttggccacacagcgctccctattccagattcagcatctcccctgccaacatcgcctcgttctcacttactcacctgacggattctgacattgaacagggcggcagttctgaagacggcgagaaggattag

SEQ ID NO: 122037 - DNA, 186 bp, synthetic construct
  misc_feature 1..186: note = Description of Artificial Sequence: Synthetic coding sequence
  source 1..186: mol_type = other DNA
atgcagccaaggacacagccactcgcacagacattgcccttctttctaggcggtgcccctcgggatacgggcctgcgcgtgccagtgatcaaaatgggtactggctgggaaggatttcagcggacgctcaaagaggttgcgtatatccttttgtgctgctggtgcatcaaggagctgctggactag

SEQ ID NO: 122038 - DNA, 186 bp, synthetic construct
  misc_feature 1..186: note = Description of Artificial Sequence: Synthetic coding sequence
  source 1..186: mol_type = other DNA
atgcaacccagaactcagcctttggctcagaccctgcccttctttctgggaggggcccctcgtgatacaggactaagagtaccagttattaagatggggacaggctgggagggatttcagaggactcttaaagaggtggcctacatcctcctgtgctgttggtgtataaaggaactgctcgattag

SEQ ID NO: 122039 - DNA, 522 bp, synthetic construct
  misc_feature 1..522: note = Description of Artificial Sequence: Synthetic coding sequence
  source 1..522: mol_type = other DNA
atgtactcctttatgggcggcgggctgttctgcgcctgggtaggaacaatactcttggtggtcgccatggcaacggaccattggatgcagtatagactctctggctcctttgctcaccaaggtctgtggcgctactgcctcggcaataagtgctacctgcaaacagactccatcgcttactggaacgccaccagggctttcatgatactcagcgctctgtgcgcaatttcggggatcattatgggcataatggcattcgcccatcagcccactttctcccggatcagcagacctttctccgccggaatcatgttcttctcttctaccctgtttgttgtgctcgctctggccatttacactggggtgaccgtctcttttcttggcaggagatttggagattggagattcagctggtcatatatccttgggtgggtggccgtattaatgacgttttttgcgggcatattttatatgtgtgcttatcgagtgcacgagtgccggcgactgtcaacccctagatag

SEQ ID NO: 122040 - DNA, 681 bp, synthetic construct
  misc_feature 1..681: note = Description of Artificial Sequence: Synthetic coding sequence
  source 1..681: mol_type = other DNA
atgcccggaggcccgggcgtgctccaggcactcccggcgactatcttcttactgtttttgctctccgcggtgtaccttggacccgggtgccaggctctgtggatgcacaaggtaccggcttcactgatggtttctcttggggaagacgctcatttccaatgtcctcacaactctagcaataacgccaatgttacctggtggagggttctacacgggaattatacctggcccccggaatttctgggaccgggggaggaccccaatggtactctcattattcagaacgtgaataagtctcatgggggtatttacgtctgcagggtgcaggagggaaatgagtcttaccagcaatcatgcggcacatatctacgcgtgcgccagcctccaccccgcccatttttagacatgggggagggaactaagaaccgaatcataactgccgagggcatcatcttgctcttctgcgcagtggtgcctgggacgttgctcctctttcgaaaaaggtggcaaaatgaaaaactgggcctggacgcaggtgacgaatacgaggatgagaacctgtacgagggtctgaacctcgatgattgttcaatgtacgaagatataagcaggggcctgcagggaacataccaggacgtcgggagtttaaacatcggcgatgtgcaactggaaaaaccttag

SEQ ID NO: 122041 - DNA, 2001 bp, synthetic construct
  misc_feature 1..2001: note = Description of Artificial Sequence: Synthetic coding sequence
  source 1..2001: mol_type = other DNA
atggctgacatggaagacctgtttgggagtgatgctgacagcgaggctgaaagaaaggatagcgacagcggtagcgatagcgactccgaccaagagaatgccgcaagtgggtccaacgcaagcggaagtgaatccgatcaggacgagaggggggacagtgggcagccaagcaataaggaactgtttggagacgactcggaggacgagggagcatcacatcactccggctccgataaccactcagagcgtagtgacaatcggagcgaggctagtgaacgcagcgaccatgaagacaacgacccctccgacgtcgatcagcactctggatccgaagcacctaatgatgacgaggatgaggggcacaggtccgatggcggttcgcaccattcagaggctgagggatccgaaaaggcgcattccgatgacgagaaatggggacgtgaagacaagtccgatcagtccgacgacgagaagatccagaattccgacgacgaggagcgggcacaagggagtgacgaggacaagttgcagaattcagacgacgatgaaaagatgcagaacacagatgatgaggagagaccccagctttctgatgacgagaggcagcaattgagtgaggaggaaaaggccaattccgacgacgagcgccctgtagctagcgacaacgacgacgaaaagcagaattctgacgacgaggagcaaccacagttgtctgacgaggaaaagatgcagaatagtgatgatgaacgcccccaggcgtccgatgaggagcatagacattctgacgatgaggaagagcaagaccacaagtcagaatctgcaagaggctcagattccgaggatgaggtgctgcggatgaagagaaaaaacgccattgcttccgactctgaagccgattccgacaccgaggtccccaaagacaatagcggcacaatggatctcttcggtggggcagacgacatctccagcggctccgacggcgaagacaagcccccgactccaggtcaacccgtggacgaaaatggacttcctcaggaccagcaagaggaagagcccattcctgaaactcggatcgaggtcgagatacctaaggtgaacacagatctggggaacgatttgtactttgttaagctgccgaacttcctaagcgttgagccccgcccatttgatccacagtattacgaggatgagttcgaagacgaggagatgctagacgaagagggacggacacgactaaagctgaaggtggaaaatacaatcagatggcgcattaggcgcgacgaggaggggaacgagatcaaggagagtaacgcacgaattgtaaagtggtctgatgggagcatgagcttgcatctggggaacgaagtgtttgacgtgtacaaggcgcccctgcagggagaccacaaccacctctttatcagacagggaacaggcctccagggacaggcggttttcaagaccaaattgacgttccgccctcattcgaccgattctgcgacacatcggaaaatgacactctctcttgcggataggtgcagcaagacccagaagattagaattttgccaatggctgggcgggaccccgagtgtcagagaacagaaatgattaagaaggaggaggagcgcctccgggctagcatacggagagaaagccaacagaggcgcatgagagaaaaacagcatcaacgaggactcagcgcctcttatcttgaacccgaccgctacgacgaggaggaggaaggggaagagagcatttctctggctgccatcaagaacagatataagggaggtattcgtgaggagagagctaggatatattcaagtgattccgatgaggggtccgaggaggataaggcccagaggctcctcaaggccaaaaagttaacaagtgacgaagaaggggagccgagtgggaaacgcaaggccgaagacgatgacaaggccaataagaagcacaagaaatacgtaatctctgatgaggaggaagaagacgacgactag

SEQ ID NO: 122042 - DNA, 1821 bp, synthetic construct
  misc_feature 1..1821: note = Description of Artificial Sequence: Synthetic coding sequence
  source 1..1821: mol_type = other DNA
atggctgacatggaggatctgttcggatctgacgccgactccgaggcagagaggaaagatagtgactccgggtccgactccgattcagatcaggagaacgcggcctcaggctcaaatgcatcagggagcgagtctgaccaggatgagcgaggcgacagcgggcagccttctaataaagagctatttggagacgatagcgaggacgagggagcaagccaccacagcggttctgataatcatagcgaacgctcagataacagatccgaggcctccgagaggtccgaccacgaagataacgatccgagcgatgtcgaccagcattctggcagcgaggcacctaacgacgatgaggatgagggtcatcgaagcgatggcggctcccaccatagcgaagccgaggggtcagaaaaggcgcacagcgatgatgagaaatggggacgcgaggacaagtccgatcagtcagatgacgagaaaattcagaactccgacgatgaggagcgggctcagggatctgatgaagacaagttgcaaaactccgacgatgacgaaaagatgcagaacaccgatgacgaagaaaggccccaactctcagacgatgaaagacaacagctgtccgaggaagaaaaggcaaacagcgatgacgaacggcccgtggcttccgacaacgacgacgagaagcagaattcagacgatgaggagcagccacaactgtctgacgaagagaagatgcagaactctgacgacgaacgaccccaggcatccgatgaggagcatcgacactccgatgacgaagaggaacaggaccacaagtccgagtcagcccgggggagtgatagtgaggatgaggtgctgcgaatgaaaagaaagaacgccattgcttctgatagcgaggcagatagcgataccgaggtgcccaaggacaactctgggactatggacctttttggaggagccgacgacattagtagtggttccgatggggaggacaaaccgcctacccccgggcaacccgtggacgagaatggtctgccacaggaccagcaggaagaggaaccaatcccagagactaggatcgaggtcgaaatccccaaggtgaacacagatctgggaaatgacctttattttgtgaaactgcccaatttcctgagcgtagaaccatccatgtccctgcaccttgggaacgaagtcttcgacgtctacaaagctcctttgcagggcgaccataaccacctatttattcgacagggaaccggcctccagggccaggctgtgttcaagactaagctcacctttcgccctcactctacagatagcgctacgcacagaaagatgactcttagcctggctgaccgctgttcaaaaacacagaaaatccgaattctcccgatggcgggccgggacccagagtgccagcgaaccgagatgatcaagaaagaggaagaaaggctcagagcctccattcggagggaaagtcagcaacgtagaatgagggagaagcagcaccagcgtggcctgagtgcctcatacctggaacccgaccgctacgatgaagaggaggagggcgaggagagcattagcctggccgctatcaagaaccgttacaagggaggcatcagggaggagcgagcccggatttattcttctgactcggatgagggaagcgaggaggacaaagcacagcggctgttgaaggcaaaaaaacttactagcgacgaagaaggcgagccctcaggtaaacgtaaggctgaggacgacgataaggctaataaaaagcacaagaagtacgtcatatctgacgaggaggaggaggacgatgactag

SEQ ID NO: 122043 - DNA, 1935 bp, synthetic construct
  misc_feature 1..1935: note = Description of Artificial Sequence: Synthetic coding sequence
  source 1..1935: mol_type = other DNA
atggcggacatggaggacctctttgggagtgatgcggactctgaggcggaaaggaaagactccgattcgggcagcgacagcgatagcgaccaagagaacgcagcctccggcagtaatgcctctgggtccgaatccgatcaggatgagcgcggcgactcagggcaaccctccaacaaggagctctttggagatgacagtgaagacgagggtgcctcccatcacagtggatctgataaccacagcgagcggtccgataatagatctgaagccagcgaaagatccgaccacgaggacaatgatcccagcgacgtggatcagcactcgggctcagaagcccctaatgacgacgaagacgaaggacaccggtctgacggcggctcgcaccatagcgaagcagagggatcggaaaaagcgcactccgacgatgagaagtggggaagagaagacaagagtgatcagagcgacgacgaaaagattcaaaattctgacgacgaggaacgcgcacaagggtctgatgaggataagctgcagaacagtgacgacgacgagaagatgcagaacacggacgacgaggaaagacctcaactctcagatgacgagcgacagcaactttccgaggaggagaaagcaaacagcgacgatgaaagaccagtcgccagcgacaatgacgatgacgatgagcgcccgcaggcatccgacgaggaacataggcactccgatgatgaggaagaacaagaccataaatcagaaagtgccaggggaagtgactccgaagacgaggtactgagaatgaaaagaaaaaacgcaatagcgagtgattccgaagccgattcggacaccgaagtccccaaggataactctgggacaatggatcttttcggtggagctgacgatatatcctctggatccgatggggaagataaacccccgactcctgggcaaccagttgacgagaacgggcttccacaggatcagcaagaggaagagcccattccagagaccaggattgaagtggaaatacccaaggtgaatacagacctggggaacgatctgtatttcgtgaaacttcctaacttcctgtccgttgaaccacggccatttgatccacagtactatgaagacgaattcgaggacgaggagatgctggatgaggaagggagaaccaggctaaagctcaaagttgagaacaccataaggtggcgtatcaggagagatgaggagggaaatgagatcaaagagtctaacgctagaatcgtgaagtggagtgacgggagcatgtcgttacacctcggaaatgaggtatttgacgtttacaaagcccccctacagggcgaccacaaccatctatttatcagacagggcactggactgcagggccaggcagtgtttaagacgaagctgacattcagaccccattccaccgacagtgccacacacaggaaaatgacactgtccctggccgatcggtgttccaaaacccagaagataagaatcctgccaatggctggaagagatcccgagtgtcaacgaaccgaaatgatcaagaaagaagaggagcgcctgcgcgcttcgatccgcagagaatctcagcagaggagaatgagagagaaacagcatcagcgaggactgtcggccagttatttggaaccagacaggtatgacgaggaggaggaaggagaagagagcatttctttggcggctatcaagaaccgctataagggaggaattagggaagagagagcacgcatctattcttctgacagtgacgaaggtagcgaggaggataaggctcagaggctgctgaaagccaagaaattaacatctgacgaagaaggtgagccatcaggtaaacggaaggctgaggatgatgacaaggctaacaaaaagcataaaaagtatgtcatttctgatgaggaggaagaagatgacgactag

SEQ ID NO: 122044 - DNA, 2127 bp, synthetic construct
  misc_feature 1..2127: note = Description of Artificial Sequence: Synthetic coding sequence
  source 1..2127: mol_type = other DNA
atgcgtgagcgcatctgggcgccgccgctgttactgctcctgcctttactgttaccccccccactgtggggcggccccccggattcccctcgccgggagctagaacttgagcctggacctttgcagcccttcgatctgctgtacgcatccggcgctgcggcatactactctggggactacgaaagagctgtgagagatctggaagccgctctgagaagtcatcgccgattgagggagatcagaactcggtgtgctcgccattgtgctgctcggcacccactgccccccccaccaccaggcgagggaccaggtgccgagctccctctgtttaggtctctactaggtcgtgctaggtgctatcgaagttgcgagacccagcgcttaggcggtcccgcaagtaggcaccgcgtgagcgaagacgttagatccgacttccaacgccgggtgccgtacaactatctccagagggcatatattaagctgaaccagctggagaaagcggtcgaagctgctcatactttctttgtcgctaatccggagcatatggagatgcaacaaaacatagagaactaccgggctaccgctggtgtggaagctctgcagctggtggatagagaggcgaaaccccacatggaaagctataacgctggagtcaaacactatgaagcagacgattttgaaatggctattcgccacttcgaacaagccctccgggaatacttcgtggaagatacagagtgccgcaccttgtgcgagggcccccagcggtttgaggagtacgagtatttgggttataaggcaggattatacgaagcgatcgctgaccactacatgcaggtgttggtttgtcagcatgaatgtgtccgagagttggcaacccgccctggccgactgagtccaatcgagaacttcttgcctttgcactacgactatctccaatttgcgtactatcgggtgggagagtatgtgaaagccctggaatgcgctaaagcatacctgctgtgtcaccctgacgacgaggatgtcctagacaatgtcgactactacgagtccctgcttgacgacagcatcgatcccgcctccatcgaagctcgggaggatcttaccatgtttgttaaacggcacaaattggaaagcgaattgatcaaaagcgcagcagaagggctaggcttcagctacaccgagcccaactactggatcagatatggggggcgccaagatgaaaatagggtgccaagcggcgttaatgtcgagggggccgaggtgcacgggttttcaatgggaaagaaactatcccctaagatagaccgagacttaagggaaggaggccccctcttatatgagaatattacattcgtgtacaacagcgaacaattgaatggtactcagagagttctgttagacaacgtgctgtctgaggagcagtgccgggaactccattccgttgctagtggcattatgctggttggggacgggtacagggggaaaacatcacctcataccccaaatgagaagtttgagggcgcaacggtgctcaaagccctgaaatccggttacgaaggcagggtaccgctcaagtccgccaggcttttttacgacatcagcgaaaaggccaggagaattgtcgaatcctatttcatgctgaattcaactctctacttttcatacacccacatggtgtgcagaaccgcgctcagcggccagcaggatcgaaggaacgacctctcacatccgattcatgctgataactgcctgctggatccagaggccaacgaatgttggaaagagccacctgcctacacctttagagactactcggcacttctttacatgaacgacgattttgaaggtggagagttcatcttcacggagatggatgcgaagacggtcaccgctagcatcaaacccaaatgcgggcggatgataagcttttcctctgggggcgagaatcctcacggagtaaaggccgtcacaaaaggcaagcgctgcgctgtcgcactttggttcaccctagatccgctgtacagagaactggagcgtattcaggcagacgaggtgatcgccattcttgaccaggaacaacagggcaagcacgagctcaatatcaacccaaaagatgaactgtag

SEQ ID NO: 122045 - DNA, 1584 bp, synthetic construct
  misc_feature 1..1584: note = Description of Artificial Sequence: Synthetic coding sequence
  source 1..1584: mol_type = other DNA
atggagatgcagcagaacattgaaaactacagggccacagcaggagtagaggctctgcagctggtggaccgcgaagcgaagccccacatggagtcttacaacgcgggagtcaaacattacgaagccgatgacttcgagatggctattaggcactttgagcaggcgcttagagagtacttcgtggaggatacagaatgccgtacactgtgtgaggggccccagcggttcgaggagtacgaatatttgggatataaggccggcctgtacgaagctatcgctgatcattacatgcaggttctggtgtgtcagcacgaatgcgtgagggaactggcaacccgcccgggccggctcagtccaatagagaattttctccccctgcactatgattatctgcagtttgcgtactatcgggtgggcgaatatgtgaaggccctggaatgcgctaaagcctatctgctgtgccacccagatgatgaagacgtgctggataacgttgactactatgaaagtctgctggacgacagcattgaccccgccagcatcgaagcacgagaggatctcactatgttcgtgaagaggcataaacttgaatcagaactaataaagtcagccgctgagggattggggttctcctataccgaacccaattactggatccgctatggaggtcgccaggacgagaatagggtgcccagcggagtgaacgtggaaggggccgaagttcacggctttagtatgggcaaaaagctaagtcccaagatcgatagggatctgagagaagggggcccactgttatatgagaatattacctttgtttataacagtgagcagctcaacggcactcagcgggtgttgctggacaacgtgctgtcagaggagcagtgtagagagttacactctgttgcttctggcattatgctcgtgggtgatggctaccgtggtaagaccagcccccacacgccaaacgaaaaattcgagggggccactgtgctcaaggccctgaaatccggatatgaagggagagtgccacttaaatctgcaagactgttttacgatatctctgagaaggcccgccgcatcgtggagtcttactttatgcttaactccaccctctatttttcctatacccacatggtgtgccgcaccgccttgtctggccaacaggaccgcagaaacgacctgtctcacccaatacacgcagataactgtttactggacccggaagccaacgagtgttggaaagagcctccagcttacacttttcgagattattctgccctgttatacatgaacgacgactttgagggaggggagttcatctttactgaaatggacgcaaaaacagtgactgcttctataaagcctaagtgtggccgaatgattagcttctcaagcggaggcgaaaaccctcatggagtcaaagcggtgaccaaggggaagagatgtgccgtagccttatggttcaccctcgaccccctatatagggaactagaaagaatccaggccgatgaagtgatcgcaatccttgaccaggaacagcagggcaaacacgagttaaacatcaatcccaaagatgaattgtag

SEQ ID NO: 122046 - DNA, 2721 bp, synthetic construct
  misc_feature 1..2721: note = Description of Artificial Sequence: Synthetic coding sequence
  source 1..2721: mol_type = other DNA
atgatatgccagaaattctgcgtagttcttctgcactgggaattcatctacgtgattacggcttttaatctctcctatcccatcacaccctggcgcttcaaattgagttgtatgccaccaaactccacatacgattatttcctgttgccagcaggcctgtccaagaacaccagcaattcaaacggccactacgagacagcagtcgaacccaagtttaatagtagcggtacacactttagtaatctatccaagactacatttcattgctgcttccgctctgaacaggaccgtaactgttcgctttgcgctgacaatattgaagggaagacgtttgtctccactgtaaatagccttgtcttccagcagatagacgcaaactggaatatccaatgttggctgaagggtgatctgaagcttttcatctgttatgtagaaagtctgtttaaaaacctcttccggaattataactacaaggtgcatttgttgtacgtactgccagaggtccttgaagactccccactcgttccccaaaagggatcctttcagatggttcactgtaactgttcagtccatgagtgctgtgagtgtttagtgccagtcccgacagcaaaactgaatgatactcttttgatgtgcctcaaaattacttctggcggggtcattttccagtccccgttaatgtcggtgcaacctatcaacatggtgaagcctgacccacctctgggcctgcacatggagatcactgatgatggcaacttaaaaatctcttggagctctccacccctagtcccctttccactgcagtaccaggtgaagtattcagagaactccacaaccgtcattcgcgaggccgacaaaatcgtctccgccaccagcctgctcgtagacagtatcctgccagggagcagttatgaagttcaggttcgcggtaaacgccttgacggacctggaatatggtccgattggagcactccccgagtctttacaacccaggacgtgatctactttcctcccaagatcctcacctccgtcggctctaacgtatcgttccattgcatatacaaaaaggagaacaagattgtaccatccaaagagatagtttggtggatgaatctcgctgagaaaatccctcagtctcagtacgacgtagtgtcggaccacgtcagcaaggtgacattctttaacctaaacgagaccaaacccaggggcaaatttacgtacgatgcggtctactgctgcaatgagcacgagtgccaccaccgatacgcggaactgtacgtcatcgacgttaacattaacattagttgtgagaccgacggatacttgacgaagatgacttgcagatggagtacctccaccatccagtccttagcagagagcacactgcagctgcgctatcacagaagcagcctctactgttcggatatccctagcattcaccccataagcgagcccaaagactgctatcttcagagcgacggtttttatgaatgcatttttcagccaatcttcctgctttccggttatacaatgtggatacgtatcaaccattccctgggcagcttggattcacccccaacttgtgtccttcccgactctgttgttaagccactaccccccagcagcgtaaaagccgaaatcactattaacattggcttactgaagatcagttgggaaaaaccagtctttccagaaaacaacctacaattccagatccggtatggtttgtctggaaaagaagtccagtggaagatgtacgaggtgtatgacgctaagtctaaatccgtcagcctgcctgttccagacctttgcgccgtctacgccgtccaggtcagatgcaaaagactggacgggttaggatactggagcaattggagcaaccccgcatacacagttgtgatggacattaaggtcccaatgcggggacctgagttttggagaatcatcaacggcgacaccatgaaaaaagagaaaaatgtgactttactgtggaagccgctcatgaaaaatgatagcctgtgcagcgttcaacgctacgtgattaatcatcatacctcttgtaatggcacctggagtgaggacgtgggtaatcataccaagtttaccttcctctggactgagcaagcccatacagtgaccgtgctggcaatcaacagcatcggagcaagtgtcgccaactttaatctgaccttctcgtggcctatgtcaaaagtgaacatagtccagagcctgagcgcttatccactgaattcgtcttgcgtgattgtgtcttggatacttagcccctctgactacaaactcatgtatttcattatagagtggaaaaacttaaatgaggacggcgagataaagtggcttcgcatcagctcatccgttaagaagtattacattcacgatcactttattcccatcgaaaagtatcagttctccttgtaccctatttttatggagggagtgggaaagcccaagatcattaattcattcactcaggatgatattgagaaacatcagagtgacgctgggctgtatgtgatcgtaccagtgattatatcctcatcaatccttctattaggcactttgctgatcagtcatcagaggatgaagaaactgttctgggaagacgttcctaatcccaagaactgcagctgggcgcagggcctaaactttcagaagaagatgccgggcactaaagaactcctgggtggtggctggctgacctag

SEQ ID NO: 122047 - DNA, 3498 bp, synthetic construct
  misc_feature 1..3498: note = Description of Artificial Sequence: Synthetic coding sequence
  source 1..3498: mol_type = other DNA
atgatctgtcagaagttctgcgtcgtccttctgcattgggagtttatttacgtgatcaccgcatttaacctttcttacccgattacaccatggcgttttaagctgagctgtatgccccctaactctacatatgattacttcctgcttccggctgggcttagtaagaatacatcaaacagcaatggccattacgagacagctgtggaacccaagtttaattcttccggtacccacttcagtaatctgagcaagaccaccttccactgttgcttccgctctgagcaggacaggaattgttctctgtgtgccgacaatatcgaaggaaagacctttgtctccacagtgaatagtctggtgttccagcagattgatgcaaattggaacatccagtgctggctgaagggcgacctgaaattgttcatctgttatgtcgagagcttatttaagaatctttttcgcaactacaactacaaggtccacctgttgtacgtgctgccagaggttctggaggactccccactggtgccacagaaggggtcattccaaatggtacactgcaattgcagcgtccacgagtgttgcgagtgtctcgttccagtccccacagctaaactgaatgatacattgctgatgtgtctgaagatcacttcgggtggggtgatttttcagtcccctttaatgtctgtacagcctataaatatggttaagcccgatcctcctctgggactccacatggaaattacagacgacggcaatctgaaaatcagctggtcaagtccccctttggtaccatttcccctgcagtaccaagtgaagtattcagaaaacagcactactgtgatcagagaagccgataaaatagtgagcgccacatcactgctcgtcgattcaattctccctggttcttcctacgaagtccaagtccgcgggaagcgcctcgacggaccaggtatttggtccgactggagcacacctcgcgtgtttactacccaagacgtaatatatttccccccaaagatcctcacctcggtcggcagcaatgtttcatttcattgcatatacaaaaaagaaaacaagattgtcccctccaaggagattgtgtggtggatgaacctggcagaaaagattccccagtcacagtacgatgtcgtttcagatcatgtgtcaaaagtaaccttctttaacctgaacgagaccaagcctcggggtaagttcacctatgacgctgtgtattgttgtaacgagcatgaatgtcaccacagatacgctgagctctacgttatcgatgtgaacatcaatatctcttgcgaaacagacggctatctcaccaagatgacctgcaggtggtcaacgtccaccattcaatctctggccgaaagcaccttgcagctcagatatcaccgatcctcattgtactgttctgacattcctagtatccatcctatttccgagcctaaagattgctacctgcaatccgacggtttctatgagtgcatttttcaaccaatcttcctgctctctgggtacaccatgtggatccggattaaccatagtctaggaagcctggacagtcctccaacttgcgtgctgcctgattcggtcgttaaaccacttccaccgagttcggtcaaggcggaaatcaccatcaatatcggccttctgaagatctcgtgggaaaaacctgtatttcccgagaataatctgcaatttcagattcgatacgggttgagtggaaaagaggtacagtggaaaatgtatgaggtgtacgacgcaaaatctaaaagcgtcagcctgccggtgcccgacctttgcgccgtgtatgcagtccaggtgaggtgcaaaaggcttgacggacttggctactggtctaactggtccaaccctgcgtatactgtggtaatggatatcaaggtacctatgcgtggccctgagttctggaggatcatcaatggagatacaatgaagaaggagaagaacgttacactgctatggaagcctcttatgaaaaacgatagcctgtgctctgttcagagatacgtcattaatcatcacaccagttgtaatggaacctggagcgaggacgttgggaatcacacaaagttcacgttcctctggaccgagcaggcgcataccgtgaccgtgcttgctatcaactcaatcggcgcttcagtggccaatttcaatctgacattttcctggcccatgtctaaggtcaatatagtgcagtctttatccgcttacccactgaactcttcttgcgtgatcgtctcgtggatactgagcccctccgattataagctcatgtactttattatcgaatggaagaatctcaacgaggatggagaaattaaatggctcagaatctcttcatccgtcaagaagtattacatccatgatcatttcataccaattgaaaaataccagttcagtctctacccaattttcatggagggtgtcgggaagcccaagattatcaattcttttacccaggatgacatcgaaaagcatcaatcagatgcaggactctacgttattgtgcctgtcatcatttcttctagcattctgctgctgggtacactgctaatctctcatcaacggatgaagaaactgttctgggaagacgtaccgaatccgaaaaactgttcgtgggcacagggattaaacttccaaaagcccgagacttttgagcatctgttcatcaaacatactgcatctgttacctgtggccccctgttgttggagccagaaaccatatcagaggatatctctgtcgataccagttggaaaaacaaagatgagatgatgcccacgaccgtggtgtcactcctctccacaaccgacctggaaaagggatccgtgtgcataagtgatcagtttaattcagtcaatttctctgaagccgaggggaccgaggtgacttacgaggacgagtcgcagcggcaacccttcgtgaaatatgctacgctgatatctaactctaagccctcagagaccggggaagaacagggcctgataaacagctcagttacgaagtgcttctctagcaagaacagtcccctgaaagattcttttagcaactcttcttgggagatcgaagctcaagccttcttcatcctttctgatcaacaccccaacatcataagtccccatttaacctttagtgaaggcttggatgagctgcttaaactcgaggggaattttcccgaggaaaataacgataagaagagcatttactatctaggcgtcacctctattaaaaagcgggaatccggtgtcttgctcactgataagagtagagtatcatgtcccttccctgccccatgtctattcactgacatcagagtgctacaggatagctgcagtcatttcgtggagaataacattaatcttggaacatcgtccaagaaaacttttgcctcctatatgcctcaatttcagacttgcagcactcagacgcacaagatcatggaaaacaagatgtgcgacttaacggtgtag

SEQ ID NO: 122048 - DNA, 2721 bp, synthetic construct
  misc_feature 1..2721: note = Description of Artificial Sequence: Synthetic coding sequence
  source 1..2721: mol_type = other DNA
atgatctgccaaaagttttgtgtcgtgctgctccattgggagtttatctacgtcatcacggcgtttaacttgtcatacccaatcaccccatggcgtttcaaactaagctgtatgccgccaaattccacttacgattactttctactgcctgccgggctcagcaagaatacttccaattcgaacggtcattatgagacggccgtggaacccaagttcaactcttccggtacccactttagtaacctgtccaaaactacattccactgttgtttcagatctgaacaggatcggaattgctcgttgtgtgccgataacatcgaagggaagacctttgtttccactgtcaattcgctggtttttcagcagatcgacgctaactggaatattcagtgttggctcaaaggcgatctgaaactgttcatctgttatgtggagtccttgtttaaaaacctgttccggaactataattacaaggtccacttactctatgtcttacccgaggttttggaagactcacccctggtgcctcaaaagggcagctttcagatggtccactgcaattgctcagtccacgagtgctgtgagtgcctggttccagtccctacagccaagctgaacgatacactcctcatgtgtctgaaaattacctctggtggggtgatttttcaatctcctctgatgtccgtccaacccatcaacatggtcaagcccgacccacccctggggctgcacatggagattaccgacgatggcaacctgaaaatctcctggagttcccctcctctcgtaccttttccattacagtaccaggttaagtattctgagaatagtacgactgtgatccgcgaggccgacaagatcgtgtcggccacaagcctgctggtcgattctatactgccaggcagcagctatgaagttcaggtcaggggaaaaagactggacggcccaggtatttggagcgactggtcaacccctagggtgttcacaacacaggacgttatatatttcccacccaagatcttgacttctgtcggcagtaatgtttccttccattgcatctacaagaaggagaataagatcgtcccttccaaggagatcgtctggtggatgaacctggccgagaaaatcccacaatctcagtatgacgtggtctcagatcacgtgtccaaggttaccttctttaacctcaatgaaaccaagcctcgcggaaagttcacttatgacgccgtttactgctgtaacgaacacgaatgccaccatagatacgcagaactgtatgtcattgacgtaaatatcaacatctcctgcgagaccgacgggtatctgacaaagatgacatgcaggtggagtactagtactatccagagtttagcggaatctaccctgcaactgcggtaccacagatcctctctttactgcagtgacattcccagcattcatccaatttcagaacctaaggattgttatctccagtctgacgggttctatgaatgtatctttcaacctattttcctgctgtcaggatataccatgtggattagaattaatcatagcttgggaagcctggattccccccccacatgcgtgctgcctgacagtgtcgtcaagccattgccgccaagttcagtaaaggctgaaattacaatcaatataggtctcctcaagatcagctgggagaaacctgtttttccagagaataacctccaatttcagatcaggtacgggttgtcgggcaaagaagtgcagtggaaaatgtatgaggtctacgatgcgaagagtaagtccgtgtccctgcccgtgcccgatctgtgcgccgtctacgcagtgcaagtcagatgcaagaggttggacggactgggttactggagcaattggtctaatccggcatatacagtagtgatggacattaaggtccctatgaggggcccggaattctggcgcattataaatggcgacacaatgaaaaaggagaagaatgtaactctcttgtggaagcctctgatgaaaaacgattccctctgctcagtgcagcggtacgtgatcaaccaccacacctcatgtaacggaacctggtcagaggacgtgggcaatcatactaaattcacatttttgtggacggagcaggcacataccgtcacagtactagccataaactccataggcgccagcgtggctaactttaacctgactttttcttggcccatgtccaaggtcaatatcgtacagagccttagcgcgtacccacttaattcctcttgcgtgatcgtatcctggatcctgagcccaagcgactataagctgatgtactttataatcgaatggaaaaatctcaacgaggatggagagataaaatggctccgtatttcatcaagtgtcaaaaagtactacatccacgaccactttataccaatcgagaagtaccagttctccctgtaccctatcttcatggagggagtcggcaagcctaagatcatcaacagcttcacacaggatgacattgagaaacaccaatccgatgcggggctttacgtgatcgtgcccgtcatcataagttcaagtatcttacttctcggcactctacttatctcacatcagcgcatgaaaaaattgttttgggaggatgtcccgaatcctaagaattgttcttgggctcagggccttaactttcagaaaaagatgcctggcacgaaggagttattaggtggtggatggctgacctag

SEQ ID NO: 122049 - DNA, 2877 bp, synthetic construct
  misc_feature 1..2877: note = Description of Artificial Sequence: Synthetic coding sequence
  source 1..2877: mol_type = other DNA
atgatctgccaaaagttctgtgttgtccttctccactgggaatttatctatgtgataacagcattcaatctctcctacccaattacaccgtggcgtttcaagctgagctgtatgccacctaactcaacgtacgattatttcctactgccagctggcttaagtaaaaatacatccaattcgaatgggcactatgaaaccgcggttgagcctaagttcaacagcagcggcactcacttctccaaccttagcaagaccacgtttcactgttgtttccgttccgaacaggaccgaaactgcagcctgtgcgcagataatatcgagggcaagacttttgtatctaccgtcaattcgctggtgtttcagcagattgacgcaaactggaacatacagtgctggctgaagggcgacctgaagctttttatttgttacgttgagagcttgttcaagaatctgttccggaactacaattacaaggtccacctgctgtatgtgcttccagaagtgctcgaagacagcccactcgtaccccaaaaagggtcctttcagatggtccactgcaattgtagtgtgcatgagtgttgtgaatgcctggtgccagtacctacagctaagctgaatgatactctgctcatgtgtttgaagattacgagtggaggggtcatatttcagtcaccattaatgtccgtccaaccaataaatatggttaaaccggatccgccactggggctgcacatggagattacagacgacgggaatctcaagatctcatggagctccccacccctcgtcccctttccactgcaatatcaagtcaagtattctgagaacagcactacagtcatcagagaggcggacaagatcgtgtccgctacatccctactggtagactctattctgcctggttcttcttatgaggttcaagttcgcggaaagagacttgatggaccaggtatctggagcgactggagtaccccaagagtctttactactcaggatgtgatctactttccaccaaagattctcacaagtgtcggctctaacgtgtcttttcactgcatctacaagaaggagaataagatagtaccgtccaaggagatagtttggtggatgaatctggctgaaaaaatcccccagtcccagtacgacgtggtcagcgaccatgtgtccaaagtgacattctttaatctcaacgagaccaagccacgaggcaagtttacttacgacgcagtgtactgctgtaacgagcacgagtgccatcatcgctatgctgaactgtacgttatcgatgtgaatatcaacattagctgcgagaccgatggctacctgacaaaaatgacttgtcgttggtcaaccagcaccattcagagcttggcagaatcaacgttgcagttgcggtatcataggtcctccttatactgtagcgacattccgtcaatccacccgatctcagagccaaaagactgctatcttcagtcagacggcttttacgaatgtatcttccagccgattttccttctgtctggatacactatgtggatcaggataaatcactcattgggttccctggactccccgcccacatgtgtcctacctgacagtgtggtaaagccccttccgccatcaagcgtgaaggcagaaatcactataaatataggcctgcttaagatctcttgggaaaagccggttttcccagagaataatctgcagttccagatccgatatggtctttcagggaaggaagtccaatggaaaatgtacgaggtttacgacgcaaagtcaaagtctgtcagcttacctgtgcctgacctctgcgccgtgtacgccgtccaggtgcggtgtaagcggctggatggactaggctattggtccaactggtctaatccagcatacactgtcgtaatggacattaaagtccccatgcggggacctgagttttggcggataatcaatggtgacaccatgaagaaagagaagaatgttacactactttggaaacctctgatgaagaacgatagcttatgttcagtccagcgctatgtaattaaccaccacacttcatgcaacggcacctggagtgaggatgttggaaatcatactaagttcacgttcctgtggacagagcaggcccacaccgtcaccgttctggctattaattctatcggtgcctcagtggcaaactttaatttgacattctcctggcctatgagcaaggtgaacatagtgcagagcctatccgcatatcctctaaattctagctgcgttatcgtgagttggatcctgagcccctcagattacaaactgatgtacttcatcattgagtggaaaaacctcaatgaagatggcgagataaaatggttgaggatttcatcttcggtgaagaaatactacattcatgaccacttcattcctatcgaaaaataccagttctcactatacccaatctttatggaaggagtgggaaagcccaagatcatcaattcattcacgcaagacgacattgagaaacatcagagcgacgccgggctatacgtaatagtgccagtgattattagcagctctatccttcttctggggacactgttgataagtcaccaacggatgaaaaagctgttttgggaagatgtgccgaatccaaaaaattgcagctgggctcagggcctgaatttccagaaaatgcttgaaggctcaatgtttgtgaaaagtcaccaccatagccttatttcttctacccagggacataaacactgtggccgccctcaaggcccccttcacaggaagacacgcgatctgtgtagcctcgtctatttactgacactaccccctttactctcatacgaccccgcaaagtcacccagcgtcagaaacactcaggaatag

SEQ ID NO: 122050 - DNA, 2691 bp, synthetic construct
  misc_feature 1..2691: note = Description of Artificial Sequence: Synthetic coding sequence
  source 1..2691: mol_type = other DNA
atgatctgccagaaattctgcgttgttctgctacactgggagtttatctacgtcatcactgccttcaatctgagctaccctataacaccttggaggttcaagttgagttgtatgcccccaaacagtacatatgattacttcctgctgcccgccggtctctcaaaaaacacgtcaaattcgaacgggcattacgagaccgcagtcgaacccaagttcaatagtagtgggacccatttctccaatttgtcaaagacgactttccattgctgctttcggagcgagcaagacaggaactgctccctctgtgccgacaatatcgaaggcaaaactttcgtgtcaactgtcaattcactcgtgtttcagcaaatcgatgctaattggaacatccagtgttggttgaagggtgacctgaaattattcatctgttatgtggaatccttatttaaaaatctattccggaactataactacaaggtccatcttctctacgtgctccccgaggtactggaggactcaccccttgtgcctcaaaagggttcgttccagatggtacattgcaattgcagtgtccacgagtgttgcgagtgtctcgtcccagtacccaccgccaagctgaacgacacccttctgatgtgtctgaagattacatccggcggtgtcatcttccagagccccctgatgagcgtgcagcctataaacatggtgaagcccgatccccccctagggcttcacatggagattacagatgacgggaatctaaagatcagctggtcatctccgcctctcgtgccgtttccgctccaatatcaggtgaagtatagcgaaaatagtaccacagtgatacgcgaagctgacaaaatagtgtccgctacttccttactagtcgattcaatcttaccaggctcttcatacgaggttcaggtgcggggtaagcgcttggacggccctggtatttggtccgactggagcacgcccagagtgttcacaacccaggacgtgatctatttcccaccaaaaatactgacgtcagtgggctcaaatgtgtcttttcactgcatttataagaaggaaaacaagatcgtgccttcaaaagagattgtatggtggatgaatttggcagaaaaaatcccacagtcacagtacgacgtcgtgtcagatcacgtgtccaaagtgacattctttaacctgaacgagaccaagcctcgcggaaagttcacctatgatgccgtctactgctgcaatgagcatgaatgtcaccacagatatgcggagttgtacgttatagacgtgaatattaatatatcttgtgagaccgacggatacctaaccaagatgacgtgccggtggagcaccagcacaatccagagcttggcagagagtacattgcagctcagataccaccgtagtagcctgtactgttccgatatccctagcatccatcccatcagtgagcccaaagactgctatctccagagcgatgggttttacgaatgcatcttccaaccaatatttctgctctccgggtacaccatgtggattcgcatcaaccacagcctggggagcctggacagccctccaacttgcgtgctgcccgactctgtggtgaagcctctgcctccatcatccgtgaaagctgaaatcaccatcaatattggtctgctgaaaatcagttgggagaaaccagtattccctgagaacaacttgcagtttcagataaggtatggcctgagtggaaaagaggtgcaatggaaaatgtacgaagtgtatgacgcaaagagtaagtcagtcagcctccctgtgccagatctgtgtgccgtttacgccgtccaggtccgatgcaagcgactggacgggttagggtattggtcaaattggtcaaatcctgcatacaccgtagtcatggatatcaaggttccgatgcggggacccgaattttggcggatcatcaatggtgatacaatgaagaaggaaaagaacgtgacactcctgtggaaacccctgatgaagaacgactccctttgctctgtgcagaggtatgtgattaaccaccatacctcctgtaacggcacctggtccgaggatgttggcaatcacacaaagtttactttcttatggacggaacaggcacacaccgttaccgtgcttgccattaacagtattggtgccagtgtggctaattttaatcttacatttagctggccaatgtcaaaagtaaacatagttcagagcctgagcgcttaccccttgaatagctcctgcgtgatagtgagctggatcctaagtccttctgactacaaacttatgtacttcatcatcgagtggaaaaatctcaatgaagatggtgagattaagtggttacggatatcttcttctgtgaagaagtactatattcatgatcacttcatccctattgagaagtatcagttctctctctatccaatcttcatggaaggagttggcaaacctaagatcataaatagttttacccaagatgacatcgagaagcaccagagcgacgccggactgtatgtgattgtgccggtgatcatcagctcaagtatattgttgttgggcaccctgctgatctcacaccagaggatgaagaagctgttctgggaagacgttccgaaccctaaaaactgtagttgggcccagggactaaacttccagaaacggactgatattctgtag

SEQ ID NO: 122051 - DNA, 699 bp, synthetic construct
  misc_feature 1..699: note = Description of Artificial Sequence: Synthetic coding sequence
  source 1..699: mol_type = other DNA
atgatgcctacaacagtggtttcgctgctgagcacaactgacctggagaaaggcagcgtttgtatctctgaccagttcaacagcgttaatttttcggaggctgaaggcaccgaagtgacgtacgaggacgaaagtcagcgccagccctttgtcaagtacgccactctgatatctaattccaagccatccgaaacaggcgaggaacagggattgatcaatagttccgtaacaaaatgtttcagcagtaagaatagccccctgaaggacagctttagcaacagttcttgggagatagaggctcaggcattttttattttgtccgatcaacaccccaatatcatcagccctcatcttacattctctgagggattggacgaactgctgaagctcgaggggaactttccagaagagaacaatgataaaaaaagtatatattatttgggagtgacctctatcaagaagagagaaagcggagttcttctcacagataagtcccgggtgtcttgtcctttccctgctccatgccttttcaccgatattagggtattacaagacagctgctctcactttgtggagaataatataaatttgggtacttcttcaaagaagacgttcgcctcttatatgccccagtttcagacctgttctactcagacacacaagatcatggagaataagatgtgtgacctgaccgtgtag

SEQ ID NO: 122052 - DNA, 396 bp, synthetic construct
  misc_feature 1..396: note = Description of Artificial Sequence: Synthetic coding sequence
  source 1..396: mol_type = other DNA
atggccggagtgaaagctctcgtggctctgagcttcagcggcgcgatcggccttacttttctgatgcttggatgtgcgctggaggattatggagtttattggccactattcgtgctcatcttccacgccatcagccctattcctcattttatcgcaaaaagagtcacatacgactcagatgctacttcatcagcgtgccgcgaactggcatacttcttcacaaccgggatcgttgtgtccgccttcggcttccctgtaatcctcgcgcgggttgcagtgatcaagtggggagcttgcggcctggtgcttgctggaaatgcagtcattttcttaactattcaaggcttttttctaattttcgggcgcggtgatgatttctcctgggagcagtggtag

SEQ ID NO: 122053 - DNA, 396 bp, synthetic construct
  misc_feature 1..396: note = Description of Artificial Sequence: Synthetic coding sequence
  source 1..396: mol_type = other DNA
atggccggaatcaaggcactcataagcctgtcgttcggcggcgccatcggcctgatgtttttgatgctgggctgcgcactgcctatatacaacaagtattggccactctttgtgctcttcttttatatcctttcccccataccatattgcatagcccggagacttgtcgacgatacagacgccatgtccaacgcctgcaaggaacttgcaatttttctaactacgggcatcgtggtcagcgccttcggcttgccgatagtgtttgcacgagcacaccttatcgagtggggcgcatgtgctctggttctcactggaaatacggtcatctttgcaactattctcggttttttcctggtctttggaagtaatgacgattttagttggcaacagtggtag

SEQ ID NO: 122054 - DNA, 510 bp, synthetic construct
  misc_feature 1..510: note = Description of Artificial Sequence: Synthetic coding sequence
  source 1..510: mol_type = other DNA
atggccggaatcaaagcgctgattagtctgtccttcggcggtgccatcggccttatgtttctcatgctcggttgtgctttgcctatttataacaaatactggccgctgttcgtcctgttcttttatatactctcccccataccctattgtattgccagacggctcgtggacgacaccgacgcgatgtccaacgcgtgcaaagaactcgctatttttttgacaaccggcatcgtggtcagcgcgtttgggctgccaattgttttcgcccgagcccacctcatgggcagactgccgttcttcagtaagatgggtacggccgagagtgaaggtcgcgagaccctgacacagcagctcccccttccggctgcagctatgcgtcggctccttcctgcgtctagagtatcgacccagcctgtcctgcggctcgccgactctgcggagagcctgctcggtcggcctgccctgtgggcattggggtttctcctctgtccacccagccaagcccagtag

SEQ ID NO: 122055 - DNA, 3195 bp, synthetic construct
  misc_feature 1..3195: note = Description of Artificial Sequence: Synthetic coding sequence
  source 1..3195: mol_type = other DNA
atgatgaaatttaggttccgaaggcagggtgcagatccccagagggaaaaactgaaacaggaactgttcgcctttaataaaacagtcgaacatggctttccaaatcagccatccgctctggcatttgatcccgagctacgaatcatggcaatcggcacccgaagtggagctgtgaaaatttatggcgcgcccggagtggagttcaccggcctgcatagagacgcagctactgtgacgcagatgcattttcttacgggtcaggggcggctgctgtccttactggacgatagctcactgcatctgtgggagattgttcaccacaacggctgtgcccacctcgaagaagctcttagcttccagctaccaagccgcccaggttttgatggtgcgagtgctcccctgtctctcacccgcgtgaccgtggttctcttggtcgctgcatccgacatcgctgctttaggcaccgaggggagttccgtgtttttccttgacgtgacgacattgacgctcctggagggccagactctggcacctggggaagtcctccgcagcgtgccggatgactaccgctgcggtaaggcactcgggcctgtggagtctctgcagggtcatctccgcgacccaactaagatcctcattggctatagcaggggtctgctagtcatttggaatcaggcatcccaatgtgtagaccacatatttctgggcaaccaacagttagaaagcttgtgttggggccgcgactcatctacggtagtttccagccactctgacggaagctacgcagtctggtctgtcgacgctgggtcatttccaacactccagccgaccgttgccacaactccgtacggaccgtttccctgcaaggcaatcaataagatcctctggagaaactgcgaatcagggggccattttatcattttcagtggtgggatgcctagagcctcatacggcgacaggcattgtgtcagcgtgctgagggcagagaccttagttacgctggacttcacatctagaatcattgatttctttacagtgcattcaactcggcctgaggatgagttcgacgatccacaggctctcgctgttctccttgaggaagagttggttgtgttagatctacagactcctggatggccagccgtccccgcgccgtatctggcccctctgcattcaagcgcaatcacctgttccgcccatgtggccagtgttccagccaaactgtgggccagaatcgtctccgcgggagagcagcagtccccacagccagtatcgtcggccctgtcctggcctattaccggcggacgaaacctggcacaagagccttcccagcgtggactgcttttgaccgggcatgaggacggaacggtgcggttttgggatgcttcaggagtggcacttcgacccctttacaaattgtcaacggctggactcttccagaccgactgtgagcacgcggactcactggctcaggccgcggaagatgactggcctccgtttcgcaaggtgggatgttttgacccgtacagtgacgatccgcgactgggcgtccaaaaagtggccctgtgcaagtatactgctcagatggtggtagccggtaccgccgggcaggtgctcgtgttagagctcagcgatgtgcccgttgaacaggccgtgtccgtcgcgatcatagatttactgcaggatagagaggggttcacttggaagggccatgagcgactatcaccaaggaccggccctctgccctggcccgccggcttccagccacgcgttttggtccagtgtcttccacctgctgcagtgacagctgtgacacttcacaccgagtggagtctggtggcctttgggacttcccacggattcggcctgttcgattaccagaggaaatcgccagtgctggctcgctgcactctccacccaaacgacagtctggccatggagggacctctgagccgcgtgaagtccctgaagaaaagtctgagacaatcctttaggcgcattcgaaaaagccgggtctccggcaaaaagagagcggcaaacgcaagctcaaagctgcaggaggcgaatgcacaactggccgaacaggcttgcccccacgacgttgagatgacgccagtccagcgcagaatagaacctaggtctgccgacgattcactgtctggcgtggtgcggtgtctgtactttgcagatacatttctgcgagatggggcacaccatggtcctaccatgtgggccggaacgaacagcggatcagtgttcgcctacgcccttgaggtgcccgcagccgcagttgggggagagaaacgcccggagcaggccgtggaagctgtgctggggaaggaggtccagttaatgcaccgggccccagtggttgcaattgccgtcctcgacggtaggggtagaccccttcctgaaccatacgaggcctcacgcgacctggcgcaggcacccgatatgcagggcggacatgcagtactgattgcctccgaagagcagtttaaggtgtttacactaccgaaagtcagcgccaagacaaaatttaagttgactgcccacgagggctgtcgcgttagaaaggtcgcgcttgcgacatttgcgagcgtcgcttgcgaggattacgctgaaacttgtttggcctgcctcaccaatcttggtgatgtgcatgtattcagtgttcctggcttgcgcccacaggtccattactcttgcatccggaaggaagatatcagtgggatcgccagctgcgttttcacgcgccatggccagggattctacctgatttctccctccgaatttgaacgcttctcgctgagtgcaagaaacataacagagcctctttgctcactcgatattaactggccccgagacgcaacccaggcatcctatagaattagggagagcccaaaactgtctcaggccaatggaaccccatccatcctcctagctccccagtcattggatggctcccctgatcccgcacatagtatggggccagatacccccgaacctcctgaggctgcactcagccctatgtccatcgattccgctactagcgcggacacaacgcttgatacaacgggagacgtcaccgtggaagacgtgaaagattttctcgggtcgtctgaggagtctgaaaaaaatttacgtaatctggctgaggacgaagcacacgcctgtgccattttgatcaagtag

SEQ ID NO: 122056 - DNA, 1056 bp, synthetic construct
  misc_feature 1..1056: note = Description of Artificial Sequence: Synthetic coding sequence
  source 1..1056: mol_type = other DNA
gaactgccttcagctgccccagactctaccctgttactgactgcacagcattgggtcgccaaccttttcatcttggccactctgatcggctggacagtgcggagttttttcttgggccggatggagacgtgttgcagtcaccttggcttgcggtctggtagaagatttgccgtcagcatcggatactggcacgacccctatattcaacactttgtgagactgagtaaggagcgcaaggctcctgaaatcaatagaggctatttcgcacgagtgcatggggtctcccagctcattaaagcattcctgcgcaagacagagtgtcactgtcagatcgtgaacctgggcgctggtatggacaccactttttggaggctgaaggacgaggacttgttgccttctaaatacttcgaagtcgacttccccatgatagtaactcggaaattgcattccatcaaatgcaagccacccctcagtagccccatcctggaattgcacagcgaagatacactccagatggacgggcacattctggatagtaagcggtacgctgttattggcgccgacctgcgggacctctccgagctcgaagaaaaactgaagaagtgcaacatgaatacccagctgccgaccctattaatcgctgagtgtgtcctggtgtatatgaccccagagcagtctgcaaatctcttgaagtgggcagccaattcctttgaacgggccatgtttataaattacgagcaggtcaacatgggcgataggttcgggcaaattatgattgagaacctgcgaagaaggcaatgtgatctggctggggtcgaaacctgcaagtcactggagtcgcagaaggagaggctcttgtccaacggctgggagacagccagcgccgtagatatgatggagctgtataaccgcctccctcgggccgaagtgagccggattgaaagcttagaatttctggatgaaatggagctgcttgagcagctgatgcgacactattgtctgtgttgggctactaaaggagggaatgagcttggtcttaaggagattacgtattag

SEQ ID NO: 122057 - DNA, 840 bp, synthetic construct
  misc_feature 1..840: note = Description of Artificial Sequence: Synthetic coding sequence
  source 1..840: mol_type = other DNA
atggccactcgacagcgcgaaagtagtatcacttcttgctgctccacgagtagctgtgatgctgacgatgaaggcgtacgcggcacatgtgaggatgcgtcgctgtgcaaaaggtttgctgttagcattgggtactggcatgatccatacatccagcattttgtccgcctgagtaaagagcgcaaggctcccgaaattaatagaggctatttcgctagagtccacggggtaagccagctgatcaaggcattcttacggaagactgaatgccactgtcagatagtgaatctgggggccggcatggacactacgttctggcgccttaaggatgaggacctgctgccgagcaaatacttcgaggtggacttcccaatgatcgtgacccggaagctgcattcaatcaaactgcccacccttcttatcgctgaatgtgtcctggtgtacatgactcctgaacagtctgctaacctgcttaaatgggctgccaactctttcgaacgggctatgttcatcaactatgaacaggtgaacatgggcgacagattcggccagattatgattgaaaacttacgacggaggcagtgcgacttagccggcgtggaaacttgcaagagcctcgagtcccagaaggaaaggctattgtccaatgggtgggagactgccagcgcagttgacatgatggaactgtataatcggctccccagagccgaggtgtcaaggattgagtcgctcgaatttctggacgaaatggagctgctggagcagcttatgcggcactattgtctctgttgggcaactaaaggcggaaatgagctgggacttaaagaaatcacctattag

SEQ ID NO: 122058 - DNA, 1005 bp, synthetic construct
  misc_feature 1..1005: note = Description of Artificial Sequence: Synthetic coding sequence
  source 1..1005: mol_type = other DNA
atggctacccgacagagggagagcagcatcactagctgctgctctaccagctcgtgcgatgctgatgacgaaggtgttaggggcacctgcgaagatgctagcttgtgcaaacgatttgccgtctccatcggttactggcacgacccttacatccagcacttcgtccggctgagcaaagaacggaaggcccctgaaatcaacagaggatactttgctcgagttcacggtgtgtctcagctgatcaaagcttttttgcgtaagactgagtgccactgccagatagtgaacctgggcgccggaatggacactacgttttggagactaaaggacgaggacctgcttccaagcaagtattttgaagttgatttccctatgatcgtgaccaggaagctacatagtatcaagtgcaagcccccactctcatctcccattctggaattgcacagcgaggacactttgcagatggatggtcatatactggatagcaaaagatacgcagtgataggggcagacttgcgggacctgagcgaactggaagagaagttaaaaaagtgcaacatgaacacacagttacctaccctgctgatagctgagtgtgtactggtctacatgacaccggaacaatctgcgaatctcttaaagtgggccgccaactcttttgaaagagcaatgttcataaattacgagcaggttaacatgggagaccgtttcgggcaaatcatgattgaaaacctaaggaggagacaatgcgacctggccggcgtggagacctgtaagtcactcgagagccagaaagaaagactgctcagcaacggctgggagaccgcctcagcggtggacatgatggagctgtataaccgtctcccccgggctgaggtatccaggattgaatctctggagttcctggacgagatggaactgttggagcagctgatgcgccattactgcttgtgttgggctactaaaggagggaatgagctcggtctgaaagagatcacctactag

SEQ ID NO: 122059 - DNA, 2415 bp, synthetic construct
  misc_feature 1..2415: note = Description of Artificial Sequence: Synthetic coding sequence
  source 1..2415: mol_type = other DNA
atggctgtcagggcactgaaactgctcacaaccctgttggccgtggtggctgccgcttcccaagccgaggtggagtcagaagctggctggggaatggtgacgcctgatctgctcttcgctgaaggaaccgcagcttacgcaagaggtgattggcccggcgttgtgttatcgatggagcgcgctttgcgttcccgcgccgctcttcgggctctcaggttgcgttgcagaactcagtgtgccgctgacttcccttgggaactagaccccgactggagcccgtcacctgcacaagcctctggagcggctgccctcagggacttgagcttcttcgggggactgcttcggcgcgcggcctgtcttcgaagatgtttggggcctcctgctgcccacagtctgagcgaggagatggaactggagttccgcaagcggtccccctacaactacctgcaggtcgcctactttaaaatcaataaactcgagaaagccgtggccgcagcgcacaccttcttcgttggcaacccggagcacatggaaatgcagcagaatctcgactattaccaaaccatgagcggagtgaaggaggctgactttaaggacctggaaacccagcctcatatgcaagaatttaggttgggcgttaggctgtactccgaggagcagccccaggaggctgtgccgcatctggaagcagccctccaggaatatttcgtggcgtacgaagaatgtagggctctgtgcgaggggccatatgactacgatgggtacaattaccttgagtataacgcggacttgtttcaagcaattacagatcattatatccaggtccttaattgcaaacaaaattgtgttacagagctggcatctcacccctcccgcgagaaaccctttgaggacttcttaccttcgcactacaattatctgcagtttgcctactataatattggcaactacacacaggccgtcgagtgtgcaaaaacatatttattgttttttccgaatgatgaggtgatgaatcaaaacctcgcttactacgccgccatgctaggggaagagcatacacgttccattgggccacgtgagagcgctaaggaatatcgccagagatccttactagaaaaagagcttctgttctttgcctatgatgtgttcggtatcccgtttgtggatcctgattcttggactcccgaggaagttatccctaagagactgcaagaaaagcagaagtctgagcgggaaacagccgtgcggatttctcaggagatcgggaaccttatgaaggaaatcgagacgttggtggaagagaagacaaaagaatccttagatgtttcaaggctgacgagggagggcggtccactgctttacgaaggaatttcgcttacgatgaactccaagttactgaacggttcacagcgagttgtgatggatggggtgatctctgatcatgaatgccaggagctgcagcggctcaccaatgtggctgctaccagcggagatggataccggggccaaacgtcgcctcatacgcctaacgaaaagttctacggtgtcactgtcttcaaagcgctgaagctcgggcaggaaggcaaggtgcccctgcagagcgcccacctttactacaatgtcaccgagaaagtgcgtaggatcatggaatcttactttcggctggacactccattgtacttcagttatagccacctggtgtgccggactgcaatcgaagaagtgcaagctgagagaaaagacgattctcatcctgtccacgtagataactgcatcttgaatgcagaaacattggtgtgcgttaaagaaccacctgcttataccttcagagactattcagcaatactgtacctgaacggtgactttgatgggggaaacttttatttcactgagctggatgctaagaccgtgaccgcagaagtgcaacctcaatgcgggcgcgccgtagggttctcttctggcacggagaacccacacggcgtgaaagcagtgactagaggccaacgctgcgctatcgcattgtggtttaccctcgacccaagacattccgaacgagtcagggccgcacgcgctggagagtcttcctggtgctgtggagatccctttcctgagaggccgtggtttgccttcctgttccccaagtcacattgtcaatggctccggcacgagaggagtacgtgggacacctccagcaatgcgctgtctctgtggagtcattgcctggtcttgccgggccccgctgtcaacggcattcaggtcggtaaggaggtgaagaccggtagcgacgccgaattcctcgtcccttctctcggtcccacatctgctgtcttgtttcaacgtgtcgggcctgccggaaaagaaatgtccctcgggccactgagaaacttgccttgtccactgggcagcagtagttag

SEQ ID NO: 122060 - DNA, 2211 bp, synthetic construct
  misc_feature 1..2211: note = Description of Artificial Sequence: Synthetic coding sequence
  source 1..2211: mol_type = other DNA
atggcagttagagccctgaagctgctgacaacgctgctcgcagtggtggccgctgcctcccaggccgaagtggaaagcgaggcagggtggggaatggtgactcccgacctgctgttcgcagaaggtacagccgcatatgcacgtggcgattggcccggggtagtgctctcaatggagcgggccttgagaagccgggcagcactgcgggccctgagactgaggtgtaggacccagtgcgctgctgatttcccctgggagctcgatcctgattggagtccatctcctgcccaggccagcggtgccgcagccctccgggacctgtcattcttcggggggcttctgagaagagcggcatgcctgcgtaggtgcttgggcccgcccgccgcccactcgctcagcgaggaaatggagctggaattcagaaagaggtctccctataactacttacaagtagcctacttcaagatcaacaaattggagaaagcagtggcagctgcacatacattcttcgtcggcaatcccgagcatatggagatgcagcaaaacctagattattaccagaccatgtccggtgtcaaggaagccgattttaaggacctcgagactcagcctcacatgcaggagtttaggctgggagtgcggctatacagtgaagagcaaccacaagaggcggtgcctcatctggaagccgcactacaggaatattttgtagcttacgaggagtgccgcgccctttgcgaaggcccgtacgattatgacggctacaattatctagaatataacgcagatctttttcaggcaatcaccgaccattacatacaggttctgaactgcaagcagaactgcgtcacagaactggccagccacccttcgagggagaaaccatttgaagacttccttccttctcactataattatctccagttcgcctactataatatcgggaattatactcaggctgtggagtgtgccaagacctacctactgttttttcctaatgacgaagtaatgaatcagaacttagcttactacgccgctatgctcggggaagagcatacgaggagtattggccctagagagtctgcaaaggaatatagacaaaggtcgcttctagagaaggaactgctctttttcgcgtatgatgtatttggaattccatttgtcgatcccgattcttggactcctgaggaagtaatacctaagcgcctacaggagaaacagaaatccgagagagagactgccgttcggatctcccaggaaatcggtaatctgatgaaagaaatcgagaccctcgtcgaggagaaaactaaggagtctcttgatgtgagccggctgactcgggaggggggcccgctcctctacgaggggatttccctgacaatgaactccaagctgctgaacggatctcagcgtgtggtcatggatggcgtgatttcagaccatgaatgccaggagctgcagagacttaccaatgttgccgcgacttccggagacggttataggggacaaacgtctccacacaccccaaatgaaaagttctacggcgtgacggtcttcaaggccttaaaactgggccaggagggcaaagtccctctgcagagtgctcacctttactacaacgttacagagaaggtgcggcgtattatggaatcgtatttcagactggacacccccttatactttagctattctcacctcgtgtgtcgcacagccatagaggaggttcaggccgaaagaaaggacgacagccacccagtgcatgtggacaactgcatcctgaacgctgagaccctggtgtgtgtcaaggagccgccagcctatacgttccgggactacagcgcaattctatatctcaacggagacttcgatggcggtaatttttacttcactgaactggacgctaagacagtgaccgctgaggtccagcctcaatgtggacgggccgtgggtttcagctctggaacagaaaatccacacggggtgaaggcggtcacaaggggtcaaaggtgcgctattgctctgtggttcactttggatccaaggcactctgagagggatcgggtgcaagcagatgacctagtgaagatgctcttttccccagaagaaatggacctgtcacaggagcagcctctggatgcgcagcagggcccaccagagcccgcccaggagagcctgagcggctcagaaagtaagcctaaggacgagctgtag

SEQ ID NO: 122061 - DNA, 2094 bp, synthetic construct
  misc_feature 1..2094: note = Description of Artificial Sequence: Synthetic coding sequence
  source 1..2094: mol_type = other DNA
atggccgttcgcgcacttaagcttttgacgacactattagcagtggtggctgccgcctcccaggctgaagtggaatctgaagcaggttggggaatggtgaccccggatctgctgttcgcggaaggcaccgccgcctacgctaggggggattggcccggcgtggtactgagtatggagcgcgccctgcgcagtagagctgccctaagggcgctgagacttcggtgtagaacccagtgcgccgcagactttccctgggaactagacccggactggtctccaagcccagcacaggcctctggcgccgctgcattgagggatctgagcttcttcggagggcttctgagaagagcagcttgtctcagaaggtgtctgggccctccagccgctcactccttgagcgaagagatggagctcgagtttaggaagaggagcccctacaattacttgcaagtggcctatttcaagattaacaagctggaaaaagcggtggcagccgctcatacttttttcgtgggcaaccccgagcacatggagatgcaacagaatctggactactaccaaaccatgtccggtgtcaaggaagcagactttaaggaccttgaaacccagcctcacatgcaggaattcagactaggtgtgaggctctattctgaagagcagccccaggaggccgtcccacatctcgaggcggccctgcaggagtacttcgttgcctatgaagaatgccgagcactgtgcgagggcccctatgattatgatggttacaattacctggagtataatgccgatttatttcaggctattaccgatcactacattcaagtgttaaactgcaagcagaactgcgtgaccgagcttgcatcccatccaagccgagagaagccatttgaggacttcttgcctagtcactataattacctgcagttcgcctactacaacatcggcaactacacccaagctgtagagtgtgctaaaacctatctcttgtttttccctaacgacgaagtcatgaaccagaatctagcatactatgcagcgatgctgggagaggaacacacacgaagcattggcccgagagaatccgctaaagaatatagacagcgtagcctccttgaaaaggagctgctgtttttcgcttatgacgtgttcggaatccccttcgttgacccagattcttggacccccgaagaagtgatacctaaacgcctccaggaaaagcagaaaagtgaaagagaaactgcggtcaggatctcccaggagattgggaatttgatgaaggaaatcgaaactctggttgaggaaaaaacgaaagaatctctggatgtcagccgcttaactcgggaaggcgggccactcctttatgaaggaatctcactgaccatgaactctaaacttctcaatggatctcagagggtcgtcatggacggggttataagtgaccacgagtgtcaggaactgcagaggcttacaaatgtcgccgctaccagcggtgatggttacagggggcagacgtctcctcatacccctaatgaaaagttctatggggtgaccgtatttaaggcccttaaattagggcaggagggcaaagtgccgctgcagagcgcacacctctactataatgtgaccgaaaaggtgcggcgtattatggaatcttactttcgccttgacacgcctctgtatttctcatacagccacctggtatgcaggactgccattgaggaagtgcaggctgaacggaaggatgactcacatcctgttcacgtggataactgcatccttaatgcagagaccctggtgtgcgtcaaggagcctcctgcttacacctttcgagactactcagctatcctgtatctgaacggggatttcgacgggggaaatttctatttcaccgagctcgacgcaaaaacagtgacagcggaagtgcagcctcaatgtgggcgcgctgtggggtttagctctgggactgagaatccccacggtgtcaaagccgtgaccagaggacagaggtgcgccatcgccctatggtttaccctggaccctaggcatagcgagagggtcagagctgcccgggcaggacaaggagcaggacggtag

SEQ ID NO: 122062 - DNA, 459 bp, synthetic construct
  misc_feature 1..459: note = Description of Artificial Sequence: Synthetic coding sequence
  source 1..459: mol_type = other DNA
tgagagagggaaactgccgtccggattagtcaggagatcgggaatctaatgaaagagatcgagacactggtggaagaaaaaactaaggagtctttggatgtttctcggctcaccagagagggcgggcccctgttgtatgaaggaatatcattgactatgaacagcaagctgcttaacggctcccaaagggtcgtgatggacggcgtgatcagcgaccacgaatgccaggaactgcagagacttacaaacgtggcagcaacatcgggagatggctaccgcggacagacaagtccccacactccaaatgagaaattctatggagttacggtgttcaaggccctgaagcgtggagtcgtgctggtgcggtttcacaccgccgacaaggatgtgccggaaactggccagttcaccaaggagcgtggcctgcttggccttactgtcccctgtggatggggatag

SEQ ID NO: 122063 - DNA, 1806 bp, synthetic construct
  misc_feature 1..1806: note = Description of Artificial Sequence: Synthetic coding sequence
  source 1..1806: mol_type = other DNA
atggagttggagttccggaaacgcagcccatataactacttgcaggttgcttacttcaagatcaataaattagaaaaggccgtggccgcagcacacacatttttcgtgggaaaccccgagcacatggaaatgcaacaaaatctggactactatcagactatgtctggtgtcaaagaggcggacttcaaagacctcgagacccagccccatatgcaggagtttcgactgggggtgagattatacagcgaagaacaaccgcaggaagcagtccctcacctcgaagccgccctgcaggagtatttcgtggcttacgaagaatgccgagccctctgcgagggaccttatgactacgatggatacaattacctcgaatacaacgccgacctttttcaggccatcacagatcactacatccaggttctgaattgtaagcagaattgtgtcaccgagctggcatcccacccatcaagggagaaaccctttgaagatttcttgccctcccactataattaccttcagttcgcttactacaatatcggcaattacacccaggcagttgaatgcgcaaaaacttatctcctgttctttcccaacgatgaggtgatgaaccagaatctggcctactatgctgcgatgctgggtgaggagcacacacggtccattggccctagagaaagtgctaaagagtatcggcaaagatctctcttggaaaaagagctcttgttcttcgcttacgacgtgttcgggattccgtttgtagatcctgattcctggacaccggaggaggtcattcctaagcgcctgcaggagaagcaaaaatccgagcgagaaacagctgtgcgaatatctcaagagatagggaatcttatgaaggaaatcgaaaccctggtggaagagaaaacaaaggagagcctcgacgttagtcgcctgacaagggagggaggccccctcttatacgagggtatctcgctcactatgaacagcaaactgttaaatgggtcacaaagggtagttatggacggtgtaatcagtgatcatgaatgccaggagttacagcggctcaccaacgtcgccgccacttctggcgacggctaccggggacaaacatctcctcatacaccgaacgaaaagttttatggcgtcacagtcttcaaagcactcaagctcggccaggaagggaaagtcccactacagtcagctcatctgtattataatgttaccgagaaggtccgccgtatcatggagtcttacttccgcctggatacccctttgtatttttcatattctcacctggtctgtcggaccgccatcgaagaggtccaggctgagcgcaaggacgactctcatcccgtacacgtggacaactgtattctgaacgccgagacattagtgtgtgtgaaggagccaccagcgtataccttcagagactacagcgctattctgtatcttaatggcgacttcgatggcggcaatttttatttcaccgagctcgacgccaagacagtgacagcggaagtacagccccaatgtggacgcgctgtggggttctcatctggcactgaaaacccccacggcgtgaaggctgtgaccagagggcagcggtgtgctatagccttatggttcacattagatcctcgacactccgaaagagaccgtgtgcaggccgacgacctggtgaagatgctcttttcccctgaagagatggacctgtcccaagaacagccattggacgcccagcaagggcccccggagccggcccaggaaagcttatccggttcagaatctaagccaaaggacgagctgtag

SEQ ID NO: 122064 - DNA, 2355 bp, synthetic construct
  misc_feature 1..2355: note = Description of Artificial Sequence: Synthetic coding sequence
  source 1..2355: mol_type = other DNA
atgacatcgccagctgctgcccagtctcgggagatagactgtctttcaccagaagcccagaaactggccgaagccaggctggctgccaaaagggctgcgcgggccgaggcacgcgagataagaatgaaggaactcgaaagacagcagaaggaggaggactccgagcgctattcccgtagaagtcgacgtaacacgtccgcctcggacgaggatgaacgtatgtccgtgggctcaagaggatctctgagggtggaggagcgacccgaaaaagactttaccgagaagggatccagaaacatgccgggactgagcgctgccacgttggcatcccttgggggaacctcttcccggagaggatccggtgacacctctatttcgatcgacactgaagcttcaatcagagaaataaaggatagcctggccgaggtcgaggagaaatataaaaaagccatggtatcaaatgctcagctcgacaacgaaaaaacaaactttatgtaccaggtggacacactgaaagatatgctgctagaactggaggagcagctcgcagaatcgcgccgccagtatgaagaaaaaaacaaggagttcgagcgcgagaaacacgcccattccatcttacaattccagttcgcagaggttaaagaggcgctgaaacagagagaagagatgttggagaaacacggaattatccttaattcagagatagccacaaacggggaaacgagtgacacattgaataatgtcggttatcagggacccactaagatgacgaaggaagagttgaatgcgctgaaatctactggcgatggtacgctggggcgcgcctcagaagttgaagtcaaaaacgagatcgtcgccaatgtaggcaaacgggaaattttgcacaatacagagaaggagcagcatactgaagatacagtcaaagactgcgtcgacatcgaggttttccccgccggcgaaaacacagaggatcagaagagtagtgaggacacggccccattcctcggcactcttgctggggccacatacgaggaacaggtgcagtctcagattctcgaaagtagcagcctccccgagaacacggtgcaggtggaaagcaatgaagtgatgggggcacctgacgacagaactcgtacccccttagagccttccaactgctggagtgacctagatggtgggaatcatacagaaaacgtgggcgaggccgcagttacacaggttgaggaacaggccggcactgtggcctcctgtccattaggacatagtgacgacacagtttatcatgatgacaaatgtatggttgaggtaccccaggagcttgaaacctcaacagggcacagtcttgaaaaggagttcactaaccaggaggcggcagaaccaaaggaagtccccgcccattcaaccgaagtgggacgggatcacaatgaagaagaaggagaagagacgggcctgagggatgagaaacctattaaaacagaagttcctggatcccccgcaggaaccgaaggcaactgtcaggaggccactggcccaagtacagtcgatacccagaacgagccgctggacatgaaagagccagacgaggagaaaagcgatcaacaaggcgaggcgctcgattcctcccagaagaagactaaaaataagaagaagaagaacaagaaaaaaaagtcccctgtgccagtagaaacgctcaaggatgtgaaaaaggaactgacatatcaaaacactgacctgtcagagattaaggaagaagagcaggtcaagagtactgatcggaaaagcgcggtagaggcgcagaacgaagtgaccgaaaacccaaagcagaagatcgctgctgagtccagtgagaatgtggattgtcctgagaaccctaagatcaagcttgatggaaagctcgatcaggagggagatgacgtacaaactgccgccgaagaggttttagctgacggcgatactcttgattttgaggatgacaccgtccagagcagtggccctagagcgggcggagaggagctagacgaaggcgtagctaaggacaatgctaaaatagatggagcgactcagtcctctcccgcagagccaaagtccgaagacgctgatcgttgtactctcccagagcacgagagtcccagtcaggacatttcggacgcctgcgaggcggagagcacagagcgttgcgagatgtccgagcacccaagccagactgtccgcaaagcgctggactctaactccctggaaaatgacgacttgtcagccccgggacgggagcccggtcactttaatcctgagtctagggaagatacacgaggagggaacgaaaagggtaagtcaaaggaggattgcacaatgtcctag

SEQ ID NO: 122065 - DNA, 2259 bp, synthetic construct
  misc_feature 1..2259: note = Description of Artificial Sequence: Synthetic coding sequence
  source 1..2259: mol_type = other DNA
atgacctctccggccgctgcacagtcacgggagatcgattgtctgagccccgaagcccaaaagttagccgaggcgagattagccgcaaagcgagcagcgagggcagaagcccgggagattcggatgaaggaacttgaacgccagcagaaagaggtagaagaaaggcctgagaaggactttacagaaaagggctctaggaacatgcccggcctgtcagctgcgaccttggcttcactaggcggcacttccagccgtagaggttctggtgacacttctatatctatcgatactgaagcaagcatccgggaaatcaaggacagcctcgcagaggtagaagaaaaatacaaaaaagccatggtgtctaacgcccaattggacaatgaaaaaaccaactttatgtatcaggtagacaccctcaaggacatgcttttggagctcgaagagcaactcgccgaaagtcggaggcaatatgaggagaagaacaaagagttcgagcgtgagaagcatgctcacagtattctacagtttcaattcgcagaggtcaaagaggcactcaaacagagggaagaaatgctcgaaaagcacggcatcatcctgaattctgagattgcgacgaacggagaaacatccgatacactgaataatgtgggatatcagggcccgacaaagatgaccaaggaagagctgaacgccctgaagtctaccggtgatgggacgttagggcgcgcatctgaggtggaggtgaagaatgagatagtggctaatgtcgggaagcgcgagatcctgcacaacacagaaaaggaacagcatactgaggacactgtcaaggactgtgtcgatatcgaggtctttcccgcaggtgaaaataccgaagatcagaagtcctccgaagataccgccccttttctcggcaccctagcaggagccacctacgaggagcaggtgcagtctcagattctagaaagtagctctctgcccgaaaacaccgtgcaggtggagagcaacgaggtcatgggcgctcccgacgaccgaacacgcacccccctggagcccagtaactgttggagcgacctcgacggcggtaatcatacagagaatgtaggcgaagccgccgttacccaagtggaagagcaggccggtactgtggcgtcctgcccactgggccattccgacgacaccgtgtatcacgatgacaagtgcatggtggaggttccccaggagcttgaaacaagcaccgggcattctttggagaaagaattcaccaatcaagaggccgctgaacctaaagaagtgccagctcattctacagaagtgggaagggaccataatgaggaagaaggggaggagactggcctgagggacgaaaaacctattaaaacggaggtaccagggtcacccgcaggcactgagggaaattgtcaagaagcgactggaccgtccactgtggacacccaaaatgagccactggacatgaaagagccagacgaggaaaagagcgatcaacaaggcgaggcactggacagcagtcaaaaaaagaccaagaacaagaagaaaaagaacaagaagaagaagagcccagtccctgtggagacacttaaagacgtcaagaaagagttaacttaccagaacaccgacctatcagagattaaagaagaggagcaggtcaaaagtactgatagaaagagcgcagtggaggcccagaatgaggtgactgagaatcctaaacagaaaatagcagccgagagttccgagaacgtggattgtcctgagaatccaaaaataaagcttgacggcaagttggatcaagagggagacgatgtgcagaccgcagccgaggaagtattggcagatggagatactttggacttcgaagatgataccgtccagtcttcagggccgagggcgggtggcgaggagctcgatgaaggggttgcgaaggacaacgccaagatagatggcgcaacgcagagttcaccagctgaaccaaagtccgaagatgctgaccggtgcaccttgcccgaacacgaaagtcctagccaggacatcagcgacgcttgcgaggctgagagtaccgaacgctgtgaaatgagcgagcaccccagtcagacagttcgaaaagcgctggacagcaactctcttgaaaacgacgacctctctgcacccggccgggaacccggccattttaaccccgaaagccgcgaagacactcgggggggcaacgagaaggggaaatccaaggaagattgtaccatgagttag

SEQ ID NO: 122066 - DNA, 1893 bp, synthetic construct
  misc_feature 1..1893: note = Description of Artificial Sequence: Synthetic coding sequence
  source 1..1893: mol_type = other DNA
atgactagtcccgccgctgcccagtctcgggaaattgattgcctgtcacccgaggctcagaaactcgccgaggctcggcttgctgccaagcgagcagctagagccgaagcgagggagatacgcatgaaggagctcgagaggcagcaaaaggaagtgactagtgcccaagagaagtattatggactagacactaaatggggcgatatcgagcaatggatggaggactctgaaagatactcaagaaggtcacgccgtaacacatcagcgtctgatgaagacgagcgcatgagcgtcggatcacggggatctctgcgttcccaacccgacctggagtacggcggcccgtatgcttggacgaatggatacgacggagagctctacggctcgcaaagcctgaacaggaggtcgggcaggcctagctgtctatacagcgctgcgcggccgtcggggtcttatcgcgcctctgtccttgatgaagggtcttttggtgggaccaggcggggctccaccagtgggagtcgagctccatccgagtatagtggtcatctgaattctagctcacgcgcctcctctcgtgctagttcggcccgcgcatcccctgttgtagaagagagacctgagaaggactttactgaaaaaggatcaagaaatatgcctgggctcagcgctgcaaccctcgcgtccttgggaggcacaagctcccgcaggggctctggcgatacctccatcagcatcgacacagaagcaagcatccgggaaatcaaggaactcaacgagctcaaagatcaaatccaggatgtggaaggaaaatacatgcagggacttaaggagatgaaagatagtttggcggaagtggaggagaaatataaaaaggcaatggttagtaacgcgcagttagataatgagaagacgaacttcatgtaccaagtggataccctcaaagacatgcttttggagctagaggagcagctcgccgagtccaggcgccagtacgaggagaagaataaagagttcgagcgcgagaaacatgcacactctattctgcaatttcagtttgctgaagtaaaagaagctttgaagcaacgtgaagagatgttggaggaaataaggcagcttcagcaaaaacaggcatcaagcattcgggagatttctgatcttcaagagacgattgaatggaaggataaaaagataggcgcacttgaacggcaaaaagaatttttcgacagtgttaggtctgagcgtgacgacttgcgcgaggaggtcgtcatgcttaaagaggagctgaaaaaacacggcattatcctgaatagcgagatagccacaaatggagagacttctgataccctcaacaacgtgggctaccagggtccgaccaaaatgacaaaggaagaacttaatgccctgaaatctaccggggatggaacactggatatcaggctgaaaaagctggttgacgaaagagagtgtctgttggagcaaatcaaaaagcttaaaggacagcttgaggaaagacagaagattggaaagctggataatctacgcagcgaggatgacgttttagagaatggcaccgatatgcacgtgatggaccttcagcgggacgccaatcgccagattagcgacctgaagttcaagcttgcgaaaagcgaacaggagattaccgctttggaacagaacgtcataaggctggagtctcaagtgtcccgatacaagtctgctgccgaaaatgccgagaagatcgaagatgaactgaaagccgagaaacggaagctccaaagggagctacggagtgcactggataagaccgaagagctcgaagtgtccaacggccacttggttaagcgcctcgagaagatgaaggcgaatagatctgcactgttaagccagcagtag

SEQ ID NO: 122067 - DNA, 2427 bp, synthetic construct
  misc_feature 1..2427: note = Description of Artificial Sequence: Synthetic coding sequence
  source 1..2427: mol_type = other DNA
atgacaagtcccgctgcggcgcagtctcgggagatcgattgcctctctccggaggcccagaagttggccgaggcgcggttggccgcaaaaagggctgcacgcgccgaagctcgcgagattagaatgaaagaactggagaggcagcagaaggaagaggactccgagcgatacagccggaggtcccggcgcaataccagcgccagcgacgaggacgagcgcatgagcgtggggtccagagggtctctgcgcgtagaagagcgaccagagaaggacttcacggaaaaaggaagtaggaacatgccgggtctcagcgctgcaactctcgcctccctcgggggaacgagcagcagacggggatccggggatacaagtatttcaattgacacagaagcttctatcagggagataaaggaactgaacgaactcaaagatcagattcaagatgtcgaaggcaagtacatgcaggggctgaaggagatgaaggatagtctggccgaggtagaggagaaatataaaaaggccatggtatcaaacgctcagcttgataatgaaaaaaccaattttatgtaccaggtcgacaccttgaaggatatgttgttggagcttgaagaacagctggcagagtctcggcgacaatacgaggaaaagaataaggaattcgagagagagaagcatgcccacagtattctgcagttccagtttgccgaagtaaaggaagcactgaagcagagagaggagatgctcgagaagcacggaatcatcttaaatagcgaaatcgccacaaatggcgaaacctccgatacactgaataatgtcggctatcagggccctactaaaatgaccaaggaggagctgaacgctctgaaaagcacaggcgacggcaccctcggtagggccagcgaggttgaggtcaagaatgagattgtggctaatgtcggcaagcgcgaaatactgcacaacaccgaaaaggagcagcatactgaggacacggttaaagactgcgtcgatatcgaagtgttccctgcaggggagaatacagaggatcagaaaagttccgaagataccgccccgtttctagggaccctagctggggccacatatgaggaacaagtgcaaagtcagatactggagtcctcctcgttaccagagaatacggtacaggtggagtcaaatgaagtcatgggggcgccagatgacaggactcgcacacccctagagcctagcaattgctggtccgatctggacggtgggaatcacacagagaatgtaggagaagccgcagttacccaagttgaggagcaggcagggacagtggcctcatgcccactggggcattcagacgacacggtgtatcacgatgacaaatgtatggtggaggttccacaggagcttgagacaagtacagggcactctttagagaaagagttcaccaatcaggaagctgccgaacccaaagaggtccccgcccactccactgaggtaggccgagaccacaacgaggaagaaggggaggagacagggttgcgtgacgagaaacctatcaagacagaggtgccaggaagtcccgccggaactgagggcaactgtcaggaagccaccggacccagcactgtggacacacaaaatgagcccctggatatgaaagaacctgacgaagagaagtctgatcagcagggcgaagctttggactccagccagaagaagaccaagaacaaaaaaaagaagaataaaaagaagaaaagcccagtaccagttgaaacacttaaggatgtgaaaaaagaacttacttaccagaacacagacctgtctgaaatcaaagaggaggagcaagtaaagtcaaccgatagaaaaagcgcagttgaggctcagaatgaagtgacagaaaaccccaaacagaagattgccgccgagtcgagtgaaaatgtggattgcccagaaaatccgaagatcaagctggatggtaagctggatcaggaaggggatgacgtacagactgctgccgaagaggtgctggctgatggggacactctcgatttcgaagatgataccgtccagtcatcagggccccgagctggcggcgaagaactcgatgagggcgtggctaaagataatgccaagatagacggggctactcaaagcagccccgccgaacccaagtcagaggatgccgacagatgtactctgccggaacatgaatcgcctagccaagatattagtgatgcgtgcgaggcggaatcaacagagcggtgtgagatgtccgagcacccgagccagaccgttagaaaggcactggactccaattccctggaaaacgacgacctcagcgctccagggagggagccggggcacttcaatcctgagagccgggaggacaccagaggtgggaacgaaaagggtaaatccaaggaggattgtacaatgtcctag

SEQ ID NO: 122068 - DNA, 1923 bp, synthetic construct
  misc_feature 1..1923: note = Description of Artificial Sequence: Synthetic coding sequence
  source 1..1923: mol_type = other DNA
atggatatgggaactcagggttctgggcgtaaaagactccccaaccgggagaggttgacagctgaagatgacgctctgaatcaaatcgcaagagaggccgaggcacggctcgcagccaaaagagcggcacgtgccgaggctcgagagattcggatgaaggaactcgagaggcagcaaaaggagatttatcaggtccaaaagaagtactatggactcgatacaaaatggggggatatcgagcagtggatggaggactctgaacgatactctagaagaagcagaaggaacacctcagccagtgacgaggacgaacgcatgtccgttggcagccgtgggtccttgaggtctcagcccgatctcgagtatgggggcccctatgcctggaccaacgggtacgacggagagttgtacgggtcccagtctttgaatagaaggagcggaaggccttcgtgcctttattccgcagcaaggccttccggctcctatagggctagcgttctggatgaaggatccttcgggggcaccaggcggggcagtacatctgggagtcgagcaccatccgagtactccggacatttgaacagcagcagcagagctagttccagggccagctcagcacgcgcttccccagtagtcgaggagaggcctgagaaagattttacagagaagggctcccgaaatatgcccggattgtcagcagccaccttagccagccttggcgggacctccagtcggaggggatccggagatacttccattagtatagatacggaggcgtctatacgggagatcaaggaactgaacgagctgaaggaccagatccaagatgtcgaggggaagtacatgcaagggctcaaagaaatgaaggatagcctggctgaagtggaggagaaatataagaaggccatggttagtaatgcccaactcgacaatgaaaagaccaacttcatgtaccaggtggacacccttaaagacatgctccttgagctcgaggaacagttggcggaaagtcgtcgtcagtacgaagaaaagaacaaggagttcgagcgcgagaagcacgcccactccattttgcagtttcagtttgcagaggtcaaagaagctcttaagcagagagaggagatgctcgaagaaatccgacagcttcagcagaaacaagccagtagtatcagggaaattagcgatctccaggaaactattgaatggaaggataaaaagatcggagctttagagcgacagaaagagttttttgattctgtgcggtctgaacgtgacgatctgagagaggaggttgttatgctcaaagaagaattgaagaaacatggcattatcctcaactccgagatcgcaaccaacggggaaacatctgataccctcaataacgtcgggtatcagggcccaactaaaatgacgaaggaagagctaaacgctctgaagtctactggagacggaaccctggacattcgcttgaagaagttagttgatgaaagggagtgcctcctggagcagatcaagaagcttaagggccagttggaagagcggcagaaaatcgggaaactggacaacctgaggagcgaggacgacgtgttagagaatggtacagatatgcacgttatggatctgcagcgggatgcaaacaggcagatctccgatctgaaattcaagcttgctaagagtgaacaggaaattacagccctggaacagaacgttattcggctggaaagccaggtgtcaagatacaaatcagcagcagagaacgccgagaagatcgaggacgaattgaaagcagagaaaaggaagctgcagagggaactgcgaagcgcgctcgacaagaccgaggagttggaagttagtaacggccatctggtgaagcgcttagaaaaaatgaaagccaacagaagcgctcttctgtcacaacagtag

SEQ ID NO: 122069 - DNA, 2166 bp, synthetic construct
  misc_feature 1..2166: note = Description of Artificial Sequence: Synthetic coding sequence
  source 1..2166: mol_type = other DNA
atgggaactccagcttcaggaaggaagcgcacccctgtgaaggataggttcagcgccgaggatgaagcactttccaatatcgctagagaggccgaggctcggctggcagccaaacgagctgcccgtgcggaagcacgcgatatccgcatgcgtgagcttgaacgccaacagaaagagtactcactgcacagcttcgatagaaaatggggtcagatccagaaatggctggaagatagtgagcgtgcacgctacagccatagatcttctcatcatcgaccgtacctcggcgttgaagacgccctcagcatccgctctgtgggctcgcatcgttatgacatgttcaaagaccgatcatctcgattgagctccctgaatcacagctatagccactcacacgggatgaaaaagcgcagtagtgattcccacaaggaccttctaagcggtctttatttcgaccagagaaactactcctctctgagacattctaaacctacatccgcctactacacacggcagtcgagcagcctgtattcagacccgctggcaacttataaatccgaccgggcttcccctacagccaatagcggcctgctgcggtcagcatccctcgcttcgctctacaatggtggcctatacaatccatatggacccaggaccccctccgaatgttcctactactccagccggattagttctgcccgcagtagcccgggattcaccaatgatgatactgccagcatcgtttcctccgaccgagcatcaagagggagacgagagtccgttgtaagcgctgctgactattttagcagatcaaacagacggggatccgttgtgtccgaggtagacgatatcagcataccagacctttccagcctagacgagaaatccgataaacaatacgccgagaattatactagaccaagttccaggaactctgcttccgctaccaccccactctctggcaactctagcaggagggggtcgggagacacatctagcctgatcgaccccgacacgtcactatctgagctgcgggatatctacgatctgaaagatcaaatccaggatgtagaggggagatacatgcaaggcctgaaagaattaaaagaatccctcagtgaagtggaggaaaagtataagaaggccatggtgtccaacgcacagctggacaacgaaaagaacaacctcatctaccaggttgatacgcttaaggacgtgatcgaggagcaagaggaacagatggccgagttctaccgtgagaacgaggaaaaatccaaagagcttgaaaggcagaagcacatgtgctccgtgcttcagcataagatggaagaactcaaagaaggtttgcgacaacgcgacgagttgattgaggagaaacagaggatgcaacagaaaattgataccatgacaaaagaggtatttgatctacaggaaaccctcctgtggaaagataagaaaataggcgcactggagaaacaaaaggagtatattgcgtgcttacgtaatgagagagacatgttgcgggaggaattagccgatctacaggaaaccgtgaaaaccggggagaagcacggcttggtcattattccagacggaacaccaaacggagacgtgtcacacgaacctgttgcaggtgctattacagttgtctcacaggaggcggcccaggtgctggaaagcgcaggtgaaggacctctggacgtccgacttcggaaattagccggagagaaggaggagctgttgagccaaatcagaaagttaaagttgcaactggaggaagagaggcagaaatgcagcaggaatgatgggaccgtgggagacctggccggcctacagaacgggtctgatctgcagttcatcgagatgcaaagagatgccaatcgacagattagcgagtacaaattcaagttaagcaaggccgagcaggacattactaccctggaacagtcaatatcaagattggaagggcaggtgctccgctacaaaaccgcagccgagaacgcggaaaaagtggaggacgaactcaaagccgaaaagaggaagctccagagagagttacgtacggcattggataaaattgaagagatggaaatgacaaactctcacctggccaagaggctagagaagatgaaggccaataggaccgctctgctcgcccaacagtag

SEQ ID NO: 122070 - DNA, 1203 bp, synthetic construct
  misc_feature 1..1203: note = Description of Artificial Sequence: Synthetic coding sequence
  source 1..1203: mol_type = other DNA
atggggactcccgcgagcggccggaaacggaccccagtgaaggatcgcttttccgcggaagatgaagcactaagtaacatcgcccgcgaggccgaagcacggcttgccgccaagagggccgcccgggctgaagcaagggatatcaggatgagggaactggaaaggcagcagaaagagctggacgaaaagtcggataagcagtatgccgagaattacactcgccccagcagtcggaattccgcttctgcaacaacaccccttagtgggaacagtagcaggagaggctcaggcgacacgtctagccttatcgatccggatacgagtttgagtgaattgagagagtcactttctgaggtggaggagaagtataaaaaagccatggtgagcaatgctcagttggacaacgagaagaacaacttgatttatcaagtcgacaccttaaaagatgtgatcgaagagcaagaggagcagatggcagaattctatcgcgagaatgaagagaaatctaaggaacttgaacgacaaaagcatatgtgctcggtcctccagcacaagatggaggaactgaaagaagggcttcgacagcgggacgaactcatcgaaaaacacgggctggtaatcatccctgacggcacacctaacggtgatgtgtcccacgagccagtggctggagcaatcacagttgtgtcccaagaggcagcccaagttctcgaaagtgccggagagggtcccttagacgttcgactgcgaaagttggctggcgagaaggaggaacttctgtctcagattagaaaactgaagttgcagcttgaagaggagaggcagaagtgtagtagaaacgacgggacagtaggtgacctagcggggctccagaacggtagtgacctgcaatttattgagatgcagcgtgatgccaaccgccagatatcggagtataagtttaaactcagcaaagctgagcaggacattaccactctggagcagagtatctctagattagagggccaagtgctacgttacaaaactgctgccgaaaacgcggaaaaggtcgaagatgaactgaaagcagagaagaggaagctgcagagggaactccgaaccgccctggataagattgaggagatggaaatgaccaacagccacctggccaaaagactagagaagatgaaagccaacagaacggctctgttggctcagcagtag

SEQ ID NO: 122071 - DNA, 2166 bp, synthetic construct
  misc_feature 1..2166: note = Description of Artificial Sequence: Synthetic coding sequence
  source 1..2166: mol_type = other DNA
atgggaacaccagcctccgggcgtaagaggactcccgttaaagatcgattcagtgcagaggacgaggctctatctaatattgcccgggaagctgaggcccgtctggccgcaaagcgtgccgccagggcggaggctcgcgacatacgtatgagggagctggaaaggcaacaaaaagaatactctctccattcatttgatcgtaagtggggacagattcaaaagtggcttgaagattctgagcgcgcgaggtacagtcaccgctcgagccaccatcggccttacctgggggtcgaggatgcactgtcaattagaagtgttgggagccatcgttatgacatgtttaaagaccggtcctcgaggctgtcatccctcaaccactcttactctcacagccacggtatgaagaaacggtcctcggactctcacaaggatctgctgagcgggctttattttgaccaacgcaattatagttcccttcgccactcgaaacccacgagcgcctactatacaagacagtctagctcactgtattccgatcccctcgctacctataaatccgatcgtgctagccctaccgcaaattctgggctgctgagaagcgcttcactggcttcactttataacggtgggctctacaacccatacggacccaggaccccaagtgaatgcagctattactcttcaaggatctcttccgcccgtagcagcccgggctttactaatgacgacaccgcatcaatagtctcctctgacagggcttcaagggggcgcagggagtctgttgtctctgccgctgactacttcagtaggagtaatagacggggaagtgtcgtgtcggaagtggacgatatatcaatcccagacttgtcatcactggatgagaaatccgataaacagtatgccgagaattacactcggccctctagtagaaatagtgcatctgctacaacgccgctgtccggaaactccagccgaagaggatcaggggacacctcaagtttaattgatcctgacacatccctgagtgagctgcgggacatctacgatcttaaggatcagattcaggatgtggagggccgctacatgcaaggtctcaaggagcttaaggaaagcctgtccgaggttgaagagaaatacaaaaaagctatggtatctaacgcccagcttgacaatgagaagaataatctcatctatcaggtcgatactcttaaggacgtgatcgaggagcaggaggaacagatggcagagttctatagggagaacgaggagaagtctaaagagcttgagcgtcaaaaacacatgtgctcagtcttgcagcacaaaatggaggagctgaaagaaggattgcgccaacgggacgaattgatagaagaaaaacaacgaatgcaacagaaaatagacaccatgactaaggaagtgtttgatcttcaggagaccctgctatggaaggataagaaaatcggcgccctagagaagcagaaagagtacatagcctgtctgaggaatgagagggatatgctgcgcgaagaactggccgatcttcaggagactgtgaagacgggcgagaaacatggtcttgttatcattcccgatgggactcctaacggggacgtgtctcacgaacctgtggccggagcaattaccgtcgtgtctcaggaggccgcacaggtcttagaatctgctggcgaaggtcctttagatgtgcgcttgagaaagctcgctggggaaaaggaggaactcttatcccagattagaaaattgaaactgcagcttgaagaagaacgacaaaagtgcagccggaacgacggcaccgtgggtgacctggcaggattacagaacggttccgatttgcaattcattgaaatgcagcgcgacgcgaaccgccagatatccgagtataaatttaagctgagtaaggccgagcaggacatcaccactttggaacagtcaatatctcgtcttgaggggcaggtcctgcgttataagaccgctgccgaaaacgctgagaaggttgaggacgagctaaaggctgagaagaggaagttgcagagagagttacggacagcgttagacaagatcgaagagatggaaatgaccaatagccatctggctaagagactggaaaaaatgaaagcaaaccggactgcactgctcgcccagcagtag

SEQ ID NO: 122072 - DNA, 180 bp, synthetic construct
  misc_feature 1..180: note = Description of Artificial Sequence: Synthetic coding sequence
  source 1..180: mol_type = other DNA
atgggcactcccgctagtggccggaaaaggacgcccgtgaaagatcgtttttctgccgaggacgaagcgctctctaatatcgcaagggaggcagaagctcggctggccgccaagagggcagccagagctgaagccagagacatcaggatgagagagctggaacgtcagcagaaagagtag

SEQ ID NO: 122073 - DNA, 180 bp, synthetic construct
  misc_feature 1..180: note = Description of Artificial Sequence: Synthetic coding sequence
  source 1..180: mol_type = other DNA
atgggtactcctgcgtcgggtcgaaagcgcactcctgtgaaggaccgcttctcagctgaagatgaagccctgtccaacattgcaagagaggctgaagcgcgtctggctgccaagagagccgccagggccgaagcccgcgacattcgaatgcgcgaactggaacgacagcagaaagaatag

SEQ ID NO: 122074 - DNA, 180 bp, synthetic construct
  misc_feature 1..180: note = Description of Artificial Sequence: Synthetic coding sequence
  source 1..180: mol_type = other DNA
atgggaactccggcatctggacggaagcgaacaccagtgaaggataggttttccgcagaggacgaagcactatccaatatcgccagagaggccgaggcccgactggctgctaaaagggctgcaagggcagaagcccgggacatcaggatgagagaacttgaaagacagcagaaggagtag

SEQ ID NO: 122075 - DNA, 1275 bp, synthetic construct
  misc_feature 1..1275: note = Description of Artificial Sequence: Synthetic coding sequence
  source 1..1275: mol_type = other DNA
atgggaactccggcctctggaaggaaaaggacccccgtcaaagacaggttttctgcagaagacgaggcattgtccaacattgcacgggaggcagaggccagactcgcggccaaacgcgcagccagggctgaggctcgggacatccgtatgcgtgagctggaaagacaacagaaggagctggatgagaagagtgacaagcaatatgcagaaaactataccagaccttcaagccgtaacagcgcatctgccactaccccgctcagcggcaattccagcaggcgagggtccggggatacctcttccctcatcgacccagataccagcctatcggagctccgagacatctatgatctaaaagaccagattcaggatgtggagggaaggtacatgcagggattgaaggagttgaaagagagcttgtcagaggtcgaggagaaatacaagaaagccatggtatctaatgcgcagctggacaacgagaagaacaatttgatctaccaggttgacacgctgaaggatgtcatcgaagagcaggaggagcagatggcagagttctacagagagaacgaggaaaaatctaaggagctcgaaaggcagaagcatatgtgcagcgtgttgcagcataaaatggaagagcttaaagagggtctgaggcaaagggacgaacttatagaaaagcacggacttgtgataattcctgacggaacccccaatggtgacgtatctcacgaacccgtcgccggtgccattaccgtggtctcccaggaggctgcccaggtgctagagagcgcaggcgaggggcctctggacgtcagactgcgtaagctagccggggagaaagaggagctactctctcagattcgcaagctcaaactacaactggaagaagagcgtcagaaatgttctcggaacgatggtacggtaggagatctagccggcctccagaacgggtcggacttgcagttcatagaaatgcagcgtgatgctaaccgacagatttcagagtataaattcaagctgtctaaagccgaacaggacatcacaaccctggagcagagtataagtcgccttgaaggccaggttcttcgctacaagacggctgccgagaatgctgagaaggtggaggacgaattgaaggccgaaaaaaggaaactgcagcgcgaattaaggaccgccctcgacaagattgaggagatggagatgactaactcccaccttgccaagcgcttggagaagatgaaagccaatagaactgcgctcttagcacagcagtag

SEQ ID NO: 122076 - DNA, 2316 bp, synthetic construct
  misc_feature 1..2316: note = Description of Artificial Sequence: Synthetic coding sequence
  source 1..2316: mol_type = other DNA
atggcgccgggaccgttctctagcgcccttctgagtccaccccccgccgccctaccgtttctgcttctgctatgggccggggcaagccgcggccagccttgcccggggagatgcatctgtcaaaacgtggcccctactctcactatgctctgcgcaaagaccggacttctgttcgtacctccagcaatagataggcgcgtggtagaattgaggctgacagataatttcatcgctgctgtacggcgcagggactttgcaaacatgacctctctggtacatctgaccctgagccgcaacaccataggacaagtagccgcgggagccttcgccgacctgcgtgctctgagagcgctgcatctagactccaatcgactggctgaagttcggggtgatcaactgcgcgggctcggtaacctgcggcatttaatcctcggaaataaccagattaggagggtggaatctgcggctttcgacgcgttcctgtccaccgtggaggacctcgatcttagttataacaatctagaggctttgccctgggaagcggtgggccagatggtgaacctgaacacactgactctagaccataacctaattgaccatatcgcagagggcaccttcgtgcagctacataagctggttcggctcgatatgacgtccaaccgactgcacaaactacctccagatggcctgtttcttagaagtcaggggaccggccctaagccccctacccccttaaccgtgagctttgggggaaaccctctacattgtaattgtgaactcctgtggctgagacgcctgactcgcgaggacgacctggagacctgtgccactccagaacacctcaccgatcggtatttttggagtattcctgaggaggagttcctgtgcgagcccccactcatcactagacaagccggagggagagcactcgtcgtcgagggacaggccgtgtccttgcgctgcagagcggtgggcgaccctgaaccagtagtgcactgggtggcccctgacggacggttactgggcaattcctcacgcacgcgagtgcgcggcgatggtacccttgatgtgacaatcacaaccctgcgcgactctggaaccttcacttgcatagctagcaatgccgcgggcgaggctaccgccccagttgaggtatgcgtcgtgcccctgcctctgatggctccacccccagccgcaccgcctccactgactgaacctggtagctccgatatcgccacgcctggtcgccccggcgcaaacgacagcgctgccgaaaggcggttagtggccgcagagcttaccagtaactccgtgctcattcgctggcccgctcagcggcccgtgccgggcataagaatgtaccaggtgcagtacaactcttcagtggacgacagcctggtctaccggatgatcccgtccaccagccaaacgttcctggtgaacgacttagcagctgggcgcgcatacgatctgtgcgtactggctgtctacgacgatggtgcaaccgccctgcctgctactagggttgtcggctgcgtccagttcacaacggccggtgatcctgccccctgtcggcctttaagagctcactttctcgggggcaccatgatcatcgccattggcggcgtgatcgtggcctctgttctggtgtttatcgttttattaatgatcaggtacaaggtgtacggcgacggagacagtcgtcgtgtcaagggttcacgatctctgccacgagtttcgcacgtttgtagtcagactaatggtgcggggactggtgctgcgcaggctccagcgctgccggctcaagatcactacgaggcgttgagagaggtagagagtcaggccgcccccgcggtcgctgttgaagcgaaggccatggaggccgagactgcaagcgccgaacctgaggttgtgctcgggagatctcttggaggttcagccacgtccctatgcttgctgcccagcgaggaaacatccggcgaagaaagtagggcagccgtgggcccacgacgatcgaggagcggggcgctagagcccccaacctcggcccctccaacgctagccctggtcccgggcggggcagcagcccgacctcggccgcagcagcgatattcctttgatggcgactacggcgcactttttcagtcacactcctaccctcgccgtgcgcggagaaccaaacggcatcggagcaccccacacctggatggagccggaggaggggctgcaggcgaggacggtgacctgggtctcggctcggcccgggcatgcctggccttcacctcaacagagtggatgctcgagtctactgtctag

SEQ ID NO: 122077 - DNA, 2370 bp, synthetic construct
  misc_feature 1..2370: note = Description of Artificial Sequence: Synthetic coding sequence
  source 1..2370: mol_type = other DNA
atggagacactgctgggcggcttgctcgcctttggtatggcttttgccgttgtggatgcctgcccaaagtactgcgtttgccagaacctctccgagtctcttggcaccctgtgcccatctaaagggctgttgtttgtccctccagacatagaccgtaggaccgtcgagctgaggctgggaggaaacttcatcatccacatttcacggcaggatttcgcaaatatgactggcctggttgacttgacactgagtcggaatacaatcagccacatccagccattctctttcctggacctagagagccttcggtccctgcatttagactccaatagactgccgagtctcggagaagacacactgcgggggctggtgaaccttcaacacctgattgtcaataataaccaattagggggcatcgccgatgaggcctttgaagacttcttacttacattagaagacctggacctgagttataataatcttcacggtctcccctgggacagcgtccgcaggatggtgaacctccaccagctgtctcttgaccacaacttgctggatcacattgctgaaggcacgttcgccgatcttcagaaactggcaaggttagacctgacctctaatcggctgcaaaaactccctccagatccaatctttgcaagaagtcaggcatccgcgctgacagcgacgcctttcgccccccccctgtcattttcttttggaggcaatcccctgcattgcaattgcgaactcctgtggcttaggaggctcgaacgagacgacgatcttgagacatgtggttcacccggcgggttgaaaggacgctacttttggcacgtgagggaggaggaatttgtgtgcgaaccacccctgatcactcagcacacacacaaactgctggtgctggagggtcaggctgccacactgaaatgcaaggcaatcggtgacccatccccgttaattcactgggtcgctcccgatgaccgcctggttggaaatagcagtcgaacagccgtgtatgacaatggcaccttggacatatttattaccacttcccaggactctggcgcgttcacatgtattgccgcgaatgccgcaggggaggctacagccatggtcgaggtttctattgtccagttaccgcatctctccaatagcacatcgaggactgctcctcccaagtcacgccttagcgacataacaggatcctccaagaccagcaggggaggtggggggagcggcgggggggagccgcctaagagtccacctgagcgggcagtccttgtatccgaggtgactactacttcagctttagtcaaatggagcgtgagcaagtctgctcccagagtaaaaatgtaccaactgcaatacaactgttccgacgacgaggtgctgatttataggatgatcccggccagcaataaggcatttgtggtaaacaaccttgttagtggaacaggatacgacctttgcgtcctcgccatgtgggacgacacggctaccactctgactgctactaatattgtaggttgcgcccagttttttaccaaggccgattatccccagtgccagagcatgcatagccagattctgggggggacaatgatactggttattggcggcattatcgtggccacattactggtattcatagttatacttatggtgcgctacaaggtctgcaaccatgaggctccctccaagatggctgcggcagtgtcaaacgtctactcccaaactaacggcgcccagcctcctccaccgtccagtgcccccgccggtgctcccccacagggcccgccaaaggtggtggtgcggaatgagctccttgacttcactgcatctctggctagagcttcagactcctcgtccagttcgtctttgggatctggtgaggctgctggcctggggagggccccgtggcgtatccctccatctgcccctaggccaaagccgtccctcgaccgactcatgggggctttcgcctccctcgaccttaagtcccagcggaaagaggagctgctggatagtaggacacctgctggcaggggagccgggacctccgcccgcggccatcattcagatagggagccgctgctggggccgcccgccgctcgggcccggagcttgctgccactacccttagaaggcaaggctaagcggtcccatagctttgacatgggggattttgccgcggccgcagcgggtggcgtagttcctggcgggtacagtcctccacgaaaggtctccaacatctggaccaagaggtccctcagcgtgaatggtatgctgctgccatttgaagagtcagacctagtgggggcaagaggcaccttcggaagcagtgagtgggtcatggaatcaactgtgtag

SEQ ID NO: 122078 - DNA, 1887 bp, synthetic construct
  misc_feature 1..1887: note = Description of Artificial Sequence: Synthetic coding sequence
  source 1..1887: mol_type = other DNA
atggctattctgccgctgctgctgtgcctgctgccgcttgcccccgcctcttcaccccctcagagtgctactccaagtccgtgtcctaggcggtgccgttgtcaaactcagtcccttcccctgtccgtgctttgtccaggagcaggtctgttgtttgtgcccccaagtctagaccgaagagcggctgaactgagactggctgataactttattgcttcagttcgtcgccgcgatctggcaaatatgacaggcctcctgcacctgtcactttctcggaacactattcgtcacgtggccgcaggtgcttttgcagatctccgggcgcttcgtgcactccatttagatggtaatcggctcacctccctgggagagggtcaactgaggggtctggtgaatctccgccacctgatactgtccaacaatcaattggcagccttggcggctggtgctctcgacgattgtgccgaaaccctcgaggacttagacctgtcctacaataacctcgagcagctcccttgggaggcactcggtcggctggggaacgttaatactctaggactagaccacaatcttcttgccagcgtccctgcgggcgctttctcacggttgcataagttggcaaggctggacatgacaagcaacaggttaactaccattccccccgatccattgttttcccggctgccactgttagcccgtcctcgcgggtccccagcctctgcccttgtgctggcgttcgggggtaacccattgcactgtaattgtgaactcgtgtggctacgcagattggctagagaggacgatctagaagcctgcgctagtcccccggcactgggcggccggtacttttgggccgtgggcgaggaggaattcgtttgtgaacctccggtcgttacccacaggagcccccccttagctgtgccagccggccggccggccgccttaagatgtagagcagtaggagaccccgaacctagagtcagatgggtgagcccacagggcaggctgttggggaatagttcacgagcacgagctttccctaacgggacattggaactattggttacagagccaggcgacggaggtatttttacctgcatcgccgcaaacgcagcaggtgaagctactgcggcagtagagctgaccgtggggcctcccccaccgcctcagctcgccaactccacctcttgtgacccacccagggacggtgacccagacgcgctgacaccacccagtgcagcaagcgctagtgctaaggtcgctgataccggacctccaacagatcgcggtgtacaggtcaccgaacatggagcaacagccgccctggtgcagtggcctgaccaaagaccgattccgggaatacgaatgtatcagattcagtacaactcgtccgctgatgatattttggtgtaccgtatgattcctgcggaatctaggtctttcctcctcacggatctagccagcgggaggacatacgacttgtgtgtcctggctgtctatgaagatagcgctacgggactgaccgcgacccggcctgtaggatgtgcaaggttctcaaccgaacccgctctgcgtccatgtggggctcctcatgccccattcctcgggggaacaatgatcatcgcactcggcggcgtcatcgttgccagtgtgctcgtgttcatcttcgtcctgctaatgcgctataaggtccatggcggccagccacccgggaaggctaagatccctgccccagtgtcaagcgtctgcagccagaccaatggggcactgggtcctacgcctactccagctccccctgcgcctgaacctgctgccctccgcgcacacacagtggtgcagttggactgtgaaccgtggggtccgggtcacgaaccggtgggcccttag

SEQ ID NO: 122079 - DNA, 1887 bp, synthetic construct
  misc_feature 1..1887: note = Description of Artificial Sequence: Synthetic coding sequence
  source 1..1887: mol_type = other DNA
atggcaattcttcccctgttgttatgtctgcttcccctcgctccggcatcgtcacccccccaatccgcaacaccatcgccttgcccacggagatgcaggtgccaaacgcagtcattaccattgtccgttctttgtcctggcgctggccttctgttcgtgccgccatcactggaccgacgcgcggcagagcttaggctcgccgacaacttcatcgcctcagtcaggaggcgcgacttggccaacatgactggcttactccacctctctctttcgcgaaacaccattcgacacgtggcagccggagcctttgccgacctgcgcgcgctgcgcgctttgcatcttgatggcaatcgtttaacttctttgggagaaggccagctacgggggctggtgaacctgcgccacctgattctgtccaacaatcaactcgctgccttggcagcaggtgccctcgacgactgtgcagagacactcgaggatttagatctatcgtacaataacctggagcagctgccttgggaagccttgggtagacttgggaatgtgaatacactggggctcgatcataacctgctagcttccgtgcctgcaggtgcattctctagactacataagctggctaggctggatatgaccagcaatcgactgacaacaatccctcccgacccactcttcagtcggctgccactgctcgcccggcctagagggagtcctgcatctgcactcgttctcgctttcggcggcaacccgttacattgtaactgcgaactggtgtggcttcgaagacttgcacgagaagatgatctggaggcctgtgcctctccccccgcacttggtggaagatatttctgggcggtgggggaggaagagtttgtgtgcgaaccgccagtggtgacccacaggtcccctccactggcagtgcctgcaggcaggccagccgctctgagatgtagagcagtgggagaccccgaaccccgtgtgagatgggtgagcccacaaggccggctgctggggaatagcagtagggctcgcgcattcccgaatgggacactggaactcctggtaacagagccgggcgacgggggtatcttcacctgcattgccgctaacgcagccggtgaggccaccgcagccgtggagctgactgttggcccacccccacctcctcagctggcgaattcaacgtcttgtgatccccccagagatggcgaccccgatgctctgaccccaccatctgccgcttctgccagcgcaaaggttgctgatactggccccccaacagataggggggtgcaggtaacagagcatggcgccactgccgctctggtgcaatggccagatcaacgcccaattcccggaatacgaatgtaccagatacagtacaatagcagtgcagatgacattctcgtgtacagaatgataccggcagaatctaggtcattcttgctgaccgacctggcctcgggtcgtacgtatgacctgtgcgttttagcagtgtacgaggattccgcaaccggtctcacagctaccaggccagtgggctgcgcacggttctcaacagaaccagctctgcgtccttgcggagctccccatgctccattcttagggggcactatgatcatcgcattggggggcgtgatcgtcgcttccgtgttggttttcatcttcgttcttctcatgagatacaaggtgcacggcggccagccgcctgggaaagcaaagattcccgcaccagtcagttcggtgtgcagtcagactaacggcgccttaggacccacacctacgcctgcacccccagctccagagccggccgctcttcgtgcgcacacagtcgtgcagctggattgcgagccatggggaccaggccacgagcccgtggggccttag

SEQ ID NO: 122080 - DNA, 1908 bp, synthetic construct
  misc_feature 1..1908: note = Description of Artificial Sequence: Synthetic coding sequence
  source 1..1908: mol_type = other DNA
atggcgcctccactgctgctgctccttctcgcctccggcgctgctgcctgcccactgccttgtgtgtgccagaatttgtccgagagcttaagcaccttgtgtgcccaccgtggtttgttgttcgtgcctcctaacgtagacaggcgcacagtggagctccgcttggccgataacttcatccaggcactggggccaccagattttagaaatatgaccggattagtcgacctgaccctgagtcgaaacgctatcacccggatcggagccagggctttcggggacttggaatctctgcggtctctgcacctcgacgggaatcggctggtggagctgggaactggcagtctcaggggcccagtaaatctgcagcatttaatcttgtccgggaaccagcttggcagaatcgcccctggcgccttcgacgactttttggagtctttggaggacttggacctctcgtataacaacttaagacaggttccctgggctggaatcggggcaatgccagccctgcataccctcaacctggatcacaacctgattgatgcactgcccccaggcgctttcgcacagttgggccaattaagcaggctcgatttgacatctaacaggcttgccactcttgccccagacccactctttagccggggcagagacgccgaagccagcccagctccattagtgctgtcttttagtggaaatcccctacattgtaattgcgaacttttatggttgaggagactggccagaccagatgacttggagacatgtgcttctccacccggactggccggccgatacttctgggctgtgccggagggagaattttcttgcgaaccacccctgattgctcgccatactcaaaggctgtgggtccttgaagggcagagagcaacactgagatgccgagccctgggcgatcctgcccccaccatgcactgggtgggccctgacgataggctcgtcggcaactcctcgcgcgcccgagccttccccaatggtacattggagattggcgtcaccggcgcaggtgacgccggcggatatacctgcatagccaccaaccctgcaggggaggccaccgcccgcgtggaactccgagtcctggctctgccacacggggggaactcttcagccgaaggggggaggcctggcccatctgatatcgccgcaagcgcacggacagctgcagagggcgaagggacgttggaaagtgaacctgcggtgcaggtgacggaagtaaccgcaacatctggtcttgtttcatggggccctggaaggcccgccgacccggtttggatgtttcagatacagtataattcctctgaggatgagaccctgatttaccgcatcgttccggcttcatcccatcacttcttgctcaagcatctcgtgcccggagccgattatgatctctgcctcctcgctctatctccagccgccgggccttcagatcttacggcgactcgccttctgggctgtgctcatttctccacacttcccgcatcacctctatgtcacgccctgcaagcacatgtcctaggtggcaccctgactgttgcagtggggggagtgctcgtggctgcacttttggtcttcaccgtggctttacttgtacggggtcgcggcgccggaaacgggaggctccctctgaagctgagtcatgtgcaaagccagaccaacggggggccgtctccaactcctaaggctcacccccccaggtcacctccccctaggccgcaaaggagttgttcactcgatctcggcgatgcaggatgttacggatatgcaagaagacttgggggggcttgggctcgtcgctcgcactcagtgcacggtgggcttcttggtgccggctgccgaggcgttggcggaagtgctgagcggctagaagagagtgtggtgtag

SEQ ID NO: 122081 - DNA, 2160 bp, synthetic construct
  misc_feature 1..2160: note = Description of Artificial Sequence: Synthetic coding sequence
  source 1..2160: mol_type = other DNA
atggaaaaaattttgttctatctgtttctgattggaatcgcagttaaagctcagatttgtcccaagagatgcgtctgccagatcctctctcctaacctcgcaaccctatgcgcaaagaagggtctcctatttgtgccccctaatatagatcggcgcacagtcgaactgcgcctggctgacaacttcgtgaccaatatcaaaaggaaagattttgcaaatatgacctcccttgtcgacctgaccttgtcgcgcaatactatttcgttcataactcctcacgctttcgccgatcttcgcaacctgcgtgccttgcatttgaacagcaaccgtttgacaaagattacgaacgatatgtttagcggattatcgaatcttcaccacctcattcttaacaacaaccagctcacactcatttctagcactgcattcgacgatgtgtttgccctggaggaattggatttatcatacaataacctcgagactattccctgggatgcggtcgagaagatggtgtcactccacacactttctcttgatcataacatgatcgataatattccgaaggggacattctctcacttacataagatgactcggctggacgtgacttccaacaagttacagaagctgccccctgatcccctctttcagcgagcacaagtgttggctacaagtggtatcatcagccctagtacatttgccctgagctttgggggaaatccgctgcattgcaattgtgagctcctctggctccgcagactttctagggaagacgatctggaaacatgtgcgagccctcccctattgactgggaggtacttttggagcattcccgaggaagaattcttatgcgagcccccgctgattaccagacacacgcacgagatgcgagtcctagaaggccagagggccacccttcgctgtaaggcgcgcggagatccggagccagcgatacactggatttcgcctgaagggaagcttattagcaatgctaccaggtcactcgtctatgataatggcactcttgacattctgattacgaccgtgaaagacacaggagcattcacttgtatcgcaagcaaccctgctggggaagcaacccagatagtcgacctacacatcattaaactcccacacctactgaactctactaatcatattcacgagcctgatcctggcagctctgacatttctacttctaccaagagcggtagtaacacatcttctagcaacggagacactaagctgagtcaagataaaattgtggtggccgaggccactagctctacggctcttcttaaatttaacttccagcgcaacattcctggcatcaggatgttccagattcaatacaatggaacatacgatgatacgctggtgtacaggatgattcctcctacatcgaaaaccttcttggtaaataacttggcagcaggcaccatgtacgatctgtgcgtcctggcgatttatgacgatgggatcacctccctaaccgccactcgcgtcgttggctgcatccagttcactaccgaacaggattatgtgcgttgccactttatgcagtcgcagtttttggggggtaccatgatcatcataattgggggtatcattgtcgccagtgtcctggtgttcatcatcatactaatgattcggtataaagtgtgtaataacaacggacaacataaggttactaaagtgtcaaatgtgtactcccagaccaatggcgcccagatccaggggtgctcagtgacacttccacagagcgtttctaagcaggctgtgggacacgaggaaaacgctcagtgttgcaaggccactagtgataatgtgattcagagttcggaaacctgcagcagccaggactcttcgacaactacttccgccctcccaccttcctggacaagctctacaagcgtatctcagaagcagaaacggaagacaggaacgaagccatccaccgagccacagaacgaggcagtgaccaatgtcgagagccagaataccaatagaaacaatagcactgcactgcagctggcgtcccgacccccagattccgtaaccgaaggcccaacaagcaagcgagcccatattaagcctaatgcactcctcactaatgtagaccagatcgtgcaggaaactcagcggctcgagctaatctag

SEQ ID NO: 122082 - DNA, 1863 bp, synthetic construct
  misc_feature 1..1863: note = Description of Artificial Sequence: Synthetic coding sequence
  source 1..1863: mol_type = other DNA
atgcaggtgagcaaaagaatgctcgccgggggggtgcggagcatgccctcacctctgttggcttgctggcagcccatcctgttactagttctcggaagcgttcttagcggcagtgccactgggtgccccccccgctgcgagtgttccgcacaggacagggccgtcttatgtcacagaaaaaggtttgtggctgtgccagagggcatccctaccgagactaggctcctcgacttaggtaagaacaggatcaagacgctgaaccaagacgagtttgcttccttccctcatttagaagagctcgaactgaatgagaacatcgtgtcagccgtcgaacctggggcattcaacaacctctttaacctgaggaccttgggactccggtccaaccgtctgaagctgatacccctaggggtgtttacagggctaagcaatttaactaaactggacatctccgaaaacaagatcgtcatcttactagactacatgttccaagatttatacaacttgaaatctctggaggtgggagataatgacctggtatacattagccaccgcgccttttcaggcctgaattccctcgagcagctgaccttagagaaatgcaatctgacgtccatccctaccgaggctctcagccacttgcacggattaatcgtgttgagactccgccatcttaacatcaacgcaatcagggactactcatttaaaaggctgtataggctgaaggtcctagagattagtcactggccatatctcgacaccatgacccccaactgcctttatgggctgaatctaactagtctgagcattacccattgcaatctgacagccgtcccttaccttgccgttagacatctagtgtatttgagattcttaaatctatcctacaatccaatatccaccatcgagggaagtatgttacatgagttgcttcggcttcaggaaattcagctggtaggcggacagcttgcggttgttgagccttatgcttttaggggcttaaattatcttcgggttttgaatgtcagtgggaaccagctcacaaccctagaggaatccgtcttccacagtgtgggcaaccttgagaccttaatcctggactcaaacccattagcgtgtgactgccgtctgttgtgggtgttcaggaggagatggagattgaacttcaaccgtcagcagcccacatgtgccactccagagttcgtgcaaggcaaggaatttaaagatttccctgacgtgcttctgccaaactacttcacctgccgccgcgcacggattcgggatcgcaaggcccagcaggtgttcgtcgatgaagggcatacagtgcagttcgtctgcagggctgacggagatccccccccggctattctttggttgagccctcgaaaacacctggtcagtgctaaatccaatgggcgacttactgtgttccctgacggcacactagaagttcgctacgcccaggtgcaagataacggcacctatctgtgcatcgcagccaatgctgggggtaacgatagtatgcccgcccatctccacgttaggtcctactctcccgactggccacatcagccaaataagacattcgcctttattagcaaccagccaggtgaaggtgaggcaaatagcacccgcgccacggtgcccttcccattcgatattaaaactttgatcatcgcaaccacaatggggttcatcagttttctcggcgtggttcttttctgcttagttctgttattcctgtggtcacggggaaaggggaatacaaagcataatatcgagatcgagtatgtgcctcgtaagtccgacgccggcatcagctccgcagacgcaccacggaaattcaacatgaaaatgatatag

SEQ ID NO: 122083 - DNA, 168 bp, synthetic construct
  misc_feature 1..168: note = Description of Artificial Sequence: Synthetic coding sequence
  source 1..168: mol_type = other DNA
atgcttgccggaggagtccggtcgatgccttctcccttgctggcgtgttggcagccaatcctgctgctcgtcctgggctctgttctatccgggtccgccaccggctgccccccaagatgtgagtgtagtgcacaggatcgagcggtcctttgtcaccgcaaacgctag

SEQ ID NO: 122084 - DNA, 1845 bp, synthetic construct
  misc_feature 1..1845: note = Description of Artificial Sequence: Synthetic coding sequence
  source 1..1845: mol_type = other DNA
atgttagctggaggtgtcagatccatgccctccccacttctggcatgttggcagccaattctcctccttgtgctaggcagcgtcctctctggctccgctacgggttgtccgccccgatgtgaatgttcagcccaggatagagcggtcctttgccaccgcaaaagattcgtcgccgtgccagaggggatcccaactgagacgagactcctcgaccttgggaagaatcggatcaagaccctaaaccaagacgaatttgccagcttcccacatctggaggagcttgagctcaatgagaatatcgtgtcagccgtggaaccaggcgcattcaataacctctttaacctacggacactgggccttaggagcaaccggctcaaactcattccattaggcgtcttcactgggctgagtaacctgaccaagctggatatttctgaaaataagatcgtgatcttgctcgattatatgttccaggacctgtataatctcaagagcctggaggtgggagacaacgatctagtgtacatcagccatagggcattttccggtctgaactcgttagagcagctgacccttgaaaaatgtaacctgacttccatcccgactgaagccttgagccatctgcacggcctgatagtcctcagattaagacatctgaacatcaacgctatccgtgactactcattcaagcgactgtaccgcctgaaggttcttgaaatctcccactggccgtacttggatacaatgacccctaactgcttgtatgggcttaacttgacttccctgtctatcacacactgcaacctcaccgctgttccttatcttgcggtcaggcacctggtatatctgagattcctgaatctgtcttataacccaatcagcacaatcgagggttcgatgctacacgagctgctgagactgcaggagatccagttggtaggaggccaactcgccgtagttgagccctatgcttttcgagggcttaattacctccgcgtgttaaacgtgagtggcaaccaactcacgactcttgaggagagcgtgtttcactccgtcgggaacctcgaaacccttatcctcgactccaaccccctggcctgcgattgccgactgctgtgggtgttccggcggcgatggagactaaatttcaatcgtcagcagccaacatgcgccacccctgagtttgttcagggaaaggagttcaaggactttcctgacgtactgttaccgaactattttacgtgcagacgcgcacggattcgcgacaggaaagcgcagcaggtctttgtggacgaaggtcatacagtgcagttcgtatgcagagcggatggagatccaccgcctgccattctctggctgagcccccgcaaacacctagtgtctgcgaaatccaacggtaggttgaccgttttcccagatggaactctggaggtaagatatgcccaggtacaagacaacgggacctacctatgtatcgcagccaacgctgggggcaacgactccatgcctgcccacctccatgtccggtcttacagtccggattggccacaccagcccaataaaacgtttgcctttatctcaaatcaacctggcgagggggaagccaattccacccgcgcaacagtcccctttcctttcgatattaagaccctgataatcgccacaaccatgggctttatctcattcttaggcgtcgttctcttttgcctcgttttgctattcctttggtcgagagggaaaggcaacaccaagcacaatatcgaaattgagtacgtgcctcgaaagtcagacgccggaatttcctcggccgatgcgcctcggaaatttaatatgaaaatgatttag

SEQ ID NO: 122085 - DNA, 1821 bp, synthetic construct
  misc_feature 1..1821: note = Description of Artificial Sequence: Synthetic coding sequence
  source 1..1821: mol_type = other DNA
atgcttcataccgccatctcatgctggcaacccttcctggggttggcagtcgtgctgatctttatgggatctacaatcggatgccccgcaagatgcgagtgttccgcccagaacaaaagcgtctcatgccatcggcggcgacttattgcgattcctgaaggcatcccaatcgaaactaaaattctggacttgagcaagaaccggctcaaaagcgtgaatccggaagaatttattagttatcctcttctggaggaaatcgacctttccgataatatcatcgccaatgtggaacctggcgccttcaacaatctatttaatttgcgctccctccgactaaagggcaatcgattaaaattggtcccattaggggtgttcaccggcttgagcaacctcacgaagcttgacatttccgaaaataaaattgtgatcctactggactacatgttccaggatctgcacaatctgaaaagtttagaggttggagacaacgacctcgtgtacatctctcatagggcattttcaggcctgcttagtttagagcagctgaccctcgaaaagtgcaacttaactgcagtaccgaccgaagcgctgtcacaccttcggtcacttatctcactccaccttaaacatctgaacatcaacaacatgccagtttatgctttcaaacgtctctttcacctcaagcatttggaaatcgactattggcccttgcttgacatgatgccggcaaattcactgtacggtctgaaccttacatctctgtccgtcacaaatactaacttgtccaccgtgccttttctcgcgtttaagcatctggtttaccttacccatcttaacctctcctataacccaatcagtacaatcgaagccgggatgttttccgatctgatcaggctgcaagagctccacatcgtaggagctcagctccggactatagaaccacattctttccagggtctccgatttcttagagtcctgaatgtgtcacagaatcttctggagactttagaggagaatgtgtttagttcccctcgggccctggaggtgctgtctattaacaataacccgctggcctgtgactgtcggttactctggattctgcaaagacagccaacacttcagttcggaggccagcaacccatgtgtgccggaccagatactatcagagagaggagcttcaaagacttccattccactgcactgtccttctattttacgtgcaagaaacccaaaatacgggagaagaagctgcagcatctgctggttgatgaaggtcaaaccgttcagctcgaatgtagcgcagatggcgatcctcagccggtgataagttgggtgaccccccgtagacgcttcattaccaccaagtcaaatggcagagctactgtgctgggggacggcactctggagatccgattcgctcaggaccaggattccgggatgtatgtctgtatcgcctccaatgcggccggtaatgataccttcaccgcttccctcaccgtgaagggcttcgctagtgaccgctttctgtatgccaatcgcacacccatgtatatgacagactctaacgataccatctccaacggcaccaacgccaatactttcagcttggatctcaagacgatcctcgtatcaaccgccatgggctgctttactttcctgggagtagtactcttctgttttctgctgctcttcgtgtggtcccggggcaaggggaagcacaagaactccattgaccttgagtatgtacccagaaagaataacggcgcagttgtggaaggagaagtcgccgggcctcgacgctttaatatgaaaatgatctag

SEQ ID NO: 122086 - DNA, 1821 bp, synthetic construct
  misc_feature 1..1821: note = Description of Artificial Sequence: Synthetic coding sequence
  source 1..1821: mol_type = other DNA
atgttacacaccgcaatctcttgttggcaacctttcctcggtctcgcggtggtattgatttttatgggctcaaccatcggttgtccagcgcggtgtgaatgctctgctcagaataaaagtgttagctgccaccggcggcgactcatcgctatccctgaaggcatcccaatcgaaactaagatcctcgatctctctaagaaccgcctgaagtccgtcaatccagaagagtttatatcctacccacttctggaggaaatcgacctgtcggataacataatcgcaaacgtggagcctggagcgtttaataatctgttcaacttgaggtcactgagattgaaagggaacagattgaaactggtcccgttaggggtgttcactgggctctctaacttgactaagctggatatttcggagaacaaaattgtcattctgctggactatatgtttcaagatctgcataacctcaaatcactcgaagtcggagacaatgatctggtttatattagccatagagcattcagcggacttctctctctggagcagttgaccctggagaagtgcaacctcaccgctgtacccaccgaagcattatcccacctccgctctctaatatcactccatctcaagcatctcaacattaataatatgcctgtttacgcatttaaacggctatttcatctgaagcaccttgagatcgactattggccactgctagatatgatgcctgcgaactcgttgtatggactcaatctgacttcattgtctgtgacgaacactaacctgtccactgtgcctttccttgcgttcaagcacttggtgtaccttacccatttaaatctgtcatataaccccattagcaccatcgaagccggaatgttctctgaccttattcgcctacaggaactccatattgtgggcgcccagctacgcaccatcgaacctcacagcttccagggtctgagatttctgagagttctgaacgtcagccagaacttactggaaaccctcgaagaaaacgtatttagcagccccagagcactcgaagtgctgtcaatcaataacaatccccttgcatgtgattgtagactgctatggattctccagcgccagccgaccttacagttcggaggtcaacagccaatgtgcgccgggccagacacaatccgggagcgttcgtttaaagactttcactctacggctctgtccttttattttacctgcaaaaagccaaagataagggagaagaaattacagcatctcctcgtagatgaaggccagactgtgcaattggagtgtagtgcggacggagatcctcaacccgtgatttcttgggtgactcccaggagaagatttattactaccaaaagcaatgggagggccaccgttctgggggatggcactctcgagatccgtttcgcgcaggatcaagacagcggcatgtatgtttgcatagcaagcaacgccgcaggcaatgacacatttactgcttcccttacagtaaaaggcttcgcttcagatcgctttctgtatgccaatcgcaccccgatgtatatgactgactcaaatgacacaattagcaacggcacgaatgcaaacaccttctccctggacttgaaaacgattcttgtaagcactgccatggggtgtttcacctttttgggcgtggttctgttctgtttccttctcctgttcgtctggtcgcgcgggaagggcaagcacaaaaattctattgatctagagtacgtcccacgcaaaaacaacggagcagtagtcgagggcgaggtggccggtccacgaagatttaacatgaaaatgatctag

SEQ ID NO: 122087 - DNA, 1779 bp, synthetic construct
  misc_feature 1..1779: note = Description of Artificial Sequence: Synthetic coding sequence
  source 1..1779: mol_type = other DNA
atgacctgctggctgtgcgtgttatcactccctctgctgttgctgcccgcagctccccctccagccggcggatgccctgcccggtgcgaatgtaccgtccagacccgggctgtcgcctgcacccgccgccgtctgacagctgtgccggatgggatacccgccgaaactagactgctcgagctcagtcgcaaccgcattaggtgcttgaatcccggggaccttgcagcactccctgccctcgaggaattagacttatcggagaacgcgatagcgcacgtggagcctggtgctttcgctaatcttccacggctgcgtgtcttgcgcctccggggtaaccaactcaagctcatcccccctggggtctttactaggctggacaacctaactcttcttgatctgtcggagaacaagcttgtgattctcctggattatactttccaggaccttcactccctccgcagacttgaagttggcgacaacgatctcgtgtttgtttcccgaagggctttcgcaggccttctggcactggaagaactgactttagaacgttgtaacctgactgcgctttctggagagtccctgggtcacctccgcagtctcggtgccctgcggcttagacatctggctatcgctagcctcgaagatcagaactttaggagactgcccgggctgttgcacctggagatcgataattggccacttttagaggaggttgcagcaggaagtttgagaggccttaatctgacatccttatcagtaacacacacaaacatcactgctgttccagcggccgctttgcgtcaccaggcccacctcacttgcctgaacttatcacacaaccccatcagtactgttccccggggatccttcagagatctggtgcgcctgcgggaattacacttggccggagccctgctggcggtcgttgagccacaggcgtttctcgggctgaggcagattcgacttctcaacctcagcaacaacctattatctaccctagaagaaagcacctttcactcagtaaatacgctggagaccctacgcgtggacggaaatcctctcgcctgcgactgtaggttgttatggattgtacagcgccggaagaccctcaactttgacggacgcttgccagcatgtgctacacccgctgaagtcaggggtgacgcacttaggaatcttcctgactccgtcttgtttgaatatttcgtgtgtagaaagccgaaaatacgtgagaggcgcctgcagcgtgtgacagctaccgctggagaagacgtccggtttctgtgcagggccgaaggggagccagctcctaccgttgcctgggttacaccccagcatagaccagtcactgccacatctgccggcagggcacgggtgttacctggaggaacattggagatccaggacgctaggccgcaggattctggcacatatacatgtgtggcatccaatgctggggggaatgacacctattttgcgactctgaccgttcgaccagagcctgccgcaaaccgaacccctggtgaagcacataatgagacactggccgcactgcgcgcgcctctcgatttaacaacaatcttggtgtccacagccatgggatgtattactttcttgggagtggtacttttttgctttgtgctcctgttcgtctggtcccggggaagaggacagcataagaacaacttttcagttgagtatagtttccggaaagtggatgggccggcggccgctgccggacaaggaggcgctaggaagttcaatatgaagatgatatag

SEQ ID NO: 122088 - DNA, 2172 bp, synthetic construct
  misc_feature 1..2172: note = Description of Artificial Sequence: Synthetic coding sequence
  source 1..2172: mol_type = other DNA
atgcctcttttttttcgcaaaagaaagccctctgaagaggcccgcaagcgcctagagtaccagatgtgtctggctaaggaagccggtgcagatgacatcctcgacatctctaaatgtgaactgtccgagataccgtttggtgcctttgccacatgcaaagttttgcaaaaaaaagtactgattgtccataccaatcacctcacgtcactgctcccaaagagttgcagcttactctctctggctaccatcaaagtcctggaccttcacgacaatcaactaacggccctgcccgatgacctggggcagctgaccgcccttcaggttctgaatgtggaacgaaaccagctgatgcagctgcctagaagtatcgggaatctgacacaactgcagacgttaaacgtcaaggacaataagttgaaggagctgcctgatacagtcggagagcttcgatccctaagaacgctgaacattagcggtaatgaaatccagcgtctgccacagatgctggctcacgttagaacccttgagatgctctcccttgatgcttccgcgatggtgtatccgcctagggaggtatgtggggctggaactgccgctattctgcagttcctttgtaaggaatcagggctcgaatactatccaccctctcagtatctgctgccaatcttggagcaggatggcatcgagaattccagagattccccggatggacccactgacagattctctcgcgaggagctggagtggcagaatcggtttagcgactacgaaaaacggaaggaacaaaaaatgctggagaaactggagtttgagagacggcttgagctaggccagcgagaacacacccagctgctgcagcaatcaagcagtcaaaaagacgagattcttcaaaccgtgaaagaagagcagagccggttggaacagggtctaagcgagcaccagaggcatctcaacgccgagcggcagagactgcaggagcagctgaagcagactgagcagaacattagcagtcggatccagaagctcctgcaggataatcaaagacagaagaagagctccgagattctcaaatctctagaaaatgaaaggataagaatggaacagctcatgagcatcacacaggaggaaaccgagtcccttaggagacgggacgtggcctccgcaatgcagcagatgctgactgagagttgtaaaaatcgcctgatccagatggcttatgaaagccagagacagaatcttgtgcaacaggcgtgctcatcgatggccgagatggatgagcgatttcagcagattctcagctggcaacaaatggatcagaataaggctataagccagattttacaggagagcgccatgcagaaggcagcattcgaggctctacaagtgaagaaggatcttatgcatagacagattaggtctcagattaaactaatagaaaccgaacttcttcagcttactcagctcgaactgaagaggaagtcattggacactgaaagcttacaggaaatgatcagtgagcagagatgggccctgtccagtcttctgcaacagttgctgaaggagaagcagcagagagaagaggagttacgcgaaattcttactgagctggaggccaagtcagaaacacgacaggaaaattattggctgattcaatatcaaaggctgctcaaccagaaacctctgagtctgaagctccaagaggagggcatggagcgtcagctcgtggccctactcgaggagctatccgctgaacactacctgcctatcttcgcgcaccacagactgagtcttgacctcctttcacagatgtcaccaggagacttagcaaaagtgggggtatccgaagccgggctgcagcacgagatcctaagacgagtccaagaattacttgacgccgcccgcatccagccagagcttaaaccccccatgggggaagttgtaacgcccactgcgccccaggagccccccgaaagtgtgcgaccttccgccccgccggccgagctggaggtccaggcgagtgaatgtgtagtttgcctcgaacgggaagctcagatgatctttttgaactgtggccatgtctgttgttgtcagcaatgttgtcaacctctgcgtacgtgtccactttgccgccaggacattgcccagcgactgagaatctaccacagttcttag

SEQ ID NO: 122089 - DNA, 2172 bp, synthetic construct
  misc_feature 1..2172: note = Description of Artificial Sequence: Synthetic coding sequence
  source 1..2172: mol_type = other DNA
atgcccctgtttttccgaaagagaaaaccatctgaagaggcccgaaagagactggagtaccagatgtgcctggcaaaggaggccggcgccgacgatattttagatatatctaagtgtgagttgtccgagatcccgttcggtgccttcgccacctgtaaggtgcttcagaagaaagtcctgattgtgcacacgaaccacctgactagcctgctgcccaagagctgttccctgctgagtctagcgacgatcaaggttctggacctccatgataaccagctgacagctctgcccgatgatttaggacagctcactgccctgcaggtgttgaatgtggagcgcaatcaactgatgcagctgcctagatccatcgggaacctgactcaactgcagaccttgaatgtgaaagacaacaagctcaaagagttgcccgatactgtcggtgaattacgctctttacggactctgaacatttctggaaacgaaatccagaggctgcctcagatgctggctcatgttcgcaccctagaaatgctaagtctcgacgcgagtgcaatggtgtatccaccacgtgaagtctgcggagctggtaccgctgccatattgcagttcctatgcaaggaatcaggcctcgaatactacccccccagccaatatctgctccctatccttgaacaggacgggattgagaactccagagattctcccgacggcccaactgaccgcttttctcgggaggagctagagtggcagaataggttctctgactacgaaaaaagaaaggaacaaaagatgttggagaaactagagttcgaaaggcgcctcgaactgggacagcgggaacacacacagctgctgcagcagtcaagttctcaaaaggacgaaattctccaaactgttaaagaggaacagtcgaggttagaacaggggctgtctgagcatcaacggcatcttaatgccgagcgccagcggcttcaagaacaactgaagcaaaccgagcagaatatatccagtcggatccagaagttgctgcaggataatcagagacagaagaaatccagcgagattctgaaatcccttgagaatgagcggattcgcatggagcaattaatgagcatcacccaggaggagacagaaagccttcgtagacgcgacgtggcctctgccatgcagcaaatgctgacagagtcttgtaagaatcgcctcatccagatggcctatgaatctcagcggcagaatctcgtacagcaagcgtgctcctcgatggcagaaatggatgagcgctttcagcagatcttgtcatggcaacagatggaccagaataaagccatctcccagatcctccaggaaagcgccatgcaaaaagccgcattcgaagcactgcaggtgaagaaggatcttatgcacagacagatccgctcccagatcaaactgatagagaccgaactcctgcaactgacacaacttgagttgaagcggaaatcccttgataccgaatccctccaggagatgatttccgaacagagatgggccctctcttcgcttctacagcaactcttaaaagagaagcaacagcgcgaagaggagcttagagagattttaacagagctggaggccaaatcagaaactcgccaagagaactactggctgattcaataccagagattgctaaatcaaaagccactctcactaaaactccaagaagaaggtatggagcggcaattagtggctttgctagaagagctttccgctgagcactacctgcctatatttgcccaccacagactaagccttgacttgctatcacagatgagccctggggacctggctaaagtcggagttagcgaagccggcctccagcatgagatccttcgcagagtccaggagctgttggacgccgccaggatccaaccggagttgaagccaccaatgggcgaagtcgtaacaccgacggcaccacaggagcctccagagtctgtaagacccagtgcgccccctgcagaactggaggtgcaagcctctgagtgtgtcgtctgcctcgaaagggaagctcaaatgatttttctgaactgtgggcatgtttgttgttgtcagcagtgttgccagccgctccgcacttgtccactgtgccgccaggacatcgcacagagattgcgtatatatcacagtagttag

SEQ ID NO: 122090 - DNA, 2172 bp, synthetic construct
  misc_feature 1..2172: note = Description of Artificial Sequence: Synthetic coding sequence
  source 1..2172: mol_type = other DNA
atgcccttgttcttccggaagagaaaacctagcgaggaggcccgcaagcggttggagtatcagatgtgtctcgcaaaggaggccggtgctgacgatatcttggacataagtaagtgcgagttatcagaaattccttttggagctttcgctacctgtaaggttctgcaaaaaaaggtcctcatcgtccacaccaatcatttgacaagtctgttgcccaagtcctgctcactgctttccctggccaccatcaaagttctggatctgcacgacaaccagttaacagcccttccagatgaccttggacagcttacagcactacaggtgttaaatgtagagcgtaatcagttgatgcagctgccacggtccattgggaacctgactcaactgcagacacttaatgtcaaggataacaaactaaaagaattgcctgataccgtcggggaactgaggagtcttcgtacattgaatatcagcggaaacgagattcaacgactcccacaaatgctcgcccatgtgaggacgctggagatgctgtctctggatgcatccgctatggtctacccacctcgagaggtgtgcggggcgggcaccgccgccattcttcagtttctttgcaaagagtccggactcgagtactaccctccttctcagtatttgctaccaatactagaacaagatggtatcgaaaacagcagagactcccccgacggacctacagatcgtttctcccgggaagagctggaatggcagaaccggttctcggactatgaaaagcgcaaagagcagaagatgttagaaaaactggaatttgaacggagactggagcttggacagcgggagcatactcaactgctgcagcagtcatctagtcagaaagacgaaattttgcagacagtgaaagaagagcagtctcgcctagaacaaggcttatctgagcaccagagacaccttaacgccgaacggcagcgtctgcaggagcaattaaagcagaccgagcaaaatatttcctctcgcatccaaaaacttctgcaggataaccaacgtcagaaaaaatccagtgaaattctgaagtcccttgaaaacgaaaggatccgcatggaacagctgatgagtatcacgcaggaggagaccgagtcactcagaagacgggacgtggccagcgcaatgcagcaaatgctgacagagtcctgcaaaaatcgcctgatccaaatggcctatgaatcacagagacagaacttagtccagcaggcctgttcctccatggcagaaatggacgaacgattccagcagatcttgagctggcaacaaatggatcagaataaagccatctcccagatcctgcaggagtctgccatgcagaaagccgcctttgaggctctgcaagtaaagaaggacctaatgcaccgacagatacgctcccaaatcaaactgatagagacagagctgttgcagctgacccagctggagctgaagcgcaagagcctggataccgaaagcctgcaggagatgatcagcgagcagcgttgggccctgagctcgttgctccaacagctcctcaaggagaagcagcagcgcgaagaggaactacgcgagatcctgaccgaactggaagccaagagcgaaaccaggcaggagaactattggctaatacagtatcagaggctgcttaatcagaaaccactgtcgctcaagctccaggaagaagggatggagcggcaactcgttgctctgctcgaggaactgagcgccgagcactacctgccaattttcgctcatcaccgactgagtcttgacctgttgagccagatgagtccaggggatctcgcaaaagtgggcgtctccgaagctggattgcagcatgaaatcctgcgccgtgtccaggaactgctggacgccgctcgaattcagccagaactcaaacccccgatgggagaagtggtcacgcctacagcaccgcaggaaccccccgaaagcgtacgcccatcggcacctcctgccgaactggaggtccaggcaagcgaatgtgtggtttgcctggaaagagaggctcaaatgatattcctgaactgtggtcacgtgtgttgctgccaacaatgttgccagcctctccgcacatgccccctttgtagacaggatatagcccagcggcttagaatttatcacagtagctag

SEQ ID NO: 122091 - DNA, 2091 bp, synthetic construct
  misc_feature 1..2091: note = Description of Artificial Sequence: Synthetic coding sequence
  source 1..2091: mol_type = other DNA
atgcctctgttctttagaaagcggaaacctagtgaagaagccaggaagcggctcgagtaccagatgtgcctcgctaaggaggccggcgctgatgatatactggatatcagcaagtgcgagctgtcagagatccccttcggagctttcgcaacttgtaaagtgttacagaaaaaggtgcttattgttcacacaaaccacctaacgtcacttttgccaaagtcatgttcccttctttctctcgcgactataaaggtcctggacctgcacgacaaccagctaacagccctccctgatgatctggggcaactcactgcccttcaagtgctcaatgttgaacggaatcagttgatgcagctcccgcgaagcataggtaacctcacccaactccagacccttaatgtaaaggataacaaattgaaggaactgcccgacacggtcggtgaactgaggtctcttcgcaccttgaatatcagcgggaacgagatacagcgactcccacaaatgctcgcccatgtgagaaccttggaaatgctgagtttggatgctagcgccatggtttaccctcctagggaggtgtgcggtgccggaacagctgcaattctacagtttctgtgcaaggaatctggccttgagtactaccctcctagccagtacctccttccaattctggagcaggatggaatcgaaaatagccgcgacagccccgatgggccaacagaccgattttccagagaggagctggaatggcagaatagattctcagactatgagaaaaggaaagaacaaaagatgttggagaaactggagtttgaaagaaggctggaactgggccaaagagagcacacacagctgttgcaacagtctagcagccaaaaagacgaaattctccagacagttaaagaagaacagagtcggctagagcaaggtctttcagaacatcagcgccacctcaatgctgaacggcaacgacttcaggagcagttgaagcaaacggaacaaaacattagctcaaggatacagaagcttctgcaggataatcagagacagaaaaagtccagcgaaatcctcaagtcattggagaacgaacggattcggatggagcagttgatgagtatcacgcaagaagagacagaatcccttaggagaagggacgtggcctcagcaatgcagcaaatgctgacagagtcatgcaagaatcgccttatacagatggcgtacgaatcacaacgccagaatctggtgcaacaggcctgttcctctatggcagagatggacgagagatttcagcagattctgtcttggcagcagatggatcagaacaaggccatttctcagatccttcaggaaagcgccatgcaaaaagctgcttttgaggccctccaagtaaagaaagacctaatgcacaggcaaattaggtctcaggagatgatatcggagcaaaggtgggccctgtcttctctgctgcaacagcttctgaaggagaaacagcagagagaggaggagctgcgcgagattctgactgagctggaagcgaaaagcgagactagacaagagaattattggctaatccagtaccaacgcttgctgaatcaaaagccactcagcctgaaacttcaggaggaggggatggagcgtcagctggttgccctcctagaggagctctctgctgagcattatctgccgatatttgcccaccaccggctgtctctggacctgctgtcacagatgtcacccggggacctggctaaagtaggggtgtcagaggctgggttacaacacgaaatcctcagacgcgtgcaggagcttctcgacgcggcccgaatccaacccgagttaaaacccccgatgggtgaggtagttacgccgaccgcccctcaagagcctcctgagtctgtgcggccaagcgccccacccgcagaactggaggtacaggcatctgagtgtgtggtctgtttagaaagggaggctcaaatgatttttctgaactgcggccacgtttgttgttgtcagcagtgctgccagcctctgagaacctgcccattgtgcagacaggacattgcccagcggttgcggatctaccacagcagctag

SEQ ID NO: 122092 - DNA, 465 bp, synthetic construct
  misc_feature 1..465: note = Description of Artificial Sequence: Synthetic coding sequence
  source 1..465: mol_type = other DNA
atgttccattgtattccactgtggaggtgcaatagacacgtggaatcaattgataagcgccactgctccctggtttatgttcctgaggagatttacaggtatgcacgctctctcgaggagctgctgcttgatgcaaatcagctgagggaattgcctgaacagtttttccagctggtgaaactgagaaagctgggattaagcgacaatgagattcagaggctcccacccgagattgccaattttatgcagttggtggaactggacgttagccgcaacgaaatacccgaaatccccgagagtatttcattctgcaaagctttacaagtggcagatttctccggaaaccctctcactcgactgcctgagagttttccagaacttcagaatttgacgtgtctgagtgtgaacgacatcagcctacaatccttacccgaaaatattggcaaacagaagaccacttcttag

SEQ ID NO: 122093 - DNA, 1575 bp, synthetic construct
  misc_feature 1..1575: note = Description of Artificial Sequence: Synthetic coding sequence
  source 1..1575: mol_type = other DNA
atgttccactgcatccccctttggaggtgtaacagacacgtggagtccatcgacaagaggcattgctccctagtttatgtgcccgaggagatctacaggtacgcccggtcgcttgaggagctcctcctggacgccaaccagctcagagagcttccagaacagttttttcagctagtgaaactgcgaaagcttggcctctccgataatgagattcagcggctgccgcccgagatcgctaattttatgcaattggtcgaactagatgtctcacggaacgaaatccctgaaatccctgaaagcatatctttttgcaaggccctgcaggtagcggatttctcaggtaaccctctgactcgattaccagaatcgtttccagagcttcagaatcttacttgtctctcagtgaatgatatttctctgcagagcctgccagaaaatatcggcaatctttataatctggcgtccctggagctgagagagaacctgctaacctatctaccagatagtctgacacagcttaggaggctcgaggagttggatctgggcaataatgaaatctacaatttacccgagagcatcggagctctactgcacctaaaggatttgtggctggatggaaatcagctttccgagttaccccaggaaattggtaatctgaagaatctgctgtgtctggacgtgtcagaaaatcggctggagaggttgccagaagagatttcaggcctgacatcgctgactgatctggtcatctcccaaaacctcttagaaacaataccggatgggattggtaagctcaaaaagctgtcaatactaaaggtcgatcaaaacaggttaacccagctgcccgaggcagtcggcgaatgcgaatccctcactgaactcgttttgacagagaaccagctattgactctgccgaaatcaatcggaaagcttaaaaaactgtccaacctaaatgcagaccggaataaactagtctcattaccaaaagagattgggggttgctgttcactgaccgtgttttgtgtccgtgacaacaggctgacgcggatcccagccgaagtgtcccaagctaccgaactccatgtcctggacgtggcgggcaaccgattgttgcacctgcccctgtccctgaccgcccttaaactcaaagcactatggctttctgacaatcagagtcagcccctgctgacctttcagacagacacggattacacaaccggggagaagattttaacatgcgttctccttccacaattgcccagtgaaccaacgtgccaggagaatctgccgagatgcggagcattggagaatctagtcaacgatgtgtctgacgaggcctggaatgaacgcgccgttaatcgcgtaagcgccatccgtttcgtggaggacgagaaggacgaggaggataacgagacaagaacactgctaaggagagcaaccccccatcctggcgagctgaaacatatgaagaagacggttgagaaccttagaaatgacatgaatgcagctaagggcctggatagcaataagaacgaagtgaaccacgccatcgaccgcgtgacaaccagtgtgtag

SEQ ID NO: 122094 - DNA, 834 bp, synthetic construct
  misc_feature 1..834: note = Description of Artificial Sequence: Synthetic coding sequence
  source 1..834: mol_type = other DNA
atgggtaacaccattcgagccttggtcgcattcataccagccgaccgatgccaaaattacgtggtgagagatctcagggagatgccccttgacaagatggtcgacctcagcggctctcaactgcggagattccctctgcatgtgtgctcgtttagagagctggtcaaactgtacctgtcagacaatcacctgaacagtctgccccccgaactgggacaattgcaaaatctgcagatcttggctctggactttaataactttaaggccctcccccaggtggtctgcaccttaaagcagctctgtattctgtatctgggaaataataaactctgcgacctaccatctgagctgagtctactgcagaatctacggaccttgtggattgaggccaattgcttgactcagctccccgatgtcgtttgtgagttatccctgctgaagactcttcacgcaggaagcaatgctctgcgactgttgccaggacagctccgaagactccaggagctgagaacaatctggctgagtggaaacagattgaccgacttcccaacagttctattgcacatgccttttttagaagtaatcgacgtcgattggaatagtatccggtacttccccagcctggcccacttaagctctctcaaactggtcatctacgaccacaacccttgtcgaaacgctccgaaagtggcaaagggcgtgcggcgcgtaggcagatgggcggaggagacccccgagccagatccacgcaaagccaggcggtacgctctcgttagagaagagtcacaggagctccaggcccctgttcctctgctgcccccgactaactcttag

SEQ ID NO: 122095 - DNA, 4116 bp, synthetic construct
  misc_feature 1..4116: note = Description of Artificial Sequence: Synthetic coding sequence
  source 1..4116: mol_type = other DNA
atgaccgaggagagtagtgacgtgccccgggaactcatcgaatcaatcaaggatgtgattgggcgcaaaataaagatctcagttaagaagaaggttaaactggaggtgaagggagataaggtcgagaataaggtcctggtcctgacttcctgtcgcgcctttctagtgactgccaggatcccaacgaagctcgagttgacttttagttatttggaaatccacggagtggtctgtagtaagtccgcacagatgatcgtcgagaccgaaaagtgttctatatctatgaaaatggctagccctgaggatgtgtccgaagttttggcacacatcggaacctgcctcagaaagattttccccggtctatctcccgtgaggattatgaaaaaagtgtctatggaacccagcgagaggctagcctccctgcaggccctgtgggacagccaaacagtagccgagcaggggccatgtggtgggtttagccagatgtacgcctgtgtttgcgattggctcggttttagctaccgggaagaggttcagtgggatgtggacaccatctacctcacacaagacacccgagagctcaacttgcaagatttctcccatttggatcaccgcgatctgatccccatcattgctgcactggagtacaaccagtggtttaccaagctgtcaagcaaagatctgaaactgagcaccgatgtttgtgagcaaatactgcgcgtggttagcagaagtaatcggctcgaagagctagtcctcgagaatgccggcttgcgaactgatttcgcccaaaagctcgcgtcagcattagcgcacaatcccaacagcgggctccatacaataaacctggccggaaacccattagaggatcggggcgtgtcatcactgtccatacaatttgccaaactcccaaagggcctgaagcatcttaatctgagcaagacatctctctccccaaagggcgtgaatagtctgtctcaatctctctcggcaaatccactgactgctagcacccttgttcatctggacctgtcgggcaatgtcttgagaggagatgatctttcacacatgtataacttcttggcacagcctaatgcaattgttcatctcgacctatccaatacagagtgctccctcgacatggtgtgcggagcactcctcagaggctgtctgcagtacctggctgtgctcaacttgagcaggaccgtcttttctcaccgcaaaggcaaggaggtccccccatcctttaagcagtttttcagctcctcactggcacttatgcacattaacctgagtggcacaaaacttagtccagagccacttaaggcgctactgctgggactcgcctgcaaccacaacttgaaaggtgtgtcactggatctctcaaactgcgaactacgttctgggggtgcccaggtcttagagggatgcattgcagagatccacaatataaccagccttgatatcagtgacaatgggctggagagcgatctttcaacactgatcgtctggctgagtaagaatcggtcgatccagcatctggctctcggaaaaaatttcaacaatatgaaaagtaagaacctgacccctgttctggacaacctggtacaaatgattcaggacgaggagtcccctctgcagtctctttctttggctgatagtaaattaaagacagaagtgaccatcatcatcaacgccctgggctccaacacttccctgactaaggttgatatctctggcaacggaatgggggatatgggcgccaaaatgctggcaaaggctctccagatcaatactaagcttaggactgtgatttgggataagaacaacatcacagcccaggggttccaggatatcgctgtcgcaatggagaaaaattacaccctgaggtttatgccaattcccatgtatgatgcaagccaagccttgaagaccaatcccgaaaagactgaggatgctctgcagaagatcgagaattatctgttgcgaaaccatgagactcgcaaatacctgcaggagcaggcctacaggcttcagcagggcattgtgacttccacaactcagcagatgatcgacagaatctgtgttaaagtgcaagatcacctcaatagtcttcggaattgcggcggcgatgcaatccaggaggatctaaagtcagcagagcggctgatgcgggatgctaaaaactctaagactctcctgcccaacctctaccacgtcggtggggcctcttgggccggcgccagtggtctgctgtccagcccaatccaggagaccttggaatctatggcgggtgaggtaacaagagtcgttgacgaacaactcaaggctctgttggagtctatggttgacgcagctgaaaatctttgccctaacgtgatgaagaaggctcacattcggcaggacctgatacatgcaagtaccgagaaaatctccattcctcgtaccttcgtcaaaaatgttcttctggagcagtccggcatcgacattcttaacaagatatctgaagtcaaacttactgttgcgtcttttctgtccgaccggatcgtggacgagatcctcgatgctctctctcattgccatcataaactggctgaccacttctcccggcgcggaaaaacactcccacagcaagagagtctggagatagagctggctgaggaaaagcccgtgaagaggtctattatcacagtagaggaactgaccgagatcgaacgtctggaagatctggacacatgcatgatgacgccgaaatccaagcgcaagagcatccatagcaggatgctgaggcctgtgtcaagagccttcgagatggaattcgatttagacaaagccctagaagaagtacctatccatattgaagacccaccctttccctctttgcggcaggaaaagagatccagcggtttcatctctgagctccccagcgaggaaggtaaaaagttggagcacttcacaaagttgagaccgaagcggaacaagaagcaacagcccacccaggcagcggtgtgtgctgcgaacatcgtctcacaagacggcgagcagaacgggcttatgggccgggttgacgaaggagttgatgagttctttactaagaaggtcactaaaatggattctaagaaatggagcacaaggggttccgaatcccatgagcttaatgaaggtggagatgagaaaaagaagcgggattcaaggaaatcaagcggatttctgaacctcatcaagagcagaagcaagtcggagaggccgccaactattcttatgactgaagagccatcttcacccaagggcgcagtaaggtcgcctcctgtcgattgtccaaggaaagatactaaggcagccgagcacaatgggaactcagagcggatcgaggagattaaaacaccggattctttcgaagagtctcagggggaagaaatcggcaaagtcgagcgcagtgacagtaagagctctcctcaggcgggccgccgatacggggtccaagtgatgggcagcggtcttttagcggaaatgaaggccaagcaggaaaaacgcgccgcgtgtgcacagaaaaaactcggcaacgacgcagtgagccaggatagttccagtcccgcattatctggagtcgaacgaagcgacgggggtggcgcagtgccaaaactgcacccagggctgccagagaatagatttggtctcggaacaccagagaagaacaccaaagcggagccaaaggcagaagctggatcacggtcaaggagtagctccagcaccccaaccagtcctaagccactattgcaaagccccaaaccctcgttggctgcccgaccagtaatccctcaaaagccacggactgcgagcagacccgatgatatcccagactctccgtcatcgcccaaagtcgccctgctgcctcccgtgctgaagaaagtgccatctgacaaggaaagagatgggcaatccagcccccagccttcccccagaaccttcagccaggaagtgagccggcgcagctgggggcagcaggctcaggaataccaagaacaaaaacaacgtagctcatccaaagacggacaccagggcagcaagtccaacgattctggggaggaggcagaaaaagagttcatttttgtatag

SEQ ID NO: 122096 - DNA, 531 bp, synthetic construct
  misc_feature 1..531: note = Description of Artificial Sequence: Synthetic coding sequence
  source 1..531: mol_type = other DNA
atgtatgcatgcgtgtgtgattggcttggtttctcctacagggaagaggtccagtgggacgttgataccatttatctcacacaggataccagggagctgaacctgcaggatttcagtcacctggaccaccgagatttgatacctattatcgctgccttagaatataaccaatggttcacaaaattatcgtctaaagacctcaagctgtccacagatgtgtgtgagcagattctcagggtggtttcacgatctaatcggttagaagaattagttctggagaacgctggcctcagaaccgattttgctcagaaactggcctccgcccttgctcataacccaaattcaggattacacacaatcaatctggctggcaaccccctggaagaccgtgaaacaactacaaagataaaacggcaaaacgtgcctaccgtcttgcagacttatttggttgtctgtccctccgattaccaaccctgcccactccctctcggcaaggacaattactatagcgacttctctcatgatggctag

SEQ ID NO: 122097 - DNA, 3981 bp, synthetic construct
  misc_feature 1..3981: note = Description of Artificial Sequence: Synthetic coding sequence
  source 1..3981: mol_type = other DNA
atgaccgaagagagttctgatgtgccaagggaactgatcgagtcgatcaaagatgttattgggcgcaagataaagatttccgtcaagaaaaaagtgaaattggaggtcaaaggtgataaggttgaaaataaggtcctcgtcctgacttcctgcagagccttccttgttactgcacgaatcccaacaaagttagaactcaccttttcctacctggaaattcatggggttgtctgctcaaagtctgctcaaatgatcgtggaaaccgaaaagtgcagcatttccatgaaaatggcctctcccgaggatgtaagcgaggtgctggcgcatatcggcacttgcctgagaaagatcttcccgggtctgtcaccagtacgcattatgaagaaagtgtcaatggaaccgagcgagcgtctcgcatctctacaggccctgtgggattcccaaacagtggcagaacagggaccttgtggcggttttagccagatgtacgcttgtgtatgtgactggttgggcttcagctaccgagaggaggtccagtgggatgttgacaccatctatttgacccaggacaccagagaattgaacctgcaggatttttcgcaccttgatcaccgggacttgattcctattatcgccgcattagagtataaccaatggttcaccaagctgtctagcaaggacctgaaattgagcactgatgtctgcgaacagatactccgtgtggtgtctagatcaaatcggctcgaggagctggttctcgagaacgcgggcctgcggaccgatttcgcgcagaaattggcgagtgccctcgcgcacaatcctaattccggccttcatacaataaatcttgctggcaatcctcttgaggatcggggagtgtcttctttgtccattcagttcgctaagcttcctaaagggttaaaacacctcaatctcagcaaaacttcactgagccccaaaggggtgaacagtctctcacaatccttgagcgctaatcctctgaccgctagcaccttggtgcatctcgacctcagtggaaatgtcctgaggggcgacgacctgagccacatgtacaactttttggcacagccgaatgctatcgtgcacttggatttatcaaacactgagtgtagcctggacatggtgtgtggagctttactcaggggctgtctgcaatacttagccgtcctcaatctgtctcgaacggttttttcacataggaaggggaaggaggtgcccccttccttcaagcagttcttttcatcatccctcgctttaatgcatatcaatctctctggcaccaaactgtcacctgaaccattaaaagctctgcttctcgggttggcttgtaaccacaatctcaaaggggtgtccctggacctgtccaactgcgagttgcggtcaggaggtgcccaggtattggaagggtgtattgctgagatccataatataacgtccctcgatatcagcgataatggactggaatccgatctgagcacacttattgtatggctgtccaaaaaccgttcaattcagcatcttgcgcttgggaaaaattttaacaatatgaaatcgaaaaatcttacacccgtgctggataacttggttcaaatgatacaagacgaggaatctcctctacagagccttagtctggccgactcgaagctgaagaccgaagtgaccataatcatcaatgcattgggctccaacactagtctgactaaggtggacattagtgggaatggcatgggcgatatgggagccaagatgctagctaaagcactgcagataaacaccaagctcagaaccgtaatttgggataagaacaacattaccgcacagggcttccaggacatcgctgtggcaatggagaaaaattacactctgcgcttcatgcctattccgatgtatgacgcttcgcaggcgctcaaaacaaatcccgaaaagaccgaagatgctttgcagaagatcgagaactatctgctccgtaaccacgagaccaggaaatatttgcaggagcaggcatatcgcttacagcaggggattgtgacttccacaacccaacagatgattgatcggatttgcgtgaaagtgcaggaccatctgaattccctgcgcaactgtgggggtgatgcaattcaagaagatctgaagtccgctgaacgactcatgcgggacgccaagaattctaagaccttacttccaaatctctatcatgtcggcggggcaagctgggccggggcatctggactcctgagttccccaatccaggaaaccctggaatccatggccggggaagtgacgcgcgttgtcgacgaacaattaaaagccctgctggaaagcatggtcgacgccgccgagaatctttgcccgaacgtgatgaaaaaggcacacattcgacaggatctcatccatgcctccacagagaagatctctatccctaggacgttcgtgaaaaacgtacttctggagcagagcggaatagatatactcaacaagattagcgaagtgaaactgaccgtagcatctttcctgtcagaccgaatcgtggatgagatcctggacgccttgtcacactgtcaccataagctggccgaccatttttctagacgcggcaaaaccttgcctcagcaggaaagcctggagatcgaattagctgaagagaaacccgtcaagagaagtattataacagttgaggagttgacagagatagaaagactagaggatctcgacacctgtatgatgactccaaagtctaaaagaaaaagtatacacagcaggatgttgcgtccagtctcaagggcctttgagatggagtttgacctagacaaggctctcgaagaggtcccgatccacattgaagatcctccgttcccgagcttgaggcaggaaaagagatcatccgggtttatttctgaactccctagtgaagagggaaagaaacttgaacatttcaccaagcttcgaccaaaacgaaataagaagcaacagccaacgcaggcagctgtttgcgcggcgaatatcgtcagccaggacggagaacagaatggattaatgggacgggttgacgaaggcgtggatgagttcttcactaagaaggttactaagatggatagtaagaagtggagcacaagggggtccgagagccatgaacttaacgaaggaggggatgaaaagaagaaacgagatagccgtaagtcctccggttttctcaatctgattaaatccaggtcaaaatctgagcggccacccacaatcctgatgacagaggaaccatccagtcctaagggcgcagttaggtccccccctgtggattgtcctcgtaaggatactaaagccgctgagcataatggaaacagcgaacgaatagaggaaatcaagacacccgacagttttgaagagtcccagggcgaggagataggaaaagtagaaagaagtgactctaagtccagcccccaggccggccggcgttacggtgtccaggttatgggttccggcctgctagcggagatgaaggcgaaacaagagaaccgatttggacttggaactccagaaaagaatacaaaggccgagccaaaggcggaggccgggagccgctcacgatcaagttcaagtactcccactagccccaagccgctcctgcaaagccctaaaccaagcctggccgctcggccggtgatcccacaaaagcctcgtaccgcctctcgcccggacgatatacccgattccccctcatctccaaaggttgcactcctgccgccagtgctaaaaaaggtgccatcggataaagagcgcgacgggcagtctagcccacagccttctcccagaacgttctcccaagaagtctcccgaaggtcatggggccagcaggcccaggaatatcaggaacagaaacagagatcctcctccaaagatgggcatcaggggtccaagagcaacgattcgggtgaagaggcagagaaggaatttatattcgtctag

SEQ ID NO: 122098 - DNA, 1116 bp, synthetic construct
  misc_feature 1..1116: note = Description of Artificial Sequence: Synthetic coding sequence
  source 1..1116: mol_type = other DNA
atgggccacaaagttgtggtctttgacatttcagtgatacgtgccctgtgggaaacacgcgtaaagaagcataaggcttggcagaagaaggaggttgagcgtttggaaaaaagcgccctcgaaaagatcaaggaagaatggaatttcgtggctgaatgtagacgaaagggaattccccaggccgtgtattgcaaaaacggcttcattgacaccagtgtgcggctgctcgataagattgaacggaatactttgactagacagtcttcactgccaaaagatcgcggtaagcgatccagcgcatttgtgttcgaactgtccggggaacattggaccgaactaccggactctttgaaggaacagacccacttgcgagagtggtacatatctaatactctcatccaaataatccctacatatatacagctgtttcaggctatgcggatattggacctgccaaaaaaccagatctcccatctgcctgcggagataggatgcctgaagaacctcaaggagttgaacgtggggtttaactatctcaaaagcatcccccccgagctcggtgattgtgaaaacctggagcgcctggattgcagcggtaacctcgagctcatggagcttcccttcgagctctccaatttgaagcaggtcacgtttgtcgatataagtgcaaacaaattctcctccgtgcctatctgtgtcctcagaatgtctaacctgcagtggctggacatttcctccaataatctgaccgacctgccacaggatatagacaggctggaggaattacagtcattcctcctgtataagaacaagctcacctatctgccctactctatgctgaatctaaagaagctcaccctgttagtcgtgagcggggaccatctggttgaactcccgaccgctttgtgcgattcatctactccactgaaattcgtgtccctgatggacaatcccattgacaacgcacagtgtgaagatggcaatgaaattatggaatcggagcgcgacagacaacattttgataaggaggttatgaaagcctatatcgaggacctgaaggagcgcgagtctgtcccctcttacactacaaaggtctcgttctctttgcagctgtag

SEQ ID NO: 122099 - DNA, 1116 bp, synthetic construct
  misc_feature 1..1116: note = Description of Artificial Sequence: Synthetic coding sequence
  source 1..1116: mol_type = other DNA
atgggtcataaagtggtcgtattcgatatctccgtgataagagctctgtgggaaacaagggtgaagaaacacaaagcctggcagaagaaggaagtggaacggttagagaagtcagctctggaaaaaatcaaagaagaatggaactttgtcgcagaatgccgtcgcaaaggcattccccaggcagtgtactgtaaaaatggcttcatagatacatccgtacgattacttgacaagatcgagcggaatacgctcactagacagtcttccctccctaaggaccggggcaaaagatcctctgcgttcgtgtttgagttgagcggcgagcattggacagagctccccgactcactgaaggaacagactcacctgcgtgagtggtacatctcaaacactctcatccaaatcatcccaacttatatacagctgtttcaggcaatgaggatcctggacctgccaaaaaaccagattagtcatctgccagcggagattggatgcctaaaaaatctgaaagagctcaatgtgggattcaattacctgaagagcatccctccagaactgggggactgcgagaatttggagcggcttgactgctctggcaatctggaattaatggagctgcctttcgagctatcgaacttaaagcaagtgacttttgtcgatatctcggccaacaagttttccagcgtgccaatatgtgtgctccggatgtctaatctccagtggctcgacatctcaagcaacaatctgaccgatctaccacaagatatcgaccgcttagaggaactgcagtccttcctgctctacaaaaacaaactcacctacctgccttactcaatgctgaaccttaaaaagttaaccctactcgtggtttctggtgaccaccttgtggagctgcctacagcattgtgtgactcctccactccccttaagtttgtgagcctgatggacaacccaattgacaatgctcagtgcgaggacggcaacgagatcatggagtctgaacgtgatcgacaacactttgataaagaggttatgaaagcgtatatagaggacctcaaggaaagagaaagcgtgccttcctatactaccaaggtgagcttctccctgcagctctag

SEQ ID NO: 122100 - DNA, 918 bp, synthetic construct
  misc_feature 1..918: note = Description of Artificial Sequence: Synthetic coding sequence
  source 1..918: mol_type = other DNA
atgggtggaacgctcgcatggaccctgcttctgccactgttgctcagggaaagcgactctctggagccaagttgtaccgtgtcttctgctgacgttgattggaacgctgagttttcggccacctgccttaattttagtgggctatctctgagcctccctcacaatcagtctcttagggcatcgaatgtgattctgctggatctaagcggcaatggattaagagaactgcctgtgacattctttgctcaccttcagaagctggaagtcttaaatgtgctgcggaatcctctgagccgcgtggatggtgccctggctgctcggtgcgatctcgacctgcaggccgactgcaattgcgcattagagtcatggcacgatattagaagagacaattgcagcggacagaagcccctcctgtgttgggacacaacttcctcccagcacaacctgagcgccttccttgaggtgtcctgtgcgccaggtctagcgagcgccaccatcggcgccgtcgtggtgagtggctgtctgctgctgggactggcaatcgctggccctgttctggcttggcgtctctggagatgtagagtcgcccgctcacgcgaactgaacaaaccttgggccgcccaagacggccccaaacccgggctgggtctgcagcccagatacgggtccagaagtgctccaaaaccccaggttgccgtgcctagttgtcctagtacaccggactatgagaacatgttcgtggggcagcccgcggctgaacaccagtgggacgagcaaggagctcatccatctgaagataatgatttttacatcaattacaaagatattgacctcgcctctcagccagtgtactgcaatctgcaatctctgggccaagcaccaatggatgaggaagagtacgttattccaggccactag

SEQ ID NO: 122101 - DNA, 1005 bp, synthetic construct
  misc_feature 1..1005: note = Description of Artificial Sequence: Synthetic coding sequence
  source 1..1005: mol_type = other DNA
atgagaggacctagctggagcagaccacgccctcttctgctcttacttcttctcctgtcaccttggcccgtatgggctcaggtctctgcgactgcatcaccttccggttccctgggcgcccccgactgtcccgaggtgtgtacgtgtgtgccgggcggtcttgcctcctgctcagcactgtcgctgcctgccgtgccccccggcctctctcttcgtttgcgagccctgctgctggaccacaacagagtcagggccttaccaccgggcgcctttgcaggtgctggggccctccagcgactggacttgagagaaaatgggctgcatagtgtgcatgttcgcgcattttgggggctcggcgctttacagctcctggatctctcggctaaccagctagaagccctagcccccggaaccttcgcacctcttcgggccttaagaaacctgtcacttgcaggaaacaggttagctcggctagagcctgcagcacttggggcacttcctttactccgttcactaagcctgcaggataatgaattagcggccctggcgcctggactacttgggcggctgcctgccttggacgctctgcatctgagagggaacccatggggctgtggctgcgccttgcgtcccctttgtgcttggttaaggcgacatccgttacctgccagcgaagcggagacagttctgtgcgtctggcctgggaggcttactctctctcccctgaccgctttctctgacgccgccttcagtcattgtgcccaacctctggcgctgcgagatctggccgttgtgtacacactggggccagcctcattcctggtctcactcgcatcctgtctcgcccttggaagcgggctaaccgcctgtcgggcacgcagaaggcgcctgcggacagcagccttgaggccaccaagaccgccagatcctaatccagaccctgatccccatggatgtgcgtcccctgccgacccaggttctcctgcagcagcagcacaagcttag

SEQ ID NO: 122102 - DNA, 1923 bp, synthetic construct
  misc_feature 1..1923: note = Description of Artificial Sequence: Synthetic coding sequence
  source 1..1923: mol_type = other DNA
atgctgaacaagatgacacttcaccctcagcaaattatgattggaccacggttcaatagagctctcttcgatccccttttagtggttctgctggcgctgcagttgctagtcgtggcgggcttggttcgggcacagacctgtcctagtgtctgttcttgcagcaatcagttctctaaggtgatctgtgtgcgaaagaaccttagggaagtcccagacggaatttccactaatacacgtcttctgaatttgcacgagaatcaaatccagataatcaaagtgaactcttttaagcacctcaggcacctggagatactccagctcagcagaaatcacatcagaaccatagagataggcgcttttaacgggctggccaatctcaacaccctcgagttgtttgacaaccgcctcacaaccattcctaacggggcattcgtttacctctccaagctgaaagagctatggttgcggaacaatccaatcgaatctataccatcctatgcgttcaaccgcattccatctctccggcgactcgaccttggcgagctaaaacgactatcctacatttctgaaggcgccttcgaggggctgtcgaacttgcggtacttgaatcttgcaatgtgcaatctcagagaaatccccaacttgactcccctcatcaagctggatgaactggatttgtctggcaaccacctgtccgcgatcaggccaggatcattccagggattaatgcacttgcaaaagctctggatgatccagtcacagatccaggtgattgaacgcaacgcttttgataacctgcaatctctcgtcgagattaatttggcacataataatctgacccttttgcctcacgacctgtttactcccttgcaccacctggagcgcatccatctccaccataatccgtggaattgcaactgcgacattctgtggctttcgtggtggattaaagacatggcaccaagtaatactgcttgttgcgcaaggtgcaatacaccacccaatctaaaaggccggtatatcggggagctggaccagaattatttcacttgctacgctcccgtgatcgtcgagcccccagctgatctgaacgtgacggaagggatggctgccgagcttaagtgccgggccagcactagtctgacaagcgtgtcctggatcaccccaaatggcactgttatgacccatggcgcctacaaagttcggatcgcagttctgagtgatggaacactgaacttcacaaacgtaacagtccaggataccggtatgtacacttgtatggtttctaactccgtggggaacacaaccgcatcggccactcttaatgttaccgcggcaactactactcctttctcgtattttagcacagtgacagtggagacaatggagccctcacaggacgaggccaggactacagataacaacgtcggtcctacacctgtggtcgactgggagacaaccaacgtgaccacaagcctcacacctcagtccaccaggtcaacagagaagacatttacaatcccagtgaccgatattaacagcggcatacccggaattgacgaggtgatgaaaaccactaaaataattatcgggtgttttgtggcgatcacactaatggccgccgtgatgcttgttatcttctacaagatgaggaaacagcaccaccgccaaaatcaccatgcccccactcgcacagtggagatcattaacgttgacgatgagataaccggggacacacccatggaaagccatctcccaatgccggcaatcgaacacgagcatctcaatcactataattcatacaaatccccatttaaccacaccaccactgttaacacgatcaacagcatccactcctctgttcacgaacccctactgattcgtatgaattccaaggataacgttcaggaaacccagatttag

SEQ ID NO: 122103 - DNA, 1923 bp, synthetic construct
  misc_feature 1..1923: note = Description of Artificial Sequence: Synthetic coding sequence
  source 1..1923: mol_type = other DNA
atgttgaataagatgacgctgcacccccagcagattatgatagggccgcgctttaaccgagcacttttcgacccattactagtggtgttgttggcactgcagttgctggttgttgccggcctagtgagagcacaaacctgtccttcggtgtgcagctgcagcaatcaattttctaaggtcatctgcgtacgcaaaaacctgcgtgaagtccccgatggtatcagtaccaacactcggctcctcaacttgcatgaaaaccagatccaaatcatcaaggtgaactccttcaagcatctccgtcatctcgagattctccagctgtcgcggaaccacattagaactatcgagataggggcattcaatggacttgcgaatctgaacactctggagctttttgacaaccgactgacaactatacctaatggagccttcgtctatctttcaaaactcaaagagctttggttgcggaacaaccctatcgagtccatacctagctatgcctttaaccgcatcccaagccttcggaggctggatctcggcgaactgaaacgcttgtcctacataagcgagggagcatttgagggtttaagcaacctgcgctatctgaatctagccatgtgcaacctgcgggaaatccccaacctgacaccgctcatcaaactcgatgagctcgatctttctggcaaccacctatctgccatcagacctggtagctttcagggactgatgcatttacagaaactttggatgattcagagtcagattcaggtgatcgagcgcaatgcctttgacaacctccagagcctggtagagatcaatctcgctcacaataacctgacactgttgccccacgacctatttactccactgcaccacctggagagaattcacctgcatcataacccttggaattgcaactgcgatatcctatggctgtcctggtggattaaggatatggcaccatccaatactgcgtgttgtgcccgctgtaacaccccacccaatctcaagggtagatacatcggtgagttagaccaaaattatttcacatgttatgctccggttatcgttgagccacctgcggatctgaacgttacagaggggatggccgcagagctgaaatgtcgcgcttcaacatctttaaccagcgtcagctggatcacgcctaatggtaccgtgatgacccacggtgcgtataaggtacgcatagcagtgctgtcggatggcaccctgaattttacaaacgtgaccgtgcaggataccggtatgtatacttgtatggtctccaattctgtcgggaacacaactgcctctgccacactcaatgtcactgccgccacaactactcccttctcttatttttccacggtgaccgtggaaacgatggaaccctcacaagatgaagcaaggaccacggataataatgtggggccaacacctgtcgtggattgggagacgaccaatgtaaccactagtcttacaccacagagtacacgctcaactgaaaaaaccttcacaattcccgttaccgatatcaatagcgggattccagggatcgacgaggtaatgaagacgacaaagattatcatcggctgtttcgttgccatcactctgatggccgcagtcatgctggttattttctacaaaatgcggaaacagcaccataggcaaaaccatcacgcaccaacaaggaccgtggaaatcatcaacgtggacgacgaaattacaggggatacacctatggagtcacatctccccatgcccgccatcgagcatgaacacctgaatcactataactcatataagtctccatttaatcacactactaccgtgaatactattaattcaattcattcctctgtgcatgagccgctgctgataagaatgaactccaaggacaatgtgcaggaaacccaaatttag

SEQ ID NO: 122104 - DNA, 1923 bp, synthetic construct
  misc_feature 1..1923: note = Description of Artificial Sequence: Synthetic coding sequence
  source 1..1923: mol_type = other DNA
atgctcaataagatgaccctgcatccccaacaaattatgatcgggccaaggttcaatagagccctcttcgacccacttctggttgttttactcgccctgcagctgctggtggttgccggactggtgcgggctcaaacatgcccgtctgtgtgttcctgctcaaatcaattttccaaagtcatttgtgtccgcaagaatctccgcgaggtcccggatggcattagcactaatactcgcctgcttaacctgcacgagaaccagatccagatcatcaaagtcaattcttttaagcacctgcgacacctggaaatcctgcagctctctcgcaatcatattagaactattgagatcggggcatttaatggcctggctaatttgaacacgttggaactgtttgacaatagattaacaacaatacccaacggcgcctttgtgtatttgagtaagctgaaagaattgtggctccggaacaatcccatcgaatctatcccatcatacgccttcaataggattccttctttgagacggctggatctcggagagctgaagagattgtcgtatatatcagagggcgccttcgaaggcttgtccaacctgcggtacctgaatctggcaatgtgtaacctgcgcgagatccctaacctaactcccctcatcaagctggatgaactggatctgagtgggaaccacctgtctgcaattaggcccggatcttttcagggtttgatgcatctgcaaaagctgtggatgatacagtcccagattcaggtcattgagcggaacgccttcgacaacctgcagtcactggtagagataaacctggcccataacaatttaactctgctgccccacgatctgttcacacccttgcatcacttggaaagaattcacctacaccacaatccatggaattgcaattgtgatatcttatggttgtcttggtggatcaaggatatggccccctccaacacagcttgttgcgcacggtgcaacacacctcctaatcttaagggtcggtatatcggggagctggaccagaattattttacttgctacgctcctgtaatcgtggaacctcctgccgacctaaatgtgaccgaggggatggcagctgagctgaaatgcagagcctctacatcgctgacatccgtaagttggattaccccgaatggtacggtgatgacccatggcgcttataaagtgaggattgcggtcctgagtgatggtacactgaactttacaaatgtgacagtccaggacacaggcatgtatacttgcatggtctccaatagcgtaggcaacacaacggcgagcgccacattgaatgttacagctgctacaacgacacccttttcttatttttccactgtaaccgtcgagactatggaaccatcacaggatgaagccagaacgaccgacaataacgtgggccccaccccggttgtggactgggagacgacaaatgttactacatcactcactccgcagtcaacccggagcacagaaaagacttttacaataccggtaactgacataaattccggcattccaggtatagatgaagtgatgaaaaccacgaaaatcattatcgggtgcttcgttgctattaccctcatggccgctgtgatgttagtcatcttttataagatgcggaagcagcatcacaggcagaatcatcacgccccgacaaggactgtggagataattaatgtcgatgatgagatcacaggagacacaccaatggagagtcacctgcccatgcccgctatcgaacatgagcacctgaatcactacaacagctacaagtctccttttaaccacactacaacagttaacactattaatagtattcattcatcagtgcacgagcctttattgatacggatgaattccaaggacaatgtccaggagactcagatctag

SEQ ID NO: 122105 - DNA, 1923 bp, synthetic construct
  misc_feature 1..1923: note = Description of Artificial Sequence: Synthetic coding sequence
  source 1..1923: mol_type = other DNA
atgctcaacaaaatgacattgcatccacagcagattatgatcgggcctaggttcaaccgcgctctgttcgaccctctattagttgtgctgcttgcactgcagctgttagtggttgccggtctcgtaagggcacagacatgcccttcagtctgttcttgttccaatcagttttccaaggtcatttgcgtgcgcaaaaacctcagggaagtgccggatggcatttcgacaaacacccgccttctaaatctgcacgagaaccagatccagatcataaaagtaaatagttttaagcaccttaggcacttggaaattctacaactatcacgaaatcacatcaggactatcgagattggagcgtttaacggactagcaaatctaaacacgctggagctctttgacaaccggttaactacaattccaaatggtgcctttgtctacctaagcaagctgaaggaactatggctgcgcaataacccaatcgagtcaatcccttcctatgcctttaaccgtatcccttctctccgtaggttggaccttggcgagcttaagagactaagttatatttcagaaggagcatttgagggactgagcaacctgaggtatctcaatctggccatgtgcaacctgagagagattccaaacctgaccccgctgattaagctggacgaacttgatctgtccggcaatcacctctccgcgattcggccagggtcctttcaaggacttatgcatctccaaaaactatggatgatccagtcccagatccaggtgatcgagagaaatgcattcgacaatttgcagtccttagtcgaaatcaacctcgctcacaacaacctcactcttctgccacacgacttatttactccgcttcaccatctggagagaatccacctgcaccacaacccttggaattgcaactgcgacatcctgtggctgtcttggtggataaaagacatggcccccagcaacactgcatgttgtgcaagatgtaacacccctccgaaccttaagggacgctacattggagagttggatcagaattatttcacttgctatgccccagtgattgtggaaccacccgcggatttaaacgtaaccgaaggaatggctgccgaactgaagtgtcgcgcgagcacatctttaacttctgtgagctggatcacccccaacggcactgtcatgacacacggcgcctataaggtgaggatcgcggtcctgtcagacggaaccctcaacttcacaaatgtgacagtgcaggacacaggcatgtacacgtgcatggtttctaactccgttgggaacaccacagcttcagccacacttaacgttacagctgccacaaccacacctttctcttacttttcaacagtcaccgtggagaccatggagccttcacaggatgaagcccgaacaaccgacaacaacgtcggtcctacacctgtggtggattgggaaacaacaaatgtcacaacgagtctgacccctcagtccaccaggagtaccgagaagacattcacgataccggtgaccgatatcaactctggcatacccgggatagacgaggtgatgaagacaactaagataatcatcgggtgttttgtggccataactttaatggcagcagtgatgctggtgatcttttacaaaatgagaaagcagcatcatcgccaaaatcaccacgccccaaccagaacggttgaaatcatcaacgtggatgacgagatcacaggtgacacacccatggaatcccacctccctatgcccgcaatcgagcatgaacacttaaaccattataattcatataagtcgccgttcaaccatactactactgtcaacacaatcaacagtattcattcttcggtgcacgagcctctccttataaggatgaactccaaagataacgtgcaggaaacgcagatctag

SEQ ID NO: 122106 - DNA, 126 bp, synthetic construct
  misc_feature 1..126: note = Description of Artificial Sequence: Synthetic coding sequence
  source 1..126: mol_type = other DNA
atgctgaacaagatgactctccacccgcaacagataatgatcggcccgaggttcaatagggcgctgtttgatcctctactggtggttttactggctctccagctcctcgttgtggcaggtttgtag

SEQ ID NO: 122107 - DNA, 4614 bp, synthetic construct
  misc_feature 1..4614: note = Description of Artificial Sequence: Synthetic coding sequence
  source 1..4614: mol_type = other DNA
atgaccactaaaagaaaaattattggtcgtcttgtcccatgccgctgcttccgaggtgaggaagaaatcatctctgtgttagattactctcactgtagcctccaacaagtccctaaagaggtgtttaattttgaacggaccctggaagaactctatctcgacgcaaaccagattgaagagctcccaaaacagctgtttaattgtcaggcactccgcaaactctcaatccctgataacgacctgtcaaacctgcccacaacaatcgctagtttggtgaatctgaaggagctggacataagcaaaaatggagtgcaggagttccccgagaatatcaagtgctgcaagtgtttgacaattattgaggccagcgtcaaccctatatccaagctgcccgacgggtttacacaacttttgaatttgacacaactgtacctcaatgatgcgtttctggaattcttgccagctaacttcgggcgactggtcaagctcagaattttagagctcagagaaaatcatcttaagacgcttcccaagtccatgcacaagctggcgcagctcgagagacttgacttgggtaacaacgaattcggggagttacctgaggtgctggaccaaattcaaaacctgagggagttgtggatggacaacaatgctttacaggtgttaccgggctctattggcaagctgaagatgctagtgtatctcgatatgtctaagaaccgaatagaaacggtggatatggatattagcggctgcgaggcattggaggatctgttattaagctcaaacatgctgcagcagcttcccgatagtatcggactcctgaagaagctaaccacccttaaggtggacgataatcagctgaccatgctgcctaatactattgggaacctgtccttacttgaggaatttgattgcagctgcaatgagttagagtcactgccgagcacaatagggtatctgcacagtcttaggacactggctgtggatgagaatttcttgcccgaacttcctcgggagattgggtcctgcaagaatgttaccgttatgtctctaagatccaacaaacttgagttcctacccgaggagattggccagatgcagaaattgagggtactgaacctatccgataaccgtctgaaaaatctcccatttagctttaccaagctcaaagagctcgccgctttatggctgtccgataaccaatcaaaggcactgatacctctgcagaccgaggcacatccagagaccaaacaaagagttctgactaactatatgttcccacagcaaccacggggcgacgaagatttccaatcagattctgactccttcaatccaactttatgggaagaacaaagacagcagaggatgacagttgcgtttgaatttgaggacaagaaggaggacgacgaaaacgccgggaaagtgaaagatctttcctgtcaggccccttgggaacgcggacagaggggaattaccctgcagcctgcgagactgagcggggactgttgcaccccatgggctaggtgcgaccagcagattcaggacatgccggtacctcagaatgaccctcaactcgcctggggctgcattagtggcctccaacaggaacgtagcatgtgcacgcccctgccagtcgccgcgcagagcacaaccttgcccagtctgtctggaaggcaagtcgagatcaacctgaagcggtaccctactccctaccctgaagacttgaaaaatatggtgaaaagtgtgcagaatctggtcgggaagccatcccatggcgtgcgagtcgagaatagtaatcccaccgccaacacagagcagacggtgaaggaaaagtacgaacataagtggcctgttgcccccaaagagatcacagtcgaggatagctttgttcatccagcgaatgaaatgaggattggtgagcttcatccttcactggctgaaacccccctgtatcctcccaagctggttctgctggggaaggacaaaaaagagtctacagacgaaagcgaggtggataagactcattgtctgaacaactccgtgtcatctggcacttactcagactattcacccagccaggcaagctcgggaagcagcaatactagagtaaaggtgggatcactgcagacaaccgcaaaagacgcggtgcacaacagcttgtgggggaaccggatcgccccctcttttccccagcccctggacagcaagcccctcctcagtcagagagaagctgtgccaccaggcaatataccccaaagaccagaccgcttgccaatgtccgacacctttacagataactggacagatggctcacattacgacaacactggctttgtggcggaagagacgaccgccgagaatgccaactccaacccactgctgagttccaaatcacggtccacaagtagccacggccgacgtcccttgatacggcaggatcgcatcgtgggggtccccttagagttagaacagagtacccataggcatacaccagagacagaggtgccacctagcaacccatggcagaactggacacgcaccccctccccattcgaagacagaacggcctttcccagtaagctggaaacaactcccactacatctccgctcccagagcgaaaggaacacattaaggagagtacagagatccctagcccattcagcccaggcgtgccatgggaataccacgacagcaaccccaaccgttcacttagcaatgttttctctcagattcactgccgccctgagtcctctaagggggtgatctcgatctcgaaaagcactgaacgcttgagtcccttaatgaaggatatcaagagcaacaagttcaagaaaagccagagcatcgatgagattgatattgggacctacaaagtttataacattccgctcgagaattacgcctccggatccgaccacctcggatcccacgaaagacctgataagatgctgggcccagagcacgggatgagctctatgtcacgatcacagagcgttcctatgcttgacgacgaaatgctgacttacgggagtagcaaaggcccccagcagcagaaggcatctatgaccaagaaagtttaccagttcgaccagagctttaacccccagggatccgttgaggttaaggctgagaaacgcatccctccacccttccaacataatcccgaatacgttcagcaagcttcgaagaacattgccaaggacctgatatctccaagagcatatagaggatatccgccaatggaacagatgttctccttctcacaaccttccgtcaacgaagatgctgtcgttaatgcccagtttgcaagtcagggggccagggccggattcctgcggagagctgattcccttgtgtctgccaccgaaatggcaatgttccggcgcgtcaatgagcctcacgagttgccgccaaccgataggtatggtcgtcctccataccgcggtggattagaccgccagagttctgttacagtaacagagtcccagtttctcaagcgcaacggcaggtatgaggacgagcacccctcatatcaggaggtcaaagcacaggccggctctttcccggtgaagaatctgactcagaggcggcctctctcggctcggagttactctaccgagagctacggagcttcccaaacccgtcctgtatcagcccggcccacgatggctgcactgttggagaagattccctccgattacaacctagggaattacggggacaagccaagcgacaattctgatcttaaaaccaggcctactccggtgaagggtgaggagtcatgcggaaaaatgccagccgactggagacaacagttattgcgtcacatcgaagcaagaaggctcgatcggaacgctgcctacaaacacaataccgtgaatctcgggatgctgccttacggggggattagcgctatgcacgcaggtcggtctatgacgttgaatcttcagaccaagagcaagtttgaccaccaggaactcccgcttcagaaaacgccttcccaacagagcaatatactggacaatggacaagaggatgtgagtcctagcgggcagtggaacccctaccccttgggccgcagggacgttccgcctgacactatcactaaaaaggccggctcccacatccagacattgatgggctcgcaaagcctgcagcatcgcagtcgagagcagcagccttatgagggtaacatcaataaggtgacaatccagcaattccagtctcctctgcctatccaaattccgtcatcacaggccaccagaggcccccagcctggtaggtgcctgattcagactaaagggcagagaagcatggatggatatcccgagcaattttgtgttcgaatcgagaagaacccaggacttggcttcagcatttcaggtgggatctcaggccaaggaaatcctttcaagccatccgacaaggggattttcgttacgcgagtccaaccagacggacccgcttcaaacctcctgcaacctggcgataagatacttcaggcgaatgggcactcatttgttcacatggaacacgaaaaagctgttctgctcctaaaatcgtttcagaataccgttgacctggttattcaacgcgagttgaccgtgtag

SEQ ID NO: 122108 - DNA, 4488 bp, synthetic construct
  misc_feature 1..4488: note = Description of Artificial Sequence: Synthetic coding sequence
  source 1..4488: mol_type = other DNA
atgcagtgcctggagatgactaccaaacgtaaaatcatcgggcgcttggttccttgcagatgtttccgtggggaggaggagatcatatccgtcctggactacagtcattgttcgctccagcaagtccccaaagaagtttttaacttcgaacggaccctcgaagagctgtacctggacgctaaccagatagaggagctgcccaagcagctgttcaactgtcaggcccttagaaagttgagcattccggataacgacctgagtaatctgccaaccacgattgcctccctagttaacttgaaggaattggacattagtaagaatggtgtacaggaatttcccgagaatatcaaatgctgtaaatgcctaaccatcatcgaggcctctgttaaccctatcagcaagctgccggacgggttcacgcaactgctgaatctgacccagctatacctgaatgatgcattccttgagttcctccccgctaatttcggtagacttgtaaagctgcgaatcctcgaactaagagaaaaccacctgaaaacactgccaaaaagcatgcataagttagctcagcttgagcgcctggacttgggaaacaatgagttcggagagctgccagaagtcttagaccagatccagaacctcagagagctgtggatggataacaacgccttgcaggtacttcccggtagcatcggaaagttgaagatgctggtgtacctggacatgagcaagaaccgcatagaaacagtggatatggatatctctggctgcgaagcactagaggacctgttgctcagcagcaacatgctccagcagttgcctgactctatcgggctgctcaaaaaacttacgaccctgaaggtggatgataaccaactgacaatgctacccaacacgataggtaatttgagtctgctggaggagttcgattgcagctgcaatgagctggagagtttgccttcaaccattgggtaccttcactctcttagaacattagcagtagacgaaaacttcctgccagaactgcctagggagataggaagttgcaagaacgtgactgtgatgtcgctccggagtaataagctagagttcttgcccgaagagattggacagatgcagaagctccgggtgctcaatttaagtgacaaccggctgaaaaaccttcctttcagctttacaaaactgaaggaactggctgccctatggctgagcgataaccagagtaaggccctgatccctttgcagacagaagcccacccagagacaaagcagagagtattgaccaattatatgttcccccaacagcccaggggagacgaagacttccagtccgattcagactcatttaatccaaccctatgggaggaacagcgccagcaaagaatgaccgtagccttcgagtttgaagacaaaaaagaggacgacgagaatgctggcaaggtcaaggacctgtcatgccaggctccctgggaacgcggccagaggggtatcacccttcaaccggcccgactatctggcgattgctgcacaccctgggcacgctgtgatcagcaaatccaggacatgcctgtcccgcaaaacgaccctcagctggcctggggctgcattagcgggctgcaacaagagaggtccatgtgcacacctcttccagtagctgctcagtcaactactctgccctcactttccggaagacaggtggagatcaatctcaagcgatacccaaccccttaccctgaagatttgaaaaatatggtgaagtccgttcagaatctagtggggaagccttctcacggcgttagggttgagaactccaatcctaccgctaatacggaacagaccgtgaaggaaaaatatgagcacaagtggcccgtagcccctaaggagattacagtcgaagattccttcgtgcatccggccaatgagatgagaataggcgaactccatcccagtctggccgaaacacccctatatcccccaaagctggtcctattgggcaaagacaagaaagaatctactgatgagagtgaggtagataagacgcattgtctgaacaactccgtcagttccggaacatatagtgactactcaccatcacaggcaagtagcggctcctcaaatacgagggtgaaagtgggctcccttcaaacaaccgcgaaggacgccgtccacaactctctgtgggggaacagaattgctccctcgttcccccaacctttggatagcaaacccctgctttctcagcgggaggccgttcctcccggcaatatcccacagcgcccagacaggctgcccatgagtgataccttcaccgataactggaccgatggcagccactatgacaacacaggctttgtggctgaagaaacaacggccgagaacgcaaatagcaatcccctgctgtcctcaaagtcacgatctacttcttcacatgggagacggcccttgattaggcaggacagaattgtgggagtgccactcgagttggaacagtctacgcaccgccatacacctgaaaccgaggttcctccaagtaatccctggcagaactggacgagaacaccttctccgtttgaggatcggacagccttcccttcaaagttagaaacgaccccgaccacctcaccgctccctgagcggaaggaacatataaaggagagcaccgaaattcccagccctttctctcccggggtcccctgggaatatcatgatagtaatccaaaccgaagcctgtctaacgtgttctcgcagatccactgtagaccagagtcctctaaaggggtcatcagcatctctaagtccactgagcggctcagccccctcatgaaggacatcaagagcaacaagtttaaaaagtcacagagtatcgacgagatagacatcggtacatacaaagtttataacataccgctagagaactacgctagcggaagtgatcacctagggagccacgaacgccccgataaaatgcttggcccggaacatggcatgagtagcatgtcccgctcccagtctgttcccatgctggacgatgagatgttgacctatgggtctagcaaaggtccacaacagcagaaagccagtatgacaaagaaagtttaccagtttgatcagagtttcaatccccaagggtccgtggaagttaaggccgaaaagaggatccctcctccgtttcagcacaatccagagtatgtgcagcaggcctctaagaatatagccaaggatttaatcagcccccgcgcgtatcgaggataccctcctatggaacagatgtttagcttttcccaaccatctgtgaatgaagatgccgttgtgaacgctcaattcgcttctcaaggagctagggcgggtttcctgagaagagccgatagtctggtcagcgctacggagatggcgatgttccgccgggtgaatgaacctcacgagctaccccctactgaccggtacggccggcctccatatagggggggtttagacaggcaaagctcagtgacagttacggagtcgcagttcttaaaaagaaacggaaggtacgaggacgagcacccgagttatcaggaggtcaaggcccaggccggctccttccctgtgaaaaacctgacccaaagaagacctctgtccgcaaggagctacagcacggaatcatatggcgccagccaaacccgtcccgtcagcgcaagaccaacaatggccgccttgctcgaaaaaataccctccgattataacctgggaaactacggcgacaagccatccgacaatagcgatcttaagaccaggcccaccccggttaagggtgaggagtcatgcggtaagatgcccgccgactggagacagcagctgctgcgacatattgaggcaaggagactcgatagaactccttctcagcagtctaatatattggacaacggacaagaagatgtgagtccgtccgggcaatggaacccttaccccctgggtaggagggatgtgcccccggacacgattacgaagaaggcaggttcccatatccagacacttatgggatctcagagtctacagcacaggtcccgtgagcagcagccttacgagggcaacatcaataaggttacgatccaacagttccaatcccctctgccaattcagataccgtccagccaagcaacccgtggtcctcagcctggccggtgcctcattcaaacaaagggccaacgaagcatggacggatatcctgagcagttctgtgtcaggatcgagaagaatcctggactgggtttcagcatctcggggggtattagtggccagggcaaccctttcaagccttcagacaaagggatttttgtgacgagggtacagccggatggccctgcctcaaacctgctccagcccggagacaaaatactccaggccaatgggcactcctttgtccacatggagcatgagaaggctgttctacttctcaaatctttccaaaatacagtcgacctggtgatccagagagagctgaccgtgtag

SEQ ID NO: 122109 - DNA, 540 bp, synthetic construct
  misc_feature 1..540: note = Description of Artificial Sequence: Synthetic coding sequence
  source 1..540: mol_type = other DNA
atgactactaaaaggaagatcatcggtcgtttggttccatgcagatgttttcgcggcgaggaggaaatcatttcagttctggactattcccattgttccctgcagcaagtgcctaaggaggtttttaattttgagagaactctggaggaattgtatctggacgctaaccagatagaggagctacccaaacagttattcaattgccaggccctcaggaagctcagtatacctgataatgacctgtcaaatctccctactaccatcgcctccctggtgaaccttaaggagctggatatttcaaagaatggcgtgcaggaattcccagagaacatcaaatgttgtaagtgtctgacgataatcgaggctagcgtaaaccccatttccaaattgcccgatgggttcacccaactgctcaatctcacacagttgtacctgaacgatgcgttcctcgagtttctgcctgctaatttcggcaggttagttaagctgcgtatcctggaactgagggaaaatcatctcaagacccttcctaagatttag

SEQ ID NO: 122110 - DNA, 3942 bp, synthetic construct
  misc_feature 1..3942: note = Description of Artificial Sequence: Synthetic coding sequence
  source 1..3942: mol_type = other DNA
cgctccatgcacaagctcgcccagttggaacgcctggatttaggaaataacgaattcggtgaactgcccgaagttctggatcagatccagaacctgcgtgaactgtggatggataataacgccctccaggtcctgcctggttccataggcaagctcaaaatgctggtatacttggacatgagcaaaaatcggatcgagactgtagatatggacatcagcgggtgcgaagccctcgaagatcttctgctaagctccaacatgctgcaacagcttcccgattcaattggcctcctaaagaaactgaccacgctgaaggtggatgataatcagctcacaatgctgccaaacaccatcggaaacctgtccttactggaggagtttgactgtagctgcaatgagctggagtccctgccaagcaccattggatatctgcactcactcaggactttggccgtggatgagaatttcttacctgagttaccacgagagatagggtcatgcaaaaacgtaacagtgatgtccctgaggtccaataaactggaattcctcccggaggaaatcggacagatgcagaagctccgggtcctgaatctgagtgacaatagactgaaaaacctgcctttttcttttacaaagctcaaagaactcgcggcattatggctctcagacaaccagtccaaggcactgataccactccagaccgaggcccaccccgaaaccaagcagcgggtactcacgaactatatgtttccccaacagccacgaggggacgaggactttcagtctgactccgactccttcaatcctacgctgtgggaagagcaacgccaacaacggatgaccgttgcctttgagtttgaagacaaaaaagaggatgatgagaatgctggcaaagtgaaggatctatcatgtcaggcaccatgggagcgcgggcagaggggtatcacgcttcagcccgcgagattgtctggagactgttgcactccatgggcaaggtgcgatcagcagatccaggacatgcctgtgccacagaacgatccacagctggcttggggctgcattagtgggctgcagcaggaaagatccatgtgtactcccttacccgtggcggcacagtccaccacgttaccaagtctcagtgggagacaggtggaaatcaacctgaagagataccctacaccatatcccgaagacctgaaaaacatggtgaagtctgttcagaacttggttggtaagcctagtcatggggtccgggttgagaactccaatccaacagccaacaccgaacaaactgtgaaggaaaaatacgaacacaaatggccagttgctcccaaggagattactgtggaggactccttcgtgcatccagctaacgaaatgcggattggcgaattgcaccccagtctggccgaaacacctttgtacccgccaaaactggtccttctaggcaaagacaagaaagagtcaaccgacgagtctgaagtggacaaaactcactgtctcaacaattcagtttccagcggaacgtactccgactatagcccgtcccaggcttcctccggatctagtaatacccgcgttaaagtgggatccttgcagacaacagccaaggacgctgtgcacaattctttgtggggcaaccgaatagcgccatcatttccccagcccctggacagcaaacctctactgtcacagagggaggcagtcccccccggtaatatcccccagaggcccgatcgcctgcccatgtctgacactttcaccgacaattggacggatggtagtcattatgacaatactgggttcgtagcagaagagacaaccgctgaaaacgccaactctaaccctctcttgagctctaaatctagatccacgagctctcacgggaggcgacctttgattagacaggataggatagtcggagttccgctcgagctggaacaatctacccaccgtcatacaccggaaaccgaggttccgcccagtaatccctggcaaaactggacgagaacaccaagccctttcgaggatagaacggctttcccatccaagttggaaactacgccaaccacgagccccctacccgagagaaaggagcatattaaggaatcaacggaaatcccaagtccatttagtcccggagtaccttgggagtatcatgattcaaatccgaatagatctctgagcaacgtgttcagtcaaattcactgtagaccagagagcagtaagggtgtgatatctatctcaaagagtactgagcgcttatcacctttaatgaaggacatcaagtctaacaaattcaaaaaatcacagtctattgatgagatcgatataggaacatataaggtgtacaacattccactcgagaattacgccagcggctctgatcatcttggttctcatgagcgtcccgataagatgctaggccccgagcacgggatgtcatccatgagcagatcccagtctgttcctatgctggacgacgagatgttgacatatggcagcagcaagggccctcagcagcagaaggcctcgatgacaaaaaaagtataccagtttgaccagagctttaaccctcaagggtcagtggaggttaaggcagagaaacggattccacctccttttcagcacaatcccgagtatgtgcaacaggcaagtaaaaacatagctaaagacttgatttccccacgcgcgtacaggggctacccacccatggagcagatgttttctttttctcaaccttccgtcaatgaggatgccgtagtcaacgcccagttcgcctcccaaggagcccgggcgggctttctgaggcgcgctgactcactggtgtctgccaccgagatggcgatgttccgccgggtgaacgagccgcatgagctgccacctactgatcgctatggaaggccaccttatagaggggggctggatcgccagtcctccgtgaccgtgaccgagagccagttcctcaagcggaacgggcgctacgaagatgaacatccatcttaccaagaggtcaaggcccaggcaggttcttttcctgtaaagaacttgacacaaagacggccgttatcagcaagatcatactccactgagtcctacggcgctagccagactcgaccagtttccgcacggcccaccatggctgctctcttggagaagatcccgtccgattacaatcttggaaactatggagacaagccctcagacaattccgacctgaagacccgccccacacccgttaaaggggaggaaagctgcgggaaaatgccagcagattggagacagcagctactccgacatattgaggctcgacgactggaccgtaccccatcccagcagagtaacattctggataatgggcaggaagatgtcagccccagcggccagtggaacccataccctctgggcaggagagatgttccacctgacactatcactaagaaggccggcagccatattcagaccttaatgggaagccagagcctgcaacacaggagtcgtgaacagcaaccatacgaaggcaatatcaacaaagttaccatccagcagttccagtcccccctgcccattcaaataccttctagccaggccacacgcggaccgcagccaggcagatgcttgatacaaactaaaggacagaggtctatggatggctaccctgagcagttttgcgtgcggatcgaaaagaacccaggactaggtttttccattagcggtggtatcagtggccaggggaatccattcaagccatccgacaaaggcatctttgttactcgagtgcagcccgatggtcccgcgagtaacctccttcagccaggtgacaaaatcttgcaagccaatggacactcgtttgtgcatatggaacacgagaaggccgtactcctgctaaaatcatttcagaacacagtggaccttgtgatccagcgcgaactcacggtatag

SEQ ID NO: 122111 - DNA, 654 bp, synthetic construct
  misc_feature 1..654: note = Description of Artificial Sequence: Synthetic coding sequence
  source 1..654: mol_type = other DNA
atgatggagaacctgatcagaggccgcaatcctccccagtaccagcggtctccctgtaaagaagtccgcgctgcactgaggaagagacctgaggaggagctccagtgcttggaaatgaccaccaagcgtaagattattggacgcctggttccttgtagatgctttagaggagaagaggagataatcagcgtgctggattactcccattgttcactccagcaagtgccaaaggaggtcttcaactttgagagaacactggaagaactgtatctagatgccaaccaaattgaggagttacctaagcaactctttaactgtcaggcactgaggaagttatccatcccagataatgatctatccaatcttcccaccaccattgcctcactagtcaacctgaaagagttggacatcagcaagaatggagtgcaggaattccccgagaacatcaagtgctgtaaatgcttgacaataattgaagccagcgtcaatccaataagtaaactgcccgacggcttcactcagctccttaaccttacccaactgtaccttaacgatgccttcctggaattcctccctgccaacttcggacgtttggtgaaacttcggattctcgagctccgagaaaatcacttaaagacgctgcctaatatctag

SEQ ID NO: 122112 - DNA, 2466 bp, synthetic construct
  misc_feature 1..2466: note = Description of Artificial Sequence: Synthetic coding sequence
  source 1..2466: mol_type = other DNA
atgactaaaatgctcggcaagctccggattgccccaagctttccacaacccctagattccaagcctttactttcccagcgagaagcggtaccccctggcaatatccctcagagaccagaccgcctccctatgagtgatacctttacagacaactggactgatggaagtcactacgacaacaccggctttgtggccgaggaaacaaccgccgaaaacgcgaattcaaacccactgctctcttcaaagtcccgatcaacgagctctcacggacgtcgccccctgatccgacaagaccggatcgttggcgtccctttagaactggagcaatcgactcaccgccacacacccgagactgaggtgcccccctctaatccctggcagaactggacaaggactcctagcccattcgaagaccgtacggcttttccttcaaagctggaaacaaccccgaccacctcccctttaccggagcggaaggaacatatcaaggagtcaacagagatcccatcgccttttagccccggtgtgccctgggaataccatgatagcaaccccaatcgttctttgtcaaatgttttttcccagattcattgtcgccccgagagcagcaagggtgtcatatccatttctaagtccaccgagcgcttgagtccactgatgaaggatatcaaaagcaataaatttaaaaaatcgcagagtattgacgaaatcgacatcggaacctacaaggtctataacattcccctggagaactacgcgtccgggagcgaccacctaggatcccacgaaagacctgacaagatgttgggtccggagcacggaatgtcttccatgagccggtctcagagcgtgcctatgcttgacgacgaaatgctcacttatggcagtagcaagggcccccagcagcaaaaagctagtatgactaaaaaggtgtaccagttcgaccagtccttcaatcctcagggcagcgttgaagttaaagcagagaaacggattccccctccgtttcagcataacccagagtacgttcagcaggcttctaaaaacatcgccaaggatctcatcagcccaagagcctacagagggtaccctccaatggaacaaatgttttcattcagtcagccgtcggtaaacgaggatgccgtggtaaatgcacagtttgcctctcaaggagctagggctggcttccttcggcgcgcggattcactggtgtcagcaaccgaaatggccatgttccgccgggtcaatgagcctcatgagcttcctcccacggatcgatatggcaggcctccatacagggggggattggatagacagtccagcgtcactgtaaccgagtcgcagtttttaaagcggaacggaagatacgaggacgaacacccatcctaccaagaggttaaagcccaggcaggcagttttcctgtaaagaatctgacccagcggagaccactcagcgccaggagctattcaacagagagctacggcgctagccagacccggcccgtgagtgcccggcctactatggctgcattgcttgagaagattccaagcgactacaacctgggaaattatggcgataagccatcagacaattctgatttgaagacgaggcccactcctgtgaaaggtgaggagagttgtggtaagatgcctgcagattggcgccagcagttgctgaggcacattgaagccaggaggctggaccgcaacgccgcttataagcataacactgtgaaccttgggatgctcccctatggcggtataagcgcaatgcacgccggtcgatcaatgacactgaaccttcagactaagagtaagtttgatcaccaggagttacctttacagaagacgcctagccaacagtccaatatcctggataacggccaggaggacgtgtctcccagtggacagtggaacccctaccctctgggaaggagagatgtgcctcctgatacaatcacgaagaaagcaggtagtcacattcaaacacttatgggctcccagagcctccagcatcgttcgcgcgagcagcaaccctatgagggcaacataaacaaagtcactatccagcagtttcagtctcccctgcctattcagatcccctcctcccaagcaacacggggtcctcagcccggacgctgccttatccaaaccaagggacagagatcgatggacggataccccgaacaattttgtgtgaggattgagaagaacccaggcttgggcttctcgatcagcggcggtatctctggacagggcaacccgtttaagccatctgacaaggggatcttcgtaactagggtgcagcccgatggcccagcctccaatctgcttcagcccggagacaaaattctccaggccaacggacatagcttcgtacacatggaacatgagaaggcagtccttttactaaaatcttttcagaacaccgtggacctggtgatccagagggagttaaccgtgtag

SEQ ID NO: 122113 - DNA, 2433 bp, synthetic construct
  misc_feature 1..2433: note = Description of Artificial Sequence: Synthetic coding sequence
  source 1..2433: mol_type = other DNA
atgatcccagtgacagaactacgatattttgcagatacacagcctgcctacaggatcctgaagccctggtgggatgtgttcacagattatatctctatcgtgatgcttatgattgccgtgttcggaggtactctccaagtgacccaggacaaaatgatttgccttccctgcaaatgggtgacaaaggatagctgcaatgatagctttcgcggatgggcagcacccggacctgagccaacgtaccccaacagcactatcttacctacccccgataccggtccaacaggaatcaagtatgacctggatcggcatcagtataactacgttgatgctgtatgctacgagaacagactccattggttcgccaaatacttcccatacttagtgctcctacacactctcatcttcttggcctgctccaatttttggttcaagttcccacggactagctcaaagctcgaacatttcgttagcatcctgctgaagtgcttcgactcgccttggactacaagggccctgagtgaaacagttgtggaagaatctgaccctaagcccgccttctctaaaatgaacgggtcaatggataagaagagcagcaccgtctccgaagatgtggaggccaccgttccaatgctgcagagaacaaaaagcaggatcgaacagggaatcgtggaccggagtgaaactggcgtgttggacaagaaagagggggaacaggcaaaggccctttttgagaaagtgaagaagtttcggactcacgtggaggaaggagatattgtttatcgcctgtacatgcggcagaccatcatcaaggtgatcaagttcatcttaataatctgttacaccgtctactacgtgcacaatattaaattcgatgtagactgcactgtggacatagagtctctcaccgggtataggacctaccgctgtgcccacccactggcaaccctcttcaaaatcctggcatcattctacatctccctggttatcttttacggcctgatttgtatgtatacgctgtggtggatgttgcgccgcagtctcaaaaagtactccttcgagtccatcagagaagagtcttcatacagcgacatcccagatgtgaagaatgacttcgcctttatgcttcacctaatcgatcagtacgatcctctctactcaaaacgttttgcagtatttctttcagaagtatcggaaaataagctgaggcaactaaacctgaataatgaatggactctggacaaactgagacagcggttaacaaagaatgcccaggacaaactagaactccacctgttcatgctgtcaggaataccagatacagtgtttgacctagtggagttggaagtactcaaactagaattgatccctgacgtgactatcccaccatctatcgctcagctgacaggcctcaaagagctgtggctctaccatactgctgcaaagatcgaggcaccggctctagcttttctgcgagagaatttgcgagccctacacatcaagtttacagacattaaagaaatccccctttggatctactcactaaagaccttagaagaactccacctgacgggtaacttgagtgccgaaaataaccgttacatcgtgatcgatgggctgagggagctcaagagactgaaggttttgcgcctgaaatccaatctttccaaactgcctcaggtggttaccgatgtaggcgttcaccttcagaaactcagcataaataatgaggggactaaactcatagtcttaaattccctaaagaagatggctaatcttacggaactggaactgatccgatgtgatctggaacgcatacctcattctattttttctctgcacaatttgcaagaaatcgatttgaaagacaataacctcaagaccatcgaggagattattagctttcagcacctgcacagattgacatgcctgaagctctggtacaatcacatcgcctacatcccaattcagataggcaacctgacaaacctcgagaggctctacctcaatcgcaacaaaattgaaaaaatacctacgcagcttttctattgccggaagctgcgttacctcgatctgtcccacaataatctcacctttcttccagcagacatcggtctgcttcagaatcttcagaatctcgccatcacagcaaacaggatcgagaccctgccacctgagctgttccagtgcaggaaactgcgggcgctacatcttggcaataacgtcctacagtcactgccaagccgcgttggggagctcacgaatctgacacaaatcgaattgaggggcaaccggctcgaatgtttgccagtggaactaggcgaatgcccgctgctcaagagatcaggtctcgttgtagaagaggatttgtttaataccctgcccccggaggtgaaggagcgattgtggagagccgataaggagcaagcttag

SEQ ID NO: 122114 - DNA, 2433 bp, synthetic construct
  misc_feature 1..2433: note = Description of Artificial Sequence: Synthetic coding sequence
  source 1..2433: mol_type = other DNA
atgattcccgtgacagagctgcgctattttgcggacacgcaaccagcgtaccggatcctgaagccatggtgggacgttttcactgactacatttctatcgtcatgctaatgatcgccgtgttcggtggcaccttacaggtcacccaagacaaaatgatctgtctgccttgcaaatgggtgacgaaggatagttgtaatgactcattccgaggctgggcggctccaggccctgagcccacctaccccaactctactatcctaccaacacccgacacaggaccaaccggaataaaatacgatttggaccgccatcagtataattacgtcgatgcagtatgttacgaaaacaggctgcattggtttgccaaatacttcccctatttggtcttattacatactctcatttttctggcgtgctccaatttctggtttaagttccctagaacctcctctaaactggaacactttgtttctatactgctgaaatgcttcgacagcccttggaccactagggcacttagcgagacagtggtggaagaatctgaccctaaaccagctttttcaaaaatgaacggctctatggacaaaaaatcaagtacagtgagtgaggatgtcgaagcgacggtcccaatgctccagcggacaaaatctagaattgaacaaggaatcgtggataggagtgaaacaggggtgttggacaagaaggagggggagcaggcaaaagccctgttcgagaaagtcaaaaagttcaggactcacgtcgaggagggtgacatcgtctacagactgtacatgcggcagactatcataaaagtgataaaatttatcctgatcatttgctacacagtatactatgtccataatatcaaatttgatgtggattgcacagttgatatcgaaagcttgaccgggtacaggacttacagatgtgcacacccgctcgcaaccctgttcaagatcctcgccagcttttacatttctctcgtgattttttatggtctgatatgcatgtatactctgtggtggatgcttagacggagcttgaagaagtatagtttcgagagtatacgggaggaatcctcgtattcagacatccctgacgtcaaaaatgacttcgcatttatgcttcacttaattgaccagtacgaccccctgtatagcaaacggtttgcagtttttctgtcggaggtctccgagaacaagctgagacagttaaacttaaacaacgagtggactctcgacaagctgcggcagagattgactaagaacgcgcaggataaactcgagctgcacctctttatgttgagtggcattccagataccgttttcgatctggttgagcttgaagtgctcaagctcgagctgatccccgacgtcaccatcccccccagtatagcccagctgacggggttaaaggagctgtggctctatcatacagcggctaagatagaggcccctgcacttgccttcctccgcgagaatctgcgagccttacatattaaattcaccgatatcaaggagattccactctggatttacagccttaagacgctagaggaacttcacctcactggcaacctgtccgcagagaacaataggtatattgtcattgacggcctgagagagctgaagagactgaaagtgctacggcttaaatcgaatcttagcaaactgccgcaagtggtgacggatgtaggagttcacctgcagaaactctctatcaataatgagggtacaaaactgatcgtgttgaatagtttgaaaaagatggccaacctcacagaactcgagctaattaggtgtgacttggagcggattccccacagcatcttctcattacacaacttgcaggagatcgacctgaaggacaataacctcaaaacaatagaggagatcatctccttccagcatctgcacaggctcacttgcctaaagctttggtataaccacatcgcgtatatccccattcagattgggaacctcacaaacctcgagaggctctatctaaatagaaataagatcgaaaagatacctactcaacttttctattgccgcaagctgagatatctggatctttctcataataacctgacttttcttcccgccgatattggactgttacagaacctgcagaatttagcaatcactgccaatagaatcgagacactgccacctgagcttttccagtgcagaaaattgagggcgttacatctgggcaataatgtgcttcagagcctgccgtcccgcgtgggcgagctgactaatctgacccagatcgagctgaggggcaataggcttgaatgcttacctgtcgaactgggtgagtgccccctgttgaagagatccggtctggtggtggaagaggatttattcaatacactgccccccgaggtcaaagagcgcctctggcgggccgacaaagagcaggcttag

SEQ ID NO: 122115 - DNA, 2433 bp, synthetic construct
  misc_feature 1..2433: note = Description of Artificial Sequence: Synthetic coding sequence
  source 1..2433: mol_type = other DNA
atgattccagtcacagaactgaggtattttgccgatacacaacccgcatatagaatacttaagccttggtgggatgtctttaccgattacatcagtattgtaatgttgatgatcgctgtatttggaggaaccttacaagtgacccaggacaaaatgatttgcttaccttgtaagtgggtcactaaggactcatgcaatgactcttttcgcggctgggcagcgcccgggcctgagcctacgtatcctaatagcaccatcttaccaacccccgataccggaccgacaggaatcaagtatgacctcgatagacaccagtacaattacgttgatgccgtatgctacgagaacaggctgcactggtttgctaagtattttccttatttagtcttgctgcatacactgatcttcctggcgtgtagcaatttttggtttaagtttcctcggacatcatctaagctggaacatttcgtttccatcctcctgaagtgctttgattccccctggacaacaagagccctctccgagacagtggtggaggagagtgatccaaagccagcattttctaagatgaatgggtcaatggataagaagtcctccacagtgtccgaggacgtggaggcaactgtgcctatgctgcagaggactaagagtcgcattgagcaggggattgttgacaggagcgaaaccggcgttctcgacaaaaaggaaggtgagcaggcaaaagccttgtttgagaaagtgaaaaagttccgtacgcacgtggaggaaggggatatagtttacaggctgtatatgagacagactatcattaaggtcatcaagtttatattgattatttgttataccgtctattatgttcacaacatcaaatttgacgtcgattgcacagtcgatatcgagtctctgactggctatagaacatatagatgtgcgcaccccttggctaccctttttaagattttagcctctttttacatctccctggtcattttttatggattgatttgcatgtatactctttggtggatgctccggcggtccctcaagaagtactcgtttgagtctatcagagaggaaagcagttacagcgatataccggatgtcaagaatgactttgcattcatgctccacctaattgaccagtacgacccgctgtactccaagcgcttcgcggtctttctcagcgaagtctccgagaacaagcttaggcagcttaatctgaataacgagtggactctggacaaactaaggcagcgcttgacaaagaacgcccaggataagctcgagctgcacctattcatgttgtctggaatacccgacaccgtgtttgatctggtcgaactcgaagtcctcaagcttgagttaattcccgacgtcacgatccccccgagcatcgcccagctcactggactgaaggaactttggctataccataccgccgccaaaatcgaggcccctgccctggcctttcttagagagaatctgagggccttacatattaagttcacggatatcaaggaaatccccctctggatttatagtctgaagacactcgaggaactgcacttaactggcaacctctctgcagagaataatagatacattgtaatcgacgggctcagggagctcaaaaggctgaaggtgctgagactcaaaagtaacttgtctaaactgcctcaggtggtgacggacgttggagtgcatctgcagaagctaagcatcaataacgagggcaccaagctgatcgtcctgaacagccttaagaagatggccaacctaaccgaacttgagctgatccgttgcgacctggagcggattccacacagcatattctccttacacaatctgcaggaaatcgacttaaaagacaataacttgaaaaccatcgaagaaattatcagctttcagcatttacacagactgacttgtctcaagctctggtacaaccacatcgcttacatccccatccagatcggaaatctgacaaatctagagcggctgtacctgaatcgcaacaagattgaaaaaattcccacccaactgttctactgccgcaaactccggtacctggacctcagtcacaataatttgacctttctgcctgctgacattgggctcctgcagaatctgcagaacctggccatcaccgctaaccggatcgagactctgccacccgaattgtttcagtgccgtaagttacgagcgctccacctggggaataacgtcctgcagtcgctgccgtctagagtgggcgagctcacaaatctgactcagatcgaactgagagggaatcgattagagtgcctgccggtcgaattgggtgaatgccctctactgaagcggtcaggcctggtggtcgaggaggacctattcaatacgctacctccagaagtaaaagagaggctgtggcgggcagataaggagcaggcctag

SEQ ID NO: 122116 - DNA, 2412 bp, synthetic construct
  misc_feature 1..2412: note = Description of Artificial Sequence: Synthetic coding sequence
  source 1..2412: mol_type = other DNA
atgattaccctgaccgaactgaagtgtttagccgatgcacagagcagttaccacatactgaaaccttggtgggacgtgttttggtactacatcactctcattatgcttcttgtcgccgttcttgccggcgctctgcagctgacacaatcacgcgtgctatgctgtctcccttgtaaagtggaatttgataatcactgtgcggtgccttgggatatattaaaggcctctatgaatactagcagtaacccgggcactccactgccactccctctgcgaatacagaatgatctgcataggcagcagtactcttacatcgatgccgtctgctacgaaaaacagctccactggtttgccaagttcttcccatatttggtgcttctgcacacgctgatctttgcggcctgcagtaatttctggctgcattacccttctacctcctcccggctcgagcacttcgtagctatcctccacaagtgctttgatagtccatggaccacgagggccctgagtgagaccgtggcagagcagtcagtcagacctttgaaactctctaaaagtaagatcctgctgagctcgagcgggtgttcagctgacattgactccgggaagcagtcgctgccgtaccctcagcccggtctcgaatccgccggcatcgaatcacccacttcctcagtccttgataaaaaggaaggggagcaggcgaaggctatcttcgaaaaggtaaagagattcagaatgcacgtggaacagaaggacattatctatcgggtgtatttaaaacaaatcatagtgaaggtgattttgttcgttttaataatcacctatgtcccgtatttccttacccacattactcttgagattgactgctccgtggatgttcaggcatttaccggctacaagcgctatcagtgcgtgtattctcttgccgagattttcaaagtgctcgccagtttctacgtcattctggtgatcctgtatggactgacctccagctactctctatggtggatgctacgatctagccttaagcaatactcctttgaggcgctgcgggagaaatccaattattctgatatccccgatgtcaagaatgattttgccttcatcctgcacctggcagatcagtatgaccctctctactctaagcggttcagtatattcctgagcgaggtgagtgagaacaagctaaagcaaatcaacttaaataacgaatggaccgttgaaaagctaaaaagtaagctggtgaagaacgctcaagacaaaatagagttgcatctgtttatgctgaacggcctgccagacaacgtatttgagctgacagaaatggaagtgctgtcactagagcttattcctgaggtaaagttacccagcgctgttagtcagctcgtgaacctgaaagagttgagagtataccactcctccttagtggtggatcatcccgccctcgccttcctggaggaaaatctgaagatactgcggctcaaattcaccgaaatgggtaaaattcctagatgggttttccacctgaaaaatctgaaagagctctatctttcaggttgcgtgctgcccgaacagcttagtaccatgcagctcgagggcttccaagacctgaagaacctgagaacactgtatctgaagtcatccttgtcccgcataccccaggttgtgactgatttattgccaagtctccaaaaactcagcctggacaatgagggttctaaattagtggttctgaacaacctgaaaaaaatggttaacttgaaatcgctggaactgatcagctgcgatctcgagagaatccctcacagcatcttttctttgaacaatctgcacgaattggacctcagggagaacaaccttaaaacagtcgaggagatcatttcatttcagcacctacagaatctctcctgtcttaagctgtggcataacaacatcgcttacataccggcacaaattggcgcactcagtaacctggagcaacttagcctcgaccacaacaacatcgaaaacttgcctctgcagctgttcctgtgcactaaactccactatctcgacctgtcttataaccacttgacctttattcctgaggaaattcagtatctcagtaaccttcagtattttgcggtcactaacaataatatcgaaatgctccccgatggactgtttcagtgcaagaaactccagtgtctgctcctagggaaaaactctctgatgaacctgagtccccatgtgggcgagttgtctaatctcacacatctcgagcttatcggcaactacctcgaaacactcccccctgaactcgagggatgccagtccctcaagcggaactgcctcattgtggaggaaaatcttttgaacactctacctttacccgtcacagaacgtctgcagacatgcctcgacaaatgctag

SEQ ID NO: 122117 - DNA, 2412 bp, synthetic construct
  misc_feature 1..2412: note = Description of Artificial Sequence: Synthetic coding sequence
  source 1..2412: mol_type = other DNA
atgataaccctcaccgaattgaagtgccttgcggatgcacagagcagttatcatattcttaagccttggtgggacgtcttttggtattacatcacgctgattatgctcttggtggcagtgttggccggcgccctgcagctcacgcagtcaagggtcctgtgctgtttaccatgtaaagtcgagtttgataatcactgtgccgtgccttgggatatattgaaggctagtatgaatacgtcgtctaatcccggtacccctttacctcttcctctcaggattcaaaatgacctccaccgacagcagtattcatacatcgacgccgtatgttatgaaaagcagcttcattggtttgccaagttctttccatacttggtgctgcttcatacactgattttcgccgcttgctcaaatttctggctccactacccgtccaccagctcaaggcttgagcatttcgtcgctatattgcacaaatgtttcgactccccctggacaacaagggcactgagcgaaacagtggctgagcagtctgtgagacctttgaagctttcgaagagcaagatcctgctgagttccagtgggtgcagcgcagacatagactccgggaagcaatcacttccctacccccagccagggctggagtccgccggcatcgagtctcctacttcctctgtcctggacaagaaagaaggagagcaagccaaagccattttcgaaaaagtgaagagatttaggatgcatgtggaacaaaaagatattatttatagggtgtatctgaaacagatcattgtgaaagtgatactgtttgtcctcattattacatacgtgccatatttcctgactcatattacacttgaaattgattgtagtgtggatgtgcaggccttcactggttacaaacgttatcagtgcgtctattctctggcagaaatatttaaggtacttgcaagtttctacgtgatactggtgattctgtacggcctaacgtcttcatatagtttgtggtggatgcttcgcagcagcctcaagcaatactctttcgaggccttgagggaaaaaagcaactactccgatattcctgatgtcaagaatgatttcgccttcattttacacttggctgaccagtatgaccctttgtattcaaaaaggttttctatctttctctccgaggtttccgagaacaaactgaaacagataaatcttaacaatgaatggactgtcgagaaactgaaatcaaaattggtcaagaacgcccaggacaagatagaactccacctgttcatgcttaacgggcttcccgataatgtctttgagctcactgaaatggaggtcctgagcctggagttaatcccagaagtgaagcttccttcagcggtaagccagctagttaacctgaaggagttgcgcgtgtaccacagtagcctggtagttgatcacccagctctagcatttctggaggagaacctgaagatcctgagactgaagtttactgagatggggaaaattcctagatgggtcttccatctgaagaacctaaaggagctatacttgagcggctgcgttctgccggaacagctttccaccatgcaactggagggcttccaggacctgaagaatctccgtacactgtacctgaagtcatccttgagcagaatcccacaagtggtcactgacctcctgccgtccctacagaaactgagtctggacaacgaaggctctaaactcgtggtgttgaacaacctgaagaaaatggtgaacttaaaatcactcgaactgatctcctgcgatctggaaagaattcctcacagtatattttctctgaacaatctccacgaactggacctcagggaaaacaacctgaagacggtggaggagatcataagcttccagcacttgcagaatctcagttgcctgaagctctggcataataatatcgcatacatcccggcacagatcggggcactgtcgaacctagaacagctgtccttggatcacaacaatattgagaacctaccactccaactttttctgtgtactaaattgcattacctagatctgagttataatcatcttactttcatcccggaggaaatacagtacctctcgaatctccagtatttcgccgtaacaaataacaatatcgagatgctgcccgacggcctattccagtgtaaaaaactccagtgcttacttctagggaagaacagtttgatgaacttgtccccccatgtgggtgagctgtccaacctgacccacctcgagcttatcggcaactatttggagaccctgcccccggaactcgagggttgccaaagcctaaaaaggaactgtctgattgtggaggaaaacttgctgaacactctgcctttaccagtgaccgagcgtcttcagacctgtctggataaatgctag

SEQ ID NO: 122118 - DNA, 2412 bp, synthetic construct
  misc_feature 1..2412: note = Description of Artificial Sequence: Synthetic coding sequence
  source 1..2412: mol_type = other DNA
atgataacgctgactgagctaaagtgcttagcggatgcccagagctcgtatcatatattaaaaccatggtgggacgtgttttggtattacatcacattaataatgctgcttgtcgcagttctggccggtgcactgcagctcacccagagtcgcgtgctatgttgccttccctgcaaggtggagttcgataatcattgcgccgtaccctgggacatattgaaagctagcatgaatacaagctctaatccaggcacacccctacctttgcccctaaggattcaaaatgacctccaccgccaacagtatagttacattgacgctgtgtgttatgagaagcagctgcactggttcgctaaattctttccgtacttagtacttcttcatacactcatatttgccgcttgcagtaacttctggcttcactacccaagcacctcatccaggttggaacacttcgtggctatccttcacaaatgcttcgactcaccttggaccacacgggccctgtctgagaccgtggctgaacagagcgtgcggcctctcaagctgagtaagagtaagattctgctgtcatctagcggctgttcagccgacatagactccggtaagcagtccctgccatacccccaacccggactggaaagcgctggcatcgaatcgcccacctcatctgtgctcgacaagaaagagggggagcaggcgaaggcaatcttcgaaaaggtgaaacgcttcagaatgcatgtggagcaaaaagacattatttatcgtgtttacctgaagcagataattgttaaggtcatcctgttcgttcttataatcacctacgtgccgtatttcctgacacatatcacactcgagattgactgttctgtcgacgtccaagccttcacaggctataaaagatatcagtgcgtgtatagtctggccgagatcttcaaggtactggcttcattttacgtgatcctagtgattttgtatggcctgacctcctcttactccctgtggtggatgctgcgctccagcctcaaacagtactcttttgaagcgttgcgggagaagagcaattatagcgacatccctgatgtgaaaaacgacttcgcctttatcctgcacttagcggaccaatacgatcctctatactccaaacgcttcagtatctttctgtccgaagtgtctgaaaacaagctaaagcagattaatctgaataatgaatggaccgtggagaagctcaaatctaaactggttaagaacgcccaggacaagatcgagctccatctcttcatgctcaacggactgcctgacaacgtcttcgagctgaccgagatggaggtactctcactcgagctcataccagaggttaaattaccatcggccgttagccagttagtgaacttaaaggagctgagggtctaccatagctccttagtggtggaccaccctgctctagcatttctcgaggagaatctgaaaatcttgcgccttaagttcaccgaaatgggaaagattccgcgctgggtgttccacttgaagaatctgaaggagttgtacttaagtggttgtgtcctcccagaacagctgtcaactatgcagttggagggctttcaggatcttaagaatctgaggaccctctacctcaagtctagcttgagcagaatccctcaggtggtcaccgatctcttaccctcactccagaaattgtccctggacaatgaaggcagcaagttggtggtactgaacaacctaaaaaagatggtgaacctgaaaagtcttgagctgatcagttgcgatttggagaggatccctcattccatcttttcactcaataacctccacgagttagatctgcgggaaaacaatctgaaaactgtggaagaaataatatctttccagcacctccagaatctgtcgtgcctcaagctgtggcacaataatattgcttatatcccagcccagatcggagcgctgtccaacctcgagcagttgtccctggaccacaacaacatcgagaatctcccgctgcagctttttctgtgcaccaagctccattatctcgacctgtcctacaatcatctcactttcatccccgaggaaattcagtacctcagcaacttgcaatacttcgcagttaccaacaataacatagaaatgctgcctgacgggctatttcagtgcaagaagcttcagtgtctgttgctcggtaagaacagcctgatgaatcttagcccacatgtgggggagttaagtaacttaacacacttagagctgatcggcaactacctggagacacttccacccgagctcgaggggtgtcagagtctcaaacgcaattgtttaattgtggaggagaacttgctgaataccttacctctgcctgtgacagagcggctgcaaacttgcctcgacaagtgttag

SEQ ID NO: 122119 - DNA, 312 bp, synthetic construct
  misc_feature 1..312: note = Description of Artificial Sequence: Synthetic coding sequence
  source 1..312: mol_type = other DNA
atgattacccttaccgaacttaagtgcttagcagacgcccagagctcttatcacatcttaaagccctggtgggacgtattctggtactacattaccttgattatgttgctggtagcagttttggcaggggcattgcagctgacgcagtcccgggtcctttgttgcctgccttgtaaagtcgaatttgataaccactgcgccgtcccctgggatatccttaaagcttccatgaataccagctctaaccccggaaccccgttgccattacctctcaggatccagaatgacctacatagacagcaatatagctag

SEQ ID NO: 122120 - DNA, 693 bp, synthetic construct
  misc_feature 1..693: note = Description of Artificial Sequence: Synthetic coding sequence
  source 1..693: mol_type = other DNA
atgattaccctgaccgagctgaagtgtctggctgacgcccaatcctcctaccatattcttaagccatggtgggacgtcttctggtactacattacgttgattatgctgctagtcgccgtcctggcaggagctttgcaactgacccagtcgcgtgtcctgtgctgccttccctgcaaggttgagttcgataatcactgcgccgtgccttgggacattcttaaggcgtccatgaacactagctctaacccggggacccctttgccattgccattacgtatccagaatgatctccaccgccagcagtattcctatatcgacgccgtatgttacgaaaagcagctgcactggtttgccaaattcttcccgtatctggtgcttctccacacactgattttcgcggcctgctctaacttctggctgcattatcctagcactagctcccgactagaacactttgtggccatcctccacaagtgttttgactccccgtggaccactcgcgccctctccgaaaccgtcgcagagcagtccgtgcgcccgttgaaattgtccaaatccaaaatcctgctgtcctcctccggatgctctgccgatattgactctggcaaacagtctctcccttatccgcagcctggtctagaatcagcagggatcgagtctcctacgtcaagcgtcctgacagagggagggtag

SEQ ID NO: 122121 - DNA, 2412 bp, synthetic construct
  misc_feature 1..2412: note = Description of Artificial Sequence: Synthetic coding sequence
  source 1..2412: mol_type = other DNA
atgatacctgtaacagagttccgccagttctctgaacaacagcctgcgttcagagtgctgaagccctggtgggacgtgttcaccgactacttatctgtagctatgctgatgatcggggtgtttggctgtactctgcaagtaatgcaggataagattatttgtctgccaaaaagagttcagcccgcccaaaaccatagcagtctctcaaatgtctcccaggccgtggccagcacaactcctttgccccctccaaaaccaagcccggccaacccaatcaccgttgaaatgaagggccttaaaaccgacctcgacctgcagcaatacagcttcataaatcagatgtgttatgagcgcgctcttcattggtatgcaaaatatttcccatacctggtcctgatccacactctggtgtttatgctttgttcaaacttctggtttaaatttcccggctcgagtagcaagatcgagcactttatttccatcctcggaaagtgctttgactccccttggactaccagagcgctgagcgaggtatctggcgaagatagtgaggagaaagataatcggaagaacaacatgaacagaagcaataccatccagtccggaccagaggactccctggtaaactcacaaagcctcaagagcatccctgaaaaatttgtggtggacaaatccacagctggggcactggacaagaaggagggcgagcaggccaaggccctgtttgaaaaagtgaaaaaatttaggttgcatgtcgaggaaggcgacattctctatgccatgtacgtacggcagaccgttctcaaggtgattaaattcctaattatcatcgcgtataactctgcacttgtgagtaaagttcagttcaccgtggattgcaatgtggacatccaggatatgactggttacaagaatttttcttgcaatcacacaatggcacacctcttcagtaagctgtccttctgctacctctgctttgtctcaatctacggattaacatgtctctataccctgtattggctgttttaccggtcccttagggaatactccttcgagtatgtgagacaggagaccggaatcgacgacataccggacgtaaagaacgatttcgcgtttatgctacatatgatagaccagtatgaccctctgtattccaaaaggttcgccgtgttcctatccgaggtaagcgagaataaactcaaacagttgaatctgaataacgaatggactccagataagctgaggcaaaagcttcaaaccaacgcccataaccggctcgagttacctctcataatgctatctgggctgcctgataccgtgttcgagataaccgaacttcaaagtctgaagctggaaattattaagaacgtaatgatccccgcgactatcgcccaacttgacaatctgcaggaattaagcctgcaccagtgtagtgtgaaaattcattccgccgccctctcttttctcaaagaaaatctcaaggtgctttcagtcaaattcgatgacatgcgagagctgcccccatggatgtacgggttacgcaacctggaagagctttacctggtgggatcattgtctcacgatatctcaaggaacgtcaccctggagtctttgagagacctgaaatcattaaagatcttatcaatcaagtcgaacgtcagcaagatccctcaggcggtggtagacgtctcctcccacttgcagaaaatgtgcatccacaacgacggtaccaagctggttatgctgaacaacctgaaaaaaatgacaaacctcacagagctcgagctagtccactgtgatctcgaacgcatccctcacgctgtgtttagcctcctgagcctgcaggaactggacctgaaggagaataatctgaagagcatcgaggaaatcgtgtccttccagcatcttcgaaagctcaccgtgctgaaattgtggcataactctattacctacatacctgaacatataaagaaattgacctcccttgagcgcttatctttctcccataacaagatcgaggttttaccctctcacttattcttatgcaataagataaggtacctggatctcagttacaatgacattaggttcattccccctgaaatcggcgtgctgcaatcattacagtatttttctatcacctgcaataaagtcgaaagtctgccagatgagctatacttttgcaagaagctgaaaacgcttaagattggcaagaactctctgagtgttctctccccaaaaattggcaatttactcttcctgagctatctagacgtgaaaggcaatcacttcgagatactacccccagaattaggcgactgtcgggcacttaagcgggccgggctggtggtggaggatgcactgttcgaaacactgccatcggacgttcgtgagcaaatgaagacagaatag

SEQ ID NO: 122122 - DNA, 2577 bp, synthetic construct
  misc_feature 1..2577: note = Description of Artificial Sequence: Synthetic coding sequence
  source 1..2577: mol_type = other DNA
atgtttactttggcagaggttgcgagtctgaacgatatccagcccacatatcgcatcctcaagccatggtgggatgtttttatggattacttggccgtggtgatgcttatggtggccatattcgctgggaccatgcaactgacgaaggaccaagtggtctgtctgcctgtcctgccaagtccagtcaattctaaggcccatacccctcctggtaacgcagaagtgaccacaaatatcccgaagatggaggccgccacaaatcaagaccaggatggaagaactaccaacgatattagttttggaaccagcgcggtcactccggacattcccttaagggcaacatatccccgcaccgattttgcgcttccaaatcaagaagctaagaaggaaaagaaagacccaacaggacgtaagacgaatctcgattttcagcagtatgttttcatcaatcagatgtgctatcatttggctctaccctggtactccaagtattttccttacctggctcttatccacaccatcattctcatggtttccagtaatttctggttcaagtacccaaaaacttgctccaaggtggagcatttcgtaagcatccttggaaagtgtttcgaaagcccctggaccactaaagctttgagcgagacagcttgcgaagattcagaagaaaataagcaacggatcactggagctcaaactctgcctaaacacgtgtccacttcctccgacgagggctcaccttcagcctcgacgcctatgatcaacaagacaggattcaaattttccgccgagaaacctgtgattgaagtaccgtccatgaccatcctggataaaaaagacggagagcaggctaaagccttatttgagaaggtgagaaagtttcgagcccatgtggaagatagcgacttgatatataagctttacgtggtgcagaccgtcatcaagaccgcaaaattcattttcatcttatgctacaccgccaattttgtaaacgccatctcattcgagcacgtgtgtaaaccaaaggtcgaacacctgattggatacgaggtctttgaatgcactcataatatggcttatatgttaaaaaaattattgatctcttatatcagcatcatctgcgtgtacggcttcatatgcctgtacactctgttttggctgttccggattccacttaaagaatactccttcgaaaaggtacgcgaggaatcgtccttctcggacatccccgatgttaagaacgatttcgcgttcctgttgcatatggtggatcagtacgaccagctgtatagcaaacggttcggagtttttctgtctgaggtttccgagaataagctgcgagaaatatcccttaaccacgaatggacgtttgaaaaacttaggcagcatattagccggaacgcccaggacaaacaggagctgcacctttttatgcttagcggagttccagacgccgtgttcgacctaactgacctggacgtgttgaagctcgaactgatccctgaagccaagattccggcgaagataagtcaaatgacaaacctacaggagctgcatctgtgtcactgtcctgcaaaagtcgaacaaacagctttcagtttcctcagagaccatttgcggtgtctgcatgtaaaattcactgatgtagccgagattcccgcctgggtctatctactgaagaatttacgcgagctgtatttaattggcaacctcaattccgagaacaataagatgatagggctcgagtctctcagggagctgcggcatcttaaaatccttcacgtcaagagtaatcttaccaaggtgccaagtaatattacagatgtcgccccccacctaacaaaacttgtaattcataacgacggaacaaaacttcttgtgctgaactcactgaagaaaatgatgaatgtggcagagttagagctccagaactgtgagttggagcgaataccgcatgctattttctctttgagcaacctacaggaactggatctgaagagcaataatattcggaccattgaagagattattagcttccagcatcttaagagactgacttgcctgaagctgtggcacaacaagattgtaacaataccgccctcaatcacccacgtcaaaaacctggagtctctgtatttctccaacaacaaactggagtcacttccggtagcagtgttttctctccagaaactccgctgcctggatgtgagctacaataatattagcatgatccccatcgagattggactgctgcagaacctgcagcacttgcatattaccggtaacaaggttgatatactcccaaaacagctgtttaagtgcattaagctgagaaccctgaaccttggccaaaattgcatcacttcactgccagaaaaggttggccagctcagccagctcacccagctcgagctgaagggaaactgtctggaccggctgccagcccagctggggcagtgtagaatgctcaaaaaatccggcttggtggtggaagaccatctgtttgatacccttccactggaggtgaaggaagcactcaatcaggatataaatatcccatttgcaaacggtatctag

SEQ ID NO: 122123 - DNA, 2577 bp, synthetic construct
  misc_feature 1..2577: note = Description of Artificial Sequence: Synthetic coding sequence
  source 1..2577: mol_type = other DNA
atgttcacactggccgaagtcgcaagtctgaatgatattcaacctacgtacagaattctgaagccctggtgggacgtgtttatggactacctagcagtcgttatgctgatggtagccatttttgcaggaacaatgcagctgacaaaggatcaggttgtgtgtctgcctgtactgcccagcccagtgaattcaaaagctcacacaccaccaggcaatgctgaagtgaccaccaatatccctaagatggaagcagcaaccaatcaagaccaggatggacgaactaccaatgatatttcctttggaacctctgccgtgacccccgatatcccactgcgggccacttacccccggaccgacttcgcgctgcccaatcaggaagccaaaaaagagaagaaggatccaacaggtcggaagactaacctggactttcagcagtacgtttttattaatcaaatgtgttatcaccttgcattaccttggtactccaagtacttcccctatttagctcttatccataccatcattctgatggtttcatctaatttttggtttaagtaccccaagacttgctccaaagtcgagcatttcgtgagcatcctcggcaaatgttttgagtccccctggactacaaaagctcttagtgaaactgcatgcgaggactccgaggagaacaaacaaagaattaccggggcacagacactccccaaacatgtcagcacttccagtgacgaaggctctccgagtgcttctactcccatgattaacaagactggttttaaattcagcgctgagaagcccgtgatcgaggtgccttctatgaccattttagataaaaaagacggagaacaggccaaggccttatttgagaaggtgcgaaagttccgtgcgcacgtagaggattccgacctaatatataagttgtacgtggtacagacagtgattaaaacggcaaaattcatctttattctgtgttataccgcaaattttgtgaatgccatctcctttgagcatgtctgtaagcccaaggttgagcatctcattggatacgaggtgttcgagtgcacccataacatggcgtatatgctgaagaaactgttgatctcctacatttctattatctgcgtgtacggctttatttgcttgtatacccttttctggcttttccgcatccccctcaaagagtattcctttgaaaaggttcgggaagaatctagtttctccgacattccagatgttaagaacgatttcgctttcctgctgcacatggtagaccagtatgaccagctgtacagtaagcgcttcggagtctttctcagcgaggtgagcgaaaataagctaagggagattagcctgaatcatgaatggacctttgagaaactaagacagcacatctcccgaaacgcccaggataagcaggagctacatcttttcatgctgtcgggagttcccgacgctgtgtttgacctcaccgatctggacgttctgaagctcgaacttatccctgaggcgaagataccagctaaaatctcacagatgactaatttgcaggagttgcacttatgccactgtccagccaaggtggaacagacagccttctcctttctgagggatcacctccggtgcctccatgtaaagtttacggacgtggcagaaatcccagcctgggtgtacctcttaaagaatttacgcgaactctacctaatcggaaacttgaactcagaaaataataaaatgatcgggctggagtccctgcgcgaacttcgacatcttaagatcctacacgtgaaatcgaatctgaccaaggtcccgtctaacatcaccgatgtagcccctcatctgaccaaactggtgatccataacgacggaacaaagttgctggtgctcaactcactgaagaagatgatgaatgtggcggaacttgaactacagaactgcgagctggaacgaattcctcacgctatcttttcgttgtctaatctgcaagagttggacctgaagtcaaataatattagaactatcgaggagatcatctccttccagcatctgaagcgccttacttgtctgaagctctggcacaataagattgtcacgatcccaccctctattacacatgtgaagaaccttgaaagcttatattttagcaacaataaactcgagtctctgcccgttgcagttttcagcttgcagaagctcagatgtcttgacgtgtcttacaacaacattagtatgatacctatagaaatcggtcttctccagaaccttcagcacttgcacatcactggaaataaggtggatatcttgcctaagcagctcttcaagtgcattaaactgcgcacactgaacctgggacagaattgtattaccagcttgcccgaaaaggtggggcagctgtcacagctcacccagctggagcttaagggaaactgcctggaccggctgcccgcgcagctcggacagtgccggatgttaaagaagagcggactggtcgtcgaagaccacctgttcgataccttaccgctggaagtcaaggaagccctaaaccaagatattaatatcccatttgctaatggcatctag

SEQ ID NO: 122124 - DNA, 354 bp, synthetic construct
  misc_feature 1..354: note = Description of Artificial Sequence: Synthetic coding sequence
  source 1..354: mol_type = other DNA
atgttcacacttgcagaggttgcgtccctgaacgatattcagcccacctacaggatactgaaaccgtggtgggatgtgttcatggattacctcgctgtcgttatgttgatggtagccatctttgcgggcacaatgcaacttaccaaggaccaggtggtttgcttgcccgtgcttccttcacccgttaactctaaagcacatacacctccaggcaacgcagaggtaacgactaatattccaaaaatggaagccgccactaaccaggatcaggatgggagaacaaccaacgacatctccttcggtacgagtgctgtcacacctgacattccattgagagccacctaccctcgttag

SEQ ID NO: 122125 - DNA, 825 bp, synthetic construct
  misc_feature 1..825: note = Description of Artificial Sequence: Synthetic coding sequence
  source 1..825: mol_type = other DNA
atgtttacactggccgaagtggcaagcttgaatgatatccagccaacttatagaattctgaagccctggtgggacgttttcatggactatttagcagtggttatgttgatggtggccatatttgctggtacaatgcagctcacaaaggatcaagtcgtttgcctgcctgtccttccctcccccgtgaactcaaaggctcacactccccctggaaacgctgaggttacaaccaacatcccaaaaatggaggccgctaccaatcaagaccaggatggcagaacaacaaatgacataagtttcggcacaagcgctgtcacgcctgacatccccctccgagccacgtatccacgaacagacttcgctctgccaaaccaggaggccaagaaggagaaaaaggaccccacgggacgaaagaccaacctcgacttccagcagtatgtgttcatcaatcagatgtgctatcatctggcattgccatggtattctaaatattttccatatctggccctaattcacacaataattctgatggtttctagcaacttttggtttaagtatccgaagacatgctctaaggtggaacacttcgtgtcaatccttggcaagtgctttgagtcaccatggacaacgaaagctctgtcagaaaccgcttgtgaggattctgaagagaataagcagagaattactggcgctcaaactctgccaaaacacgtgtccacttcctccgacgagggctctccttctgcctctacaccgatgattaacaaaacaggtttcaaattttcagccgagaagcctgtcatcgaagtgccttctatgacatag

SEQ ID NO: 122126 - DNA, 96 bp, synthetic construct
  misc_feature 1..96: note = Description of Artificial Sequence: Synthetic coding sequence
  source 1..96: mol_type = other DNA
atgttcacactggccgaagtggcttcgctgaacgatatccagccaacttacagaatcctaaaaccttggtgggatgtgttcatggactacctgtag

SEQ ID NO: 122127 - DNA, 564 bp, synthetic construct
  misc_feature 1..564: note = Description of Artificial Sequence: Synthetic coding sequence
  source 1..564: mol_type = other DNA
atgtttacgctggcagaggtcgccagtctgaatgatatccagcccacttatagaatcctgaaaccatggtgggacgtgtttatggactacctggcggtagtcatgctgatggtcgctattttcgccggcactatgcagttgacaaaggatcaggttgtgtgtctgcccgtccttcctagcccggtgaacagtaaagcccatacgccccctggaaacgctgaagtgacaaccaacatccccaagatggaagccgctaccaatcaggaccaggatggacggacaaccaatgacattagcttcggcacatcagccgtgactccagatattcccctgagagcaacgtaccccaggacagactttgccctccctaaccaggaagctaagaaagaaaaaaaggaccccaccgggcgcaagaccaacctggactttcagcagtatgtctttattaaccagatgtgctaccacctggccctgccctggtactcgaagtatttcccgtatctcgcactgattcacaccattatcttaatggttagcagtaacttctggttcaaatacccgtag

SEQ ID NO: 122128 - DNA, 369 bp, synthetic construct
  misc_feature 1..369: note = Description of Artificial Sequence: Synthetic coding sequence
  source 1..369: mol_type = other DNA
atgttcaccctcgctgaggtagccagtttgaatgacatccaacctacctatcgtatactgaagccctggtgggacgtttttatggactacctggcggtcgtcatgctgatggtggctatttttgcaggaactatgcagctgacaaaggaccaggtggtatgtctgcccgttctcccctccccagtgaactctaaggcacacacccctccgggcaacgcggaggtgactaccaacattcccaaaatggaagcagcaaccaatcaggatcaggacggaagaactacgaatgatatcagtttcggcacctccgcagtgactcctgacataccactgagagcgacttatcctcggaccgacttcgccctgtag

SEQ ID NO: 122129 - DNA, 2391 bp, synthetic construct
  misc_feature 1..2391: note = Description of Artificial Sequence: Synthetic coding sequence
  source 1..2391: mol_type = other DNA
atgattcctgtggccgaattcaaacagttcaccgagcaacagcctgcttttaaagtgctcaagccctggtgggatgttctcgccgagtatctgactgtcgctatgctgatgattggagtcttcggatgtacattgcaggtcacccaggataagatcatatgcttgcctaaccatgagctgcaagagaatctctctgaggccccctgtcagcagctactgccacgcggcataccagaacagatcggcgccctccaggaggtcaaaggattaaagaataacttggacctccagcagtactcctttatcaaccagctatgctatgagaccgcccttcactggtatgcaaaatacttcccctacttggtggtgatccacacactgatcttcatggtgtgcaccagcttctggtttaagttcccaggtacgtcaagcaaaatcgagcactttatttcaattctgggcaagtgtttcgactctccatggaccaccagggccctgagcgaggtctccggagaaaatcagaaggggcctgccgctacagagagagctgctgctaccattgtggctatggcaggaaccggacccgggaaggcgggagagggggaaaaggaaaaggtgctggctgaaccggagaaagtcgtgacggaaccacctgtggtgacactgctcgacaagaaagaaggcgagcaagcaaaggctctgtttgagaaggtgaagaagttccgcatgcatgtggaagagggcgacatactgtacacaatgtatatccgccagaccgtcctgaaggtatgtaagtttttagcaattctggtttacaaccttgtatacgtggaaaaaatcagttttcttgtggcctgtagagtagaaacttcagaggtcacaggctacgccagtttctgttgcaaccatacaaaagcccacttgttttctaagctggctttttgttacatctcttttgtttgcatttatggccttacttgtatctacacactgtactggctctttcaccgccccctcaaggagtacagttttagatcagtgcgcgaggagacaggcatgggggacatccccgacgtgaaaaacgacttcgcttttatgcttcatttgatcgatcagtatgattctctctactctaaaaggtttgctgtgttcttgagcgaagtcagtgaaagccggttgaaacaactaaacttgaatcatgagtggacaccagagaagctgaggcagaaattgcagcgaaacgctgccggacggctcgagctggctctgtgcatgctgcctggtctgcctgacactgtgttcgaactgtcagaagtggaatctctacggctagaagcgatttgcgacattacgttcccacccggattgtctcagctcgtacatctccaggagttgagcctcctacatagccctgctaggctgccctttagcttgcaggtgttcttaagagaccacctgaaggtgatgagggtcaaatgtgaagagttacgcgaggtgcccctttgggtattcggtcttcggggcctcgaagagcttcatctcgagggcctgtttccccaggagctggccagggccgccactctggaatctctccgcgagctgaagcagctgaaggtgttatcactgcgttcaaacgcaggtaaagtgcctgcatctgtgacagatgtggctggtcatttacagcgcctgagcctccacaacgatggcgcccggctggtggctctaaactcattgaagaaactggcagcactccgcgaacttgagttggtggcctgtggacttgagcgcatccctcatgccgtgttctctctcggggctctgcaggaactggatctgaaggacaaccacttgagaagtatcgaggaaattctgtcttttcaacactgtcggaaacttgtgactctgagactttggcacaaccagattgcttacgtgcctgaacacgttcgcaagctacgcagccttgagcagctgtacctctcatataataaactcgaaactctgccttcgcaattaggtctctgttcaggactgcgactgctcgacgtgtcacacaacgggctgcactcactgccaccggaagttggactcttacaaaacctccagcatctggctctgtcgtacaatgctctcgaggctctccctgaggaactgtttttctgcaggaaacttagaacactactgctgggcgacaatcaattatcccagctgagcccacatgttggcgctctgcgtgccttatcgcgtcttgaactcaagggaaataggctggaagctctgccagaggagttggggaattgcggcggcctaaaaaaggcgggtctcctcgtcgaagacaccctctaccagggtcttcccgccgaagttcgggacaagatggaagaggaatag

SEQ ID NO: 122130 - DNA, 1569 bp, synthetic construct
  misc_feature 1..1569: note = Description of Artificial Sequence: Synthetic coding sequence
  source 1..1569: mol_type = other DNA
atggatttcctgttactgggtctatgcctctactggctcttgagacgaccgtccggggtcgtcctttgtctgctcggagcttgcttccaaatgttacctgccgcacctagtggctgcccccagctgtgtcggtgcgaaggccgccttctttactgtgaggccctcaacctcacagaagcccctcacaatctgagtgggcttctgggcctctcgctgagatataattcactgtcggagttgcgggctggtcagtttacagggttgatgcagttaacctggctataccttgaccataaccatatttgttcagtccagggcgatgcctttcaaaaactgcggcgagtcaaagagctcacgctttcctcaaatcagattacacagctgcccaacactacttttagacctatgcccaatctgcgtagtgtggacctttcatacaataaactccaggccctggcccccgatctattccatggtctgaggaagctgaccaccctccacatgcgcgccaatgccatccaatttgtgcccgttcggatcttccaggattgtaggtcactcaaatttctggatatagggtacaatcagctaaaatccttggcacgaaatagcttcgccggcttattcaagctgactgagcttcacctggagcataatgatctggttaaagtgaattttgcccattttccccgtctgatttccctacactcactgtgcttacggaggaacaaggtagcgatcgtggtctctagcctggattgggtgtggaacctggaaaaaatggacctcagcgggaacgagattgaatacatggaaccccacgtctttgagaccgtccctcacctgcagtcccttcagcttgatagcaaccgtctcacctatatagagccaaggatcctgaattcttggaaaagcctaaccagcattacccttgcaggcaatctttgggattgcggtcggaacgtttgcgccctggccagctggctgaataatttccagggtagatacgatggaaatttacagtgcgcatccccagagtatgcacagggagaggatgtcctggatgctgtctatgccttccacttgtgtgaagatggagctgaacccactagtggccacttgctctcggctgttaccaaccgaagtgatctgggcccccctgcttccagcgctacaaccctggctgacggcggcgagggccaacatgacggaacattcgaacccgccaccgttgctttgcccggtggtgaacatgccgagaatgcggtccagattcacaaggtggtcacaggcactatggcccttatattttcattcttgatcgtagtgctcgtgctttacgtgtcctggaaatgttttccggcatctttgcgccagctgaggcagtgctttgtgacccagcggcgcaagcagaaacaaaagcagacaatgcatcagatggcagcgatgtccgctcaggagtactacgtggactataaacctaaccacatagagggagcccttgtgatcattaacgagtatgggagctgtacctgtcaccaacagccagctcgcgagtgcgaagtgtag

SEQ ID NO: 122131 - DNA, 1569 bp, synthetic construct
  misc_feature 1..1569: note = Description of Artificial Sequence: Synthetic coding sequence
  source 1..1569: mol_type = other DNA
atggattttctgctgctagggttgtgcctgtactggttgctaaggcgccctagcggcgtagtgctctgcctcttgggggcatgtttccaaatgttaccagccgctccatcagggtgccctcaactgtgtagatgcgagggaagattgttgtactgcgaagcactgaatctgacggaggccccccataatcttagcggccttctcgggctgagtctgcggtataacagtctcagcgagcttcgggccggtcaattcactggactaatgcagctgacatggctttatctagatcataaccacatctgcagcgtgcagggcgacgccttccagaaattaagacgcgtcaaagagctaacactctcttccaatcagattactcagctcccaaatactactttccggcctatgcctaacctcagaagcgtggatctttcttataataagctccaggcccttgctcctgatttgttccacggtctaagaaaacttaccaccttgcacatgagggctaatgccatccagtttgtgccagtgcgcatttttcaggactgtaggtctctcaagttcctcgatatcgggtacaaccaactgaagagtctggctaggaactcctttgctggtttatttaagttaacagagctgcatctggaacacaatgacctggtgaaggtcaacttcgcccactttcccagacttatctctctgcattctttgtgcctccggagaaacaaggtggcgatagtggtgtcctctctcgattgggtgtggaacctcgaaaaaatggatctatccgggaacgagattgagtacatggagccacacgtgttcgaaactgtcccccatctgcagagtttacaactcgattcaaacaggctgacttacatagaacccaggattctgaacagttggaagagcctgacaagtatcactctggcaggaaatctatgggactgcgggagaaacgtttgtgctctggcttcctggctgaataattttcagggacgttacgacggcaacctacagtgtgcatctccggaatacgcccagggagaagatgtgttggatgccgtgtacgccttccacttatgcgaggacggggcagagccaacctcgggccatcttctgtctgctgtcactaatcgatccgatcttggccccccagctagttccgctaccaccctggctgatggcggtgaagggcagcatgacggcacatttgagccagcaacagttgccttaccggggggtgaacatgctgaaaatgccgtgcagatccacaaagtagtgactggaactatggctcttatcttcagctttcttatcgttgttctcgtcctgtatgtcagctggaagtgctttcccgcaagcctccgccagcttaggcagtgctttgtgacacaacgcagaaaacagaagcaaaaacagacaatgcaccagatggcagctatgagtgcccaagaatattacgtcgactacaagccgaaccatatcgagggggctctggtcataatcaacgagtatggatcctgcacctgtcaccagcagccagcccgcgagtgcgaagtttag

SEQ ID NO: 122132 - DNA, 330 bp, synthetic construct
  misc_feature 1..330: note = Description of Artificial Sequence: Synthetic coding sequence
  source 1..330: mol_type = other DNA
atggatttcctattgctcgggctgtgtctgtactggctgttacggcggccgtccggggttgtcctctgtctgctcggggcctgcttccagatgctcccagcagcaccctctgggtgcccacagctgtgccgctgcgaaggacgcctgctctactgtgaagccttgaacctcacagaagctcctcataatctcagtggactgctgggcctgtccttgcggtataacagtctctcagagctccgagcgggacagtttaccggcctgatgcagttgacctggctgtacttggatcacaatcatatctgctcagtccagggtgatgcattctag

SEQ ID NO: 122133 - DNA, 672 bp, synthetic construct
  misc_feature 1..672: note = Description of Artificial Sequence: Synthetic coding sequence
  source 1..672: mol_type = other DNA
atggattttctgctgcttgggctctgcctctactggctcctgcgacgccccagcggagtggtgctctgcctgctgggagcatgtttccagatgctcccggccgcaccgtccggctgccctcagctttgccggtgcgaaggcaggctcctttactgcgaggctttgaacctgaccgaggctccccacaacctgtccggcctgctggggctctcccttcgttataactccctgagcgaacttcgtgctgggcaattcacgggcctgatgcagctgacatggttgtatctggaccacaaccatatttgctcggtgcagggggacgcgttccagaaactgcggagggtcaaggaactgaccctctccagtaatcaaattacccagctaccaaatacaactttcagaccaatgcctaacctcagatcggtcgaccttagctataacaaactgcaggccttggcccctgatttattccatggcctccggaagctgaccactttacatatgagagcaaatgcgattcagtttgtgccggtgcgaatatttcaggactgtagatccttgaagtttctggacattgggtacaaccagctaaaatcattagctcggaacagcttcgctgggttgtttaaactgacagagctgcacctggaacacaatgatctcgtgaaatag

SEQ ID NO: 122134 - DNA, 1569 bp, synthetic construct
  misc_feature 1..1569: note = Description of Artificial Sequence: Synthetic coding sequence
  source 1..1569: mol_type = other DNA
atggacttccttctgctcgggctgtgcctctattggttactgaggagacccagtggcgtcgtcctgtgcctgctgggcgcatgcttccagatgctccctgctgccccctctgggtgtccccaactctgtcgatgcgaaggcaggttgttgtactgcgaggctctgaacctcacagaggctccccataacctctccggcttgctcgggctctctcttaggtataacagtttatcagaactgcgagcaggacaattcaccggcctcatgcagctgacctggctgtatctcgatcacaatcatatatgtagcgtgcaaggcgacgctttccagaaactgcgtagagtgaaggagctgacgcttagttctaaccaaataacccagctccctaatactaccttccggcctatgccgaatcttaggtcagtcgacttatcatacaataaacttcaagctcttgctccagacctgttccacggactaaggaaactcaccactctgcatatgcgcgccaacgccatccagtttgtgccagtccgtattttccaggactgccggagcctgaagttcctggacatcggttacaaccagctgaaatccttagccagaaactcgttcgccggtttattcaaactgacggagctccatcttgagcacaacgatctggttaaagtcaacttcgctcattttccacgtctcatctccttacattcactctgcttgaggcggaataaagtcgctatcgtggttagttcccttgactgggtgtggaacctcgaaaagatggacctgtcaggaaacgagatcgagtacatggagccgcacgtgttcgagaccgtcccccacctccagagcctgcagttagacagtaatcgattaacctacattgagccacgcattcttaattcttggaagtctctcacaagcatcaccctggcaggcaatctgtgggactgtggccgcaacgtttgcgccctagcctcttggctcaacaactttcagggccgttatgatggaaatctccagtgcgcgagcccagaatacgctcagggagaggacgtcctagatgctgtgtatgcattccacttatgtgaggacggcgcagagcctacgtcggggcacttgctaagtgccgtgaccaaccgatccgatctggggcctcctgccagcagcgccaccacacttgccgatggtggagaaggtcagcacgacggcaccttcgaacctgctacagttgccttgcctggtggggagcacgcggaaaacgccgttcagattcacaaagtcgtcaccggcaccatggcattgatattttcattcctgattgtagtgctcgtgttgtatgtgagctggaagtgctttcccgcatctctacggcagttacgccaatgcttcgtgacccagagacgaaaacaaaagcagaagcaaaccatgcatcaaatggcggctatgtctgcccaggaatattatgtggattacaaaccaaaccacattgagggggccctggtcattattaatgaatatggttcctgtacctgccaccagcagcctgctcgtgagtgtgaagtgtag

SEQ ID NO: 122135 - DNA, 1569 bp, synthetic construct
  misc_feature 1..1569: note = Description of Artificial Sequence: Synthetic coding sequence
  source 1..1569: mol_type = other DNA
atggacttcctgcttctgggcttgtgcctatactggctgctaaggagacccagcggagtcgtcctttgtttactgggggcttgctttcagatgttgccagcggccccttctggatgtccccagctatgccgctgcgaggggcggctactgtactgtgaagccctgaacctgaccgaggcaccacacaatctcagtggtttgcttggcctgagccttaggtacaattcgctgtctgaactgcgggctggacagttcacaggccttatgcagctcacgtggctgtatttagatcataatcatatttgtagtgtccaaggcgacgcattccagaagctgagaagggtgaaggagctcacgttgtcatctaatcaaattacccaactgccaaatacgacatttaggcctatgcccaatttgagatccgtcgacctgtcgtataacaagctgcaagctctggctcccgatctgtttcacggtctgcgaaaactgacaaccctgcacatgagagcgaatgctattcagtttgtccctgtgagaatttttcaggactgccgctctctcaagttcctggacattgggtacaaccaattgaaatccctggctcgcaactcttttgccgggttgtttaaacttaccgagttgcacctcgaacacaatgacctcgttaaagtgaacttcgcccattttcctaggctgatctctcttcatagcctttgtttaagaagaaacaaggtggccatcgtcgtgtcaagcttggactgggtctggaacctggaaaaaatggatctgtccggaaacgagatcgagtacatggaaccacacgtgttcgagactgtgcctcacctccagagcctccagctcgattcaaaccgactcacttatatcgagccccgtatcctgaattcctggaaaagcctcacatccatcacattggctgggaatctgtgggattgtggccggaatgtgtgcgccctcgcatcatggctaaataattttcaagggcgatatgacggtaatcttcagtgtgcctcaccagagtacgcccagggcgaggacgttctcgatgccgtgtatgcgttccatctgtgtgaggatggtgccgagcctacttccggccatctactgtcagctgtgacgaatcgcagcgacttgggccctccagcttcgagtgccacaacgctagctgatggcggagagggacagcacgacggcacctttgaacccgctaccgttgccttgcccggcggcgaacacgccgagaacgccgtacaaattcacaaggtcgtgacgggaactatggcactgatcttctccttccttattgtcgttttggtgttatatgtctcatggaaatgtttccctgcaagcctccgtcaactcagacagtgtttcgtgacacagcgccggaagcagaagcagaaacagaccatgcaccagatggccgcaatgtccgcacaggaatattacgtcgactacaagcctaaccacatcgagggggccctggtgatcattaacgaatacggctcctgcacatgccaccagcagcctgcccgtgagtgtgaggtctag

SEQ ID NO: 122136 - DNA, 552 bp, synthetic construct
  misc_feature 1..552: note = Description of Artificial Sequence: Synthetic coding sequence
  source 1..552: mol_type = other DNA
atggatttccttctcctcggcctgtgcctgtactggctactgcgccgcccatccggagtggtcctctgcttactgggagcatgctttcagatgctgccggcggcaccatccggctgtcctcaactgtgccgctgtgagggaagattgctctactgcgaagcactcaacttgacagaggccccccacaatctgagcggactgttagggcttagtctgagatacaattcactgagtgagctgagggcaggtcagttcacaggtttgatgcagctgacctggctctaccttgaccacaatcatatctgttcggtgcagggagacgcattccagaaattaagacgggtgaaggaactgacgctcagctccaatcagatcacccaattgccaaacacgacctttaggccaatgcctaacctgaggtcagttgacctcagctacaacaagttacaggctttagcgcccgatctcttccacggtcttagaaagctgaccaccctacatatgcgagccaacgcaatacaatttgtccccgtcaggatttttcaggactag

SEQ ID NO: 122137 - DNA, 1551 bp, synthetic construct
  misc_feature 1..1551: note = Description of Artificial Sequence: Synthetic coding sequence
  source 1..1551: mol_type = other DNA
atgggtttgcacttcaaatggccccttggtgctcccatgctggccgccatctacgctatgtccatggtgctgaaaatgctgcctgccctgggaatggcgtgcccgcccaaatgcaggtgcgagaaactcctcttttattgcgatagtcaggggttccatagtgtaccaaacgcgactgacaagggctctctagggctgtcacttcggcacaatcacattaccgaactcgagagggaccaattcgcttcgttctctcagctgacttggctgcatctggatcacaatcagatcagcactgtcaaggaagacgcctttcagggactctacaagttaaaggaattgattttaagttcgaacaagattttttatctacccaataccacttttacccagctgatcaatctacagaaccttgacctgtcatttaatcaattgtcctctctgcacccagaactcttctacggcctgcgtaaactccagacactccacctacggtccaattccctcaggacaatccccgtgcggctgttttgggattgcaggagcctcgaatttctggatctgtcaaccaacaggctcaggagcctggccagaaatggtttcgccggccttattaagctgagggaactgcatctagagcacaatcaactcactaagatcaatttcgcccacttccttcggctgagcagtctgcataccctcttcctgcagtggaataagattagtaacctgacatgcggaatggagtggacttggggcaccctggagaagttggatcttaccggcaacgagattaaggcgatagatctcactgtgttcgaaaccatgccgaatcttaaaattctcctaatggacaataacaaacttaactcactggacagtaagatcctgaacagtctgcgaagtttaaccacggtgggtctttcaggcaacctgtgggagtgctctgcccgcatttgcgctctggctagctggctgggaagcttccagggtcgctgggaacactcaattctttgccactcacccgaccatacacagggggaagacatactcgacgcggtgcacggttttcagctgtgctggaacctgtctaccaccgtcacagtgatggcaaccacatatagggatcctaccacagaatatacgaaacgcatttcttcatcatcctatcacgtcggcgacaaagaaatcccgacaaccgctggaattgcagtgaccacggaagagcatttcccagagcccgacaatgcaatatttacacaaagagtcattacaggaactatggctctcctatttagttttttctttataatttttattgtctttatctcccgtaagtgttgccctcccacactgcgccgtattcggcaatgttcaatggtgcagaaccaccggcaactgaggtcccagaccaggttacacatgagcaacatgagtgatcagggaccctataacgaatacgaacctacgcacgagggcccattcattattattaacggctacggccagtgtaagtgtcagcagctgccctacaaggaatgtgaggtatag

SEQ ID NO: 122138 - DNA, 1746 bp, synthetic construct
  misc_feature 1..1746: note = Description of Artificial Sequence: Synthetic coding sequence
  source 1..1746: mol_type = other DNA
atgggctttaatgtcatccgactcctctcaggttctgccgtagccctggtgattgcccccaccgttctcctcacaatgctctctagcgctgagcgtggctgcccaaaggggtgtaggtgcgagggcaaaatggtgtattgtgaatctcaaaaattgcaggaaatcccaagctccatctccgcggggtgcctcggcctttcacttaggtataactctctccagaaactgaagtacaatcaatttaaggggctcaatcagctgacatggctatatctggaccataaccacatctccaatatcgacgaaaatgcatttaacggtatacgaagactgaaagagctgattctgagttcgaaccggatttcctacttcctgaacaatacattccggcccgtcacaaacctccggaacctcgatcttagctataatcaactgcactcactgggaagcgaacagtttcgaggccttcgcaagctgctgtcgctgcacctgagaagcaatagtttgagaaccatccccgtgcgtatcttccaggactgccggaacttggagctgcttgacttgggatataatagaatcagatccctggcacggaacgtctttgccggtatgatcagactgaaagagctgcaccttgaacacaaccagttttccaagctcaatcttgctctgtttccaagattggtgtcactccagaatctgtacctacaatggaataagattagcgtaatagggcagactatgtcttggacctggagtagcctgcagcgtttggacctttctggaaatgagattgaggccttctctggcccttcagtctttcagtgcgtgcccaacctgcagcggctcaacctcgactctaacaagctaacatttatcgggcaggagatccttgattcctggattagcttgaatgacatctccctggccggaaacatttgggagtgttctagaaatatttgttctctggtaaattggctgaagagctttaaaggcctgcgagagaataccattatatgtgcctcccctaaagagttgcagggtgtgaatgtgatagatgcagttaagaactactccatctgcgggaaatccacaaccgagagattcgatcttgcgagggcactccctaaacccacctttaaacccaagctccctcgacccaaacacgagtcaaaaccccctctgccgcccactgtgggcgccacagaacctggccccgagaccgatgccgacgccgagcacatatcttttcacaaaattattgctggatccgttgccctgttcttgtctgttctggtgatcttgctggtcatatacgtcagctggaagcgctaccccgccagcatgaagcaactgcagcaacgatctttgatgagaagacaccgcaaaaaaaaacggcagtctctcaaacagatgacacccagcacccaagaattctatgttgactacaaacctactaataccgagacatctgagatgctgcttaatggcaccggcccttgcacctacaacaaatccgggtccagggagtgcgaaatacccctgagtatgaacgtgtctactttcctggcctacgaccagccaacgatctcctattgcggggtgcatcacgaattgctcagccataaaagctttgagaccaatgcacaggaagataccatggaaacccacttggagactgaactggatctcagtaccatcactaccgccgggagaatctccgaccacaagcagcagctggcttag

SEQ ID NO: 122139 - DNA, 1746 bp, synthetic construct
  misc_feature 1..1746: note = Description of Artificial Sequence: Synthetic coding sequence
  source 1..1746: mol_type = other DNA
atggggtttaatgtgatcagactgctttctgggagcgctgtcgcattagttatcgcccccaccgtcttactcactatgttatccagcgctgagcgcgggtgtcccaaaggatgtcggtgcgaggggaagatggtgtactgcgaaagccaaaaactgcaggaaatcccatctagtatttccgcaggctgtctgggcctttcactccgctacaacagtttgcagaaacttaagtacaaccagtttaagggactcaatcagcttacatggttatacctggaccacaaccatatttctaatattgacgagaacgcctttaacgggattcggcggttgaaggagctgattctgagtagtaaccggatctcatacttcttaaataacacatttcggcccgtcacaaatctgcgcaacttagatcttagctataaccagctccacagcttagggtcagagcagtttaggggccttcgaaaactcctgtctctgcatttaaggagtaactcgctcagaacaattccggtgagaattttccaggattgcagaaatctggagctgttagacttaggctataataggattcgctcactggccagaaatgtttttgccggaatgatcaggctgaaggaactgcacctggaacacaaccagttctctaagctaaacctggccctcttcccacgcttggtgtcacttcagaatttatacctacagtggaacaagatttccgtgataggtcagaccatgtcctggacgtggtcttccttgcagagactcgatctcagtggaaacgagattgaggccttcagcgggcccagtgtgttccaatgcgtgcccaatctgcagagactgaacctggacagcaataaactcacattcatcggccaggaaatcttggactcctggatcagtttaaacgacattagtctcgccgggaatatctgggagtgttctcgaaacatctgctcactggtgaattggcttaagtcatttaagggactcagagagaatacaatcatttgcgcatcccccaaggaactccagggagttaatgttatcgatgccgtgaagaattactcaatctgcggcaaaagtaccacggaaagattcgatttggccagggctctgcccaaacccaccttcaaacctaaactgccaagacctaaacatgagagcaagccaccactgcctcctactgtgggtgcgaccgaacccggacccgaaactgacgctgatgctgagcatatcagctttcacaagatcatagctggatccgttgccctttttctgagtgtcctggtgattctgttggtaatctatgtgagctggaagcggtatcccgctagcatgaaacagctgcagcagaggtccctgatgcgaaggcaccgcaagaagaagagacagtccctcaagcagatgacacctagcacgcaggaattttacgtcgattacaagccaactaataccgagacgagcgagatgctgttaaacgggaccggcccctgtacttacaataagagcgggtctagggagtgcgagattcccctttcgatgaacgtgtcaacatttttggcatacgatcagcctaccatctcatattgcggcgttcatcacgaactcctctcgcataagtctttcgaaactaacgcgcaggaagacacgatggagactcacctagaaactgagctggatctaagcacaatcactaccgcgggcagaattagcgaccacaagcaacaactcgcttag

SEQ ID NO: 122140 - DNA, 1557 bp, synthetic construct
  misc_feature 1..1557: note = Description of Artificial Sequence: Synthetic coding sequence
  source 1..1557: mol_type = other DNA
atgggatttcatctgattacccagctgaaaggaatgtcagtggtgttggtgctgcttcccactctgctcctggtgatgcttactggagcccagcgtgcatgcccaaagaactgtcggtgcgatggcaagatagtttactgcgagagccacgcgtttgcggacattcctgagaacatctctggagggtctcagggactgtcacttagattcaactctatccagaagctcaaaagcaatcagtttgcaggcctcaaccaactgatctggctgtacttagaccacaactacattagtagcgtggatgaggacgcctttcaggggatccgacgcctcaaggaactgattctttcctcgaacaagattacctacctccacaacaagaccttccatcctgttcctaatctgagaaatcttgacctaagttacaacaaactgcagaccctccagagcgagcagtttaaggggctcaggaagttaattatcttgcatctgcgtagcaattccttgaagaccgtgcctatccgggtttttcaggattgccgcaatctagactttttagatctgggctacaaccgcctgaggtccttgtcacgaaacgccttcgctggcctcctgaagctcaaggagctgcacctggagcacaatcaattctctaagattaattttgcccatttccccagactgttcaacctgcgtagtatctatctccagtggaacagaattcgcagtatttcacaaggtctgacttggacctggagcagcctgcacaacctcgacctgagcggcaacgacattcaagggattgagccagggacgtttaagtgtttgcctaatctccagaagttgaatctcgacagcaataagctaaccaatatatcccaggaaacagtgaatgcctggatatccctcatatctatcactctatccggcaatatgtgggaatgctcgaggtctatttgccctcttttctattggttaaaaaattttaagggtaacaaagagtcaactatgatatgcgcgggcccaaaacatatacagggggaaaaggtctcagatgcagttgagacatacaacatttgctctgaagttcaggttgtcaatactgagcggagtcacctagtgccacagaccccgcagaaacccctgatcattcccagacccaccatcttcaagccggatgttacccagagtacgttcgagacacccagtccatccccagggtttcagatacccggggctgagcaggaatacgaacacgtttccttccacaaaataattgctggtagcgtcgccctcttcttatcagttgctatgattttattagtgatttatgtctcttggaaacgttatcccgccagcatgaaacagctgcagcagcactcactgatgaaacggcggcgaaaaaaagcccgcgagagcgaacggcagatgaatagccctttgcaggagtattacgtggactacaagccaactaactctgaaaccatggacatctcagttaacggcagtgggccgtgtacatatactatttctggcagtcgagagtgcgaggtctag

SEQ ID NO: 122141 - DNA, 1773 bp, synthetic construct
  misc_feature 1..1773: note = Description of Artificial Sequence: Synthetic coding sequence
  source 1..1773: mol_type = other DNA
atgggattccatctcatcacacagctcaagggaatgtccgtcgtactcgtcctgctgccaacgctacttctagtgatgcttactggagcccagcgggcttgccctaagaactgccgttgtgacggaaaaatagtgtactgtgagagtcatgcttttgccgatataccagagaatatttcaggagggtctcagggactgagtctgcgctttaactcaatccagaaactgaaatctaaccagttcgctggactaaaccagcttatctggctgtatctcgatcacaattacatcagctctgtggacgaggacgcgttccagggtattcgccggttaaaagaactcattttgtcatcaaataagatcacatacctgcataataaaacttttcatcccgttccgaatctgcgaaatctggacctgtcctacaataaactgcaaactctacagtctgagcagttcaaggggctgagaaaactgatcattctccaccttcgcagcaattcactgaagacagtgcctatccgggtcttccaggattgtcggaacctggacttcttggatctgggatataatcgtctgagaagccttagcagaaatgcatttgccggcctgctgaagctcaaggagcttcaccttgagcacaaccagttctccaagataaacttcgcccattttccccgcttgtttaaccttcgttcaatatacttgcagtggaaccggatccgctccatctctcagggactcacatggacttggagtagtctgcataatctggacctcagcgggaatgacatccaaggaatcgagccgggcacttttaagtgcctgcctaatctacagaagctcaatctggacagcaacaaattgactaacataagtcaggagactgtgaacgcatggattagccttattagcatcactctcagtgggaacatgtgggagtgttcgaggtctatctgtccattgttttattggcttaaaaacttcaaaggaaacaaggagtccactatgatctgtgccggacccaaacacatccagggagaaaaggtttcagatgctgttgaaacctataacatttgttcagaggtccaagtggtcaacactgagaggtctcacctggttcctcagaccccacagaaacctctgattatcccacggcctactattttcaagcctgatgtaacccagagcacatttgagacgccctctccttcccctggctttcagatccccggggcagagcaagaatatgagcacgtgagtttccataaaattatagctggcagcgtcgctctattcctgtcggtggccatgattttactcgtaatctatgtgtcttggaagagataccctgcttccatgaaacaattacagcagcactccctaatgaagcgaagaaggaagaaggccagagaatctgaaaggcaaatgaacagtccacttcaagagtactatgtagattacaagcccactaactcagaaacaatggacatctccgtgaacgggagcggaccatgcacgtacaccatttctggcagcagagagtgcgagatgcctcatcatatgaaaccactcccctattactcatacgatcagccagtgatagggtattgccaggcccaccagcctctccacgtcacaaaaggctatgagaccgtatctcccgagcaggatgaaagcccagggttggagctgggtcgtgaccacagcttcatcgcaacaatcgcaagatctgccgcacccgctatttacctggagaggattgctaactag

SEQ ID NO: 122142 - DNA, 1773 bp, synthetic construct
  misc_feature 1..1773: note = Description of Artificial Sequence: Synthetic coding sequence
  source 1..1773: mol_type = other DNA
atgggcttccacctgatcacacagctcaagggcatgagcgtggtgctggtcctgcttccaacattgctcctcgttatgctgactggagctcagcgcgcctgtcccaagaattgtcggtgtgacgggaagattgtgtactgtgaatcgcacgccttcgcagatatacccgaaaacatatctgggggttcccagggactctcactccggtttaatagtattcaaaagcttaagtcgaaccaatttgctgggctgaaccagctgatatggctgtatctcgaccacaattacatttccagtgtggacgaagacgccttccaaggcattagacggctcaaagagctgatcctgagttcgaacaagatcacttatctccataacaagacctttcaccctgttccaaatctccgtaacctcgacctctcgtacaacaagcttcaaacgttgcagtcagagcaattcaaagggctaaggaagttgatcattctgcaccttcggtccaatagtcttaagaccgtgcctatccgtgtgttccaggactgcagaaatctcgatttcctggatctcggatataaccgcctgcgatcactgagcaggaacgctttcgctggcctcttgaaactcaaagagctgcacctcgagcacaatcagttctccaagattaacttcgcacacttccctcggttgtttaatttgcggtccatctacctacaatggaacaggattcggtctatctcacaaggactcacgtggacatggtcctctctgcacaacctcgacctgagtggaaacgatattcagggcatagaacctggcacatttaagtgcttaccaaatctgcagaagttgaatctcgattctaacaagctcaccaatatctcccaggagactgtgaacgcttggatcagcctgattagcatcacacttagtggtaatatgtgggaatgtagcaggtcaatctgcccacttttctattggcttaaaaattttaaaggcaataaagaatctaccatgatttgcgcgggtcctaagcacattcagggagaaaaggtgtcagacgctgtggagacttacaatatatgctctgaggttcaggtagttaacaccgagcgaagtcacttggttccacaaacacctcagaagcctctcattatacctcgacccaccatcttcaagccagacgttacacagtctacctttgagacccctagcccaagccctgggtttcagatacccggcgccgagcaggaatatgaacacgtgagcttccacaagattatagctgggtctgtggcactcttcttgagcgtggctatgattcttctagtgatctatgtgtcttggaagaggtatccagccagtatgaagcagttgcaacaacactcactgatgaaaaggcgcaggaagaaagctcgcgagagcgagaggcagatgaactctccgctgcaggaatattatgtggactacaagcctaccaattccgaaaccatggatatctctgttaacgggagcggaccctgtacctatacaattagcggttcccgtgaatgtgagatgccacatcatatgaagccgcttccctactatagctacgaccaaccagtaattggatattgccaggcccaccagccgttgcacgtgacaaagggatatgagactgtgtctcccgagcaggatgagtccccgggactggagctgggtcgcgatcattcttttatcgccactatcgcccgttccgctgcccccgctatttatctggaaagaatcgccaattag

SEQ ID NO: 122143 - DNA, 1776 bp, synthetic construct
  misc_feature 1..1776: note = Description of Artificial Sequence: Synthetic coding sequence
  source 1..1776: mol_type = other DNA
atgcccgggtttcatcttattacccaactgaaaggtatgtcagtcgttctcgtgctgctgcccactctgctgttggtcatgctgacgggggcgcagcgggcctgtccaaagaattgcagatgtgacggtaagatcgtttactgcgaaagtcacgctttcgccgacatcccagaaaacatttccggcggctcacaaggtttatctttgcggttcaattccatccaaaagctgaagtctaaccaattcgccggactcaaccaattgatctggttatacctcgatcataattacatctcctcggtggacgaagatgcattccaaggcatcaggaggctgaaggagctgatcctgtcatccaacaagataacatatctgcacaacaagacctttcaccccgtgcccaacctcaggaaccttgacctgtcctataacaaattacagaccttgcaatcggagcaatttaagggtcttcgaaagcttatcatcctgcacctgcgatccaattcattaaaaactgtgcctattagggtgttccaggattgccggaatttagacttcctcgatctgggctataatcggttgagatccttgtccagaaacgccttcgctggtctcttgaaattgaaggagctgcatctggagcacaaccagtttagcaaaattaatttcgctcattttcctcgattgtttaacctccgcagtatctacttgcagtggaaccgtatccgcagcatcagtcaggggctgacatggacttggagctctttgcataatctggatttaagcggtaatgatatccagggtatagagcctgggacgttcaagtgtctgcccaacctgcagaaattaaatctcgactcgaacaagttgacaaacatcagccaggagaccgtcaatgcttggatcagcctgatatctattacactgtccggcaatatgtgggaatgtagtcgttccatctgccccctgttttactggctgaaaaacttcaagggaaataaagaatctacaatgatctgcgccggcccaaagcacatccagggagaaaaggtatctgatgctgtggagacctataatatttgtagcgaagtgcaggttgtgaacacagagcgcagtcatttagtacctcagaccccacaaaagccgctcattattccccgcccaaccatattcaaaccggacgtaacccagagcacattcgaaaccccctcgccctcgcccggtttccaaatcccgggggctgaacaggagtacgaacacgtttctttccacaagataatcgccgggagtgtggccctttttctttctgtcgctatgattctgctggtcatatatgtgtcttggaagcggtaccccgcttccatgaaacagcttcagcagcattccttaatgaaacgccggagaaagaaggcgagggagagtgaaagacagatgaatagcccactgcaagagtattatgtcgactacaagccaactaactcggagactatggacatttcggtcaacggatcaggcccttgtacgtacaccatttcaggctccagggaatgtgagatgccacatcacatgaagccactgccctactatagctacgatcagccagtgattggctattgccaagcccatcagcctcttcatgtgaccaaaggttatgaaacagtgtcacccgagcaggatgaaagtcccggactcgagctgggtcgggatcattccttcatcgcaaccatcgcccgttccgcggcccctgctatctacttagaacgaatcgccaattag

SEQ ID NO: 122144 - DNA, 579 bp, synthetic construct
  misc_feature 1..579: note = Description of Artificial Sequence: Synthetic coding sequence
  source 1..579: mol_type = other DNA
atgaacaaaagggactatatgaacacgtccgtccaggaacctccgcttgattattcgtttcgcagcattcatgtgatccaggatctggtgaacgaggagcccagaactggattgagacctctaaaaagaagcaagtccgggaagagtctgacccagtcgttgtggctgaataataacgtgcttaatgatctgcgggattttaatcaggttgcctctcagttgctggaacacccagagaatctcgcttggatcgatctcagtttcaacgacttgacaagcattgatccagtgctgaccacatttttcaacctaagcgtactttacctccatgggaattctatccagagactgggagaggttaataaactggcagtgctgcctagacttcgatcgctcaccttacatggcaaccccatggaagaagagaaagggtacagacagtacgttttatgtacactgagtcgaatcactacctttgacttttcaggggtcacaaaggcagaccgcacaaccgccgaggtatggaaacggatgaacattaaacctaagaaagcgtggacgaagcagaatacactttag

SEQ ID NO: 122145 - DNA, 876 bp, synthetic construct
  misc_feature 1..876: note = Description of Artificial Sequence: Synthetic coding sequence
  source 1..876: mol_type = other DNA
atgggcacaccatggagaaagcgcaagggaattgcgggcccaggcctcccagacctaagttgcgccctggtgctgcagccacgagcccaggttggaacaatgagtccggctatagctctggcatttctgccactcgttgttacactcctggtcagatatcgtcattacttccggctgctggtgaggaccgtgctgcttaggagcctccgagattgtctatccggcctgagaattgaggagcgcgctttttcctacgttctcacacatgcgttacccggcgaccccggacatattttgaccactttagaccactggtccagccggtgcgaatatttgagccacatggggcctgtgaagggccagatcctgatgcggctggtcgaggaaaaggcccccgcttgcgtcctagaattggggacatattgcggttactcaactcttctcatcgctcgggccctcccaccgggtggcagacttctgaccgttgagagagaccctagaaccgcagccgtggccgagaagctgatcagactggccggatttgatgaacatatggtggaactgatcgttggctcctccgaggatgtcattccttgtctccgcacccagtatcagctgagtcgcgccgatctggtgctactggcccatagacctcgctgctatctacgggatttgcagctgttggaggctcatgcactactgcctgcaggagcgacggtcctggcagaccacgtgctcttccccggcgcccctcgatttctacagtacgctaagagctgcggcagatatcgctgtaggctgcaccataccgggctcccggacttcccagcaattaaagatgggattgcccagctgacatacgcgggaccaggctag

SEQ ID NO: 122146 - DNA, 441 bp, synthetic construct
  misc_feature 1..441: note = Description of Artificial Sequence: Synthetic coding sequence
  source 1..441: mol_type = other DNA
atgaacaagcgcgactatatgaatactagtgttcaagaacctcctcttgattacagtttccggtccattcatgtcatccaggacctggttaacgaggagccacgaactggactgaggcccctgaagaggagcaaaagtggaaagagtctgacccaatcgctttggctgaacaacaacgtgctgaacgatttgcgcgactttaaccaagtggcatcccagttgctggagcatccggagaatctggcctggattgacctaagttttaacgatctgacctccattgatccagtgctcaccaccttttttaacctgtctgtcctgtacctgcacggcaacagcatacagcggcttggagaggtgaacaaactcgcagtccttcccagacttcggtctctgaccttgcacggcaacccgatggaggaggagaaaggataccgctag

SEQ ID NO: 122147 - DNA, 756 bp, synthetic construct
  misc_feature 1..756: note = Description of Artificial Sequence: Synthetic coding sequence
  source 1..756: mol_type = other DNA
atgggcactccttggcgaaagaggaagggtatcgcagggcccggcctgcccgatctttcctgtgcactggtcctacaacctagcctgcgcgattgcctgtccgggttacgcattgaggagagagcttttagctatgtcctgacacacgccctccctggggaccctggccatattctaaccaccctggatcactggtctagcaggtgtgagtacttatctcacatgggacccgtgaagggtcagatcctcatgagattagtggaggaaaaggcgccagcatgtgttctggaactcggaacttattgcggatacagcactctcctgattgctcgagcactaccccctggaggaaggttgcttactgtggagcgtgatcccaggacggccgctgtggcagaaaagcttattagactggcaggattcgatgagcatatggtggagctgatcgtgggatcttccgaagacgtgattccatgcctgaggacacagtatcagctctctagggcagatttggtcctacttgcgcaccggccaaggtgctaccttagggatctgcagctgctggaggcacatgcccttctgcctgctggggctacagtactggctgaccatgtattgttccctggcgcgcccaggtttctgcagtatgccaaaagctgcggaaggtaccgctgccgactgcatcatactgggctccccgattttcccgccatcaaggatgggattgcacagctgacatatgctggaccaggctag

SEQ ID NO: 122148 - DNA, 876 bp, synthetic construct
  misc_feature 1..876: note = Description of Artificial Sequence: Synthetic coding sequence
  source 1..876: mol_type = other DNA
atgggaactccttggcggaagagaaagggcatcgccggcccagggctaccagatctgagttgtgcccttgtgttacagccgcgggcccaggtaggaacaatgtctcctgcaatcgcactcgctttcttgccacttgttgtcacgctgctcgtccgttatcggcactacttcaggttgcttgttaggaccgttcttctgcgctcccttcgggattgcctttccggtctgagaatcgaggaacgtgccttttcttatgtcttgacccacgctctgcctggcgatcctgggcacatcctgacaactctcgatcactggagctctcgctgtgagtacctgagccatatgggaccggttaaagggcaaatcctgatgaggcttgtcgaggaaaaagctccagcatgcgtactagagctgggcacttattgcggatacagcacgcttctcatcgcccgagcattgcccccgggcggcaggttgttgaccgtcgagcgcgacccacgcacagccgcagtggccgaaaagttgattcgcctcgcaggtttcgatgaacacatggtcgagcttatcgtgggtagttcagaagatgtcatcccttgtctacgaacgcagtaccagttgtcgcgggcagatcttgtactcctcgcgcaccgaccaaggtgttatctgagggatctccagcttttggaagctcacgccctcctgccggctggcgctactgttctcgctgaccatgtgttattccccggggctcctagatttttacagtatgctaagagctgcggtagatacagatgtaggttgcatcatacgggcctccccgactttccggcgataaaggacggcatcgcccagcttacatatgcgggaccaggttag

SEQ ID NO: 122149 - DNA, 477 bp, synthetic construct
  misc_feature 1..477: note = Description of Artificial Sequence: Synthetic coding sequence
  source 1..477: mol_type = other DNA
atgaataagcgcgactacatgaatactagcgtgcaggagcctcctctggattactcattccggtcaattcatgtgatccaagacttggtaaatgaggagccacggaccggattgaggcccctgaaacgaagtaaaagcggcaagagcctcacacagtcgctatggctgaataataacgtgctaaacgacctgagagatttcaatcaggtcgccagccagctactggagcaccccgaaaatctcgcctggatcgatcttagttttaatgatcttacttcaatagacccagtcctgacaaccttttttaacctgtcagttttatatctgcatggcaattctattcaacggttgggcgaagttaacaagctggccgttctcccacggctgaggagtctgaccctgcatggtaatcccatggaggaagaaaaggggtaccgggtccctggatcggtggaaatgccccacaggccaccatag

SEQ ID NO: 122150 - DNA, 279 bp, synthetic construct
  misc_feature 1..279: note = Description of Artificial Sequence: Synthetic coding sequence
  source 1..279: mol_type = other DNA
atgaacaagagagattacatgaatacatccgtccaggaaccccccttagattatagttttcgttccatacacgttattcaggatctggtgaatgaggagccccgtaccggcctgaggccgctcaagagaagtaaaagcggcaaaagccttacacagtcgctttggcttaataacaatgtcttaaatgacctcagagattttaaccaagtggcaagtcagctactggagcaccccgaaaaccttgcttggatagatctgtcctttaatgatcttacctag

SEQ ID NO: 122151 - DNA, 579 bp, synthetic construct
  misc_feature 1..579: note = Description of Artificial Sequence: Synthetic coding sequence
  source 1..579: mol_type = other DNA
atgaataagcgagattacatgaacacaagcgtgcaggagcctcctctggactatagctttaggagcatccacgtgatccaggatctggttaacgaagagccacggacaggactgcgcccgctgaaaaggtcaaaaagtgggaagagcctgacccagtcgctgtggctcaataataacgttctgaacgacctgcgggattttaaccaggtcgcttctcagctcctagagcaccccgagaaccttgcctggatagatttgagtttcaatgacttgacttcaatcgaccccgtgctaactacctttttcaatctttctgtcttgtaccttcacggtaattctatccagcgactgggggaggtgaataagttggccgtgctgcctaggttacgaagcctaacccttcacgggaaccccatggaggaagaaaaggggtatcgccagtacgtgctgtgtaccctctctagaatcacaacttttgacttctctggggtcacgaaagccgatcggactaccgctgaggtgtggaagcggatgaatattaagcccaaaaaggcctggacaaaacagaacacactgtag

SEQ ID NO: 122152 - DNA, 477 bp, synthetic construct
  misc_feature 1..477: note = Description of Artificial Sequence: Synthetic coding sequence
  source 1..477: mol_type = other DNA
atgaacaaacgagactacatgaacacctccgttcaggagcctcctctggattattcattccgatccatccatgtcatccaggatctggtgaacgaggaacctagaactgggctgcgcccgctcaagcgcagtaagtctgggaaatccctaacgcagagcctgtggcttaataataacgtgctgaatgacctgagagattttaaccaggtcgcgtcgcagcttcttgaacatcccgagaacttggcttggatagacctgtcctttaatgatctgacttctatcgaccccgtcctcaccacctttttcaacctgagcgtattgtacctgcatggcaattccatccagcgcctcggcgaggtcaataagctggctgtgttgccacgcttacgttcgttgactctgcacgggaatccgatggaggaggagaaagggtatcgagtccccgggagcgtggaaatgccccaccgccctccttag

SEQ ID NO: 122153 - DNA, 315 bp, synthetic construct
  misc_feature 1..315: note = Description of Artificial Sequence: Synthetic coding sequence
  source 1..315: mol_type = other DNA
atgaacaaacgagattacatgaatacctccgtgcaggagccaccactcgactattcctttcggtccatccatgtcatccaggacctggtaaatgaggaaccccgcacgggcctgcgtccacttaaacggagtaagtctggaaagtctctgacccaaagcctgtggctaaacaacaacgtgctgaacgacctgagggactttaaccaggtagcttcacagctgcttgagcacccagaaaatttggcctggattgacctttcatttaatgacttgacatcaatcgacccagtactcactactttcttcaatctgtag

SEQ ID NO: 122154 - DNA, 525 bp, synthetic construct
  misc_feature 1..525: note = Description of Artificial Sequence: Synthetic coding sequence
  source 1..525: mol_type = other DNA
atggtggaattccagcctagcgtgaccgacctggtgaatgaagagcctagaacaggccttaggccgctcaaaaggtcgaagtccggaaagtctcttacccaatctctgtggttgaacaacaatgttttaaacgatctccgggatttcaaccaggtcgcctcacagctgctggaacacccagagaacctcgcatggattgatctcagtttcaatgatctcacttcaatcgacccggtgttgaccactttcttcaatctgtcagttctatacctgcacgggaatagcattcagcggcttggggaggttaacaaactggcagttctcccccggttgaggtcattaactctccatggcaatccaatggaggaagagaagggatacaggcaatacgtgctgtgcaccctctcaaggataactacattcgacttttcaggtgtaaccaaagctgacaggactacagctgaggtttggaagagaatgaacatcaaacccaagaaagcatggacaaaacaaaacacactctag

SEQ ID NO: 122155 - DNA, 3231 bp, synthetic construct
  misc_feature 1..3231: note = Description of Artificial Sequence: Synthetic coding sequence
  source 1..3231: mol_type = other DNA
atggcagagtttacgtcctataaggagacggcatcaagccgccatctgaggtttaagctgcagagtctctcccgcaggttagatgagctggaagaggcaacaaaaaatcttcagaaggctgaggatgaactgcttgacctgcaagacaaggtgattcaagccgaaggctccaattctagtatgctggcagaaatcgaagtcctgaggcaaagagttctccggattgaaggaaaggacgaggagatcaagagagcagaggacctatgtcgactgatgaaagaaaaactcgaggaggaggagaatctaactcgggaacttaagagtgaaattgaaagattgcaaaaacgtatggctgaactcgagaagttggaagaggcctttagcagaagtaagaatgactgtacacagctatgcctatccctcaatgaggagcggaatctcacaaagaaaatcagctcagagctggaaatgctgcgcgttaaggttaaggagctcgagagcagtgaggaccggctagacaaaaccgagcagagtctggcgtccgagctggaaaaactcaaaagcctaacactgtcctttgtaagcgaacgaaaatatctcaacgaaaaggaaaaagaaaacgagaagctaataaaagagctgacgcagaagctggaacagaacaaaaaaatgaatagagactatacacggaacgcaagcaacctcgagcggaatgatttgaggattgaggacggcataagcagcaccctaccaagcaaagagtcaaggagaaagggtgggctggattatctgaagcaggtggaaaacgaaactcgtaacaaatcagagaatgaaaagaatagaaatcaggaagacaacaaggtgaaagacctgaatcaagagattgaaaaattgaaaactcagatcaaacattttgagtcgctggaggaagaacttaagaagatgaaatcgaagaacaatgatttgcaggataattatctgtccgagcaaaataagaataagctcctggcctcgcaactggaggaaatcaagctgcaaatcaagaagcaaaaagaacttgaaaatggagaagtggaaggcgaggatgctttcctttccagtaagggacgacatgagaggacaaaattccgagggcacgggtctgaagcctccgtctccaaacacaccgctagggagctgtccccccagcacaagagagagcgcctgcggaacagggaatttgcattaaacaatgaaaattactcactctcgaataggcaagtatcatccccgtcatttaccaatcgccgtgcagccaaggcctcccatatgggggtcagtactgactcagggacccaggagacaaagaaaactgaggatagatttgtcccaggaagttcacaaagcgaaggtaaaaagagtcgagaacagccctccgtgttaagtcgataccccccagccgcccaagagcatagtaaagcttggaaggggaccagcaagcccggaacggagagcggactgaagggcaaggtcgaaaagacaaccagaaccttctcagacacaactcacggatcagtgccatccgaccccctgggacgcgccgataaagctagcgacacttcatcagaaaccgtattcggcaaacgtggacacgttctggggaacggaagtcaggtgacacaggccgcaaatagtggatgtagcaaggccattggggcgcttgcatccagtcgacgatccagtagtgagggattgtccaaagggaagaaagctgccaacggcttagaggccgacaattcatgtccgaactccaaggctccagttctctctaagtatccttatagctgccgatcccaggagaacattctgcagggattttcaaccagtcataaagagggagtgaaccaacccgccgccgtcgttatggaggatagcagtcctcatgaagctctcaggtgtagggtgattaagtccagcggccgtgagaagcctgattcagatgatgatttggatatagccagtctcgttaccgccaaattggtcaatacaaccatcacacccgaaccagagcccaaaccacagcccaactcccgcgaaaaggctaagacccgcggcgcacctagaactagcctattcgagaacgacaaagatgcagggatggagaacgagtcagttaagtccgtacgggcatctactaacacaatggagctgcctgatactaatggggccggcgtcaaaagtcagcgccccttctcccccagggaggcgctcagaagcagggctataataaagccagtcatcgtcgacaaagacgtgaagaaaatcatggggggttcaggaacggaaacgaccctggagaaacagaagcccgtctctaaaccgggacccaacaaagtaactagtagcatcaccatctatcctagcgattcctcttctccaagagctgctccaggggaagcccttcgcgagcgacacaccagtactagtaacatccaggtggggctggcagagctcactagcgtatcaaaccatgtttccagccccttcgaactgtctattcacaaacatgacatcacactgcagctggccgaggccgagcgcatggccgacggtccgctgaaggacaggcctgaaactgtggttagtaggtctagcattattattaaaccaagcgatcctgttgagcggaactctcacgcaccgcctgctgaaactattaggtggaagtcgcatagtgcaccttctgaggtgggcttcagcgacgcccgccacgttactgttaggaacgcttggaaatctaggcgcgaccttaagtccctggaggatccacccaccagaataggcaagaatgtggaaagcactaactctaacgcttacactcaaagatcctccacggacttcagcgagctggaacagcccaggagctgtctcttcgaacaaggcacccggagagtcggcccaagctccggcgatgcaccggagcctagctctagacgcactcagtcttcacttaccgtgagcgaagttcttactcgccggaatcgagtgggcgatactatcaccgtggccgcttggaaccacagcgctagcatggaagaagaaggggaggactgcaccctgtctgtctaccgccagctccataactctctggatcctagtgaactgcccgggaagcagggcctcccagagagcgggagagtcagagccgaagagcgcctcagacccacacggccttgtgcagaggagaattag

SEQ ID NO: 122156 - DNA, 3081 bp, synthetic construct
  misc_feature 1..3081: note = Description of Artificial Sequence: Synthetic coding sequence
  source 1..3081: mol_type = other DNA
atggccgagttcacgtcgtacaaggagactgccagttcacgccatctgcggttcaagctccagagcctttctcgaaggctcgacgagctagaagaggcaactaaaaatctgcagaaagcagaagacgagttgctcgatttacaggacaaagtgattcaggcagagggaagtaattctagtatgctggcagaaattgaggtcctgaggcagagagtgttaagaattgaaggaaaagatgaggagatcaagagggcagaggatctatgtcgattaatgaaggagaagcttgaagaagaagagaatctgaccagagaactcaaatctgagatagagaggcttcaaaagcggatggctgagctggagaagctggaggaggctttctcaagaagcaagaatgactgtacccagctatgtctgagtctcaacgaggagaggaacctgactaagaagatatcaagcgagttggagatgctgcgggtgaaagtgaaagagttagagagtagcgaggaccgcctcgataagaccgaacagtccctggcttctgagctggaaaaactcaaatctctgactctgtcatttgtcagcgaacggaaatatcttaacgagaaggagaaagagaacgaaaagctgatcaaggaactcacgcagaagttggagcagaacaagaagatgaaccgcgattacacgcgcaatgcaagtaatttggagcgtaacgacctgagaatcgaagacgggatatccagcacgctgccatccaaggagtctaggcgtaagggcgggttagattacctgaagcaggtcgaaaatgaaactagaaataaatccgagaatgagaaaaaccgcaatcaagaggacaacaaggtgaaagatctgaatcaggagatcgagaaactgaagacccagataaaacactttgaaagtctggaagaagaactcaagaagatgaaatccaagaacaacgatctgcaggacaattatcttagtgaacagaacaaaaacaaactgctggcttcccagctcgaggaaatcaagttgcagattaaaaaacagaaagaactggagaacggagaggtcgagggcgaggatgccttcctgtcctccaaaggtaggcatgaaaggacaaaatttagaggtcacggaagtgaggcatctgtctctaagcacacagccagggagctgtcaccccaacataagcgggaaaggctccggaatcgcgaattcgccttaaataatgagaactatagcctgtccaacaggcaagtttcttctccatccttcacaaatagaagagcggctaaggcaagccacatgggcgtgtctacagacagcggcacgcaggagactaagaagaccgaagaccgttttgttcccggatcgtctcagtccgaggggaaaaaaagccgcgagcagccctctgtactttcacgttatccccctgctgcccaagagcacagtaaagcttggaaagggacttccaaacccggtactgagtctggacttaaggggaaggttgagaagactactagaaccttcagcgacaccactcacggtagcgtcccctcggatcctctgggccgtgcggacaaagcatccgacacaagctctgagacagtgtttggaaagcggggtcatgtactcggcaatggaagccaggtcacgcaggccgccaactctgggtgttctaaggccattggcgccctggctagctctagacgttctagcagcgaaggcctgtccaagggcaagaaagcagcaaacggcttggaggctgacaatagctgccctaattccaaagcccccgtcctctccaagtatccatactcctgcagaagtcaggaaaatatcctgcaggggttttctaccagccataaggaaggcgtcaatcagccagccgccgtggtaatggaagatagctcgcctcatgaggccctcaggtgtagggtgattaaaagcagcggacgtgaaaaacccgattcagatgatgatttagatattgctagcctagtcactgcgaaattagtcaatacgacaattacgcccgagccggagcctaagccccagcctaacagtcgagaaaaggcaaagaccagaggtgccccacggactagcctgtttgaaaatgataaggacgcaggcatggaaaacgaatccgtgaaatctgtgcgcgctagcaccaatactatggaactcccagatacaaatggggcaggcgtaaagtctcaacggccttttagcccaagggaagcactccgcagccgcgccatcattaagcccgtaatcgttgataaggatgtaaagaaaatcatgggcggaagcggaactgaaaccaccctcgaaaagcagaaaccagttagcaagccaggaccaaataaggtcacaagtagcatcacaatatacccgtcagattcatccagccccagggccgcacccggagaggcactccgggagagacatacatccacctctaatattcaagtcggcctagcggaactcacgtccgtttccaatcacgtgagctcacccttcgaactgtctatccacaaacacgacatcacactgcagctagctgaggctgaacggatggcagacggccctctgaaagacaggcctgagaccgtcgtatcccggtcatcgattatcattaaaccaagcgaccccgtggaaaggaactcccacgcccctcctgccgagaccatacgctggaagtctcactcagcgccgagcgaggtgggctttagcgacgcccgccacgttacagtgcgcaatgcgtggaaatccagacgagatctcaagagtctggaagatcccccaacacgcatcggaaaaaacgtggagtcgaccaattccaatgcctacactcagcgttcatccacagacttctcagaactggagcaacctagatcgtgtctattcgaacaaggaactcgccgcgtggggccatcttctggcgacgctccggagccgagtagtagaagaacccagagcagcctcacagtgtcagaagtgctcaccaggcgaaatcgcgtgggcgatacgattacagttgcagcgtggaatcattccgcttcaatgagctcctag

SEQ ID NO: 122157 - DNA, 3231 bp, synthetic construct
  misc_feature 1..3231: note = Description of Artificial Sequence: Synthetic coding sequence
  source 1..3231: mol_type = other DNA
atggctgaattcacttcctataaggagactgcttcctcacgccacttgaggtttaagctgcagagcctgtctcggcggctcgacgaactggaggaggctacgaagaatctgcagaaggccgaggatgagctgctggatttgcaggacaaggtcattcaggctgagggaagtaactcaagtatgctcgcagagatcgaagtcctcagacagagggtacttaggatcgagggaaaagatgaggaaatcaagcgggcggaggatctttgtcgcctgatgaaggagaaactggaagaagaggagaatctcacgcgagagctcaaatcggagatcgagagactgcagaaacgtatggcagagctggaaaaactggaggaggcattttcaaggagtaagaacgactgcacgcagctatgcttgtctctgaacgaagaaagaaaccttaccaaaaaaatttcatctgaactcgaaatgctgcgcgtgaaggttaaagaacttgaatcctctgaggaccgacttgacaaaacagaacaaagccttgccagcgagctggagaagttgaagtctctcaccctgtctttcgtgagtgagcgcaaatacctgaatgaaaaggagaaagaaaacgagaagcttatcaaagaacttacccagaaactcgaacagaataaaaagatgaacagggactatactaggaatgcctcaaatctggagcgcaatgatttgaggatcgaggacggaatttcgtcgactcttccctctaaagagtcaagaaggaaaggaggcctcgactacctgaagcaggtggagaatgagacacggaataagtccgagaacgaaaagaataggaatcaggaagataacaaggttaaggacctgaaccaagaaattgaaaagctcaaaacccagatcaaacatttcgagtccctcgaagaggagctgaagaagatgaaatcaaagaataacgatctccaggataactatctcagcgagcagaataagaacaaattgctcgcctctcagctggaggagataaaactacaaatcaaaaagcagaaagagcttgaaaacggagaggttgaaggagaggacgccttcttgtccagtaagggacgacatgagcgcacaaagtttcgtggtcatgggagtgaagcatccgtgagcaaacacacggctcgcgaactatcccctcagcataagcgcgaacgcctgagaaaccgggaattcgccctgaataacgagaactactccttgtcaaatagacaagtgtcgtctccatccttcaccaataggcgtgccgccaaggcatctcacatgggggtctcaacggactccgggactcaagaaacgaagaaaactgaggatcgcttcgtcccaggctcttctcaaagtgagggcaagaagtctagggagcaaccctctgtgctgtctcgatacccgccggccgcacaagagcatagcaaggcctggaagggtacctccaaaccgggcacagagtccggcctgaagggcaaggttgaaaagacaacccggaccttttccgatactactcacgggtcagtgccttctgacccactgggacgggctgataaggccagcgatacgagctcagaaaccgtttttgggaagcgcggccacgtgttaggtaatggttctcaggtaactcaggccgctaattcggggtgttcaaaagccattggcgctttagcaagctccagacgaagtagctcggaggggttgagcaaagggaagaaagccgcaaatggactagaagcagataacagttgccctaactctaaagcacccgtgctatccaagtatccatactcttgccggtctcaggaaaatattctccaaggctttagtacaagccataaagagggggtcaatcagccagccgcagtcgttatggaagacagcagtccacatgaggcactccgctgccgcgttatcaagagttccggcagagagaaacctgacagcgatgatgatctggatatcgcttctctggtaactgcaaaactcgtcaatactacaatcaccccagagccggagccgaagccacagccgaactctcgggaaaaagctaaaactaggggggccccaaggacttctctgtttgaaaatgacaaggatgcaggtatggaaaacgaatcagttaagtctgttagagcctcgacaaataccatggaactgcccgatactaatggggccggcgttaagtctcagcgccctttcagccctagagaggctctgcgctctagagctattataaagccagtaatagtagacaaggatgtgaagaaaatcatggggggatcgggcacagaaacaacgctggagaaacagaagcccgtatctaagcctggacctaacaaagtgacatccagcatcaccatttacccttccgacagctcaagtccgagggccgcccctggtgaagccctccgggagagacacacttccacctccaacatccaggtgggcttggcagagctgacatcggtctcaaatcatgtgtcctcccctttcgaactgtccatccataaacacgacattacactgcagctcgcagaggctgaacggatggccgatggacccctgaaggatcgccccgagacagttgtttcacgttctagcatcatcatcaagccttccgacccggtagagcggaactcccacgcacctccagccgaaacgatcaggtggaaatcccacagcgcgccgtccgaggttggcttcagtgacgcacggcacgtgaccgtgagaaatgcatggaagtctaggcgggatttaaaaagcctggaggatcctccaacaaggattggaaagaacgtggagtctactaacagcaacgcatacacccaacgcagttcaaccgacttctccgaactagagcagccccggtcttgtctgttcgaacaggggacccggagggttggccccagctcaggcgatgctccagaaccgtcctcaaggagaacacagtccagtctcactgtgtctgaggtcctcactcggcgaaacagagtcggggacaccatcactgtcgcagcttggaaccactcggcgagtatggaggaggagggggaagactgcaccctcagcgtgtacagacagcttcataatagtctcgacccatctgagttgccaggaaaacaaggactcccggagtctgggagggtaagagcagaggaacgattaaggccgacaaggccttgtgccgaggagaactag

SEQ ID NO: 122158 - DNA, 3231 bp, synthetic construct
  misc_feature 1..3231: note = Description of Artificial Sequence: Synthetic coding sequence
  source 1..3231: mol_type = other DNA
atggccgaattcacttcctacaaggagactgccagttcacgccatctgcgcttcaagttacagtcactatccagaaggttagacgaactcgaggaagccactaaaaatctgcagaaggccgaagacgaactcttagaccttcaggacaaagtgattcaggcagagggctcaaattcaagtatgctggcagagatcgaagttcttcgtcaaagggtactgagaattgaaggaaaggatgaggaaatcaagcgggccgaagacctgtgtcggctcatgaaagagaagcttgaggaagaggagaacctgacacgcgagctgaaaagtgaaatagagcgcctccagaaacgtatggctgagctggagaagctcgaagaagcgttttcacgtagcaagaacgattgcacacagctgtgcctttccctgaacgaagagcgcaacttaacaaaaaaaatctcctctgagcttgagatgctccgagtgaaggttaaggaattagagagttccgaagacagactagacaaaactgaacaatcacttgctagtgaactcgaaaagctaaagagcctgactctgagctttgtgtctgaaagaaaatatctgaacgagaaggagaaggaaaatgaaaaacttatcaaggagttaacacagaagctggaacagaataagaagatgaaccgcgactacacccgcaacgcatccaatctcgagcgaaatgacctgcgtattgaggacgggatctcttctactctaccaagcaaggagagccggagaaagggtggactagattacctgaaacaagtggagaatgaaacgagaaacaagtctgaaaacgagaagaacagaaaccaggaagataataaggtgaaagatttgaatcaagagatagagaagttgaagacccagatcaagcatttcgagagcctcgaggaggaactcaagaaaatgaagtcaaagaacaatgatctccaggacaactatctgtccgagcagaacaagaataagctgctagcatcccagcttgaggagataaagctccagataaagaaacagaaggagctggaaaatggtgaggtggagggagaggacgctttcctctccagcaaagggagacacgagcgtacaaagttccgcggacatggctctgaagcttcagtttccaaacacaccgcaagagagctcagccctcagcacaaaagggaaagattgcggaaccgcgagtttgccctcaacaacgagaattatagcctgagcaatcgccaggtgagtagtccctcctttaccaacagacgggcggccaaggcctcgcacatgggcgtcagtacggattccggcactcaagagactaagaagaccgaggaccggtttgtgcccggatctagccaatcagaaggtaagaaatctagggagcagccaagcgtcctgtccaggtaccctcccgccgcacaggaacactctaaagcctggaaagggaccagtaagcctggcaccgagtctggacttaaaggaaaagtcgaaaaaaccaccagaaccttctcagacaccacccacgggtctgtaccgtccgatccgttgggacgagcagataaggctagtgacacttcatctgagactgtgtttggtaagcgcggccatgtcctgggtaatggctcccaggtcacacaagcggccaactccggttgttccaaggccataggtgccctcgcgtcaagcagaagaagctcaagcgaaggcctcagcaaaggaaaaaaggccgcaaacggtctcgaggcggacaacagttgccccaattcaaaagctccagtattgagtaaatacccatacagctgtaggagccaggaaaacattctgcagggattctccacgagccataaagaaggtgtcaaccagcccgcggcggtggtaatggaagactcttctcctcatgaagctctgaggtgtcgcgtgatcaagtcttctggaagggagaagcctgacagcgatgatgacctggacatcgcatccctggtgaccgcaaagctagttaataccaccattactccagaaccagagccaaaacctcaacccaacagtcgggaaaaggcaaagaccagaggagcaccacgaactagtctgttcgaaaatgacaaagacgccggcatggaaaatgaaagtgtgaaaagcgtgcgtgccagcaccaatacaatggaattgcctgataccaacggcgccggagtgaagtcacagcgacccttcagtccccgcgaagcgttgcgcagccgcgccatcattaaacctgtcatagtcgacaaagatgtgaagaaaattatgggtgggagcggcactgaaacgacccttgaaaagcagaaacccgtctccaagcccggcccaaataaggtaacgagcagcattaccatctatccctccgactcctctagtccaagggcagctcctggtgaagcactgagagagcggcacactagcacctcaaatatacaggtgggtctggctgaacttaccagcgtgtcaaaccacgtttcaagcccctttgagctgtccatacacaagcatgatattactctgcagttagctgaggccgagagaatggcagacggtcccctgaaggaccgaccagaaacagtggttagccgcagctcaataatcattaagccctcagatccagtggagaggaattcacatgcgcctcccgccgagactatccggtggaagtcccattctgccccttcagaagtcggttttagtgacgcccggcacgtaacggtgagaaacgcctggaaaagccgtcgggatttaaaaagcctggaggacccacctaccagaatcggtaagaacgttgaaagcacaaattccaacgcctacactcagcgaagtagcaccgattttagcgagctcgagcaaccaaggagctgcctgttcgaacagggtactcgaagagtgggcccctcatccggtgacgcaccagagccttcatcccgccgaacccagtcgtccttgacggtctcagaggtgctgacaagacgaaaccgcgtcggtgacactattaccgttgctgcttggaatcattccgcttccatggaagaggaaggagaagactgcacccttagcgtctaccgtcagctacataatagtctggacccttccgagttgcccggcaaacagggccttccagagagcggacgcgtgcgagcagaagagcgtctccgccctacccggccatgcgcagaggaaaattag

SEQ ID NO: 122159 - DNA, 822 bp, synthetic construct
  misc_feature 1..822: note = Description of Artificial Sequence: Synthetic coding sequence
  source 1..822: mol_type = other DNA
atggccgagttcaccagttacaaagagacggcttcgtcaaggcacctgaggttcaaacttcaatctctgagtaggcgtctggacgagctggaggaagccacgaaaaacctccagaaggctgaggatgagctcttggaccttcaggacaaagtcatacaggccgaggggtcaaatagctccatgcttgcagagattgaggttctaaggcagcgggtcctgcgtattgaaggaaaagacgaagaaattaaaagggcggaggacctctgccgcctgatgaaggagaagctcgaggaagaagagaacttaacacgcgaactgaaaagcgagatcgaacggttgcaaaaacgtatggccgaattagaaaagctggaggaagccttctccagaagcaagaacgactgtacccagctgtgtctctccttgaacgaggagcgcaatcttacaaagaagatcagctccgagttggaaatgttgcgagtaaaggtgaaagaacttgagtcttctgaggatagattggacaagaccgaacaatctttagcaagtgagctggaaaagctaaaatccctcactctgagtttcgtgagtgaacgcaaatacttaaacgagaaagagaaggagaatgaaaaactgatcaaggagctgacgcagaaactggagcagaataagaagatgaacagggattacacacggaacgcttctaatctggaaaggaatgacctgaggattgaggatggcatctcctcaacgcttccatctaaagagtctcgcagaaagggcggactggactatctgaaacaagtggaaaacgagaccaggaactag

SEQ ID NO: 122160 - DNA, 108 bp, synthetic construct
  misc_feature 1..108: note = Description of Artificial Sequence: Synthetic coding sequence
  source 1..108: mol_type = other DNA
atggctgagttcacctcatataaagaaaccgccagttcccgccaccttcggtttaagctgcagagtctgtctcgacgcttggatgagctggaggaagctaccaagtag

SEQ ID NO: 122161 - DNA, 1041 bp, synthetic construct
  misc_feature 1..1041: note = Description of Artificial Sequence: Synthetic coding sequence
  source 1..1041: mol_type = other DNA
atgaagttttcccctgctcactacctgttgcccctgctgccggcactcgtgctgtctacacggcaagattacgaggagctcgaaaagcagctcaaagaagttttcaaggagcgatccacaatcctccgtcaactgaccaagaccagccgcgaacttgacgggatcaaagtgaacctccaaagccttaaaaacgacgaacaaagtgccaaaaccgatgttcaaaagctgcttgaactgggacaaaagcagcgtgaagagatgaagtcacttcaggaagcccttcagaatcagttaaaggagacaagtgaaaaagcagaaaaacatcaggctaccatcaattttctcaagactgaggtggagagaaaatcaaagatgatacgcgacctgcaaaacgaaaacaaaagcctcaagaacaaattgctgtccggtaacaagctatgcgggattcacgccgaggagtcaaagaaaatccaggcacagctcaaagaactaaggtacggcaaaaaggatctcttgttcaaggcgcagcagttgacagatctggagcagaaacttgccgtggctaaaaatgagctcgagaaggccgcccttgatcgcgagagtcaaatgaaagctatgaaagagactgtgcaactgtgtctcacctcggtcttcagagatcagccccctccaccactctctcttattacttccaacccaacaaggatgttgctgcctccccggaacattgcttcaaagctgccagacgccgctgctaagtctaagcctcaacagtctgcatcagggaataatgagtcgagccaggtcgagagcaccaaggaaggaaatcccagcaccaccgcttgcgatagtcaggacgagggccgtccttgttccatgaagcataaggagagccctccctccaacgctactgccgaaactgaacctataccgcagaaactccagatgcccccttgttccgagtgcgaggtaaaaaaagcacctgagaaaccactaactagtttcgagggcatggctgccagagaggagaagatcctgtag

SEQ ID NO: 122162 - DNA, 783 bp, synthetic construct
  misc_feature 1..783: note = Description of Artificial Sequence: Synthetic coding sequence
  source 1..783: mol_type = other DNA
atgaagtcactgcaggaagccctgcagaaccagttaaaagagacatctgagaaggcagagaagcaccaagctaccataaactttctgaagacagaggtcgagagaaagagtaaaatgataagagacctgcagaacgagaacaaaagcctcaaaaacaagctactgtccgggaacaaactatgcgggatccacgccgaggagtccaaaaagatccaggcccagctcaaagagttgcgctatggtaagaaggacctcctatttaaagcccagcaactgacggacctggaacagaaattggccgtggcaaaaaacgagctggaaaaagcagctcttgatagagagagtcaaatgaaggcaatgaaagaaaccgtccagctgtgcttaacatctgtcttccgggaccaaccccctccccctctctctctgatcacctctaatccaacacgtatgctcctgcccccgaggaacattgcttccaaactgcccgatgcggccgccaagtcaaagccacaacagagtgcttccggaaataatgagtcctcccaggtggagtctacaaaagaagggaaccccagtacaactgcctgcgattcccaagatgagggacgaccctgtagcatgaagcacaaagagtcgccgccctccaatgctacagccgaaaccgagccgattccccaaaaattacagatgcctccctgcagtgagtgcgaagtgaaaaaggcacctgagaaacccctcaccagtttcgaggggatggccgctcgagaagagaagatactgtag

SEQ ID NO: 122163 - DNA, 900 bp, synthetic construct
  misc_feature 1..900: note = Description of Artificial Sequence: Synthetic coding sequence
  source 1..900: mol_type = other DNA
atggccgagctaggcttgaacgagcaccaccaaaacgaggtgattaattacatgcggtttgcacggtctaagagagggctccgtctcaagaccgttgactcatgcttccaggatctgaaggaaagcaggctagtggaggacacttttacaattgatgaggtgtccgaggtgctgaacggtttgcaggccgtggtgcactccgaagtggaaagcgaactgatcaacacagcgtacaccaacgtcctgctgcttagacaactgtttgctcaagctgagaagtggtacctaaaactgcagactgacatctccgaattggaaaatagggaactgttagagcaagtggccgagttcgagaaagctgagataaccagctcaaacaaaaagccaatcctagacgtgacgaagccaaaactggcccctttgaacgagggcggcactgctgaactgttgaacaaagagatcctgaggttgcaggaggagaacgaaaagctgaagagcagactgaagactattgagatccaggccaccaatgctcttgatgagaagtcaaaactagagaaggcgctgcaggacctgcagcttgatcagggaaaccaaaaagatttcatcaaagcccaggacttgtcaaacttggaaaacaccgtggcagctctgaagtctgagtttcagaaaacactgaatgataagacagaaaatcagaagagcctggaagaaaacctggccacagctaaacacgacctactcagagtgcaggagcaacttcatatggcggagaaagagctggagaagaagtttcagcagactgctgcctaccgaaacatgaaggagatactgaccaagaagaatgaccagatcaaagacttgaggaagaggttggcccagtatgaacccgaagactag

SEQ ID NO: 122164 - DNA, 849 bp, synthetic construct
  misc_feature 1..849: note = Description of Artificial Sequence: Synthetic coding sequence
  source 1..849: mol_type = other DNA
atgcggtttgctcgaagtaaacgggggctgaggctgaagaccgttgattcctgttttcaggatttgaaagagagtcggcttgtggaagatacatttacgatcgacgaggtgagcgaggtgctaaatggtctgcaagccgtggttcactcggaagtagaatcagagctcatcaatactgcctataccaacgtgctgctgctgcggcagctgttcgcccaagccgaaaagtggtatttgaagctgcagaccgatatttctgagctcgaaaacagagagttactggagcaggttgccgaatttgagaaagccgagattacgtctagcaacaagaaacctatcttggacgtgaccaaaccaaaactggctcccctgaacgagggcgggaccgcagagctcctgaataaggaaatattgagactccaggaggaaaatgagaagttgaagtcccgattaaagacaatcgagatacaagccaccaacgcactcgacgaaaaatcgaaactcgagaaagcacttcaggacttgcaattggaccagggtaatcagaaagattttattaaggcgcaggacttgtctaacctcgagaacacagttgccgccctgaaatctgagtttcaaaaaacacttaatgacaaaaccgagaatcaaaaaagcctagaggagaatctcgcgacggcaaaacatgacctcctacgggtccaggagcaactacacatggcagagaaagaactcgagaagaagtttcagcagactgccgcctatcgcaatatgaaggagatccttactaagaaaaatgatcagatcaaagatctccgcaagcggctggcgcaatacgaaccagaggactag

SEQ ID NO: 122165 - DNA, 771 bp, synthetic construct
  misc_feature 1..771: note = Description of Artificial Sequence: Synthetic coding sequence
  source 1..771: mol_type = other DNA
atgagaaaccaggatccggggaaaatgggcaggcaaaggaaaagcatcaagttgtaccctactcatccattggtcactttccctcgaagttgggccaagttccaagagaaagccctcctggttgaggacactttcacaatcgacgaagtgtccgaagtgctgaacggcctgcaggcagtagttcatagtgaagtggaaagtgaactaataaacaccgcctacaccaatgttctgctactccgacagctgtttgcccaagctgagaagtggtatctgaagctccaaaccgacatcagcgagctggagaacagggaactcctggagcaagtggccgaattcgaaaaggccgaaatcacatcaagtaataagaagcctatcttggacgtgactaagccaaaattagcaccactgaatgaaggaggaactgccgaactgcttaacaaggaaatactgaggctccaggaagagaatgagaaattaaaatccaggctcaaaacaattgaaatccaggccacaaatgcactggatgagaagagtaaacttgagaaagcgctgcaggaccttcaattggaccagggtaatcagaaagactttatcaaagcacaggacctgagtaatcttgagaacacagtagctgctctgaagtctgaattccaaaaaacactcaacgataagacggaaaaccaaaaaagcctggaggaaaacttggccaccgccaagcacgatctcctgagggtgcaggagcagctgcacatggccgaaaaaatttag

SEQ ID NO: 122166 - DNA, 441 bp, synthetic construct
  misc_feature 1..441: note = Description of Artificial Sequence: Synthetic coding sequence
  source 1..441: mol_type = other DNA
atggtggatgagctggttctgctgcttcatgcattgttaatgcggcaccgggcactgtccatcgaaaactctcagcttatggagcagttgagacttctagtgtgtgaacgagcatcattgctccgccaggtacggcctccctcctgccccgttccatttccagaaaccttcaatggcgagtcatcacgcttgccggaattcattgttcagactgcatcttacatgctcgtgaatgaaaacagattctgcaacgacgccatgaaggtggcctttttgatttccctgctgacaggcgaagccgaggagtgggtggtgccgtatatagagatggactcaccgattctgggcgactatcgggctttcctggacgaaatgaaacaatgtttcggatgggatgatgatgaggacgacgacgacgaggaggaggaagacgattattag

SEQ ID NO: 122167 - DNA, 2220 bp, synthetic construct
  misc_feature 1..2220: note = Description of Artificial Sequence: Synthetic coding sequence
  source 1..2220: mol_type = other DNA
atggcctcaatcttattgcggagttgtagaggacgtgcccccgcccgactgccaccacctccacggtacacagtgcctcgaggctccccaggcgatccagcccatttgagctgcgcaagtacacttgggctgaggaactgcctgaatgttccttttggctgctgcactcccatccaccctgtgtatacatcttctagaggcgatcacctcgggtgttgggcccttcggcccgagtgtctcagaatcgtgtcacgggcaccatggacttccacctccgtgggatttgtggccgtgggccctcagtgtctgccggtgaggggctggcactccagcagacccgtccgcgacgattccgtcgtcgagaaaagtcttaaatcactgaaggacaaaaacaagaagctggaggagggtggtcctgtgtatagcccacccgctgaggttgtagtgaaaaagtctctaggccagcgtgttctcgatgagcttaagcactattaccatgggtttagattactatggattgacactaagatcgccgctagaatgctgtggagaatcctgaacggccattccctgacaaggcgggagcgcaggcagtttcttagaatctgtgcagacctgtttaggctcgttcctttcctggtcttcgttgtcgttccttttatggaattcctcctgcccgtggcagtcaaactgttccctaatatgctgcccagtacgttcgagactcagtcactgaaggaggaaaggctgaagaaagagcttcgtgttaagctggagctggctaaatttttgcaagacactatcgaggaaatggctctgaaaaacaaggccgctaaaggatcggcgacgaaagatttctccgttttctttcagaaaattagggagaccggcgaaaggccgtctaacgaggagatcatgcggttcagcaaactgttcgaagacgagctcacactcgataacctgacccgccctcagttggtggccttgtgtaagctattggagcttcaatcaataggcactaacaactttctgaggttccagctcactatgcgtctgcggagtatcaaggcagacgataagctgatagccgaggagggtgtcgattcgttgaacgtcaaggagctccaagctgcttgccgtgccagaggaatgagagctcttggagttaccgaagaccgactcaggggacagctgaaacagtggcttgacttgcatctacaccaggagatcccgacgtcgctgctcattttatctagagctatgtacctgcctgacactctttcaccggccgaccagctcaaaagcaccctgcagacactgcccgagattgtggccaaggaggctcaagttaaggtggcagaggtggaaggcgaacaggtggacaacaaggccaagctagaggccacccttcaggaggaggccgcaattcagcaggagcaccgcgaaaaggaacttcaaaaaagatccgaggtggcgaaggactttgaaccagaacgggtggtggcagctccccagagacctggcaccgaacctcagcctgaaatgccagacacagtgcttcaaagtgagactctcaaggatacagcacccgtgttggaaggactgaaggaagaagagattactaaagaagagatcgacatcctttcagacgcctgctcgaagctgcaggaacagaaaaagagtttgacaaaggagaaagaagagctggagttactcaaggaggatgttcaggattattcagaagatttgcaggagatcaaaaaggaactaagcaagacaggcgaagagaagtatgttgaggaatctaaggctagcaaaagacttacaaagagggtccagcaaatgatcggtcaaatcgacgggctgatctcacagctggagatggaccagcaggcaggtaaactggcccccgcaaacggaatgcctaccggagagaatgttatctcagtcgcggaactgatcaatgcaatgaaacaggtgaaacacatacctgagtctaaactgacctctttggctgccgctttggacgaaaacaaggatggtaaagtgaacattgatgatttggtaaaagtgatcgagctcgtggataaagaagacgttcacatttctacatcacaggtcgctgaaattgtggccacactcgaaaaggaggaaaaagtagaggagaaagaaaaggccaaggagaaagcggaaaaggaagttgccgaagttaagagctag

SEQ ID NO: 122168 - DNA, 759 bp, synthetic construct
  misc_feature 1..759: note = Description of Artificial Sequence: Synthetic coding sequence
  source 1..759: mol_type = other DNA
atgaggcatacatggccatttcggaacgtgcctttcggctgctgcacgcctatacaccccgtgtataccagttccagaggagaccatctcgggtgctgggccctgaggcctgaatgcttgcgcattgtgtctcgggccccctggacgagcacctctgttggctttgttgccgtgggcccacagtgcttgcctgtgcgtggctggcactccagccgccccgtgagagatgacagcgtggtcgagaagagcctgaagtcactgaaggacaagaataagaagctggaggagggaggccctgtttattctcctcctgcagaggtagtcgtcaaaaagtccctcggccagagggtgctggatgaacttaaacactactaccatgggttcagattactttggatcgatacgaagatcgcagcccgcatgctgtggagaattctcaatggacattcattaacgaggcgagaacgtcgccaatttctccgcatctgtgcagacttattcaggctggtcccttttctggttttcgttgtagtcccatttatggaatttctgctccccgtagcggtgaagttgttcccaaatatgctgccttcgacttttgagacacagagtctaaaggaagaacggttgaagaaggagctccgggtgaagctcgagctggcaaagttcctccaggataccatcgaagaaatggcgctgaagaacaaagctgccaagggcagtgccacaaaggacttctcggtgtttttccagaagtag

SEQ ID NO: 122169 - DNA, 4185 bp, synthetic construct
  misc_feature 1..4185: note = Description of Artificial Sequence: Synthetic coding sequence
  source 1..4185: mol_type = other DNA
atggccgctctgctacggtcggctagatggctcctacgggcaggagccgctcctagattaccgctttcactgcggttgcttccaggggggccgggcagacttcacgccgcgtcatatctgcccgccgcccgggccggccctgtagccggtggcctgctctctcctgccaggctatatgcgatcgccgctaaagaaaaggatattcaggaggaatccactttcagctcaaggaagatttccaatcagttcgattgggcattgatgcggctggacctttccgtcaggcgcacgggcaggatccctaaaaagctgttgcagaaggtgttcaacgacacttgccggtccggggggctcggggggtctcatgcgctgctgctgttgcgttcatgcggctcgctgctgcccgaacttaaattggaggaaagaacagagtttgcccaccgtatctgggacactctccagaagcttggtgcagtttatgatgtgtctcactataacgcgttgttaaaagtttacctgcaaaacgagtacaagttctcacctacggacttcctggctaaaatggaagaagctaacattcagcccaacagggtgacataccagcgactcattgcgagctactgtaatgtgggggacatagagggcgccagtaaaatcctggggtttatgaagacaaaagatctcccggtgaccgaggcagtttttagcgcccttgtgaccgggcacgctagggctggcgacatggagaacgccgagaatatcctgactgtcatgagggacgccgggattgagcctggccctgatacctatctggccctcctgaatgcttatgcagagaaaggcgacatagaccacgtgaaacagaccctggagaaggtagaaaaatctgaactgcacctaatggatcgagatctgttgcagattatttttagcttctctaaggcaggctacccacaatacgtgtcagagatactggagaaggtgacatgcgaacggagatatattcctgatgcgatgaacctaatcctgctgctggttactgagaaactagaggacgtagccctgcagattttactcgcttgccctgtcagcaaagaagacggccccagcgtgttcgggtcctttttcctacaacattgtgtaacaatgaatacccctgtggaaaagctcaccgactattgtaaaaagttaaaggaagtgcaaatgcacagctttcccttgcagtttacactccactgcgcccttctggccaataagactgacctcgccaaggctcttatgaaagcagtgaaggaggagggcttccctattaggccacactacttttggcctctgttggtgggccgccggaaggaaaagaacgtccagggtatcatcgagatcttaaaaggaatgcaggagctgggggtccacccggaccaagaaacatacaccgactatgttatcccctgcttcgactccgtgaacagcgcccgagccatactgcaagagaatggttgcctgtccgactctgatatgttcagtcaagccgggcttagaagcgaggctgccaacggtaacctggatttcgtcctttcattcctgaaaagtaacacactgcctatctctcttcaatctataagaagttcattgctcctaggttttagaaggagcatgaacataaacctatggtccgagattactgaactcctgtacaaggacgggagatactgtcaggagcccaggggccccacggaagctgtgggttacttcctgtacaacctgatcgacagcatgtctgattcagaagtccaggcaaaggaggagcacttaaggcagtattttcatcaactggagaagatgaacgtgaagatcccagagaatatctaccgggggatccgtaatctcctcgagtcataccacgttccggaattgatcaaagacgctcacctattggtcgagtcaaagaacctggacttccagaagacagttcaacttacatccagcgaattggagagcacgctggaaacgctgaaggctgaaaatcagcctatcagagatgtgctcaaacaactcatccttgtgttgtgctccgaagagaacatgcagaaagctctggagctcaaggccaaatatgagagcgacatggtgactggcgggtacgctgcgctgattaatctgtgctgccggcacgacaaggtggaggacgcactcaacctgaaagaagagttcgatagattagactcctcagctgttttggacacagggaagtatgttggattggtcagggttctcgctaagcacgggaagttgcaggacgcaatcaatatcttgaaagaaatgaaggagaaagatgtgctgattaaagacacaaccgcactctcatttttccacatgctgaacggcgctgctctaaggggggagatagagacagtgaagcagcttcatgaagcaatagttactcttggcctggctgaaccatctaccaatatttctttccctctggtgaccgtacacctcgagaaaggggatcttagtacggcactggaagtcgccatcgattgctacgaaaagtataaagtcctgccacggatccacgacgtactctgtaagttggttgagaagggagaaaccgatctgattcaaaaagccatggacttcgtgagtcaggagcaaggggagatggtgatgctgtacgatttgttcttcgcattcttgcagactggcaattacaaagaggctaagaagattatagagactccgggcatccgggctcgctcagcaagactacaatggttttgcgacagatgcgtggccaataatcaggtcgaaaccctagagaagctagtagaactcactcagaaactctttgagtgtgaccgggaccagatgtattacaatctactgaaactctacaagattaatggtgactggcaaagggcggacgcagtctggaataagatccaggaagagaacgttattccacgcgagaagaccctgcgtctgctggctgagattttaagggagggaaaccaggaagtaccctttgatgtgcctgagttatggtatgaagatgagaaacattccctcaatagctcctccgctagcaccacagaaccggacttccagaaagatatactgattgcttgccggctgaaccagaagaagggggcatacgatattttcctgaacgcaaaggaacagaacattgtattcaacgccgaaacatactctaacctgatcaaattgctcatgtctgaagactatttcacgcaagctatggaggtgaaagcttttgccgagacccatatcaaaggcttcacattaaacgacgcggccaacagcaggctgattatcactcaggtgcgtcgcgattacctgaaggaggccgttacgactctcaagaccgtccttgatcagcaacagacaccatcccggctcgcggtgactcgcgtcattcaggccctcgccatgaaaggtgacgtggagaatatcgaggtggtgcagaagatgctgaacggcctcgaagacagcatagggttgtcaaagatggtgttcattaacaacatcgccctggcccagatcaaaaataataatatagacgccgccattgaaaatatcgaaaacatgctcacaagcgagaataaggtcattgagccacaatacttcgggctcgcatatctgtttcggaaggtgatcgaagagcaactggagccagccgtggaaaagatctccattatggccgaacgcttagccaaccagtttgctatctataaacctgttactgacttctttctgcaactggtcgatgctggcaaggtggatgacgcccgcgcgctgttgcaacggtgcggagctatcgccgagcagacacccatacttttgctttttctgctgcggaatagtcggaagcagggcaaagcttcaaccgtaaaatccgtgctggaactgatccctgagctcaatgagaaggaagaggcctataacagtctgatgaaatcatatgtctcagagaaagacgtgacttctgccaaggcactgtacgaacacctgactgccaaaaacactaagcttgacgacctgtttttgaaacgctatgcctctttgctcaaatatgccggggaaccagtgccttttatcgagccgccagaatcgttcgaattttacgcccaacagttacgcaaacttagggagaactcttcctag

SEQ ID NO: 122170 - DNA, 3264 bp, synthetic construct
  misc_feature 1..3264: note = Description of Artificial Sequence: Synthetic coding sequence
  source 1..3264: mol_type = other DNA
atgcctccaccaatctgtcccccactcgcacctggaccatggcccggggggctcggcggcagccatgctctcctgctcctgcgttcttgcggaagcctgcttcccgagttaaagctggaggagagaacagagtttgctcaccgcatatgggacactctgcagaagctaggagcggtgtacgacgtaagccactataacgcccttctgaaggtctacctgcagaatgaatataaattttctcctaccgattttctggccaagatggaggaggcaaatatacaaccgaatagagtcacatatcagcgcctgattgcctcgtactgtaatgtaggcgacatcgagggagcgtcaaaaatcctcggcttcatgaagacaaaggacctcccagtcaccgaagccgtcttcagtgctctagtgactggccatgctagggcgggagacatggaaaatgctgagaacattttaactgtgatgcgggacgcgggaattgagcccggaccggacacctacctggctcttctaaacgcctacgcagagaaaggtgacattgatcacgtgaaacagaccttggagaaagtagagaaatctgagcttcacttaatggaccgcgacttgctccagatcatcttctctttttcaaaggccggctacccccagtatgtgagcgagatcctggaaaaggttacctgtgaacggcgttacatccccgatgcgatgaatctcattctcttgttagtgacagaaaaactcgaggatgttgctttgcaaattctgctcgcatgtcctgtgagcaaggaagacgggccgtcagtctttgggtccttctttttacagcattgtgtcactatgaacacaccagtggagaagctcacggattactgtaagaaacttaaggaggtgcaaatgcacagcttccccctgcagtttacactccactgcgcactgctggccaacaagaccgacctcgcaaaagcactgatgaaagctgtgaaagaggaagggttcccaatccgcccccactatttttggcccctcctggttggaagacggaaggagaagaatgtgcagggcataatcgagatccttaagggaatgcaggaactgggcgttcatcccgaccaggaaacctacactgactatgtcattccatgcttcgactctgttaattctgcgcgtgctatactgcaggaaaatgggtgtctttccgactctgacatgttctcccaggcagggctcagaagcgaagcagcgaatgggaaccttgacttcgtgctgtcctttctgaagtcgaacactctcccgatctcacttcaatcgataaggtccagccttcttctggggtttagacgaagtatgaatatcaacctctggagcgagattacagaattgctttacaaggacggcaggtactgtcaggagcccaggggtccaaccgaggcggtgggatactttctctacaacctgatcgatagcatgtctgatagtgaggtgcaggccaaggaagaacacctgaggcagtattttcaccaactggagaagatgaacgtgaaaatccctgaaaatatctaccgggggatcagaaacctgcttgagagttatcacgtacccgaacttatcaaagacgcacatctgctggtggagagtaaaaacttggacttccaaaaaacggtccagctcacctcgagtgaactggaatcaaccctggaaacactgaaagcggaaaaccagccaatccgggatgtactcaagcaactgatattggtgctctgcagcgaagagaatatgcagaaagcgttagaactgaaggccaagtacgaatcagacatggtaaccggcggttatgctgcgctcattaatctgtgctgtagacacgataaggtcgaagatgctctgaacctgaaagaggagttcgatagacttgactccagtgctgtgctggataccggaaaatatgtgggattggtccgagtactggctaagcacggaaaactgcaggacgcaattaacattcttaaagagatgaaagaaaaggacgttctcattaaagatacgacggctctctccttcttccatatgctaaacggagccgccttgcgtggcgagatcgaaactgtgaaacagctgcatgaggcaatcgttacgctgggactcgcggaaccctccaccaacatctcttttccactcgtgaccgtccacctcgagaaaggagacctgtctacagcccttgaagtggcgattgattgctacgagaaatataaggttctgccaaggattcatgacgtgctatgtaagttagttgagaagggcgagactgatctgatccagaaagcaatggattttgttagtcaggagcagggagagatggtgatgctgtacgatctgttttttgccttcttacagaccgggaattacaaagaagccaagaagattatcgagacgccaggcattcgggccagatccgcccgccttcagtggttttgtgatcgatgcgttgccaataaccaggtagaaacactcgagaaattggtggagctcacgcagaaattattcgaatgtgaccgagaccagatgtactacaacttgctgaaactgtataagatcaatggcgactggcaacgggccgacgccgtatggaataaaatccaggaggagaatgtaatcccgcgcgagaaaacccttcggctcctagcagagatcttaagagaaggtaatcaggaagtcccattcgacgtgccggagctgtggtacgaagacgaaaagcactcgttaaattctagttcagcttcaactaccgagccagattttcaaaaagacattttaatcgcttgcagactgaatcagaaaaagggcgcctacgatatttttcttaatgcaaaggagcaaaatatcgtgtttaatgcagaaacttactccaatctaattaagctgctcatgtccgaagactattttacccaggccatggaagttaaggctttcgcggagacgcacataaaaggctttactctgaacgacgccgccaactccaggcttatcatcacccaagtgcggcgggactacttgaaagaagcagtgacgactctgaaaacagttttggaccagcaacagacgccgagccgactggccgtgacccgggtgatccaggccttggctatgaagggggacgtggagaacatagaggtcgtgcagaaaatgttgaacggcttagaggatagcattggcttgagcaaaatggtgtttataaacaacattgcgttggcccagtag

SEQ ID NO: 122171 - DNA, 2856 bp, synthetic construct
  misc_feature 1..2856: note = Description of Artificial Sequence: Synthetic coding sequence
  source 1..2856: mol_type = other DNA
atgcctggacccctcggactgctttgctttctcgccctcgggctcctgggctccgcaggccccagtggcgcagcccctccattgtgcgctgctccttgcagctgtgacggcgatcgacgagtggactgtagtggaaaaggactcaccgcagtgcctgaaggactttccgcctttacccaggcattggatattagtatgaataatatcacacagctgcctgaagacgccttcaaaaacttcccatttctggaggagctccaactcgccggaaacgaccttagctttatacaccctaaggcattaagcggacttaaagagctgaaggtactgactcttcaaaataaccaactgaagacagtgcctagcgaggccatccgcgggctctctgccctgcagtcactgcgtttggatgctaaccacataacttcagtcccagaggactcttttgagggcctggtccagctccgccatctgtggcttgatgacaatagtttgaccgaagtacccgttcatcccctgtctaacctcccgaccctgcaggcgctgacactggctctgaataagataagctccattcccgatttcgcatttactaacttatccagtctagtggttctgcatttacacaacaacaagatacgctcactatcgcagcactgctttgatggcctggacaacttggaaacactggatttaaattataacaaccttggtgaattcccccaagctatcaaggccttacctagcctcaaggaattggggttccactctaatagtatcagcgtgatccccgacggcgcctttgacggaaatcctctcctgcgtaccattcatctctatgataaccctctaagctttgtgggaaactcagcgtttcataatctgtctgatctccattcacttgttattcggggagcgagcatggtgcagcagttccctaacttgacaggcactgtgcatttagagtccctcactctcaccgggaccaaaatcagttcaatccctaacaatttatgtcaggaacaaaaaatgctaagaactttggacctatcatacaataacatcagagaccttccctccttcaacgggtgtcacgcattggaggaaattagtctgcagaggaatcagatctaccagatcaaggaagggactttccagggtctgattagcttacggattctggatttaagccgcaacttgatccatgagattcattctcgcgcttttgctaccctgggaccaatcaccaacttggacgtctccttcaatgaactgacttcttttcccacggagggtctgaacggtttgaaccagttaaagctggtcggaaactttaagctcaaggaagcccttgccgcgaaggactttgtcaacctgcggtcccttagcgtcccgtacgcttatcaatgctgcgccttctgggggtgtgactcctacgccaatctgaatactgaagataactctcttcaggaccacagcgtggcgcaggagaagggtacagccgacgcagccaacgttacttccacgctcgaaaacgaagaacacagccagatcattatccattgtaccccaagcacgggagctttcaaaccttgcgagtacctgcttggttcctggatgatcagacttaccgtgtggttcatcttcttggtggcattgttctttaacctcctggtgatactcaccactttcgcctcttgtacttcccttccaagctccaagctcttcatcggcttgataagcgtgtctaatttattcatgggaatttacaccggtatcttgaccttcttggacgccgtatcctggggccggtttgcggagtttgggatctggtgggagaccggttctggatgtaaggtggcggggttcttggccgtcttctcatctgagtcagcaatttttctcctaatgcttgctactgtggaaagaagtctgtctgcaaaggacatcatgaagaatgggaaatctaatcatttgaagcagtttcgggtcgccgccctcctcgcgttcctgggtgcaacggtggccggttgcttccccctgtttcatagaggtgagtattccgcatctcctttgtgcctgcctttcccgacgggcgaaaccccgtccctcggattcaccgtgacgctcgtcctgctgaatagcctggcctttctcctgatggccgtcatctatacgaagctttattgtaatctggaaaaggaggatctgtctgagaatagtcagtcctccatgattaagcacgtcgcatggttaatcttcaccaattgtatctttttttgtccggtcgctttctttagtttcgccccacttatcacagcaatttcgatctcgccagaaatcatgaaatctgttaccctcatttttttccctctgcctgcatgtctcaaccccgtgctttatgtgttttttaatcctaaattcaaggaagactggaaactgcttaaaagacgggtgacaaaaaaatcaggttccgtgtctgtgtctatatcgtcccaggggggctgcctcgaacaggacttctactatgattgcggtatgtatagccatctccagggtaacctcaccgtgtgtgactgctgcgagtcgtttctcctcacgaaacccgtctcctgcaaacacctgattaagtcccacagttgcccggcactggcggtggcaagctgccagagacctgagggatactggagtgattgtggaacccagtcagctcactcagactacgcggatgaggaggactccttcgtctctgactcatctgaccaagtccaggcctgtggcagggcttgcttctaccagtctagggggttccccctggtgcgatacgcttacaatctgcctcgcgtgaaagactag

SEQ ID NO: 122172 - DNA, 2724 bp, synthetic construct
  misc_feature 1..2724: note = Description of Artificial Sequence: Synthetic coding sequence
  source 1..2724: mol_type = other DNA
atggatacaagtagactaggggtcctcctctcattacccgtcctgctccaactggccactggtggctcctctccacgcagcggggttctcctccgcgggtgtccaacgcattgtcattgtgaacctgacggaaggatgctgcttagggttgactgctcagatctggggctctccgagctgcctagtaacctctccgtgtttaccagctatctggacctttccatgaataacattagccagctcctgcccaaccctctcccctctttgcgtttcctggaggagctccggctggctggtaacgccctgacttacatcccaaagggcgcctttactggactctacagtcttaaagtgcttatgctgcagaacaaccaattacgccacgtgcctactgaagcactgcaaaatttgcgcagccttcaatctttgagattagatgccaaccatatcagttatgtgccaccaagctgtttcagcggcctgcactcccttaggcacctgtggctggacgataacgctttgacagaaatcccagtccaggcttttagaagtctatccgctcttcaggcaatgactcttgctcttaataaaattcatcatatccccgattacgctttcggcaatctgagttccctggtggtgctccatttacataataaccgtattcattcactgggcaagaaatgtttcgatggactgcatagtctcgaaaccctggatctgaactacaataacttggacgaatttcccaccgccattcgcaccttatcaaacctcaaggagttgggatttcattcaaacaacattcggtccatccctgagaaggcttttgtcggcaaccctagcttaattaccattcatttctacgacaatccaattcagttcgtcggccggagcgcatttcagcacctgcctgagctgcggactcttacactgaacggggccagccagataactgagttccccgacttgactggaactgccaacctagagtccctcacattgacaggggctcagatatccagcctgccacagaccgtatgcaaccagctccctaacctgcaggtgctcgacctctcctacaacctgcttgaagatttaccatccttcagtgtctgtcaaaaacttcagaaaatcgatttacgccacaatgagatctacgagatcaaggttgacaccttccagcagttactttccctgcgctcccttaatctggcatggaacaagattgctataattcatcctaacgcttttagcaccctgccaagcctgatcaaactcgatctcagctccaatttgttgtcctcttttccgataacaggtctgcacgggcttactcatcttaaactaaccggaaaccatgcccttcagtccctgataagttcggagaacttccccgagctgaaggtaatagaaatgccctacgcatatcagtgctgtgccttcggcgtctgcgagaatgcatacaagatctccaaccagtggaacaaaggggacaattcctcaatggacgacttacacaaaaaagatgcgggtatgtttcaagctcaagacgaaagagatctcgaagatttccttcttgattttgaagaagatcttaaggctttgcacagcgtgcagtgctctccatcacctggccctttcaagccatgcgagcacttgctggatggatggctcattcgaatcggcgtgtggaccattgccgttcttgcactgacctgcaacgccctcgtaacctcaactgtattccgaagccccctgtatatatccccaatcaagcttcttatcggggtgatcgctgccgtcaacatgcttactggagtgtcgagcgctgtgttagccggagttgacgccttcacatttgggtcgtttgctcgccacggggcctggtgggaaaacggcgtggggtgccatgttatcggctttctcagcattttcgccagtgagtctagcgtttttttattgactcttgctgcccttgagcgcggcttctctgtcaagtattctgccaagtttgagacgaaagctcccttctcatccctaaaagtgataatcttgctctgcgctctgctcgccctcactatggccgccgtgcctctgctgggagggtctaagtatggcgccagtccactgtgccttcccctgccttttggggaaccctccaccatggggtacatggttgccctgatcctcctgaattccctctgttttttgatgatgaccattgcatacaccaaactgtactgcaacttggacaagggggacttggagaacatttgggactgttcgatggtgaagcacatcgcgctcctgctgttcactaactgcatattgaactgccctgtcgcattcctgagtttcagttctctgattaatttaacttttatctctcccgaagtgataaagttcattctgttagtggtagtgcccctaccagcctgcttgaaccctctgctttacattctctttaaccctcatttcaaggaggacctcgtatccctaagaaaacaaacgtatgtgtggactaggagcaaacacccaagcttaatgagcataaattccgacgatgtggaaaagcagagctgcgattcaacccaggccttagtcacctttactagctcttccatcacatacgaccttcctccctctagcgtcccttcgcctgcgtacccagtcactgagagctgtcatctttcttccgtagccttcgtgccttgtctttag

SEQ ID NO: 122173 - DNA, 2334 bp, synthetic construct
  misc_feature 1..2334: note = Description of Artificial Sequence: Synthetic coding sequence
  source 1..2334: mol_type = other DNA
atggacacatcccgcctgggcgtcctgctgtcacttcccgtgttgctgcagctggctacaggagggtcctccccccgcagcggcgtcctcctgaggggttgtccaacccactgtcactgcgagcccgatggaagaatgctgctccgagtcgattgcagtgatctaggactctcggagctgcctagcaacctctccgtgttcacttcctatttagacctgtctatgaacaatatttctcagctcctgccgaatccgctcccgtcgctgcgctttcttgaagaactccgcctggcagggaacgcattaacctacatccccaaaggtgcctttaccggcctctattcacttaaagttctgatgcttcagaacaaccaactgcgccatgttccaaccgaagccctccagaaccttaggagtctgcagtcgttaaggctggacgctaatcatatctcttacgtaccacccagttgcttctctggactccattcactgcgccatctgtggctggatgataatgcgctgactgaaattccagtgcaagccttcagaagcctgtccgcgctgcaggcgatgaccctggctctgaacaaaatacatcatattccagactacgcttttggaaatttatcttctttagtggtcctccacttgcacaacaaccggattcacagcctgggcaagaagtgtttcgatggtctacactcacttgaaactttggatctcaactataataacctggatgagtttcctaccgcaatccggactcttagtaatctcaaggagttgggttttcacagtaacaatatcaggagtattcctgagaaagcttttgtggggaatccatccctgattaccatacatttctatgacaacccgatccagttcgtgggtagatccgcatttcagcacttgccagagctgcggacactaacactgaatggggcgagtcagatcactgagtttcccgatttgactggcactgctaacttggaatctctgacccttactggcgctcagatttcctctctgccacaaacagtgtgcaaccagctccctaatctacaggtcctcgatctttcctacaacttacttgaagaccttccatctttttcagtgtgccaaaaactgcagaagatcgatttgaggcacaacgaaatctacgaaattaaggttgacactttccagcaactgctgtccttaagaagtctcaacctagcttggaacaaaatcgctatcatccatcctaacgccttctccaccctgccctcgcttattaagctggacctctccagtaatttgctgagttcattccccattacagggctccatggactgacccacttaaagctcacaggcaatcacgcacttcagagtctgatctctagcgaaaattttcccgaactgaaagtcatcgagatgccctatgcatatcaatgctgcgcctttggcgtctgcgagaacgcttataagatcagcaaccagtggaataagggggataactcatccatggacgatttgcataaaaaagacgccggaatgtttcaggctcaggacgaacgcgatctagaggactttctgctggactttgaggaggacttaaaagctctgcattcggtccagtgttcccccagtcccggaccattcaagccatgtgaacaccttctggatggatggctgatccgtataggagtttggacaattgctgtcctggctctgacttgcaacgccctagtaacttcaactgtgttccgtagtcctttgtatatatctcccattaagctgctgattggcgtaattgctgctgtcaacatgctgactggggtgtcttctgctgtgctcgcgggcgtggacgcctttacctttggaagctttgccaggcacggcgcatggtgggaaaacggtgtcggatgtcacgtcatcgggtttctctctatcttcgccagtgaaagctccgtgtttctgctcacactggcggctctagagcgaggctttagcgtcaaatactccgccaagtttgaaaccaaagccccattctccagcctaaaggtaattatattgttatgcgctctgctggccctgactatggccgctgtgcccctcctcggcggaagcaaatacggcgcctcacccctgtgtctgcccctgcttccacacgacgatcactgcctgcatcaggcccttctccagttcggccagggacggcccggcgagtatctgggcctgctctacggaaagacccattgccccgtggcccttcatcagctgcaccccaagctgccctgcgggttcttggtcttactgctcttcaataaaccctacatctaccagagctag

SEQ ID NO: 122174 - DNA, 2508 bp, synthetic construct
  misc_feature 1..2508: note = Description of Artificial Sequence: Synthetic coding sequence
  source 1..2508: mol_type = other DNA
atggacaccagtagactgggtgtgctgctgagcctgcctgttctgctgcagcttgcaacgggaggatccagccccaggagcggcgtgctcctaagaggttgccccacccactgccattgcgaaccggacggccgaatgctgttacgcgtggattgctcagatcttggtctgtctgaattaccttccaacctgtctgtctttacaagttacctggacctgtctatgaataacatctcccagttacttcccaatccactacccagccttaggtttttagaagagctgagactcgcggggaacgccctgacctacatccccaaaggagcattcacgggcctgtattctctgaaagtgctgatgctccagaacaatcagctgagacatgtacctacggaggctctccagaatctccgtagtctgcagtcactacaccttcacaataatagaatccattccctgggtaagaaatgcttcgacggtcttcattccctggagacgctagacctaaactataacaacttggacgagttcccgaccgcgatccgcacactcagcaacctcaaggagttggggtttcactcaaacaacatacgcagtatcccagagaaagcatttgtcgggaatcctagccttatcaccatacacttttacgataaccccatccagtttgtcgggagatccgcattccagcacctgcccgaactgcggacacttacactgaatggcgcctctcagattactgaattccccgatctcactggcaccgccaatttggaaagtctgacactgactggggctcagatctcttccctgccccaaaccgtgtgtaaccagctcccgaatctccaagtgctcgatctctcctacaatctgctggaagatctgccgtcattcagtgtctgccagaagctccaaaagattgatctcagacataacgaaatctacgaaatcaaagtggatacttttcagcaactgctgtcattacgcagcctgaacttggcatggaacaaaatagccataatccaccccaacgccttctccacactgccatccctgattaaactggatctatctagcaatctcctttcctcattccctataactggcctgcacggcttaactcacctgaagttaacaggcaaccacgcgctgcagtcgctgatctctagcgagaattttccagaacttaaagtcatcgaaatgccttacgcataccagtgttgtgcatttggggtctgcgagaatgcatacaaaatatctaatcagtggaataaaggcgacaattcctctatggatgatctccataaaaaagatgctggcatgtttcaggcacaagatgagcgagatctcgaagactttctcctggattttgaagaggaccttaaagcgcttcactccgttcagtgctcgccgagcccagggccctttaagccctgtgagcacctgctcgacgggtggctcatcaggattggtgtctggaccatcgctgtgctggctttgacctgtaacgccctggtgacaagcaccgtgtttaggtctcccctatacataagcccaatcaagttactcatcggagttattgcggccgtcaatatgctaactggggtctcgtcggctgtactcgcaggggttgacgccttcacgtttggttccttcgcgcggcacggggcctggtgggagaatggggttggttgccacgttattggattcctttccatctttgcttccgaatcaagtgtgttcctgctgactctggccgccctggagcgcgggttcagcgtgaaatactccgcaaaatttgagactaaagccccattcagctcactgaaggtcataattcttctttgcgctctgctcgcactcaccatggccgcagttcccctgctcggaggcagcaagtatggcgcttcccctctgtgcctacctctcccttttggcgagccaagtaccatggggtacatggtagccctcatcctgctcaattctctctgtttcctcatgatgactatcgcttataccaagctgtactgtaacctggacaaaggcgacctcgaaaatatctgggactgctccatggtaaagcacatcgccctgcttctgtttacaaattgtatattgaactgtcccgttgcttttctctccttttcatccctgattaacttaacctttatctcccccgaggtgatcaaattcatactgttagtggtggtaccactgcccgcctgtctgaaccccttgttatacattctttttaatcctcattttaaggaagatctcgtaagtctgcgcaagcagacttatgtttggaccaggtctaaacatccttcccttatgagtatcaatagcgatgacgttgaaaaacaatcctgcgactccacccaggctcttgtgacctttacatctagctctatcacgtatgacctccccccctcatcagtccctagcccggcctaccccgtcaccgaaagctgtcacctaagttccgtcgcgtttgtgccttgcttatag

SEQ ID NO: 122175 - DNA, 2652 bp, synthetic construct
  misc_feature 1..2652: note = Description of Artificial Sequence: Synthetic coding sequence
  source 1..2652: mol_type = other DNA
atggatacctctcggctaggggttctgctgtcccttccagtactactgcagctggcaaccgggggtagctccccacggtccggcgtgctgctgcgcgggtgcccgactcattgccattgtgagccagacggacggatgctcctccgcgtcgactgttccgacctcggattgtccgaactgccttccaatttatctgtctttactagttaccttgacctgtccatgaacaacatctcacaactcctccctaacccacttcctagccttcggttcctggaggaattgcgcttggcaggcaacgcgctgacctatatccctaaaggggcctttaccgggctgtattccctcaaggtcctgatgttgcagaacaatcaactccgccatgtgcccacggaagccctacagaatctgcgaagtctgcagtccttgagacttgatgccaatcatatttcatacgtgcctcctagttgtttcagcggcctgcacagtcttcggcacctgtggctggatgataatgcactgacagaaatccccgttcaagcatttcgatctctttcagctcttcaagccatgaccctggccctaaacaaaatccatcatatcccagattacgcctttggcaatttgagcagtctggttgtgctacacctacacaacaatagaattcacagtctgggcaagaaatgcttcgatggattgcacagccttgagactcttgatctcaactacaacaatctagacgaatttcctaccgctataagaaccctttctaacctgaaagagctccacttttacgacaatccgattcagtttgtaggacggtcagcgttccagcacttaccagaacttcgtacccttactttgaatggagctagccagatcaccgagttcccagacttgactggcactgcaaacttagagtcgttaaccctgactggagcacagatctctagtctgccacagaccgtttgcaatcagctgccaaatctgcaggtgttggaccttagttataacctgttagaagatctcccttctttttccgtctgccagaagctacagaaaattgatctccgccacaacgagatttatgagattaaagtggacacatttcagcagctattatctctgcggagtcttaacttggcatggaataagatcgccatcatccaccccaacgcgtttagcacactaccgtcgctgataaagctggacttatcctccaacctgctgtcatcttttcccattaccggattgcacggccttacccaccttaaactcactggcaatcatgctctgcagtcacttattagcagtgaaaatttccctgagctgaaagtgatagagatgccgtacgcttatcagtgttgtgcctttggagtgtgtgaaaacgcctacaaaatcagcaatcaatggaataagggtgataacagcagtatggatgatctccacaagaaagacgctggaatgtttcaggcccaggatgagcgcgatctagaggactttcttcttgattttgaggaagatctgaaagccctacacagcgtgcaatgcagtccctcaccaggacccttcaaaccgtgtgagcacctcctggatgggtggcttatcagaataggtgtgtggacaattgccgttctggcactaacctgcaatgccttggtgacttctaccgtttttagatctcccctttacatttccccgattaagctgctgataggggtgatagcagcagtgaacatgctgacaggagtgtcatccgcagtgcttgctggcgtggatgcgttcactttcgggtctttcgccagacatggtgcatggtgggagaatggagtcgggtgtcatgtgatcggattcctgtcaatctttgccagtgaatcctcagtgtttcttctcacgctggccgcgctggaaagaggctttagtgttaagtactccgcaaagtttgagacaaaggcccccttttctagccttaaggtgattatccttctctgtgccctgctggcattgactatggctgccgtgccactcctcggcggatccaaatatggagcttccccgctgtgcctgcctctaccgttcggggagcccagcacaatgggctacatggtagccttgatcctgctgaactccttgtgcttccttatgatgaccattgcctatacaaagttgtactgtaacctcgataagggcgacttagagaatatctgggattgctctatggtcaagcacatcgcacttctcctcttcactaactgcattctgaactgcccggtggcattcttgtcattcagctctttgattaaccttacgttcataagccctgaggtgatcaagttcattttattagtggttgttccactgcccgcctgcttgaatccactactctacatcctttttaacccccattttaaagaggacctggttagtctaaggaagcagacctatgtgtggaccagatccaagcacccatcactgatgtctattaacagcgatgatgtagaaaagcagtcttgtgacagcacccaagcccttgtgacgtttacgtcctcaagcatcacgtatgacctgccaccatctagtgttcctagcccagcctaccctgtcacggagtcctgtcacctgtcctccgttgctttcgtgccttgcttgtag

SEQ ID NO: 122176 - DNA, 2748 bp, synthetic construct
  misc_feature 1..2748: note = Description of Artificial Sequence: Synthetic coding sequence
  source 1..2748: mol_type = other DNA
atgggccgtcctcgccttacccttgtgtgccaggttagtataataatctccgcacgagatctgtctatgaacaatctcaccgaattgcagccaggactgttccatcacctgagatttctggaagagctcaggctgtccggtaatcatctgtcacatatcccaggtcaagcgttcagcggactgtacagcctgaagattctaatgctccaaaacaatcagttgggtgggatccccgcagaagctctgtgggaactgccatcactgcagtctctgcggttggatgccaacctcatatccttggtgcccgaacgctcattcgaggggctctcgagtctccgccacctctggctggacgacaatgccctgaccgagattcccgttcgtgcactcaataacctgcctgcgctgcaagctatgacacttgctctaaaccgcattagtcatattcccgattacgccttccaaaatctgactagtcttgtcgtgctacacctgcacaacaaccgtattcagcaccttgggactcactctttcgagggcctgcataatttggagacgctcgatctgaactacaataaactccaggagttccctgtggcaattagaactttgggaagacttcaggaactcggtttccacaacaataacatcaaggccattcccgagaaggctttcatgggaaacccactgcttcagacgatccacttttacgacaatccaatccagttcgtgggtcgttctgcatttcagtatttgcctaaattgcacaccctgagcttgaatggtgcaatggatatccaggagttcccggacctgaaggggaccacttccctagagatccttactctcaccagggccggcattcggctgctgccatccggcatgtgccagcaattacctcggctgagagttctggagctgagccacaatcaaatcgaggaactaccttccctgcatcggtgtcagaagttagaggagattggcctgcagcacaatcggatttgggagatcggtgccgataccttctctcagctatctagtctgcaggcactggacctgtcctggaacgctattcggagcatccaccctgaggccttcagtaccctgcatagcctagtgaaactggacttaacagataaccaattgaccacgttacctctggcagggctaggagggctcatgcacctgaagttgaaaggcaatcttgccctgagtcaggctttcagcaaagactctttccctaaactgaggatcctcgaggttccctacgcatatcagtgttgcccatatggcatgtgtgccagtttttttaaagccagcggtcagtgggaggcagaggacttgcatttagacgatgaagagagtagtaaaaggcctttaggcctgctggctcggcaggccgagaatcactacgaccaggatcttgacgaattacagctcgaaatggaggactcaaagccgcatccatccgtgcaatgcagcccgacccctggccctttcaaaccttgcgagtatttatttgaatcctgggggatacgtttagccgtgtgggccatcgtactcctgtctgtgctgtgcaatggcctcgtgctgttaacggtgttcgcaggaggtcccgtgcctttgcctccagttaaattcgtagttggggcaatagcaggggccaacacattaaccggaattagctgtggcctgctggcttctgtagatgcactcacttttggacagttcagtgaatatggcgcaaggtgggagacggggctcggttgtcgggcgaccggctttctggctgtgctggggtctgaggcctccgtgctcctcctcactctggctgcagtacaatgttctgtgagcgtgagctgtgtaagagcttacggcaagagtccctccctgggcagtgtgcgtgctggagtgctgggctgtctggcactcgccggcctggccgcagcattacctctggccagtgtaggggaatacggcgcctctcctctgtgtcttccatacgccccaccggaaggacaacctgccgccctcggatttacagtcgctctggttatgatgaattccttctgcttcctggttgttgccggcgcctatatcaagctttattgtgatttaccacgcggcgactttgaagccgtgtgggattgtgccatggttaggcacgtcgcctggctcatctttgccgatggactgctgtattgtcctgttgctttcctttcctttgcatccatgttaggcttgttccctgtcacccccgaggcagtgaaatccgttctcctcgtggtgctgcctctgccggcatgcctaaacccattactctacttattgtttaatccccactttagagacgaccttaggcgccttaggcctagagctggcgattccggccccctagcctacgctgccgcaggcgagctcgaaaagagttcctgtgacagtacacaggcattggtcgcattcagtgatgtcgaccttatcttggaggccagcgaggcaggccgccctccaggccttgaaacatacggctttccttcagtaactcttatctcatgtcagcagcctggtgcccctagacttgaggggagtcactgtgtggaacccgaaggcaatcatttcggcaatccacagccctccatggacggcgagttgctcctgagggccgaggggtccacccctgctgggggcggccttagcgggggcggaggctttcagccgagtgggctcgcttttgcctcgcatgtgtag

SEQ ID NO: 122177 - DNA, 699 bp, synthetic construct
  misc_feature 1..699: note = Description of Artificial Sequence: Synthetic coding sequence
  source 1..699: mol_type = other DNA
atgaataacctgactgagctccaacccggcctgtttcaccatttacgctttcttgaggagcttcggctgtcaggcaaccacttgtcacacatcccaggccaggcctttagcggcctctatagtctgaaaatccttatgttgcagaacaaccagctgggcggtattcctgccgaggccctctgggagctcccttctcttcagtcactgcgactggatgctaacctgattagcttggtgcctgagcggagcttcgaaggtctgagtagcctgcgacacctgtggctagacgacaacgccctaaccgagatcccggtcagggccctcaacaatctgcccgccctgcaggctatgactcttgccctgaatcgaatctcccacattcccgactacgcttttcaaaatctgaccagcctagtagtgctggacttaaattacaacaagttgcaagagttcccggtagccatccgcaccttgggacggttacaagagttatccctgaatggggccatggatattcaagagttccccgatctcaagggaactactagcctggaaattctgaccttaaccagagctggcatccgtctcttacccagcggcatgtgccagcaactgccacgcttaagggtacttgagctgtcccacaaccagatcgaggagctgccttccctccatcggtgtcagaagttggaagagtag

SEQ ID NO: 122178 - DNA, 2904 bp, synthetic construct
  misc_feature 1..2904: note = Description of Artificial Sequence: Synthetic coding sequence
  source 1..2904: mol_type = other DNA
atgccatctcccccaggtctgcgggctctgtggctttgcgctgcactttgcgcaagcaggagggctggaggcgctccacagccaggcccggggccaacagcctgtcctgctccctgtcactgtcaagaggatggcatcatgctcagcgccgactgttctgagcttggcctctctgctgtccctggagacttggatcctcttaccgcttatttagatctgtctatgaataatctgaccgagctccaaccaggtttgttccatcatcttagatttctcgaggaactccgcctgtctggtaatcatttgagccatattccagggcaggccttttctgggctctatagtctgaagattcttatgctgcagaataatcaacttgggggaattccagccgaggctctttgggagttaccttcactgcagtccctgagactggatgcaaacctcatatctctggtacccgagcggagttttgagggcctgagttctctacggcacctgtggctggatgacaacgccttgactgagattcccgtacgggcgctgaataacctaccggcacttcaggccatgacacttgccctgaaccgtatctcgcacatcccagactatgcctttcagaaccttacgagcctggtagtgctgcatctccataataaccgaatacagcacctcggtactcactcatttgaaggactgcacaatctagaaacactcgatctgaactataacaagctccaggagtttcccgtggctatacgcactctcggacggcttcaggagctcggcttccacaataataacataaaagctattcccgagaaggccttcatggggaatcccctcttgcaaaccattcacttctacgataaccctatacaattcgtaggcagatctgcttttcagtatctgccaaagctgcacacccttagtctaaacggagctatggacatccaggaattcccagatctaaaaggaaccacatctctcgagattttgaccttgacccgcgccggaatccgtctgttgccctccggcatgtgtcagcagcttccaagactgcgggtattagagttgagccacaatcagatagaggagctgccaagtttacacagatgccaaaagctcgaggaaatcggcctgcagcataaccgaatctgggagattggcgcggacacttttagtcagctgtccagtctgcaggcgcttgatttatcttggaatgcgattagatctatccaccctgaagccttcagcaccctgcactcactggtcaagctggacctcacagataaccagttgactaccttgccattagcaggacttgggggactgatgcacttgaaactaaaggggaaccttgctctgtcacaagcctttagtaaggactccttccccaaactgaggatcctggaggtgccctatgcctaccaatgctgtccctacggtatgtgcgcaagcttcttcaaggcgtctggccagtgggaagccgaggatctgcatctggatgatgaggagtccagcaagcgcccactgggcttgttggcccgacaagcggaaaatcactacgatcaggatctggatgagctgcagcttgagatggaagatagcaaaccacatccttcagtgcaatgtagcccgacacccggtcccttcaagccttgcgaatatctgtttgagtcttggggaatccgtcttgcagtctgggccattgttctgctgtccgtcctttgtaacggcctggtgttgttgaccgtctttgcaggcggacctgtaccccttcctcccgtgaagtttgtggtcggcgccatagcgggagccaatacccttaccggtatcagttgtggcctcttggcatctgtggacgccctcacattcggtcagttcagtgaatatggggcgaggtgggaaaccggacttggctgccgcgccacaggattcttggcagtactcggttccgaggcaagcgttcttttgttgactctggccgcagtccagtgtagcgtttcagtctcttgcgttagggcgtacggcaaaagcccatctctgggctctgtccgggccggggtgttggggtgcttggcgctagccggattggcagccgccttgcctttggccagcgtcggagaatatggggccagtccactgtgtcttccatatgccccgcccgaagggcagcctgcagctcttggctttacggttgccctggttatgatgaacagtttttgctttctcgtggtggctggagcctatatcaaactgtattgcgatctccctaggggcgattttgaggcagtgtgggactgcgcgatggtccgccatgtcgcctggctaattttcgcggacgggctcctttattgtcccgtggcctttctgtctttcgcaagtatgttaggcctcttccccgtaacacctgaagccgtgaaatcagtactcctggtggtgttgcccttgcctgcctgcctcaacccattactgtatctcctgttcaaccctcatttcagagatgatcttcgccgtcttaggcccagggctggagattctggcccattggcatacgcagctgccggagagcttgaaaagtccagctgtgactctactcaagccctggtggcgttctccgatgtggatctcatcctggaggcaagtgaggccgggcggcctcctgggctggagacatacgggtttcccagcgtcactctgatcagttgccagcagcctggagccccccgcctggagggttcccactgcgtcgagccagaagggaatcattttggcaaccctcagccctccatggacggagaactgctcctacgggccgaaggttcaacacctgctggagggggactctcgggcggtggcggcttccagccatcgggcttggcttttgcgagccacgtttag

SEQ ID NO: 122179 - DNA, 228 bp, synthetic construct
  misc_feature 1..228: note = Description of Artificial Sequence: Synthetic coding sequence
  source 1..228: mol_type = other DNA
atgcttagtgcagattgtagtgagctgggcctctctgcggtccctggggacctggatccactgacggcttatctagccgtaccaggcatggttgctgagggaaaggctgatcggacgggcggcggcggatcatcaaggcccgaaaagactaggcggtccctggaagaagccattgatagaactatcggaggcgctcaggagctgtgggccccagaggtgagctcatag

SEQ ID NO: 122180 - DNA, 2487 bp, synthetic construct
  misc_feature 1..2487: note = Description of Artificial Sequence: Synthetic coding sequence
  source 1..2487: mol_type = other DNA
atgcgccttgaaggcgaagggaggagtgctagagccggacagaatctgagcagagccggatctgctcggagaggtgctccacgcgatttatctatgaataatctcactgaactgcagccgggcctgtttcaccatctgcggtttctggaggagctccggctgagtggcaatcatttaagccatataccggggcaagcctttagcggcttgtactccctgaaaattctaatgctccaaaacaaccagctaggagggattcccgcagaagccctctgggaactccccagtcttcagagcctggatctcaattataataaactgcaagagttccctgtagctattcggaccctgggacggctgcaagagcttggctttcataacaataacatcaaggccatccccgaaaaagcattcatgggaaatccgctcctgcagaccattcacttctatgacaatcctatacagttcgtgggacggtcagcctttcaatatttgcctaagttgcacacactctcacttaatggagccatggatattcaggagtttcctgaccttaaaggcaccacgtccctcgagatattgaccctcacacgtgctggaattagactccttccttccggaatgtgtcaacagctcccccgcctgcgggttctggaactgagtcataaccagattgaggagctgccctctttgcacagatgccagaagttggaggagatcggcctgcagcacaaccggatttgggagattggcgccgacacctttagccaactgtccagcctacaggcgctggacctgtcgtggaatgccattcggagtatccatcctgaagctttcagcaccctgcattcactggtgaagctggatttaacagataaccagctgacaaccttacccttagcgggcttgggcgggctcatgcatctcaagctaaagggtaacttagccctgtctcaggcgtttagtaaggactctttccccaaactgagaattctagaagtgccatatgcctatcaatgctgtccttatggtatgtgtgcgtcctttttcaaagctagcgggcaatgggaggccgaggacctgcatttagacgatgaggagagctccaagaggccgctggggcttcttgcgaggcaggccgagaatcactatgatcaggacttagatgaactacagctagagatggaggatagtaagcctcacccctctgttcagtgttctcccacacctggcccatttaaaccttgcgaatatctgttcgagtcttggggaatacggctggcagtgtgggccattgtactgctgagcgttctgtgcaacggattggtattgctgactgtgtttgccggcggacctgtcccgctacctcccgtaaagttcgtcgtaggagctatcgctggtgctaacaccttgacaggaatctcgtgcggcctattagcttctgtcgacgcactgacctttgggcagttttccgaatatggagcacggtgggaaacagggcttggatgtagagccacaggcttcctggcagtgctcgggagcgaagcgagcgtcctcctgctgacgcttgcagcggttcaatgcagtgtgtctgtttcctgcgtacgcgcttatggaaaaagtcccagtctcgggagcgttagggcaggcgtgcttggttgcctcgccctggccggactcgccgcggccttgcctctggctagtgtcggcgaatacggtgcctcacctctgtgcctaccttatgcccctccggaaggtcaacctgcagcgctcggctttaccgttgcccttgtgatgatgaattccttctgttttctggtggtcgccggtgcctatattaaactgtattgtgatctgcctaggggggatttcgaggctgtgtgggactgcgccatggtgagacacgtcgcctggctgatctttgctgatggactgctgtactgccccgtggcctttctttcattcgctagcatgctcgggctgtttcccgttacccctgaggccgttaagagcgtactgctggtggtcttgcccctcccagcctgcttgaatccactactctacctcctgttcaacccacatttccgtgacgacctccggcggctgcgccctcgagcaggggacagtggccctcttgcttacgcagcggcaggcgagctggaaaaaagctcctgcgattcgactcaggctttagttgccttctctgacgtagacctgattctggaggcatcggaggccgggcgccctcccggactagagacctacggcttccctagcgtgacgctgatcagctgtcagcagccaggcgccccccgcctggaaggatcccattgtgtcgagccagagggaaatcactttgggaacccccagccctccatggacggagagcttctacttagggcagaaggctcaacaccagcaggtggcggcctgtccggtggagggggattccaaccatcaggactcgcattcgccagtcacgtatag

SEQ ID NO: 122181 - DNA, 6039 bp, synthetic construct
  misc_feature 1..6039: note = Description of Artificial Sequence: Synthetic coding sequence
  source 1..6039: mol_type = other DNA
atggagactctcaacggagcgggtgacaccggagggaagccaagcacaaggggcggcgatccagcagccagatcccggagaaccgagggtatcagagccgcatatagacgtggagatagaggcggagcccgggacctcctagaagaagcctgtgaccaatgtgcatctcagctggaaaagggacagcttctttccatcccagccgcttatggggatctggagatggtgcgctacttactgtctaaacgcctggtcgagctgcccactgagcccacagacgacaaccctgctgtggtggctgcctatttcggccacaccgccgtggtccaggaacttctggagcccctgactcctaaacaaactgagtgggaacagacggctcccttttccggaacctttcccctcagttgccatctgctgcctggaccatgttcccctcagaggttactgaattggatgctggcccttgcttgtcagcgcggacatctcggagtggtgaagctgctcgtgttgactcacggcgctgatcccgagagctatgccgtgagaaaaaatgagttccctgtgatcgtgagactccccctgtacgctgctatcaaatcaggaaatgaggacattgccattttcctactgcggcatggcgcatatttctgctcttacattctgcttgactctcctgacccaagcaagcatcttctgcgcaagtactttatcgaagcaagtcctctcccgagttcatatccaggcaaaaccgccctgagggtgaagtggtcgcacttgaggttaccctgggtggacctcgactggctcatagacattagctgccaaataaccgaattggacctgagtgctaattgtctggctaccctcccgagcgtgataccgtggggcctgatcaacctgcgcaagctcaatctctctgacaatcatctgggtgagttgccaggagtccaaagctctgacgagattatttgctcaagactgctggagattgacatcagtagcaataaactgtcccacttacctccgggtttcttgcacctctcaaagctgcagaaattgaccgctagcaagaactgtctcgagaagctgttcgaggaggaaaacgcaacaaactggatcggtctcagaaaactgcaagagctggatattagcgacaacaaactaactgagcttcctgcgctgtttttgcatagcttcaagtctttaaactccctgaatgtgtcgagaaacaatttgaaagtgttcccagatccatgggcatgtcctttaaagtgttgtaaggcttctcgaaacgctctcgaatgcctgcctgacaagatggccgttttttggaaaaatcacctgaaagatgtcgatttttctgaaaacgcgctgaaagaggtacctctgggacttttccaactggacgccctgatgtttctgagattacaaggaaaccagctggctgcattgcccccccaagaaaaatggacatgccgccagctgaagactctggacctgtccaggaatcagctgggcaagaacgaggatgggttgaagactaaacggattgcattcttcacaactagaggtcgccagagatccgggaccgaagcggctagtgtgctagagttccctgctttcctgtctgagagcctcgaagtactgtgtctgaatgataatcacctcgacactgtgccgccctctgtttgcctgcttaaaagcctatcggagctgtatctagggaataatcccggccttagagaacttcctcctgagctgggtcaattgggtaacctctggcagctagacacagaagacttaactataagcaatgttcccgccgaaattcagaaagagggtcccaaagctatgctgtcttacctgagagcgcaactgagaaaggccgaaaagtgtaaactcatgaagatgataattgtgggaccccctcgccagggcaagagcaccttattggagattctgcagactgggcgtgcacctcaggtggttcacggtgaagctaccattagaaccaccaaatgggagctgcagcgaccagccggaagcagagccaaagtagagagcgttgagtttaatgtgtgggacattggtggccccgctagcatggccacggttaatcagtgtttcttcaccgataaggcactgtacgttgtggtttggaacctggctttaggagaggaggccgttgcgaatttacagttctggctgttgaacattgaggccaaagcgcccaatgctgtggtactcgtcgttggcacccatctggacttgattgaagccaaattccgggtcgaaaggatcgccacgctgcgggcctatgtgctcgccctctgtcgctcccccagcggctctagagcaacagggttccccgatattaccttcaaacacctgcacgagattagctgtaaaagtctggaaggtcaggaaggactgcgccagcttatctttcatgtcacatgcagtatgaaagatgtgggctctactatcggctgccagcgtttagccggccgcttgatccctcgctcgtatctgtccctacaggaagctgtcctggctgagcagcagaggcggagcagggacgatgatgtacagtacttgaccgacaggcagcttgagcaactggtggaacaaacacccgacaatgacatcaaggactacgaggacctccaatccgctatcagcttcctgatcgaaacaggaactttgttacactttcctgataccagccacggactgaggaatctgtattttctggatcccatttggctgagcgagtgtttacaacgaatttttaatatcaaaggctcaagatccgtggccaagaatggggtgatccgggccgaagacttgcggatgctgctggtcgggactggtttcacacagcagaccgaggagcaatactttcaatttcttgctaaattcgagattgccctgcccgtcgctaacgactcctatctgctgccccacctcctgccctcaaagccagggctagatactcacggcatgagacatcccacggcaaatacgatccaacgagtctttaagatgagcttcgtgcctgtcggattttggcaaaggttcattgcacgcatgctgatttcgctcgcagagatggacttacagctgtttgaaaacaaaaagaacaccaagtcgaggaatcgaaaggtgaccatatacagctttactgggaaccagcggaatagatgttccacctttagggtgaaaaggaaccagaccatctattggcaggaggggttgttggtcacattcgacggaggctatttatctgtggaatcttccgatgttaactggaagaaaaagaaatccggagggatgaagattgtttgtcagtccgaggtgcgcgatttttccgcaatggctttcatcacggaccatgttaacagcctgattgaccagtggtttccagccctgactgcgacagaatctgacggtacaccactaatggaacaatatgttccgtgtcctgtatgcgaaacagcgtgggcacaacacacagatccatctgagaaatctgaagatgtccagtatttcgatatggaagactgtgtacttacagctatagagagggatttcatatcgtgccctaggcaccccgacttgcccgtgcctctgcaagaactggtgccagaattattcatgacggattttccggcgaggctattcctcgagaacagcaagcttgagcatagtgaggatgaaggctcagttctgggccaaggcggctccggcaccgtgatatacagagctcgctatcagggccagcccgtggccgtgaaacggttccatataaagaagtttaagaatttcgctaatgtaccagctgataccatgttgcgacatctcagagctaccgatgctatgaagaattttagcgagttccggcaggaagccagcatgctgcatgcactgcagcacccttgcatcgtcgcactcatcggaattagtatccatcctctgtgctttgccttagaattggctcctctgtcatccctcaatacagttctctctgaaaacgccagggacagttcctttatccccctggggcacatgctaactcaaaagatcgcctaccagattgcctcagggctggcttacctccataagaagaatatcatcttttgcgaccttaagagtgacaacattctagtgtggtccctcgatgttaaggaacacatcaacataaaactgtccgactatggcatatctcgacagtccttccacgagggggctctgggcgtggaggggacaccaggctaccaggctcccgagatcaggcctaggatagtgtatgatgagaaagtggacatgttttcctacggcatggtgctctacgagctactgtccgggcaacgtcccgccttagggcatcatcagttgcagatcgccaaaaaactgtcaaaaggaatccgccctgtactcggtcagccagaggaggtccagtttaggcggctgcaggccctgatgatggagtgttgggacactaaaccagaaaaaagacccctcgcattaagcgtcgtatctcagatgaaggatccaacttttgccacctttatgtacgaactgtgttgtggaaaacagaccgcattcttctctagccagggtcaggaatacactgtggtcttctgggatggaaaggaagaaagccgaaactatactgtagtgaacacagagaagggcctgatggaagtgcaaagaatgtgttgtccaggaatgaaggtgagttgtcagctgcaagtgcagagatctctgtggactgccaccgaagaccagaaaatctatatttacactttgaagggaatgtgcccactgaatacaccccagcaggccttagataccccggctgtggtgacctgtttcctggcagtgccagtcatcaagaagaactcgtacttggtgcttgccggcttggccgacggtctggtcgcagtgtttccagttgttcgtggcactcccaaagattcttgttcatacctgtgcagtcacactgctaatcgaagtaaattcagcatagcagatgaggacgcaagacaaaatccatatcccgtgaaggcgatggaggtggttaattccggctcggaagtctggtacagcaatggccctggtttgctagtgattgattgcgcttccctggagatatgtagacgactggaaccctacatggccccatctatggtgacaagtgtggtatgcagctcggagggccggggggaagaagtggtgtggtgtctggatgacaaagccaattctcttgtgatgtatcatagcactacgtatcagttgtgtgcacggtacttctgcggagtacccagtcccttacgagatatgttcccagtccgccccctggacaccgagcccccggcagcctcccacaccgccaatcccaaagtacccgagggcgacagtatcgctgacgtctccatcatgtacagcgaggagctgggaactcagattctgatccatcaagagtctttaaccgactactgctctatgagctcctattcatccagccctccgagacaagcagctcggtccccatcctctctcccttccagtcccgctagtagcagttccgtcccgttcagcacagactgcgaggactccgacatgctacacacgcccggggccgcctccgataggtccgagcatgatctgactccaatggatggggaaaccttcagtcagcacctgcaagctgttaagattttggccgttcgtgacctgatttgggtccctcgcaggggcggcgacgtaattgttatcggacttgagaaggactccggtgcccagagaggacgcgtgattgctgtgctcaaagctagggaacttacccctcacggcgtgcttgtcgatgccgccgtcgtcgcaaaggatacagtagtgtgcactttcgaaaatgaaaacactgaatggtgtttggctgtctggcgtgggtggggggccagagagtttgacattttttatcaatcctatgaagagctcggtcggctcgaggcttgcactcggaaacgccggtag

SEQ ID NO: 122182 - DNA, 6048 bp, synthetic construct
  misc_feature 1..6048: note = Description of Artificial Sequence: Synthetic coding sequence
  source 1..6048: mol_type = other DNA
atggccggtatgtcccagcgacctccgagcatgtattggtgtgtcggtcccgaagaatctgccgtatgccctgaacgtgccatggagacactgaatggggctggcgacacgggagggaaaccctctacaaggggtggggatcctgccgcacgcagtcggcgcaccgagggaatccgagccgcttataggagaggcgatcgaggaggagctagggacctgctggaggaggcatgcgatcagtgcgcatcacagctggagaagggacaactactaagcattccagccgcttacggggatctggagatggttaggtacctgctgtccaaacgactcgttgaactacccacagaacccaccgacgacaatccggctgttgtggcagcttatttcggccacaccgcagtggtgcaagaactgcttgaatctcttcccggaccatgctcccctcaaaggcttctcaactggatgctggccctggcttgccagaggggccacctcggggtggtcaagctgttagtgctgactcatggcgccgaccctgagtcttacgctgtgaggaaaaacgaattccccgtaattgtccggctgcctctgtacgctgcgattaaaagcggaaacgaagacatcgctatttttctcctgcgccatggagcctacttctgtagctatatcctcctggactcccccgatccctctaaacaccttttaaggaaatacttcattgaggcaagtccattaccttcttcctatcctggaaagaccgcactgagagttaagtggtctcaccttcgtttgccttgggtagacctcgactggcttatcgatatctcgtgtcaaatcacagagttggacctgtccgcaaattgcttggccactctcccatcagtgatcccatggggtctgataaacctgcgaaagttaaatttgtcagataatcacctgggagagcttcctggagtgcaatcttctgatgagattatttgttccagactactggagatagatatatcaagcaacaagctttcccatcttccacctgggtttttgcacctatccaagttgcagaagctgacagcgagcaaaaattgcctagaaaagctgtttgaagaagagaatgccaccaactggataggactccgcaaactccaggagctcgatatttctgacaataaactcactgagttgcccgctctctttctgcacagctttaaaagcttaaattcactgaatgtttcacgcaacaatctgaaggtctttccggatccgtgggcctgccctttaaaatgctgtaaagctagtcgcaacgcattggaatgtttgcctgataagatggcggtgttctggaaaaatcatctgaaagacgttgacttctctgaaaacgcactgaaggaggtgcctttgggactgttccagttagacgccctcatgtttctcaggttgcaaggaaatcagctcgccgctctgccaccacaagaaaagtggacttgcagacagctgaaaacgctggacctgtcaagaaatcagcttgggaaaaatgaagatggacttaaaactaagcgaatagctttttttactactcgggggagacaacgctctggtaccgaagcagcatccgtgcttgagtttccagcattcctgagcgaatctcttgaggtcctctgtcttaatgataatcacctggacacggtgccgcccagtgtctgcctgttaaaatcactctccgaattgtacctgggcaataacccagggctcagggagcttcctcctgagctcggacagctcgggaatctgtggcaactcgataccgaggacctgacaatttccaatgtacctgctgaaattcagaaagagggtccaaaggccatgctgagctatctaagagcccagctgcggaaagctgaaaagtgcaagctaatgaagatgattatcgttggcccccctagacagggaaaatctacacttctggagatactgcagaccggacgtgcgccccaggtcgtccacggcgaggcgacaattcgcacgactaagtgggagctccagagacctgctggcagtagagcgaaagtggaatctgtggagttcaacgtttgggacattggaggtcccgccagcatggccaccgtcaaccagtgctttttcactgataaggccctctacgttgtggtctggaatttggccctgggtgaagaagctgttgcaaatttgcagttctggcttctcaacatcgaggccaaagcccccaacgcggtagttttggtggtggggacacatttggatttgattgaggctaaatttcgagtggagaggattgctaccctgagagcctatgtcctggctttgtgtagaagcccaagtgggagcagggccacgggtttccccgatattacttttaaacacctgcatgaaattagttgcaaatccctggaggggcaggaaggcctccgacagttgattttccatgtgacctgcagcatgaaagatgtgggttcaacaattggctgtcaacggctggcagggcggctaatcccacgctcttacctgtcactgcaggaggccgtgttggccgagcagcagagaaggtcacgcgatgatgatgtgcaatacctgaccgatcgccagttagaacagctggtcgaacagacaccagataatgacattaaggactacgaggacttgcaatccgcaatttctttcctgattgagacaggcacactgctccattttcccgatacaagccatggtctacggaatctttactttctggaccccatctggctttcagaatgcttgcagaggatattcaacattaaaggatccaggagcgtggccaagaacggggtcattcgagccgaggatctccgaatgttgcttgtggggaccggcttcacacaacagactgaggaacagtacttccagtttctggcaaagtttgaaatcgccttgcctgtcgccaacgatagttatctactgcctcacctcctgccatccaaaccgggtcttgacactcacggcatgcgccaccccacagcaaacaccatccaacgagtctttaagatgtctttcgttccagtaggcttttggcagaggttcatcgcaagaatgctgatttccttggctgagatggatctgcagctgtttgagaacaaaaagaacaccaagagccgaaatcgcaaagttacaatctacagtttcacaggcaaccagaggaacagatgctccacattccgggttaagcgaaaccagaccatatattggcaggagggactgctggtcacttttgacggcggatatctatccgtcgaaagttctgacgtcaattggaagaagaagaagagcggcgggatgaagattgtgtgtcaatccgaagttagagattttagcgccatggctttcattacagatcacgtgaatagcctcatcgatcagtggttccccgcactcacagccacagagtctgacggcactcctttgatggagcagtacgtaccctgcccagtttgtgagaccgcctgggcccaacacaccgatccctctgagaagtccgaggatgtacagtattttgatatggaagattgcgtgttgaccgctatcgagcgcgattttatctcttgtccgaggcatccagatctgccggtccccctccaggagctagtgcctgaactgtttatgaccgactttcctgcccggttgtttctggagaatagcaaattggaacattccgaggatgaggggagcgtcctcggacagggcgggagcggcaccgtgatataccgggcccgctaccagggacagcctgttgcggtgaaaaggttccacatcaagaaattcaagaattttgctaatgtgcccgcagacaccatgctgcgtcatcttagggccacagatgctatgaagaatttctcagaatttcgccaggaggccagcatgctgcacgccctgcaacacccttgcatagttgcgctgatcggcatcagtatccacccactttgctttgcgctagagctggcacctttatcatctctcaataccgtgcttagcgaaaacgccagggacagcagtttcataccgctgggccacatgctgactcaaaagatcgcctatcagattgcttcaggcctggcctacctccacaagaaaaacataatattttgtgatcttaaatcggacaatatcctagtatggagcctcgacgtcaaggagcacatcaatatcaaactgtcagattacggaatcagccgccagagctttcatgagggcgcactgggtgttgagggaacaccaggatatcaggccccagaaattcggccaagaatcgtctatgacgagaaggtcgacatgttttcatatgggatggtactgtacgagttgctttccggacagcgcccagccttggggcatcatcaactacaaatagccaagaaactgagcaagggaatcagaccggtgttagggcaacctgaggaagttcagttccggcgcttacaggccctcatgatggagtgttgggataccaaaccagagaaacggccactggcactttccgttgttagccagatgaaagacccaacctttgctacattcatgtacgagctctgttgcgggaaacagaccgcttttttttctagccagggccaggagtacacagtggtgttctgggacgggaaggaggagtcccgcaactatactgtggttaataccgaaaagggtcttatggaagtccagaggatgtgttgtcccgggatgaaggtgagttgtcagttgcaggtccaaagatcgctctggacggccactgaagatcagaagatttatatctacacgttgaaggggatgtgcccattgaacacaccgcagcaggcgctggataccccagccgtcgtgacgtgctttcttgccgttccggtgattaaaaaaaacagttacctcgttttggccgggctggccgatggcttagtggccgtttttccagtcgtcagaggaactccaaaagactcctgctcgtacctatgctcacatacggctaataggagcaaatttagcatcgccgatgaagacgcaaggcagaatccttaccccgtgaaagctatggaggtggtcaacagcggtagcgaagtttggtatagcaatgggcccgggttgctggtcattgattgtgcatccctggagatctgcagacgtctggaaccatatatggctcccagcatggtgacctccgtggtgtgctcttcagagggccgcggggaggaggtggtatggtgccttgatgacaaagctaactccttggtcatgtaccattctaccacctatcagctgtgcgccaggtacttttgcggcgtcccttcccccctgagagacatgtttcctgtgagaccactcgatacagaaccacccgctgccagccacacagccaaccccaaggtgccggaaggcgacagtattgccgacgtcagtatcatgtactctgaagaactggggacacagatcttgattcaccaggaatctttgacggactattgcagcatgtcgtcctactcatcttctcctccccgtcaggccgctaggtcaccgtcctccctcccatcctccccagcttcaagcagcagtgttccgtttagcaccgactgtgaggactccgacatgctacatacaccaggtgccgcttccgatcggtcggaacacgatttaacacctatggatggcgagaccttttcacaacacttgcaggcagtcaaaatactcgccgtaagggatttgatctgggtgcctcggcgtggaggcgacgtgattgtgattggtctcgagaaggactccggggcccagagggggagagtaatcgccgtgctcaaagccagagagttgaccccccatggagttctggtggatgctgcggtggtagccaaggacaccgtagtgtgcaccttcgaaaatgaaaataccgagtggtgtctggccgtgtggagaggttggggcgctcgggagttcgacatcttctaccagtcatatgaggagctcgggaggttagaggcctgtacccgtaaacgccggtag

SEQ ID NO: 122183 - DNA, 2025 bp, synthetic construct
  misc_feature 1..2025: note = Description of Artificial Sequence: Synthetic coding sequence
  source 1..2025: mol_type = other DNA
atgcttcacgcactccagcacccatgcatagttgcactgattggtatctctattcacccgctgtgtttcgcactggaacttgccccattgtccagcctcaacactgtgctgtctgagaatgcgcgggacagcagtttcatacccctggggcatatgcttacgcagaaaatcgcataccaaatagctagcggactcgcttatctgcataagaagaatatcatcttctgcgatctgaagagcgacaatattttagtgtggagcctagacgtgaaagagcacattaatatcaaactttcagactatggaatttccaggcaatcgtttcacgaaggtgcgctcggtgttgagggtacccccgggtaccaggcaccagagatccgtcctaggattgtgtatgacgagaaggtggacatgttctcgtatggcatggtcctgtacgaattgctgagcggccagcggcctgctctagggcatcaccagttacagattgctaagaagctgtccaaggggattagaccagtgcttggccagcctgaagaagtacaattccgccgtctgcaggccttgatgatggaatgttgggatactaagcctgagaaaaggcctctcgcattaagtgtggtgtcccagatgaaagatcctacctttgctacttttatgtatgaactttgttgtgggaagcagaccgcatttttttcttcccagggtcaggagtacaccgtagtgttttgggatggcaaagaagagagccgaaactataccgtggttaacactgaaaaaggcctgatggaagtgcagagaatgtgttgtcccggaatgaaagtgagctgtcagctgcaggttcagaggagtctatggaccgccactgaggatcaaaaaatctatatatacacccttaagggtatgtgcccattgaatacccctcagcaggcactggacaccccagctgtagtgacgtgttttctggccgtgcccgtgatcaaaaaaaactcttatttggtgttggccggtctggccgacggtctggttgctgtgttccctgtggtccggggcacgccaaaggacagctgctcttacctgtgttctcacacagccaacaggtccaagttttcaatcgctgacgaggatgccagacagaatccataccccgtcaaggcaatggaagtcgtcaacagcggttcagaggtctggtactcaaatgggccaggattgttagttatcgattgcgcctctttagaaatctgcaggcggttggaaccgtacatggcacccagtatggtgacgtcggtagtgtgtagcagcgaggggaggggcgaggaggtggtttggtgccttgatgacaaagccaatagtctggtaatgtaccattctacaacttatcaactttgcgccaggtatttttgcggagtgccaagccccttacgtgacatgttccccgtccggcctctggatactgagcccccagcggcctctcataccgcgaatccaaaggtccccgagggcgatagcatcgcagacgtgagtatcatgtattctgaagaattgggcacacagatcctgattcaccaagaatcactgaccgactactgttccatgtcgtcttattcatcttccccgccccggcaggcagcacgaagcccttcatcactgccatcctcaccagcgagctccagctcagttccattctctaccgactgcgaggactcagatatgcttcatactccaggtgccgcctccgatcgctcagagcacgatctgactcccatggatggggagacattttcacagcacctgcaagccgtgaaaatcctggccgtgagggacctcatttgggttccgagacgaggtggggatgtcatcgtcatcggactggagaaagactcaggcgctcagagagggcgagtgatagccgtcctgaaagctagagaattgactccgcacggtatcatgcctgtaagcagtgtcaaagtgtgctgggcagggtggcctgttcgggatatggtctatatggtcgcagtcatgtag

SEQ ID NO: 122184 - DNA, 99 bp, synthetic construct
  misc_feature 1..99: note = Description of Artificial Sequence: Synthetic coding sequence
  source 1..99: mol_type = other DNA
atggcaggtatgtctcagaggcctccttcaatgtattggtgcgtgggaccagaggagtccgcagtatgtccagagcgagctatggaaactctaaactag

SEQ ID NO: 122185 - DNA, 1506 bp, synthetic construct
  misc_feature 1..1506: note = Description of Artificial Sequence: Synthetic coding sequence
  source 1..1506: mol_type = other DNA
atgttcagctatggcatggtgttatatgagctcctgtcaggccaacgccccgctctgggccaccaccagctgcaaatcgcaaagaaattgtctaagggaatccgcccggtgctcgggcaacccgaggaagtgcagttccgtcgcctgcaggcgcttatgatggagtgttgggacacaaagccagagaagcggccacttgcactctctgttgtgagccaaatgaaggaccctacttttgccacctttatgtatgaattatgctgtggaaagcagacagccttcttctcatctcaaggccaagaatacactgtggtcttctgggacggcaaggaagagtcacggaattacaccgtagtgaacacggaaaagggactgatggaagttcagcggatgtgctgccccggcatgaaggtatcctgtcagttgcaagttcagcgaagcctgtggacagcgacagaagaccaaaagatctatatctacacactgaagggcatgtgccctctcaacaccccacagcaggccctagacacccccgccgttgtcacgtgttttttagccgtgcctgtgattaaaaagaacagctacctcgtactggccgggctggccgacgggctggtggccgtgtttcccgtcgtccgaggcacacctaaggactcatgctcctacctgtgctctcatacggctaatagatcaaaatttagtatagctgacgaggacgctcgacagaatccttacccggtcaaggccatggaggtggtgaactcgggaagtgaggtttggtatagcaacgggcctgggcttcttgtcatcgattgcgccagcctggagatatgtcggcgtcttgagccgtatatggcaccttctatggtaaccagtgttgtgtgtagtagcgagggcaggggcgaagaggtggtatggtgtttggatgataaggccaatagtcttgttatgtatcatagcacaacctaccagctgtgtgcaagatacttctgtggcgttccttcacccttgcgggatatgttcccggtgcgaccactagacaccgaaccacccgcggccagccacaccgccaatcctaaagtgccagagggagatagcatagcggatgtctcaattatgtattccgaagagctgggcacacagatactgatccaccaggaatcattaaccgattattgttcgatgtcctcctactcttcatctccacctcggcaggccgcacggtccccctcctccttgcctagttcccccgctagtagctccagtgtgcccttttcaaccgattgtgaagactcagacatgcttcacacacctggagctgcctctgatagaagtgaacatgacctcaccccaatggacggggagaccttcagccaacatctgcaggcggtgaagatcctcgccgtgagagatctcatctgggtacctcgccgtgtggagatgttatcctccttggcatggagacgcatcctggccccaagcggtgcggaatcacttccttcctag

SEQ ID NO: 122186 - DNA, 7584 bp, synthetic construct
  misc_feature 1..7584: note = Description of Artificial Sequence: Synthetic coding sequence
  source 1..7584: mol_type = other DNA
atggcaagcggatcttgccagggctgcgaagaagatgaagagaccctgaagaagctgatcgtcaggctcaacaatgtgcaggagggcaaacagattgaaactctggtgcagattctcgaagatcttctggtgttcacgtattctgagcgcgcttctaagctgtttcagggcaagaacatccatgtccccctgttgatagtgctcgactcctatatgcgggtcgcatctgtccagcaggtggggtggtccctgttgtgcaaattgatcgaagtgtgtcccgggacgatgcagtccctcatgggcccccaggacgttggaaacgactgggaagttcttggcgtccaccaactcattctgaagatgctgactgtccataatgcatctgtcaatctgtccgtgatagggttaaaaactctcgatctgctcctcacatccggaaagattacactgttgattttggacgaagaaagcgacatctttatgctaatttttgatgccatgcacagcttcccagcgaacgatgaagtccagaaactgggatgcaaggctctccatgtccttttcgagagggtgtccgaagagcagctgacggaatttgttgaaaacaaagactatatgatccttctgagcgccttgaccaatttcaaggatgaggaggagatagtgctccacgtgcttcactgcctccattctttagccatcccatgtaataatgtcgaagtcctgatgtccggaaatgtgcgctgttacaacattgtagtcgaggctatgaaagcctttcctatgtcagagagaatccaggaggttagttgctgtctgcttcaccgcctcactttagggaacttttttaacatactggtcctgaatgaggtacacgagttcgtcgtgaaggctgttcagcaatacccggaaaatgccgcactgcagatcagtgcgctgtcctgccttgcactgctcaccgagacaatttttctgaatcaggatctcgaagaaaaaaacgagaatcaagaaaacgatgacgagggcgaggaagacaagcttttctggctggaggcttgttacaaagcgcttacgtggcacagaaagaataaacatgtgcaggaagcagcctgttgggctttgaacaacctcttgatgtaccagaactccctccatgaaaagataggtgatgaagatggccatttccccgctcatcgggaggttatgctttcaatgcttatgcactcatcatccaaggaagtgtttcaggcttctgcaaatgcattgagcactcttctggagcagaacgtgaatttcagaaaaatcttgctgtcaaagggcatccaccttaacgttctggaattgatgcagaagcacatccactctcctgaggtcgcagagtccggctgcaaaatgctcaatcatctgttcgaggggagcaacacttctttagacataatggccgccgtggttccgaagatcctcacagtgatgaagcgacacgagacctctctgccagtgcagctggaagcactgagggccatactgcattttatcgtccctgggatgccagaagaatctagagaagacacggaatttcatcacaaactgaatatggttaagaaacaatgcttcaagaatgacatccacaagctcgtgctcgctgctctcaatcgcttcataggaaaccctggcatccaaaaatgtggtttgaaggtgataagtagcattgttcacttccccgacgctctggagatgctatcattggaaggcgcgatggatagcgtgcttcataccttacagatgtatcctgatgatcaagaaattcagtgcctcggcctatcccttattggttacctcattaccaagaagaatgtgtttattggcaccgggcatttactggccaaaatccttgtgtcttcgttatataggttcaaagacgtagcagaaattcaaaccaaaggattccagaccattcttgccatactgaagcttagcgcaagcttctctaagttgcttgtgcatcatagcttcgatctcgttatttttcaccagatgtcaagtaacatcatggaacagaaggaccagcaattcctcaatctatgttgcaagtgttttgcaaaggtcgcgatggatgattacctgaaaaacgttatgctggagagagcctgtgatcaaaacaatagtataatggttgagtgtttacttctgctgggggccgatgccaaccaggccaaggagggtagtagcctaatctgtcaagtctgcgagaaagagtccagtccaaaacttgtggagttgttacttaattctgggtctagagagcaggacgtccgaaaagcactaaccatatccataggcaagggcgattcccagatcatcagcctcctactccggaggctggccctggacgtcgccaacaactcgatctgcctaggtggtttctgcattggcaaggtggaaccttcctggctgggcccattgtttcccgacaagacgtccaatctcaggaaacaaaccaacatagcctctactcttgcacggatggtgatacggtaccagatgaagtctgccgtggaggaggggaccgctagcgggagcgatgggaatttctcagaagatgtgctctcaaaatttgatgaatggacatttataccagacagctcaatggacagtgtgttcgctcagtcagatgatctggatagcgagggctctgaaggctccttcctggtaaaaaaaaaatctaattccattagcgtgggcgaattttaccgggatgcggtccttcaaagatgcagtcccaatctgcaaagacactctaactctctgggcccaatctttgaccatgaggacctgcttaagagaaagaggaaaatcttgtccagcgatgatagtctgagaagctctaagctgcagtcgcatatgaggcactcggatagcatctcctcgctggccagcgagcgagagtatattacaagtctcgatctgagcgccaacgagctgcgggatatcgatgctctgtcacaaaagtgttgcattagcgtgcacctcgaacacctcgagaagttagagctgcatcagaatgctctcacaagttttccccagcaactgtgcgagacactgaaatctttaacccatctagacctgcactccaataagtttacttctttcccctcttatctccttaagatgagttgtattgccaatttagacgtgagccgcaacgatattggtcctagcgtcgtcctcgacccaaccgtcaagtgccccacactgaagcaattcaatctgagttataatcaactttcctttgtacctgagaacttgactgacgtggttgagaaactggagcagctcattctggaaggtaataagatctcaggtatttgttctcctcttcgccttaaggagttgaaaattctcaacctgagcaagaatcatatctcatcattatctgaaaatttccttgaagcctgtcctaaggtagaaagtttcagcgcccgaatgaattttctggctgcaatgcctttcctaccaccgagcatgaccattcttaagctgagtcagaataagttctcgtgcatccccgaagctatacttaaccttcctcacctcaggtcattggatatgtcgtccaacgatattcagtaccttcccgggccagcccactggaagtctcttaacttgcgggaactattattttcccataatcagattagcatactggatttatccgagaaggcctatctgtggagccgtgtggagaagctgcatctgtcacataataagttgaaagaaatccccccagaaatcggatgtcttgagaatctaacgagcctggacgtgagctacaatctggaactccgaagcttccctaacgagatgggaaagctgtctaagatatgggacttacccttggatgagctgcatttgaactttgatttcaagcatatcgggtgcaaagcgaaggacatcattcgttttctacagcaaaggcttaagaaggccgtgccttataaccgcatgaagctgatgatcgtgggcaataccgggtcaggtaagacaaccttgttgcagcagctgatgaagactaaaaagtctgacctcgggatgcaatctgcaaccgtcgggatcgacgttaaggattggcccattcaaattagagacaaacgcaagagagatctcgtgctgaacgtttgggacttcgctggccgggaagaattttattcaacgcatccacattttatgacacagcgagccctctacctcgctgtttacgacctaagtaaaggtcaagctgaagtggatgccatgaaaccctggttattcaatatcaaagcacgcgccagtagctctcctgtgatactcgtgggaactcacctcgatgtgtccgatgaaaaacagaggaaggcatgcatgagcaagataacgaaagagctccttaataaacgcggcttccccgctatccgcgactaccacttcgttaatgccacggaagaaagcgatgcattggctaagctgcgtaaaactattattaatgaaagcctcaatttcaagatacgcgaccagctggttgtcggacaactgattcccgattgctacgtagaacttgaaaagatcatactgtctgagcgcaaaaacgtgcccattgagttccccgttatagacaggaagcgcttgcttcaactagtcagagaaaatcaactgcagctggacgagaatgaattacctcacgcagtccacttcctgaacgagagtggcgtgcttctccacttccaggatccggcgcttcagctgtcagacctttattttgtggaaccaaaatggctgtgcaagattatggcccagatcttgacagtcaaggtcgaagggtgccctaagcaccctaaaggcattatatccagaagagatgtggagaagtttctgtcgaaaaaacggaaatttccaaaaaattacatgagccaatactttaaactgctggaaaagtttcagattgcactccctattggagaggaatatctgttggtaccaagctcactgtccgaccaccggccagtcatcgagcttccccactgcgagaatagcgaaataattatccgcctctacgaaatgccttactttccaatgggcttctggagccggttgatcaaccgtctcctggagatctctccctacatgctttcgggcagagagagagccttgcgcccaaaccggatgtactggaggcagggtatttacctgaactggtccccagaggcctactgtttagtcgggtctgaagtcctggacaatcaccccgagtccttccttaagatcacggtccctagctgcagaaagggctgcatccttctcgggcaggtggtggaccatatcgactcactcatggaagagtggtttcccgggctgctggaaattgacatatgcggagagggtgaaaccctcttgaagaagtgggcgctttacagctttaacgatggcgaagagcatcagaaaattctcctagacgatctgatgaaaaaggcagaggagggcgacttgctagtgaatccagaccagcctcgcttgactatacctattagccaaatagcccccgacttaatcctggccgatttgcccagaaatatcatgctgaacaatgacgaactagaatttgaacaggccccagaattcctcctaggagacggcagcttcggctctgtatacagagctgcctacgaaggagaggaggtggccgtgaaaattttcaataagcacacatcactccggttgctgaggcaagaattggtggtgttgtgtcaccttcatcatccttctttgatctctctcctggccgcaggcatcaggccccggatgctggttatggaattggcgtcaaaggggtctctcgataggctgcttcagcaagacaaggccagcctgaccaggacattacaacaccggatcgctctccatgtagcagatggcttacgctatctgcacagcgcgatgatcatctatcgggatctcaaaccacacaacgtgctcctgtttaccctgtacccaaacgcggcaatcatcgcaaagatcgccgattatggcattgctcagtactgctgtcggatgggcattaaaacctcggaagggaccccaggtttccgtgcccctgaggtagcacggggtaatgtgatctataatcaacaggctgatgtctactcttttggattactgttgtacgacattctgaccacaggcggcagaatcgtcgagggcctaaaattccctaatgaattcgatgagcttgagatccagggaaaattgccagatccggtcaaggagtatggatgcgccccttggccgatggtggaaaaacttattaagcagtgtctcaaagaaaatccgcaggagcggcctacatccgcccaggtgttcgacatcctaaattccgcggagttggtgtgtcttaccagacgtattttgctgcctaaaaacgttattgtggaatgcatggtcgccactcatcataacagccggaatgcctccatatggctggggtgtggacatactgaccggggtcagctctcatttcttgacctaaacactgagggctatacctctgaagaggtcgccgactcgaggatactgtgtctcgcattagtgcacctgccagtagagaaggaatcctggattgtgagtgggacgcagagtggaactctactcgtaatcaatactgaggacgggaagaagagacacaccctggagaagatgacagatagtgtgacttgcctctactgcaacagctttagcaagcagtccaaacagaagaattttctgctggtcgggacagccgacggtaagcttgccatatttgaagataagaccgtgaaattaaagggcgctgcacccctcaaaattcttaatattggcaacgtgtcaacccctctgatgtgtctttctgaatctacgaacagtactgaacgcaacgtgatgtggggcggttgcgggacaaaaatattttcattttcaaacgattttactattcagaaactgatcgagaccaggactagccagctgttttcttacgctgccttctcagattcaaacattatcacggtcgtggtggacactgcgctatatatcgcaaagcaaaatagccccgtagtggaagtatgggataagaagaccgagaaactgtgtggtctgatcgattgtgtgcatttcctgcgcgaagtgatggtcaaggagaataaagagtcgaagcacaagatgagctattccggaagagtcaaaaccctctgtctacagaaaaatactgccctgtggatcggcactggaggaggtcacatcctcctgctggatctttctaccaggcgcctgatccgggtaatttataacttttgcaacagcgttcgcgtcatgatgaccgctcagctggggagcctaaagaacgtcatgttggtgctaggctacaatcgaaaaaataccgagggaacccagaaacagaaggagatccaaagttgtttgactgtttgggatattaacttaccgcatgaggtgcagaaccttgagaaacatattgaagtacggaaggagctggccgagaaaatgcgaagaactagtgtggaatag

SEQ ID NO: 122187 - DNA, 582 bp, synthetic construct
  misc_feature 1..582: note = Description of Artificial Sequence: Synthetic coding sequence
  source 1..582: mol_type = other DNA
atgacctcttcgtgtttcaggagcacaactcgccggtcactcagttcccagactgctcaaagattggtctgtccacagtttataaacggcaccgcaaaggacagtatcctgacttctcgctcccaggtgcccatcattctccagtggaacaaatcctccaagaaatttgtcccgcacggcgatatccccaatatggaggatgtgttggcagtgaagtctttcagaatgcaaaatacgctatacctgtcactaacccgattcatcggcgatagtagggtgatgaggtggaacagtaaacagtttgtagagattcaagctttaccctcccgcggcgctatgactctacagcccttctcatttaaggacaatcactaccttgcactcgggtccgattataccttctcccagatataccagtgggacaaagaaaaacagcttttcaaaaaattcaaggaaatctacgttcaggccccgagatcctttacagcagtttcgactgaccgccgagattttttttttgctagctcattcaaaggcaaaaccaagatctttgagcatattatcgtagaccttagcctctag

SEQ ID NO: 122188 - DNA, 1638 bp, synthetic construct
  misc_feature 1..1638: note = Description of Artificial Sequence: Synthetic coding sequence
  source 1..1638: mol_type = other DNA
atggcgcttagaaggggtggctgcggggcacttggacttctgctgttgctcttaggcgccgcctgtctgatcccccggtccgcccaggttagacgcctagcaagatgtccagcaacgtgtagttgcaccaaggagtctattatttgcgttggttcctcttgggtgcctcgtattgtgcctggagatatttctagcctctccctggttaacggcacattctctgaaatcaaagacagaatgtttagtcacctgccgagcctgcagctgctattgctgaattccaactctttcaccataattcgtgacgatgcattcgctggcctgtttcacctcgagtacctcttcattgagggcaacaaaatcgagaccatcagccgcaatgcctttcgcggactacgagacctgacacaccttagcctggcgaataatcacattaaagccctacctcgggacgtgttcagcgacctggactcattgattgagcttgacttaagagggaataagtttgaatgtgactgcaaagccaagtggctgtatctgtggctgaaaatgacgaattcgacggtgtcagacgttctctgcatcgggcctccggagtatcaggaaaaaaaactcaatgacgtgacaagttttgactacgaatgtaccactaccgatttcgtggttcaccaaacacttccgtaccagagtgtctctgtcgataccttcaattctaagaacgatgtctacgtggctatagcccagcccagtatggaaaactgcatggtgttggagtgggaccatatagagatgaatttccgctcatatgataatattacaggacaaagcattgttggatgtaaagcgattctgattgatgatcaggtgttcgtagtggtcgcccaattgttcggcggctcccacatctacaaatatgatgagtcatggacgaaattcgtgaagtttcaggacattgaggttagtagaatatcaaaacccaacgacatcgaactgttccagatcgacgatgaaactttcttcgtcattgctgacagttccaaggctgggctgagcaccgtttacaagtggaactccaagggattttatagctatcagtcgctgcatgagtggttcagagataccgacgccgaattcgtggacatagacggcaaaagccatttgattttgagctctcgatcccaggtgccgattatcctgcagtggaacaaatcctccaagaaatttgtgccccacggagacattcccaatatggaggacgtgctggccgtcaaaagctttcggatgcagaataccctgtacctctcgttgacaaggttcattggcgatagcagggtcatgagatggaattctaagcagtttgtagaaattcaggccctgccatcccggggcgccatgacactacagcctttttctttcaaagacaatcactacttagccctggggagtgactataccttcagtcagatttaccagtgggataaggagaaacagctcttcaaaaagtttaaggaaatatatgtccaggctcctcggtccttcacagctgtaagcaccgaccgcagggatttttttttcgcaagctcattcaaggggaaaactaaaatattcgagcatatcatagtcgacctgtccctctag

SEQ ID NO: 122189 - DNA, 1647 bp, synthetic construct
  misc_feature 1..1647: note = Description of Artificial Sequence: Synthetic coding sequence
  source 1..1647: mol_type = other DNA
atggccggactcagagctagaggcggccctggtcctggcttgctggccctcagtgcgttaggcttttgcttgatgttgcaggtgtccgctaagaggccacctaagactcctccttgcccacctagttgtagttgcacgcgcgacacagctttttgtgtcgatagcaaggctgtccccagaaacctaccttctgaggtgatctcactgactctagtaaatgcggctttcagtgagattcaagatggggccttttcccacctgcctctgttgcagttccttctcctgaacagcaacaaattcactctcattggggacaatgcttttaccggactcagccacctccagtatttgtttatagagaataacgatatatgggccctgagtaaatttactttccgggggctcaagagcctgactcacctgtccctggccaacaataacctacagacccttcctagagacatcttcaggcctttggacattctcaacgacctggaccttcggggtaatagtcttaattgcgattgcaaggtgaagtggcttgttgaatggctggcccacacgaacacaactgtggctcccatctactgcgccagtccccctcggttccaggagcacaaggtgcaagacctgcctctgcgggagtttgactgcatcacgactgacttcgtgttgtatcagacccttgccttccctgccgtgagtgctgaaccattcctgtattcaagcgacttgtatctggcactcgcccagcctggcgtgagtgcatgcacaatcctaaagtgggactatgttgagcggcagttgagggactacgatcgaatccccgcgccttcagccgttcactgtaaacccatggtcgtggatagccagctgtacgttgtggtggcacaactattcgggggtagctatatctatcactgggaccccaacacaacccgtttcaccaggctgcaagacatagatcctcagcgtgtgcgtaagccaaacgatctcgaggcctttcgaatcgatggtgattggtacttcgccgtggccgacagtagtaaagccggagcgacctcgctgtataggtggcaccagaatggcttctacagtcatcaagccctccacccgtggcaccgggacaccgatctagagttcgtcgacggggagggaaagcccagactcatcgtctcatcaagctcacaggcacctgtaatttatcaatggagccgaacccagaaacagttcgtggctcagggggaagttacccaagtgccagatgcccaggccgttaaacattttagggcaggacgggactcctacctgtgtctgtcaagatacataggcgactccaaaattcttcggtgggaaggcacccgctttagcgaggtccaggctctgcccagtagaggaagcctcgcactgcaaccattcctggtgggggggcggaggtacttggcgctaggatccgacttttcatttacgcagatataccaatgggatgaaggcaggcagaagttcgtgcgcttccaagagctggcggtgcaggcgcctagggcattttgctacatgcccgcaggcgacgcccagctactccttgccccttcatttaagggccagaccctggtgtaccgccatatagtggtagacctgtcggcgtag

SEQ ID NO: 122190 - DNA, 1614 bp, synthetic construct
  misc_feature 1..1614: note = Description of Artificial Sequence: Synthetic coding sequence
  source 1..1614: mol_type = other DNA
atgggcggcgcaggcatcctgctgctcttgctcgctggcgctggcgtggtggttgcctggcgtccacctaaggggaaatgcccgttacgctgcagctgcagcaaggactcggcattgtgtgaggggtcacctgatctgccagtctcattctcccctactttactgtccctgtctctggtcagaacaggggtgacccaactgaaggcgggctctttcctgagaatcccatctctccatctattgttgttcacctctaactcatttagtgtgattgaggacgacgcattcgccggcttgtcccacctgcaatacctcttcatagaggataatgagattggatctatttcaaagaatgctctgcgtggtctccgtagcctcacccacctgtccctggccaacaaccacctggagaccctcccaaggtttctgttcaggggcctggatacgctcacacatgtggacttgcggggcaaccctttccagtgcgactgccgtgttttgtggctgctccagtggatgccaactgtgaatgcttccgttgggacaggtgcgtgtgcgggtcctgcatccctcagtcatatgcagctccaccacttggacccaaagacgttcaaatgtcgggctatcgaactgagttggtttcagactgtgggcgaatccgccctttctgtggaaccgtttagttaccaaggcgaaccccatatcgtgctggcgcagccgtttgctggaaggtgcttaatcctgtcatgggactattctcttcagagatttagacccgaagaagaacttccggccgctagtgttgtctcatgcaagcccttagtgctgggtcccagtttgttcgtgcttgcagcgcgcctctggggtgggtcacagctctgggcaaggccaagccccggattacggttagcccccacacagaccctagccccccgtcgtctgctaagacccaacgacgcagagctgctctggctggaaggacagccctgttttgtggttgctgacgcatctaaagccggtagtaccactttgttgtgccgggacggcccaggtttttatccacatcagagtttacacgcctggcaccgcgatactgatgcggaggcacttgagctggacggcaggcctcatttactgctggcttctgcatctcagcgaccagtcctgtttcactggaccggaggccggtttgagagaaggacagacattccagaggcagaggacgtctatgcgactcgccactttcaagctgggggagatgtcttcttatgtcttacaagatacatcggggactcgatggtgatgcggtgggacggctccatgttcagactattacagcagcttccatctcgtggcgcacatgtttttcagcctctcctcattgcgagagatcaactggccatacttggctccgatttcgcgtttagccaagtgctcagactggagcccgataaagggctgctggagcccctgcaggagctagggcccccagccctggtcgcaccacgagctttcgctcatattacaatggccgggcgaaggtttcttttcgcagcctgctttaaggggccaacccagatatatcagcaccatgagattgatctgtccgcttag

SEQ ID NO: 122191 - DNA, 1485 bp, synthetic construct
  misc_feature 1..1485: note = Description of Artificial Sequence: Synthetic coding sequence
  source 1..1485: mol_type = other DNA
atgggaggagccggcatacttctcctgctgctggcaggtgctggagtcgtagttgcctggaggcctccaaagggtaagtgccccctgagatgcagttgcagcaaagatagcgccctctgtgagggctcacctgacctccccgtgtctttcagtcctacactactgagcttatccttggtgcgtacaggagtaacccagctcaaagcggggtcctttctgcgcattccctccctgcacctgttattgtttacctctaattccttctccgtgattgaggatgacgccttcgcaggcctcagtcatctgcagtacctgttcatagaggataatgagataggcagcatatcgaagaacgctttaaggggtctccgctccctgacccacctgtctttagcaaacaatcatctagaaacactgccgagatttctgtttaggggtctcgacaccctgacgcacgtggatctgaggggcaatccctttcagtgcgattgtcgagtgctatggctgctgcagtggatgccaaccgttaacgcatcagtcggcacgggcgcatgtgcagggccagcctcactatcacatatgcagctgcatcacttggatccgaaaacttttaagtgtagggccatcgagttatcctggttccagactgtgggggagagcgccctgtccgtggagccattttcctatcagggtgaaccccacatagtcctcgcccaaccattcgcaggcaggtgtcttatcctatcctgggactactcgctgcaaagattcaggcctgaggaggaactgcctggggaaccccccccccggccctcggcatgccctgcagcttgtctggccggactcacttgtctgcccacctcaccacaacgccctccttggtgtcccgctagtcactggtgctgggctagagctagtagctgctggctcccggcgtgtggcggggcccatagctgtgggccgggacctgtccccgcttgcgcctggccccaaaggcgcccttggccgaggggcggctgttgcggacctatgaccccttcctcctgtggatggaagggcaatccagcttcttggtggccaatgcctccccggcgcgctgcaccacgttgctgcgcggcaactggtcccgcgttcacccgaactcgggcatgcacgcctgggaccggaactaggactctcaggccttggtcatggacggcaggaccaacctgctgttggcctaggctgcccagtgggccttgttcctctactgggcctgtagctgcatcaagggacgcccagacatcaccaagaccccgtatgtccatgccacacgctacctctaggctggtgggcacatgtagctgtgcaagtcacgcgacccttggcactccctggagctgcgccggaacggccccctgcttcgtctgttgctcgaacttcccacgcgccgttcccaccagtagctcccattgtagtagtccaggtactagctggccgtcctag

SEQ ID NO: 122192 - DNA, 1617 bp, synthetic construct
  misc_feature 1..1617: note = Description of Artificial Sequence: Synthetic coding sequence
  source 1..1617: mol_type = other DNA
atgggaggggcaggaatcctcctgcttctcctcgcaggggccggcgtcgtcgtcgcatggcgcccacccaagggcaagtgtcctcttagatgttcctgctctaaagattctgccctctgtgaagggtctccagacctccccgtgagctttagcccaaccctcttgagtctgtcccttgtcaggacgggagtgacacagctcaaagcgggctcattcctgcggatcccatcactccatctgctgttattcacgagcaactctttcagcgtcattgaggatgacgcctttgcaggactctcacatctgcaatacttatttatcgaagacaacgaaattggctctatctccaagaatgccctccggggtctgcgcagtttaacccacttaagcttggccaacaatcatctggaaactctgccacgtttcctgtttcgagggttggatactctcactcacgttgatctgcgaggcaaccccttccagtgtgactgccgggtgctctggctgctccagtggatgccaaccgtgaacgcctccgttggtaccggcgcatgtgctggtcccgcatctttgagccacatgcaactgcatcatctcgatcccaaaacatttaagtgccgggccatcgagctgagctggttccagactgtgggggagagtgccttatcggtagagcctttcagttatcagggtgaaccacatatcgtgctggctcagcccttcgcgggtagatgtctcatcctgagctgggattacagcctccaacgctttagacctgaggaggaactccccgccgctagcgttgttagctgtaaacctctcgtgctgggaccatcgctgtttgtccttgcagctaggttatggggtggcagtcaactgtgggctaggcccagtcctggattgcgcctggcgcccactcagactctggccccccgtcgcctactccgccccaacgacgccgaactgctctggcttgaaggacaaccctgttttgtagtagccgatgcctccaaggccggttcaacgacgctgctttgcagggacgggcctggcttttacccacaccaatcacttcacgcctggcatcgcgacacagatgcagaagcgcttgaattagatggccgcccccatcttttactcgctagcgccagtcaaagacctgtgctcttccactggacaggcggcaggttcgaaagaagaacagatatccccgaagcagaggacgtctatgctacacgacacttccaggccggaggcgatgtgttcctgtgcttgacgcgctatattggggattctatggtggtcatgaggtgggacggatctatgttccgattactgcaacagctgccctcgcggggagcacatgtgttccagcccctcctgatcgcccgggatcagttggccatactggggagtgattttgcattttctcaggtgttgaggctcgaaccggataaagggctcctggaacctctgcaggagttgggccccccagccttagtggctccaagggcattcgcccacatcacaatggctggcaggcgtttcttatttgccgcttgtttcaaaggtcctacccagatctaccagcaccatgagatagatctctcggcttag

SEQ ID NO: 122193 - DNA, 2091 bp, synthetic construct
  misc_feature 1..2091: note = Description of Artificial Sequence: Synthetic coding sequence
  source 1..2091: mol_type = other DNA
atggctaccccagggtctgagccccaaccatttgtgccagccctctccgtcgccacactacatcctctgcatcaccctcatcatcatcaccaccaccatcagcaccacggcggaaccggcgcaccggggggcgccggtgggggtggaggaggcagcggcggatttaatttgcccctgaatcgcggactggaacgcgcactggaggaggcagcaaattcaggagggctgaatttgagcgcacggaaactgaaggaatttccacggactgctgccccgggacatgatctaagcgacacagttcaggccgacttatctaaaaaccggctagtggaagtacctatggaattgtgccattttgtttctcttgagattctgaatctgtaccacaactgcatccgcgttatccctgaggccattgtgaacttacaaatgctcacgtatcttaatttatccagaaatcagctgagcgcactgcccgcctgcctatgtggcctgcccctgaaagttttgattgcttctaataacaaactcgggtctctcccagaggagataggacaactgaaacagctgatggagcttgacgtgagttgcaatgagataacagccctccctcagcaaattggtcagctgaagagtttgcgcgaactcaatgttaggcgcaactacctgaaggtgttaccacaggagttagtggatttatccctggtgaagttcgactttagttgtaacaaggtgctggtgatccctatttgctttagggaaatgaagcagctgcaggtgctgcttttggaaaacaacccactgcagtcccccccagcccagatttgtactaagggcaaggtacatatttttaagtatctttccattcaggcttgccagatcaaaactgcggacagtctgtacttgcataccatggagcggccacatctgcatcagcacgtggaggacgggaaaaaggattcggacagcggagtcggcagtgacaacggagataaaaggctttcggccactgaacccagtgatgaggataccgtctctctcaatgtgcccatgtctaacattatggaggaggaacagataataaaggaggactcatgtcaccgcctgagcccagtgaaaggcgagttccaccaggaattccagcccgaaccatccctcttgggggattctactaatagtggcgaggaaagggatcagtttactgaccgtgcagacggacttcactctgagttcatgaactacaaagcccgggcggaggactgcgaagagcttctccgcattgaggaggatgtgcactggcagaccgagggcataatctccagctcgaaggatcaggatatggatatcgcaatgattgaacagctccgcgaggccgtggacttgcttcaggatcctaatggcctgtctactgacattacagaaagaagcgtgcttaatctttatcctatgggatcggccgaagcactcgaactccaggactctgcgttgaatggccagattcaacttgagacttcaccggtctgtgaagtccaatccgatctaaccctgcagtccaatggttctcaatacagcccaaatgagattagagagaattccccggcagtctccccaacaacaaactcaactgctccttttggattgaaacccaggtcagtatttctccggcctcaacggaacctggaaagtattgatccccaattcactatacggcggaaaatggaacagatgcgggaagagaaagaactggtcgagcagcttagggagtccattgaaatgaggctgaaggtatccctccatgaggatttgggagccgcactgatggatggcgttgtactgtgtcatctagtcaatcacatccggccacggtccgtggcttccatccatgtaccgagccccgctgtgccaaagctgtcaatggctaagtgtagaaggaacgtcgaaaattttctagaagcctgccggaagctcggtgtgcccgaggagaagctttgcctgcctcaccacatccttgaagagaaaggccttgtaaaggtgggaattaccatacaggccttactggatatcactgtgacaaaagccctgtttacttag

SEQ ID NO: 122194 - DNA, 2187 bp, synthetic construct
  misc_feature 1..2187: note = Description of Artificial Sequence: Synthetic coding sequence
  source 1..2187: mol_type = other DNA
atggccactcccgggagtgagccccaaccattcgtgcccgcattaagcgtggctacccttcacccattacaccacccccaccaccatcatcaccatcaccagcaccatggaggtacaggggcgcccggcggtgcaggaggcggtggcggcggcagtggcggcttcaacctccctttgaatcggggcctggagcgcgccctggaggaggccgccaacagtggcgggctgaatctttccgcacgtaaactgaaagagttccccaggacagccgccccagggcacgatctttccgataccgtgcaggccgatctctcaaaaaatcggcttgtggaagtgcccatggaactgtgccatttcgtctccctagagattttgaatctctatcataattgcatcagggtaattcctgaagctatcgtgaatctccagatgttgacgtacctcaacctttcccgtaatcaactgtccgctctgcccgcctgtctctgtggccttccccttaaggtgctgatagcttccaataacaaactcgggtctctgcctgaggaaatcggacagctcaaacagcttatggaactcgacgttagctgtaatgagattacagcgctaccacagcagatcgggcagctcaagagtctccgcgagctgaacgtgagacggaattaccttaaggtgttgccacaggagctcgtagacctatcgcttgtgaagtttgatttctcctgcaacaaggtgctggtgatcccaatttgcttcagggagatgaagcagctccaggtccttctcctggagaataacccactgcaatccccccccgcccagatctgcacaaaggggaaggtgcacatcttcaagtatctaagcatacaggcctgtcaaattaaaaccgcagatagcttatacctccatacgatggagcggcctcatcttcaccagcatgttgaggacggaaaaaaggattccgatagcggggtcggatctgataacggggataagaggctctctgccacagaaccctccgacgaggataccgtgtccctgaatgtgcctatgtccaatataatggaagaagagcaaattattaaagaggactcatgccataggctatcacccgtcaagggcgagttccaccaagaatttcaacctgagccatccctcctcggagactccacgaacagtggagaggagagagatcaattcacagatcgggcagacggactgcattctgagtttatgaactataaggctagagccgaggattgtgaggagttgttaaggatcgaggaagatgtgcattggcagaccgagggaattataagttccagcaaggaccaggacatggatattgcaatgatcgaacagcttcgggaagctgtggacctgcttcaggacccaaatggattgtctaccgatattactgaaaggtcagttctgaacctttaccctatgggctccgcagaggccctggagctgcaggattccgcactaaatgggcagatccagttggaaaccagccctgtgtgtgaagtccaaagcgatctgacgcttcagtccaatggaagtcagtactctcccaatgagatcagggagaactctccagccgtctcccctacaactaattctacagcgcctttcggacttaaaccgcgatctgttttcctgaggccacagcgcaatttggagagtatagatccacaatttacgatcagaagaaaaatggaacagatgcgcgaggagaaagaactggtggagcagctgagggaatctatcgagatgcgcttgaaagtttcactgcacgaagatcttggtgctgccctgatggacggagttgtcctctgccacctggtaaatcatattcggccccgaagcgtagcctctattcatgtaccctcccccgcagtgcccaaactatccatggccaagtgccgtcggaatgtggaaaacttcttagaggcttgccgcaagttaggcgttccggaggcagatctgtgctctccctgcgatattctgcaattagacttccggcatatcaggaagacagtagacaccctgctcgccctgggtgaaaaggcccctccacctacttcggcgctcagaagccgggacttgatcggcttctgtcttgtgcatatcctctttatcgtccttgtgtacatcacttaccattggaacgccctgtcggcttag

SEQ ID NO: 122195 - DNA, 2292 bp, synthetic construct
  misc_feature 1..2292: note = Description of Artificial Sequence: Synthetic coding sequence
  source 1..2292: mol_type = other DNA
atggccacgcccgggtctgaaccgcagccctttgtcccagccttgagcgtggcgaccctccaccccctccatcatccccaccatcaccaccatcatcaccagcatcatgggggtactggggctccagggggcgctgggggagggggagggggttccgggggattcaatctcccactcaaccgggggctcgagcgcgcattggaggaggccgccaattccgggggcttgaacctgagtgcccggaagcttaaggaattccctcgcacggccgcgcctggtcacgacttatctgacaccgtccaggcagatctgtcaaagaacaggctggttgaggtgcctatggaattatgtcactttgtctctctcgagatcctcaatctgtaccacaattgtatacgtgtgatcccggaagctatcgtgaacttgcagatgctgacttacctcaacctgtcccggaatcagctgtccgccctgcctgcctgtctgtgtggcctgcccttgaaggtgctcatcgcatcaaataataagcttgggagcctccctgaagaaatagggcagttgaaacagttgatggaacttgatgtgtcttgcaacgaaattactgctctgccacaacaaatagggcagctgaaatctttgcgagagttgaatgtgcggagaaactacctgaaggtcctgcctcaggagctggtggacctctcactcgtcaagtttgatttttcctgtaataaggtattagttatcccaatttgcttccgggaaatgaagcagctgcaagtcctgttactcgagaacaaccccctacaatccccccccgcacagatctgtaccaaggggaaggtccacatctttaagtatcttagcatccaagcctgccagataaagacagctgactccttgtaccttcatactatggagcgccctcacctccaccagcacgtggaagacggcaagaaagattcagactctggcgtgggcagcgacaatggcgacaagaggctctcagcaaccgaaccctccgacgaggacacagtgtcccttaatgtccccatgtccaacatcatggaggaagaacagatcatcaaggaggattcatgccaccgtctcagccccgtaaagggcgaattccaccaggagtttcaacctgagccctccctgctaggggactccaccaacagcggcgaagagcgcgaccagttcaccgatcgcgccgacggccttcattccgagttcatgaactataaagcccgcgccgaggattgcgaggagttactcaggattgaggaagacgtgcattggcagaccgagggaattattagctcaagcaaagaccaggacatggacatcgctatgattgagcagttgagagaggccgttgacctccttcaggaccctaatggactgtctaccgacataacggaaagaagcgttttgaacctttacccaatgggctctgctgaggccctggagttacaggatagtgcattaaacggtcagattcaactggagacctcacccgtctgcgaggtacagtccgacctgaccctgcagagcaatgggagtcagtacagcccaaacgaaatcagagaaaactcccctgctgtgtctcctactaccaattctaccgcaccgtttggactgaagcccaggagcgatcccgcactaatccttcctcctatctctttcaacaccctcacccaagctcagacctgggactctagctcatattccgtgccgtccgagggcgactctgataatgtcttcctgagaccgcagaggaatctcgaatccatcgacccacagtttactatccgacgaaaaatggagcagatgagggaggaaaaggaattggtggagcaattgagggagagcatagaaatgcgccttaaggtgtcacttcacgaggatctgggggcagctctgatggatggggttgtgctgtgccatctggtgaatcacattaggccccggagtgttgcctctattcacgtcccctctccggcagtacccaagctgagcatggcgaaatgccggcgcaatgtcgaaaacttccttgaagcctgtagaaagctgggtgtccccgaggccgacctatgcagtccgtgtgatatcctacagctcgacttcaggcatattcgcaagaccgttgacacactgttggccctcggagagaaagcaccgccacctacctcagccctcaggagccgggatctgatcggcttctgtctggtacatatcttgtttattgtgctggtgtacattacataccattggaacgcgttgagtgcttag

SEQ ID NO: 122196 - DNA, 3282 bp, synthetic construct
  misc_feature 1..3282: note = Description of Artificial Sequence: Synthetic coding sequence
  source 1..3282: mol_type = other DNA
atggcccgccccgtgagaggcggactgggagcaccccgtcggagcccttgcctgctcctgctctggcttcttcttctccgcctggagccagttactgccgctgctgggcctcgagctccatgcgctgccgcctgcacctgcgcaggcgactccctcgattgtggcggtcgggggctggcagcacttcctggcgaccttccgtcatggacaagatccctgaacctttcatacaataaactatccgaaattgaccctgctggctttgaagatcttcctaacttgcaggaggtgtatctgaacaacaacgagctgactgctgttccctcacttggagcggccagctctcacgtcgtgagtcttttcctgcaacataataagatccgcagcgtagaagggagccagcttaaggcctacttatcgcttgaggttctggatctctcactaaataatattactgaagtgaggaatacctgtttcccccatggccctcctattaaggaactgaacctggcaggcaacagaattggcacccttgagttgggcgctttcgatggtctgtcccgaagtctcctaacgctgcgcctgtccaaaaaccgaatcacacagctccccgtaagagcctttaaactcccgagattgacccagctggatctgaacaggaaccggatccgcctgatcgaaggactaactttccaaggcttgaacagcctggaagtacttaaactgcagaggaacaacatctcaaagctgacagatggagccttttggggactgagcaaaatgcatgtcctccatctggagtataattcgctagtcgaggtgaactcaggttccttgtacgggttgacagctctgcaccaactgcatttaagtaataacagcatcgccaggattcacagaaaaggctggtctttttgccagaaactgcatgaactggtcctcagctttaacaatttgacccgtctcgatgaagagtccctcgccgaactgagcagcttaagcgtcttgcgtcttagtcacaatagcatcagccacatagcagagggagcctttaaaggactgcgcagcttacgagttcttgacctggatcacaatgagattagcggaacgatagaagacacctccggcgctttctcgggcctcgattccctgagtaagctgacactcttcggaaataaaattaagtcggtcgctaaacgagctttttctggactggaggggctggagcatctcaatttaggcggaaatgccatccgttcagtccagttcgacgcattcgttaagatgaaaaatttgaaggagctgcacatttcatccgatagttttctgtgtgactgtcagttgaagtggttgccaccttggctgatcgggcggatgctgcaggcctttgtcaccgccacatgcgctcatcccgagagtctgaaaggacagtccattttctctgtgcctcccgagtcatttgtctgcgatgattttctcaagccacagatcatcactcagcctgaaactacaatggctatggtcggtaaggacattcgttttacctgctccgccgcctcctcatccagttccccaatgacttttgcgtggaagaaggacaacgaggtcctgacaaacgcggacatggaaaattttgtacatgttcatgcccaggacggggaagtaatggagtatactaccatcctgcatctccgacaggtgacattcggccatgaaggaagataccagtgtgtgataacaaatcacttcggatccacctattcccataaagctcgactgacagttaatgtcctccctagtttcactaagacaccccatgacatcactattagaaccaccacgatggccagactggagtgcgcggcgactgggcaccccaaccctcaaatagcgtggcagaaagatggcggtactgatttccccgccgcacgggagcgtaggatgcacgttatgcccgatgatgacgtcttcttcatcaccgatgttaaaatcgacgacgccggcgtctacagctgcacagcccaaaattcagccggatccatttcagcaaatgccaccctgaccgtgcttgaaacaccttctctcgtggtgccactggaggatcgggtggtcagcgtcggggaaactgttgctctccagtgtaaagctacaggaaatccaccaccaaggatcacttggttcaagggtgaccggcctctgtcactgactgaaaggcaccacctcacacctgataatcaactgttggttgtgcagaacgtggtcgccgaggatgccggccgatatacctgcgaaatgagcaataccctgggtacagagcgcgctcacagccagctgagcgtcctgcctgctgcaggctgccgcaaagacggaactactgtagggattttcacaatagcagtcgtgtccagtatagtgcttacttcacttgtctgggtttgtattatctaccaaacccgcaagaaatctgaggagtattctgtcactaacacagacgagaccgtcgttcctccagacgtgccgtcctatctgtcgtcgcagggaaccctgtccgaccgccaggaaacagtggtgcgcactgaaggcggccctcaggctaatggtcatatcgagagcaacggcgtgtgtccaagagatgcatctcatttccctgagcccgacacccactcagttgcttgcagacagccgaaactgtgcgccggttctgcataccacaaggagccttggaaagcgatggagaaggctgaaggaaccccagggcctcataagatggaacacgggggtagagtcgtatgctcggactgtaatactgaggtggactgttatagccgcggccaggcatttcacccccagccagtctcaagggattcggcccagccctccgcccccaacggtcccgagcccgggggctccgatcaagagcatagcccccaccaccaatgctctcggactgctgcggggagttgtcctgagtgtcagggcagcctgtacccctctaaccacgaccgaatgctcacagcagtcaagaaaaaacctatggcttccctggacgggaagggcgatagctcctggactttggctaggttgtatcacccagatagcacagagctccagcccgcatcaagccttacaagcgggagtcccgaaagagccgaggcccagtacctccttgtaagcaatgggcacctccctaaggcttgcgatgctagccctgaatccaccccattgaccggtcaactgcccggcaaacaacgggttccactattactggcgcctaagagctag

SEQ ID NO: 122197 - DNA, 2991 bp, synthetic construct
  misc_feature 1..2991: note = Description of Artificial Sequence: Synthetic coding sequence
  source 1..2991: mol_type = other DNA
aatctgagctataacaagctgtcagagatagatcccgctggcttcgaggacctgccaaatttacaggaagtttatcttaacaataacgagctaacagccgtcccctctctgggagccgcctcaagtcatgttgtaagcctgttcttgcaacacaataagatcagaagcgtggaaggcagtcagctgaaggcctatctgagtctggaagttctggatttgtcactgaataacattaccgaggtacgcaacacctgtttcccccacgggccacctatcaaagagttgaatctggccggaaacagaataggtactcttgagcttggggcctttgatggcctgtcccgttctctcctgacactccggctgagtaagaatagaattacgcagcttccagtgagagcgtttaaactgccacggttgacccagctagacctcaacaggaataggatcagattgatcgaagggttaacattccagggcctaaacagcctcgaggtcttgaaattgcaacgcaacaatatttctaagctgaccgacggtgcattctggggactgtctaagatgcatgtgctccatttagaatacaactcgctggtcgaagtgaactcgggttctctgtacggactgaccgccctccaccagttacacttaagcaacaactccattgctagaatacatagaaaggggtggtccttttgtcagaagctccacgaactcgttctgtctttcaataaccttactcgcctggatgaggagtcgctggctgagttgtctagcttgagtgtgctcaggctgagtcataacagcatttcccacattgctgaaggcgctttcaaaggactcagatcacttagggtgctagaccttgaccataatgaaatcagcggcacaattgaggatacgagtggcgcgttttctgggctagattcactctccaaactgaacctgggcggcaacgccattaggagtgtgcaattcgacgccttcgtaaagatgaaaaatttgaaagaactgcatatatcctccgactcattcctgtgtgactgccaacttaaatggctgcccccttggctcataggcaggatgctacaggccttcgtgaccgctacgtgcgctcatcctgagtctttaaaaggacaaagtatttttagtgtgccgcctgaaagtttcgtgtgtgatgatttcctcaagccacaaatcattacacaacctgaaactacaatggcaatggtgggcaaggacatacgctttacctgcagcgccgcctctagctcatcctcccctatgacgtttgcatggaagaaagacaacgaagtcctcactaatgcagacatggagaactttgtccacgtacacgcgcaggacggagaggttatggaatacactaccattctccatcttaggcaggtgacgttcggacacgagggtcgttaccagtgtgtgatcacaaaccacttcggaagcacctacagtcacaaagcccgacttaccgtgaacgtgctcccctcttttactaagacacctcacgacataaccatccgaactaccactatggctcgcctggaatgcgcggctacaggacacccaaacccgcagatcgcctggcagaaagatggtgggaccgacttccccgccgcacgggaaagacggatgcacgtaatgccggatgacgacgtctttttcatcaccgatgtgaagatcgacgatgctggagtttattcttgcactgcccagaacagtgccgggtccatcagcgctaacgctactctaactgtcctggagaccccaagcttggtggtccccttggaagacagagtggttagtgttggggaaaccgtagccctccaatgcaaggctacagggaaccctccacccaggattacgtggtttaaaggcgaccgcccactgtcgcttaccgagcgtcaccatttgacacctgataaccagcttctggttgtccaaaatgtggttgctgaggatgccggtcgctatacttgcgaaatgagtaatacactcgggaccgagcgtgcccattcgcaactctctgttcttccagcagcgggttgcagaaaagatggcactactgtgggcatcttcactatcgccgtcgtgtccagcattgtcctcacaagcctcgtctgggtgtgcattatctatcagacccgtaagaaaagcgaagaatactctgtgactaatactgacgagaccgtggtacctccagatgtgccctcttatctgtcttctcagggtactctgagtgacaggcaggagacagttgtacggactgaaggggggccacaagcgaatggccacattgaaagcaacggcgtgtgtcctagagatgcgtctcactttccagagccagacacacattcagtcgcgtgcagacagcccaaactgtgtgcaggctccgcataccataaggagccatggaaagccatggaaaaagccgagggcactcccggtcctcacaaaatggagcacggcggccgggtggtgtgctccgattgcaacacagaggtcgactgttattctaggggacaggcttttcatcctcagccagtgtcccgagactccgcccagccttccgctcctaacggtcccgaaccaggtggctccgaccaagagcatagtcctcatcaccagtgcagccggactgccgcgggttcttgcccagagtgtcagggttctctctatccatctaaccacgatcgaatgttgactgcagtgaaaaagaagccaatggcaagcctcgacggaaaaggagattcttcctggacactggcccgactgtatcatccagactctactgagctgcagccagcctcaagcttgacgagcggtagcccggaacgcgctgaagcccaatatctcctggtctctaacggccacttgcccaaagcctgtgatgcgtctcccgagtccactccacttaccggacagctccctggcaaacaacgtgtccccctcctcctcgcgcccaaaagctag

SEQ ID NO: 122198 - DNA, 3213 bp, synthetic construct
  misc_feature 1..3213: note = Description of Artificial Sequence: Synthetic coding sequence
  source 1..3213: mol_type = other DNA
atggctcgccctgttagaggcgggctcggcgcaccaagaaggtcaccatgcctcttacttttgtggctgctcctgctgcgcctcgagcccgtcaccgcggccgccggccccagagctccgtgtgcggccgcctgcacatgtgcaggcgactcactggactgtggcggcagggggctggctgccctccccggcgatttaccatcctggactcgctccttgaacctttcttacaacaagctgtctgaaattgacccagctgggtttgaggacctccctaatctacaggaggtctacctgaataacaatgaacttacagcagtccctagtttgggggctgcatcatcccatgtcgtgagtctgttcttgcaacataataaaatccgctctgtggaaggcagccagttgaaggcgtacctgtccctcgaagtgttggacctatctttaaacaatattacggaggtgcgaaacacttgctttccccacggtccacccatcaaggaactgaacttggctgggaaccggattggaacactcgagcttggtgctttcgacggactgtccaggtcccttctgacactgaggctctctaaaaacaggataacacagctccccgtgagagcatttaagctaccccgcctgacacagctggacttaaacaggaataggataaggctgattgagggcttaacttttcaaggcttaaactcccttgaagtccttaaactccaaaggaacaacatttccaaactgaccgatggagctttttggggcttgtccaaaatgcacgtgctgcatctcgaatataattctctggtcgaggtgaacagtgggtcactttatggactcaccgcactgcaccaactgcacttgtccaataattcaatagctaggattcatagaaagggctggtctttctgtcagaaacttcacgagttggttctcagtttcaacaatctcactcggctggacgaggaatccctcgccgagttgagctccctatcggtactgcgcctcagccataactcaatatcccacatcgcggagggggctttcaagggcctgagaagccttagggtgttagatctggaccacaatgagatatctggcaccatagaagacacaagtggcgctttttctgggcttgacagtctcagtaagctgctcctgcttgaaccttcacaatctgccgggtgtagctcaccatcgcagcctcacatgtccgcaggtggacggacgctgttcggcaataagattaaaagtgttgcgaaacgtgctttttccgggctcgaaggcctcgaacacctcaacctcggtggtaacgcaatccgatccgtgcagttcgatgcttttgttaaaatgaagaaccttaaagaacttcacatttcttctgattcattcctgtgcgactgccagcttaagtggttgccaccatggctaattggccggatgctgcaggccttcgtgaccgctacgtgcgcccaccccgaatccctgaagggccagagtatcttctccgtgccacctgagagctttgtgtgcgacgactttctgaagccccagatcatcacacagccagaaaccactatggccatggttggaaaagatatcagattcacctgtagcgcagcttcttcctcctcatctcctatgactttcgcttggaaaaaggacaatgaggtgttgactaatgcagacatggagaatttcgtacacgtccacgcacaggatggagaagtcatggaatacacgacaatcctccacctgagacaggtcacttttgggcatgaaggacgttaccagtgtgtgattacaaaccactttggctctacttactcccataaggcccgtttgactgtcaatgtgttgccatctttcacgaaaaccccccacgatattactattaggaccaccacgatggcacgtctggagtgtgccgcgacagggcatccaaacccacagatagcttggcagaaagacggaggcactgatttccccgccgcgcagaccccaagcctggttgttcccctagaggaccgagtggtatcagtgggggagacagtggcactacaatgcaaggctaccggaaatcccccccccagaataacgtggttcaaaggcgatcggccactctctcttacagagcgccatcacctcacccccgacaaccagctcctggtggtacagaacgtcgtggccgaggacgccgggagatacacttgtgagatgagtaacaccctgggaaccgaacgggctcattctcaactgtcagtgcttcccgccgccggatgtcggaaggacggtaccactgtggggatattcacaatcgcagtcgtgtcatcaatcgtactgacgagcctcgtctgggtgtgtattatataccagacccgtaaaaaatctgaggaatatagcgtaactaacaccgacgaaacagttgtgccccccgacgtcccctcatatttaagttcccaagggactctgtctgatcgtcaggaaactgtcgtcagaaccgagggcggtcctcaggcaaacgggcacattgagagcaacggggtgtgcccccgagatgcatctcactttcctgagccagatacacacagtgtggcttgtcggcagcccaagctctgcgccggttcagcgtaccacaaagagccctggaaggctatggagaaagccgaaggcacaccaggtcctcataaaatggagcacggcggtagagtagtttgttctgattgcaacacagaagtggattgctatagccgcggccaggcattccaccctcagcctgtgtccagggacagtgcccagccctccgccccaaatggcccggaaccgggcgggagtgatcaggaacactctcctcaccaccagtgttcccggacagctgccgggtcctgtcccgagtgtcagggatcgttgtaccctagtaatcatgaccggatgctgacagccgtcaaaaagaaacccatggccagcctggacggaaaaggcgacagttcctggactctggcccggctgtaccacccggactctactgagcttcagcccgcaagttccctgacgtccgggagcccagagagggccgaggcccaatatctactggtgtcgaatggccaccttcctaaagcctgcgatgcctcccccgagtctacccctctaaccggacagctcccagggaagcagcgggtcccactgctgttagctcccaagtcctag

SEQ ID NO: 122199 - DNA, 3198 bp, synthetic construct
  misc_feature 1..3198: note = Description of Artificial Sequence: Synthetic coding sequence
  source 1..3198: mol_type = other DNA
atggcgccggcccctctcggcgtgcccgaggagcagctccttggttgcagaagcagagttctctccagacttctgtttattgcccaaacagcactgctgttgctgccagccgctggggccggcctgtgtcctgcaccttgttcttgcagaatccctctcctggattgctctagacggaagctgcccgccccctcttggcgggctctgagcggccttctgccccctgataccgcaatcctcgattttagccataacagactcagcaattggaacatatccttggagagtcagacactgcaggaagtcaagatgaattacaacgagctgaccgaaattccgtattttggtgagcctaccagcaacatcacgcttctgtccctcgtgcataacattataccagagatcaatgcccaggcacttcagttctacccagctcttgaatctcttgacctcagcagtaacattatcagcgagatcaaaactagcagtttcccacgaatgcagctgaaatatctcaacctctcaaacaacagaattactacactggaagcaggttgcttcgacaacctgtcttccagtttgcttgtggttaagttaaacaggaatcggatgtcaatgatacctcccaagatttttaagcttcctcacctccagtttctggaactcaaacggaatagaattaagatcgttgaaggcctgaccttccagggcctagatagcttgcggtcacttaagatgcagcggaacggtatctcgaagctcaaggatggcgctttcttcgggttaaacaatatggaggagctggagctagaacataacaacctgaccagagtgaataaagggtggttgtatggccttcgaatgcttcagcagctgtacgtgtctcagaatgcaatcgagcggataagtcctgatgcctgggagttctgtcagcgactgagcgaactagacctcagctataaccagttgaccaggctagacgaatccgcctttgtgggcctctccctgttagagagactcaacttgggtgataaccgggtgacacacatagctgacggagtgttccgattcctgagtaacttgcagactttagatttgaggaacaacgagatctcttgggctatagaagatgcttctgaggcttttgccgggttgacgagtctaaccaagcttattctccaggggaaccagattaaaagcattacaaagaaagcatttatcggactggaaagcctggaacacctcgatctgaataacaatgccatcatgtccatccaggagaatgcattctctcagacccatctgaaagagctgatccttaatacatccagtctgctatgtgattgtcacctgaagtggctcttgcagtggctggtggataacaacttccagcactccgtgaatgtttcatgtgctcaccctgaatggcttgccggccagtcgatattgaatgtggatctcaaggatttcgtgtgcgatgacttcctgaagcctcagatcagaacgcaccctgaaaccattatagctctaagaggcatgaacgtcactctgacctgcacagcggtctcttcctctgattcgccaatgagcactgtttggagaaaagactccgagatcctctacgatgttgacacagagaactttgtcaggtactggcagcaggccggagaggccctggaatacacctcaatcctgcacctcttcaatgttaacttcaccgacgagggcaaataccagtgcatcgtcacaaatcacttcggctcaaattacagccaaaaggcaaagctgaccgtcaacgagatgccaagcttcttgaagaccccgatggacctgaccatcagaactggtgcaatggcgcgactcgagtgtgccgccgagggccaccccgccccccagatctcttggcaaaaagatgggggaactgacttcccagccgcccgcgaacgcagaatgcacgtgatgccggaggatgatgtgtttttcatcgcgaatgtgaaaattgaggatatgggaatttactcctgtatggcccaaaacacagccggggggctttccgcaaatgcgagcttgaccgtgctagagactccaagtttcatccggccccttgaggacaaaacagtgacaagaggagaaaccgcagtgctacagtgtattgccgggggatcccccgctccccgactgaactggacaaaggacgatggaccattactggtcaccgaacgacatttcttcgccgccgctaatcaacttctgattattgtcgacgctggactggaagacgctgggaagtatacatgcattatgagtaatactctgggcacagaacgcggtcatatttatctgaatgtaatctcatcccctaattgcgattcaagccagtcgtcaattggccatgaagatgatggttggacaaccgtcggaattgtcatcattgtggtggtgtgttgcgtcgtcggaacatctctgatatgggtcatcgttatatatcatatgcgcaggaaaaacgaggattattcaatcactaacacggaggagcttaacttacctgctgacattccctcttaccttagctctcagggaaccttatccgagccccaggaaggttattctaacagcgaagcaggatcacaccagcagctgatgccccccgctaacggctacatccacaagggcaccgatggaggtaccgggacaagagtcatctgttccgattgttacgacaatgccaacatctattctagaaccagagaatactgtccatatacctacattgcagaggaggatgtcctggaccagactctttcctcgctgatggtgcagatgccaaaagaaacctacctcgtccaccccccacaggataccacagctctcgaaagcctgataccttccgcgaaccgtgaacctagtgctttccccaccaaccacgagagaatctctgaaaagaagctgcccagcactcagatgtccggtgagactctgcagagaccggtgtggaacataaatagggagctgggactgccccatccaccattctcccagcaacccgtgcacgagtcgccccagctgcaccagaacgaaggactggcaggccgggaaccggactgttctgcctcctcgatgtcttgtcataggctgcaggatcacgctttcgatttcagcaggacacgcaatatacaagatggctccgaaggtacatag

SEQ ID NO: 122200 - DNA, 876 bp, synthetic construct
  misc_feature 1..876: note = Description of Artificial Sequence: Synthetic coding sequence
  source 1..876: mol_type = other DNA
atggagtcagagcggagtaaacgcatgggtaatgcttgtataccattaaaaagaatcgcatacttcctctgtttactctctgcgctcctcctgactgagggaaagaaacccgccaagccaaaatgtccagccgtctgtacttgtacaaaagacaatgccttgtgcgaaaacgccagatccatcccgcgaaccgtcccgcctgacgtgattagcctgagtttcgtccgaagcggcttcaccgagattagtgagggctcttttttgttcacgccatcactgcagctgcttctttttactagtaatagctttgacgtgatctccgatgacgcttttatcggtttgcctcacctggagtacctcttcatagaaaataacaacatcaaaagtatctcaaggcacacattcaggggcctgaagagcctaattcacctcagcttggccaataataacctgcaaacattgcctaaagatattttcaaaggtcttgattccctcaccaatgtcgacctgcgggggaacagctttaactgtgactgcaagctgaagtggctggtcgaatggctgggtcatactaacgcaacagtggaggacatatactgtgaaggcccacctgagtataagaagcgaaagatcaactccctctcatccaaagacttcgactgcatcatcaccgagtttgctaaaagtcaggacctcccctaccagagcttatccattgacacgttcagctacttaaacgacgaatacgtggttatcgcccaacctttcaccggcaaatgtattttcctggagtgggaccacgtggagaagacattcaggaactatgacaacatcacagtgctgcgagaaatccatcgtttcacgaacatgtcctag

SEQ ID NO: 122201 - DNA, 1674 bp, synthetic construct
  misc_feature 1..1674: note = Description of Artificial Sequence: Synthetic coding sequence
  source 1..1674: mol_type = other DNA
atggagtccgaaagaagcaagaggatgggtaatgcttgtataccactgaaacgaatcgcctattttctgtgcctcctctcagccctgctacttactgagggaaaaaagcctgccaagcccaagtgtccagcagtctgcacttgtacaaaagacaacgccttatgtgaaaacgcaaggtcaatcccccggacggtgccaccagacgtcatcagcttatccttcgtcagatccgggtttacagagatatccgagggctcctttctctttactccatcgcttcaactacttcttttcactagtaactccttcgatgtgatctccgatgacgcctttataggcctgccccacctggaatacctgttcatcgagaacaacaacatcaaaagcatatcaagacacacctttagagggcttaaatccctgatacatctcagtctggctaacaataacctgcagactctacccaaggacatcttcaaaggcctcgactctctgacaaatgtggatttgaggggcaattcctttaactgcgattgcaagctcaaatggttggtcgagtggctgggacataccaatgccacggtagaggatatttattgtgagggccctcccgaatataagaaacggaaaatcaacagtctgagttcaaaagatttcgactgcatcatcacagaatttgctaagagccaggatttaccttaccaaagtctgagtatcgacacctttagttatctgaacgacgagtatgtggttatcgcccagcctttcaccggcaaatgcatttttctggaatgggatcacgtggagaagacattcagaaattacgataacataaccggcacctccacggtcgtgtgtaagcctattgtgattgaaacacagctctacgtcatcgtggcacaactgttcggaggatcacatatttacaagcgggacagtttcgccaacaaattcatcaaaattcaagatatcgagattcttaagattcgcaagcccaacgatattgaaaccttcaaaattgaaaacaactggtatttcgttgtggcagacagtagcaaagctggcttcactactatctataagtggaacggtaacgggttctattcacatcaatctctccatgcctggtatcgtgataccgacgtggaatatctagagattgtcaggacgccgcagacactgcgtacaccccaccttattttgtcttcctccagccagcgtccagtgatctaccagtggaataaagccacccagctcttcaccaatcaaaccgatatacccaacatggaagatgtctacgccgtcaagcatttcagcgtgaaaggggatgtgtacatctgcctgactcgattcatcggtgatagtaaggtcatgaagtggggaggcagttcctttcaggatatacagaggatgcctagccgtgggagcatggtgttccagcccctccagatcaataattaccaatatgcaatattaggcagcgactattcgttcacacaagtgtacaactgggacgccgaaaaagccaagtttgtgaagttccaggagctcaacgtgcaggcccccaggtcctttactcacgtgtcgataaacaaaaggaactttctcttcgcctcctcattcaaagggaacactcagatctacaagcacgtgatcgtcgatctgtctgcctag

SEQ ID NO: 122202 - DNA, 1530 bp, synthetic construct
  misc_feature 1..1530: note = Description of Artificial Sequence: Synthetic coding sequence
  source 1..1530: mol_type = other DNA
atggagtccgagagatctaagagaatggggaacgcctgcatcccacttaagcgcatcgcttattttttgtgcctgctgagcgccctattgctgacagaaggaaaaaagccagccaaaccaaaatgtccagccgtgtgcacgtgcaccaaggataatgccctttgtgagaatgcaagatcaatccctagaaccgtgcctcccgatgttatcagtctgtcattcgttcgttcggggtttacagaaattagcgagggatccttcttatttacgccctcactgcaattgttgtctcttgcgaacaataacctgcaaaccctgcctaaggatattttcaagggactcgactcgcttactaatgtagacctccggggcaattcattcaattgcgactgcaaattaaaatggctggttgaatggctggggcacacaaatgccacggtagaagatatttactgcgagggaccccctgagtacaaaaagagaaaaataaactcgctgtcttcaaaagactttgattgtatcatcacagaattcgccaaatcccaggatttgccctatcagtctttatcgatagatactttcagctatctgaacgatgagtacgttgtgatcgcacagcccttcacgggcaaatgcattttcctcgaatgggaccacgttgagaaaacgtttaggaattatgacaacattacagggacgtctacagtggtgtgtaaacctatcgtcattgaaacccaattatatgtgatcgttgcacaattgttcggtggcagtcatatctataagcgagactcgttcgctaataagttcattaagatacaggacatcgagatcctgaagatacgaaagcccaatgacatcgaaacattcaagatcgagaacaactggtactttgttgtagctgactcctctaaagctggcttcaccacaatttataaatggaacggtaatggcttttatagccaccaaagtctccatgcatggtacagggataccgatgtggaatatttagagatagtgaggaccccacagacccttagaacacctcatctaatattgtcgtctagcagccagcggcccgtcatctaccagtggaacaaagccacccagctcttcacgaaccagacagatattcccaatatggaggacgtctacgctgtcaagcatttcagcgtcaaaggggatgtgtatatctgtctcacccgcttcattggcgattctaaggttatgaaatgggggggcagtagctttcaggatatccagcgaatgcccagtcgaggaagcatggtgtttcaacccttgcagatcaacaattatcagtacgccattttgggcagtgattattcgtttacccaggtatacaattgggacgcagaaaaggctaagtttgttaagtttcaggagctaaacgtgcaggctccccgaagttttacccacgttagtatcaacaagcggaatttcttgttcgcctcctcgttcaaggggaatacacagatatataagcacgtcattgttgatctttctgcctag

SEQ ID NO: 122203 - DNA, 777 bp, synthetic construct
  misc_feature 1..777: note = Description of Artificial Sequence: Synthetic coding sequence
  source 1..777: mol_type = other DNA
atgagcgcgtacccaaagagctataacccttttgacgatgacggagaggacgagggagccaggccagccccctggagagacgcacgagatctaccagatggacctgatgcacccgctgatcggcaacagtacctaagacaggaggtgctgaggcgcgccgaggctacagcggcctctacgtctaggagcctggctttaatgtatgaatccgaaaaagtgggggtcgcctcctctgaggaactcgctagacagcggggcgtactcgaacggacagagaagatggtagacaaaatggaccaggacctgaagatttcacaaaaacacataaactcaattaagtccgtttttgggggattggtgaactacttcaagagcaaaccggtggaaactcctcctgaacagaacggtaccctcactagtcagcccaataatcgtctgaaagaggccatttccactagcaaggaacaggaagcaaagtatcaggctagccatcctaacctcagaaagcttgatgacacagaccctgttcctaggggcgctggctcagcaatgagcaccgacgcctaccctaagaacccgcacctgagagcgtatcatcaaaaaatcgacagtaatcttgatgagctgagcatgggcctgggtaggctgaaggatattgccttgggaatgcagaccgagatcgaggaacaggacgatatattggaccgccttactactaaggtcgacaaactcgacgttaatattaagtccactgagcgcaaggttaggcagttatag

SEQ ID NO: 122204 - DNA, 2466 bp, synthetic construct
  misc_feature 1..2466: note = Description of Artificial Sequence: Synthetic coding sequence
  source 1..2466: mol_type = other DNA
atggctgggccagggtcaaccgggggccagatcggcgctgcggccctggccggcggtgctcggagcaaggtcgccccatctgttgattttgatcatagttgcagcgattcagttgaatatttgacactcaactttgggcccttcgagactgtccaccggtggagaaggttaccaccatgtgacgagtttgtaggcgccagaaggtccaagcacacggtggtcgcttacaaggacgccatttacgtcttcggaggggataatggagcttttacaactggaacgccacccgctccacggtatcatcacagcgctgtggtgtacggtagctctatgttcgtttttggcgggtatacaggtgacatttattcaaattcgaatttgaaaaataagaacgacttgttcgaatataagtttgctactggccaatggacagagtggaaaatcgagggacgcctacccgtcgcaagaagtgcgcacggagccactgtgtatagcgataaactgtggatttttgcaggatatgacggcaacgcccggctgaatgatatgtggactatcggattacaagatagggagttgacttgttgggaggaggtggctcagtctggcgagataccgccctcttgctgtaactttcctgtggctgtatgtcgggacaagatgttcgtgttctccggccagtctggcgcaaagatcactaataacctgttccagttcgagttcaaagataaaacatggacgagaatcccaacagagcatctgcttcggggcagtcccccacccccccagcggcgatacggacacaccatggtggcatttgatcggcacttatatgtcttcgggggggcggctgacaacacactcccaaatgagctgcactgctacgatgttgacttccagacgtgggaggttgtgcagccgagtagcgacagcgaagtcgggggggcagaggttcccgagagagcttgcgctagcgaggaggtgcctacacttacctacgaggaaagagtcggcttcaagaagagtagggatgtgtttggacttgactttggtactacaagtgctaagcagccaacacagcccgcctctgagcttcccagcggaagactgtttcatgccgccgccgtgatttcggacgcgatgtacattttcggaggcaccgtggataacaacatcaggtctggcgagatgtaccggtttcagttctcctgttaccctaagtgtactctccatgaggattacggccgtctgtgggagtccagacaattttgtgacgtcgagtttgtgttgggggagaaggaggagtgtgtccagggacacgtagctatcgtgacagctcgcagcagatggttgcgacgtaagatcacgcaggcacgtgaacggctggcccaaaagctcgagcaggaagcggcccccgtacctcgagaggcccccggcgttgccgccggcggtgcccggccgcccttgctgcacgtggcgatcagagaggccgaagcccgcccgttcgaggtgcttatgcagttcctctatactgacaagatcaaatacccccgcaaagggcatgtcgaggacgtgctgcttataatggatgtctataagctggctctcagcttccagctatgcagactggagcagttgtgccgccagtacattgaggctagcgtggacctacagaacgtgctcgtggtttgcgagtctgccgcccgactgcagctaagccagctcaaggagcattgtctgaacttcgttgtcaaggagagtcactttaatcaagtgatcatgatgaaagagttcgagagactatcttcaccactaattgtggagatagtccgcagaaagcaacaacccccaccacgcacccctcttgaccagccagtcgacattggaacaagcttaatccaggacatgaaggcctacctcgagggagctggggcggaattctgtgacatcactcttctgctggacggacaccctcggcccgcacacaaggcgatcctggctgctagaagttcctacttcgaggcaatgtttagaagctttatgccagaagacgggcaggtgaacattagcattggggaaatggtgccatcccgccaggctttcgagtcaatgctgcgctacatttactacggtgaagtgaatatgcccccagaagatagcctatacctcttcgcggctccatactactatggattttataataaccgcttgcaggcctattgtaaacagaatctagagatgaatgtgacggtccagaatgtcctgcagattctggaggctgcagataagactcaagccctcgatatgaaacgacactgcctccacattatagtgcaccagtttaccaaagtgagcaagctgcctaccctgaggtcactgagccagcagctgcttctggacattattgatagcctggcctctcacatttctgataaacagtgtgcagaattgggagccgacatctag

SEQ ID NO: 122205 - DNA, 2400 bp, synthetic construct
  misc_feature 1..2400: note = Description of Artificial Sequence: Synthetic coding sequence
  source 1..2400: mol_type = other DNA
atgaattacgatcctattgtctctaaagtggctgaagtgttagcttccggaagggctatcaggaagcgtgaggttgaacgctcaaagcataccgtcgtcgcctacaaagacgcaatttatgtgtttgggggagataacggcaaaactatgctcaacgacttgctgagattcgacgtgaaggactgcagttggtgccgtgcatttaccacagggactccacctgccccccgataccaccatagtgccgtggtttacggctcctccatgtttgtgttcggtggatatacaggggatatttattccaactccaatctcaagaacaaaaacgacctgtttgaatataagtttgctaccggccagtggacagagtggaaaatagagggtaggctgccagtggctcgatctgctcacggagctactgtgtacagtgataaactgtggatttttgcagggtatgatgggaatgcaagacttaatgacatgtggacaatcggcctgcaggatcgggagctgacttgctgggaggaagtcgcccaatccggagaaattcctcctagctgctgtaattttcccgtggccgtgtgtagggacaaaatgttcgtcttctctgggcaaagtggagcaaaaattaccaacaacctctttcaatttgagtttaaggataagacttggactcgtataccgaccgaacaccttctgcgcggcagtccaccacccccacaacgccgatatggacatacgatggtcgccttcgatcggcacctgtatgtgtttggaggtgcagcagacaataccctgccaaacgaactgcattgttatgacgtcgatttccagacatgggaggttgtccaaccctcctccgatagtgaggttgggggggctgaggtcccagaacgcgcttgtgccagcgaggaagtccccacattgacttacgaagagcgggtgggattcaagaagtctcgcgacgtgtttggcttagacttcggcaccacttctgcaaagcaacccacccagcctgcaagtgagcttcctagcgggcgactattccacgcggccgccgttatatctgacgccatgtatattttcggaggcacagtggataacaacatacggtctggggaaatgtaccggtttcagtttagttgttaccccaagtgcaccctacatgaggactacgggaggctgtgggagagtcgccagttctgcgacgtggaattcgtgctgggggagaaggaagaatgcgtgcagggccatgttgctattgtgactgccagaagtcgctggctacggagaaagatcacacaggccagagagagactcgcacagaaactggagcaggaagctgcaccggttccgagagaagctccaggcgttgctgcaggaggagccaggcctccacttctgcatgtggccatcagagaagctgaggcacgacccttcgaagtgttgatgcagttcctgtatactgacaagattaagtatcctaggaagggccacgtggaggacgtgcttttgattatggatgtatacaagctggccttgagtttccaactgtgtcggctggaacagctatgcaggcagtatatagaggcctccgttgatctacagaacgttctagtggtgtgcgaatctgccgcccggttgcaattgtcacagctcaaggaacattgtctcaatttcgtcgtgaaagagagccattttaatcaggtcataatgatgaaggaatttgagaggctctcgagcccactgatcgtagagatcgttaggcggaaacagcaaccaccgccgcgtacaccactggaccagcctgtagacattggcacttcgctgatacaggatatgaaggcatacctggaaggagccggggcagaattttgcgatataaccctgcttctggatggacacccgagaccagctcataaggccattctagccgcaagatcaagttattttgaggccatgtttcgaagcttcatgcccgaagatggccaggtaaacatctccatcggagaaatggtgccttcccgacaagcctttgaatccatgctgaggtatatctactatggagaggtgaacatgccacctgaagactcactatatctgtttgccgcgccctactactatggattctacaataaccgtttacaggcctattgtaagcagaatctggaaatgaacgttactgttcagaacgtattgcaaattctcgaggccgccgataagacccaggcccttgatatgaagcgacactgcttgcatattatcgtccaccagttcaccaaggtgtccaagttgccaacactccgttccctgtcgcagcaactgttgttggacataatcgactcactcgcttctcatattagcgacaaacaatgcgccgagctaggggccgatatttag

SEQ ID NO: 122206 - DNA, 1560 bp, synthetic construct
  misc_feature 1..1560: note = Description of Artificial Sequence: Synthetic coding sequence
  source 1..1560: mol_type = other DNA
atgagctatccccagttcggctacccctacagttccgctccccaatttctcatggccacaaattctttgagcacttgttgtgagtctggcggcagaaccctggctgactctggccctgcagcgagcgcacaggctccagtatactgtcccgtatacgaatccaggttgttggcgactgcccgacatgagctgaatagcgctgccgcactgggagtctatggaggaccctacggtgggtcccaagggtacgggaactacgtgacttatggaagcgaggccagcgctttttactcacttaactcattcgattctaaggacgggagtgggtctgcgcacggaggcctcgcgccagccgctgctgcgtactatccctacgaaccagccttgggtcaatacccttatgaccgctatggcaccatggactccggcacacgccgcaagaatgccaccagagaaaccacctcaaccctgaaagcctggctccaagagcacagaaagaatccttacccaaccaaaggggaaaaaatcatgctggctattatcactaagatgactttgacccaggtctcaacctggttcgctaacgcccgccgcagactgaagaaggagaataaaatgacatggccaccccggaacaagtgcgccgacgagaaacggccttacgccgagggggaagaggaggagggcggtgaagaagaggcccgggaagagcccctcaagtctagtaagaacgccgaacccgttgggaaagaggagaaggaactggagttgtccgacctggacgacttcgatcccctggaggccgagccacccgcttgtgagttgaaaccaccattccattcattggacggaggcctggaacgggtgccagccgcacctgacggacccgtgaaggaggcgagcggggccctcaggatgagcctcgctgccggcgggggcgccgcccttgacgaggacctcgagcgcgccagatcatgtttgcgtagcgcagcagccggtcccgaacccttgcctggagccgagggtggcccccaggtgtgtgaagccaagctaggtttcgtgcctgctggcgcatctgccggactggaggctaaaccgaggatctggtccttggcacatacagctaccgccgctgcagccgctgccacttctctctcccagactgagttcccctcttgcatgctgaaacgccaggggccggcggccccagctgccgtaagctctgcaccagccactagtccatctgtggcactcccccactccggagcacttgacagacatcaagactcgccagtcaccagcctgcggaactgggtggatggggtatttcatgatcccattttgaggcattctaccctcaatcaggcctgggctaccgccaagggcgctctgctcgacccgggccccctgggccggtcccttggcgccggggcgaacgtgttaacggctccgctggctcgagcattcccccccgccgtgcctcaggacgcccccgccgctggcgctgcacgtgagctcttggctttgccgaaagctggcgggaagcctttctgcgcatag

SEQ ID NO: 122207 - DNA, 3036 bp, synthetic construct
  misc_feature 1..3036: note = Description of Artificial Sequence: Synthetic coding sequence
  source 1..3036: mol_type = other DNA
atgatcgagaacagcatgtttgaagaggagcctgatgtggtggaccttgccaaagagccatgcctgcatcccctggagccagacgaggttgaatacgaaccaagggggagcagattgctggtcagaggtctcggagaacacgaaatggaggaagacgaggaggactacgagtcctccgctaaattactcgggatgagcttcatgaaccgctccagcggccttagaaatagtgcaactggctaccgccaatctcctgacggggcatgtagcgttccaagcgcaagaacgatggttgtctgcgcgtttgtgatcgtggtcgctgtctcagtgataatggtaatttacctgctgccaagatgcaccttcaccaaggagggttgccacaaaaaaaatcagagcataggactgatccagccgttcgcgactaacggcaagctgttcccttgggcacagatccgcctgccaaccgctgtcgtccctctccgctatgagctttctcttcatcccaatcttacaagcatgacttttagagggagcgtgaccatctcggttcaggcactgcaagtcacttggaatataatattacactcaaccggccacaatatctctcgggttacgtttatgagcgctgtgtcctcacaagaaaagcaggccgagattctcgagtatgcttaccacgggcaaatcgctattgttgcgcccgaggctctgctggctggacataactacactctgaagatcgaatacagcgccaatataagttcatcgtattacggcttttacgggttttcgtacacggatgagtctaatgaaaaaaaatactttgcagccactcagtttgaacctctggctgcaaggtcagcttttccctgcttcgacgagcccgcttttaaggccaccttcataatcaagataataagagatgagcagtatacggcacttagcaacatgccgaagaagtctagcgtagtgcttgacgatgggcttgtgcaagatgagttttctgaatcagtaaagatgagcacatatctggttgcattcattgtcggggagatgaagaacttaagccaggatgtgaacggcacgttggtttcaatctatgcagtacctgagaagatcgggcaggtacactacgctctagagaccaccgtgaaacttttggaattctttcagaactattttgagatccaatatccgctcaagaagttagacctggtcgcaattcctgatttcgaggctggggctatggagaactggggactgcttactttccgggaggagaccctcctgtacgacagtaatacatcctccatggcggaccgtaaactggtaacgaagatcattgctcacgagcttgctcatcagtggttcggaaacctagtcacaatgaaatggtggaacgatctctggctgaacgaggggttcgccaccttcatggagtacttttccttagagaagattttcaaggagctgagttcttacgaagatttcctcgacgccagattcaaaactatgaaaaaggactccctgaattcttctcatcccatttcctcttctgtgcagtcgtccgagcagatcgaggaaatgtttgacagtttgagctacttcaaaggctcttctctgcttcttatgttgaagacgtatctctcagaggacgtttttcagcacgcggttgttctttatctgcacaatcacagctacgcttcaatccaaagcgatgacctgtgggattcatttaatgaggtgaccaaccagaccctagatgtcaaaaggatgatgaagacgtggaccctccagaagggattcccactggtgacagtacagaagaagggcaaggaactgttcatacaacaagaacgattcttcctgaacatgaagcccgagatacaaccctcggatacgagctatctatggcacatacctctcagttatgttactgaaggtaggaactactccaagtatcagagcgtatccctgcttgataaaaagtctggcgtgattaaccttactgaggaagtcctgtgggttaaagtaaacatcaacatgaacgggtactacattgtgcactacgctgatgacgactgggaggctctgattcaccagttaaagatcaatccttacgtgctctccgacaaggacagagcgaacttaattaataatatctttgaactcgccggcctgggaaaggtcccactgaaacgggcattcgacctgattaactacctcggcaacgaaaatcatactgcccccattacagaggccctttttcagacggacctgatttataaccttctggagaagctcggatatatggatctggcaagccggctggtgacccgggtcttcaaactgcttcagaatcagatacaacagcagacgtggacagacgaagggacccctagcatgcgagagctccgcagcgctttgctggaattcgcctgtacgcacaatctggggaattgctccacgacagccatgaagctctttgacgattggatggcctctaacggaacgcagtctttaccaactgatgtcatgaccacggtcttcaaagtgggcgccaagaccgataaaggatggtcattcctgctgggcaagtacatctccatcggatcagaggccgagaaaaataagatcctggaagcgctggcctcttctgaagacgtccgtaaactttattggctaatgaagtctagtcttaatggcgataactttcggacccagaagctgtcctttattattagaaccgtgggacggcatttccctggacatctcctcgcctgggatttcgttaaggagaattggaataaactggtgcagaaattcccactgggatcctatacaatacaaaatatcgtcgccggcagcacatacctgttttctacgaagacacatctttctgaggtgcaggccttcttcgagaatcagagtgaggctacattcaggttgagatgcgtccaggaggcactggaggttatccaactgaacatccaatggatggaaaagaacctcaagtcactgacatggtggctgtag

SEQ ID NO: 122208 - DNA, 3450 bp, synthetic construct
  misc_feature 1..3450: note = Description of Artificial Sequence: Synthetic coding sequence
  source 1..3450: mol_type = other DNA
atggccgagaggaaaggaaccgcaaaggtggacttcttgaagaaaatagaaaaggagatccagcagaaatgggacacagaaagagtcttcgaggtgaacgcctccaatctagaaaagcagacttccaaggggaagtatttcgtgacctttccatacccttatatgaacggccgactgcacctgggccacacctttagtctgtcgaagtgtgaagcttgcgcggataaattgaagagggagatcgagctgtacgggtgtccccctgatttccccgacgaagaagaagaagaggaagaaaccagtgtgaagacagaggacatcataatcaaggacaaggccaagggcaagaagtctaaggcggccgcgaaagctggtagcagcaaatatcaatgggggattatgaagtccttaggattgtcggacgaggagatagtcaagttctccgaggcggagcactggttggattactttccccccctggccatacaggatctgaagaggatgggactaaaggtggactggcgaaggtcatttatcacaaccgacgttaacccatactatgacagctttgtgcggtggcaattcttaactctgcgcgagcgcaataaaatcaagttcggaaaaaggtatacaatctattctccaaaggacggacagccgtgcatggaccatgacaggcaaactggagagggcgtggggccccaggaatatacactactaaagttgaaggtgctggaaccttacccgtccaagctatccgggctgaaaggcaagaacatatttctggtggctgctactctgcggcccgagacgatgtttggacagactaactgctgggtccgtccagacatgaagtacatcggatttgaaactgtgaatggggacatcttcatctgtacccagaaggcagccaggaatatgtcttatcagggctttaccaaggataatggggtcgtgcctgtggttaaagaacttatgggggaggaaattctgggtgctagcctgtctgcacctctgactagttacaaggtcatctacgtactgcccatgctgactataaaagaagacaagggcaccggcgtcgtcaccagcgtccccagcgattcacctgatgacattgcagctctgagggacctgaaaaaaaaacaggctctgcgcgcgaagtatggtattcgtgacgacatggttctccccttcgaaccggtgccggtaattgagatcccaggcttcgggaatttatccgccgtgaccatttgtgacgaattgaagatccagtctcagaacgatcgcgaaaaactagccgaagctaaggagaaaatttacctgaagggattctacgaagggataatgctggtcgacgggtttaaaggccagaaggtccaggatgtgaagaaaactatacaaaaaaagatgattgatgctggagatgctctgatttacatggagccagagaaacaggtgatgtcaagatcctcagatgagtgcgtggtagccctgtgtgatcaatggtacctagattacggcgaagagaattggaagaagcagaccagccagtgtctaaagaatctcgaaacattctgcgaggagacccgcaggaacttcgaagccactcttggctggctgcaagagcacgcttgctctcggacctacgggctcggcacccatttgccatgggacgaacagtggctaattgaaagccttagcgactccactatctacatggcgttttacaccgtcgcgcacctgctgcagggggggaatttgcatggacaggcggaatctccgctgggcattcggccccagcagatgactaaggaggtgtgggactacgtgttcttcaaggaggctccatttcccaaaacccaaatcgccaaggagaagttggatcaactgaaacaggagtttgagttttggtacccagtggacttgcgtgttagcggcaaggacctggtccccaaccatctgtcatactacctctataaccacgtagctatgtggcctgagcagtctgacaagtggccaaccgcagtgagggcaaacggccacctgctgttgaactcagagaagatgagtaaatccactggcaactttcttacactgacgcaggccatcgataagttcagcgccgatggtatgcgtctggcactcgcagatgcaggtgacacagtggaagatgctaatttcgtcgaagcaatggcggatgccggcatcctacggctttatacatgggtggagtgggtgaaagagatggtcgccaattgggactccctccggtctggccccgcctcgaccttcaacgatagggttttcgcatctgaattaaatgctgggatcatcaagacagaccagaactatgagaaaatgatgtttaaggaggcactcaaaactggattcttcgagtttcaggcagccaaggacaaataccgggagctcgcggtggagggaatgcacagagagctggtgttcaggttcatcgaggtacaaactttgttactggccccgttctgtccgcatctttgcgagcatatctggactttgctaggaaaacctgacagcatcatgaatgcaagttggcctgtggcaggtccggtgaacgaggtgttgattcacagctctcaatacttaatggaagtgacccatgatctcagactccggctgaagaattacatgatgcctgctaagggaaaaaaaactgataagcagcctctccagaaaccaagccactgcactatctatgtggcgaaaaactaccctccctggcagcacacaactctcagcgtcttgcgaaagcatttcgaagctaataacggaaagctccccgacaacaaggttatagccagtgagctgggaagtatgccagagctgaagaaatatatgaagaaggtgatgccctttgtggctatgatcaaagaaaatttggagaagatgggacctaggatcctcgatcttcagctcgagttcgacgaaaaggctgtacttatggaaaatatcgtttacctaacaaacagcctggaacttgagcacattgaggttaagtttgcaagcgaggccgaagacaagatcagagaagattgctgcccaggtaagccactgaacgtcttccgcattgaacctggagtttctgttagcctggtcaacccccaaccttctaacgggcatttctcaaccaagatcgagatacgacagggtgacaattgtgatagtattatacgtagattgatgaagatgaatcggggtatcaaagatctgagcaaagtaaagctaatgagattcgatgatccactccttgggccgaggcgggtaccggtcctgggtaaggaatacacagagaagaccccaatctccgagcacgcagtattcaacgttgatttgatgtctaaaaagatacatcttacagagaatggaatccgcgtagacattggcgatacaattatctacctggtgcactag

SEQ ID NO: 122209 - DNA, 480 bp, synthetic construct
  misc_feature 1..480: note = Description of Artificial Sequence: Synthetic coding sequence
  source 1..480: mol_type = other DNA
atggccgagaggaaagggaccgccaaggtcgactttttaaaaaaaatcgaaaaggaaatccagcagaagtgggataccgagagggtcttcgaggtaaacgcaagtaacctcgaaaaacagaccagcaagggaaagtattttgttacctttccgtacccctatatgaatggcagactccatctaggacacactttctctctttccaagtgcgagttcgctgtggggtaccagcggctaaagggaaagtgttgtctgttcccattcggactgcattgtacgggtatgccaattaaagcttgcgcagacaagttaaaaagggaaatcgaactgtacggctgtccgccagacttccccgacgaggaagaggaggaagaggaaacatcagttaagacagaagatatcatcatcaaagataaagccaaaggtaagaagagtaaagctgcgaagttggatttgctgaatacttctggcgcgctgtag

SEQ ID NO: 122210 - DNA, 3531 bp, synthetic construct
  misc_feature 1..3531: note = Description of Artificial Sequence: Synthetic coding sequence
  source 1..3531: mol_type = other DNA
atggctgagaggaagggcaccgccaaggttgatttccttaagaaaattgagaaagagattcagcagaagtgggacactgaaagggtgtttgaagtgaatgcctcgaacctggagaagcaaacttcaaagggaaagtatttcgtcacatttccttacccctatatgaatggacggcttcatttgggacataccttctctttaagtaaatgtgaatttgcggtgggctatcagcggttaaaggggaaatgttgtctctttccctttggacttcactgcactggtatgcctattaaggcgtgcgcagacaaattgaagcgcgaaattgagttatacgggtgcccgccagatttccccgatgaggaagaagaagaggaggagacctccgtcaaaaccgaagatattatcataaaagataaggccaagggaaaaaaatctaaggccgccgctaaggctggctcttctaagtaccaatgggggattatgaagagtctggggcttagtgacgaagaaatcgttaaattctccgaggccgagcattggctagactacttccccccgctggctatccaggacttaaagcgcatgggcctgaaagttgactggaggaggagcttcatcactacagacgttaacccctattacgacagctttgtgcggtggcagtttctgacgctgcgtgaacgcaacaagatcaaatttgggaaacgctatactatatactcccccaaagacgggcagccctgtatggaccacgacaggcaaacaggcgaaggggtgggtccgcaggaatatacactgcttaagttaaaggtgctggagccgtacccttcaaagctgagcgggctcaagggcaaaaacatcttccttgtagccgcaacactgagacctgaaaccatgttcggccagacgaattgttgggtgcgtcccgacatgaagtatatcgggttcgagacagtgaacggtgacatcttcatctgcacccagaaggccgccagaaatatgtcttaccagggctttactaaagacaatggagtcgtgcccgtcgtgaaggaactcatgggcgaagagatcctgggtgccagcctgagtgccccgctgactagttataaggtcatttacgtcctgcccatgctgaccatcaaggaggataaggggactggtgtggtgacgtccgtccccagcgattcacccgatgatatcgccgcactgcgagatctgaagaagaaacaggcactccgggcaaaatatggcatccgcgacgatatggtgttgccatttgagccagtgcccgtgattgaaattcctggattcgggaatctgtccgccgtaactatctgcgacgagttgaaaatccagtcccagaacgatcgggaaaaacttgctgaggccaaggaaaaaatttatctgaagggcttctacgagggcattatgctggtagatgggttcaaaggccaaaaggtacaggatgtgaagaaaaccatccaaaagaaaatgattgatgccggggacgctcttatctacatggaaccggagaaacaagtaatgtctaggtcatccgacgagtgcgtcgttgccctgtgcgatcagtggtatctcgactatggtgaagaaaattggaagaagcagacctcgcagtgcctgaaaaacctggaaacattctgcgaagaaacccggagaaactttgaggccactctaggttggttgcaggagcacgcatgctcccgcacatacgggttgggaacacacttgccctgggatgagcagtggctcattgaatccctgagcgacagcactatctatatggccttttataccgtggcccaccttttacaaggtgggaatctgcacggccaggcagaatctccactgggcatccggcctcagcagatgaccaaagaggtgtgggattacgtgtttttcaaggaggccccttttccaaaaacacaaatcgccaaagagaaattggatcaactgaaacaggagttcgaattttggtatcctgtggacctccgggtctctggtaaggatttagtgccaaatcatttgagctactatttgtacaaccacgtcgctatgtggcccgagcagagtgacaaatggccaactgctgttcgcgccaatggtcacctgttgctaaatagtgagaaaatgtccaagtccacaggtaactttctgacgttgacacaggcaattgataagttctccgccgatggaatgcggcttgctctggccgatgctggggacacagtagaagacgccaactttgttgaagctatggctgacgctggcatcttacggctctatacgtgggtggaatgggtgaaggaaatggtagccaattgggattctcttcgaagcgggccagccagcacgtttaacgacagagtctttgcctctgaattaaatgctggtatcataaaaacagaccagaactacgagaagatgatgttcaaggaggcactgaagacaggcttttttgaattccaggcggcaaaggacaaatacagagaattggccgtggagggtatgcacagagagctcgtctttcggttcattgaagtccagaccctgctgctggcgcccttctgcccgcatctctgcgagcacatctggactctgctgggcaaaccagatagcattatgaacgcctcatggcctgtggctggccctgtgaacgaagtgttaattcactccagccagtatctgatggaggtaacacacgacctgcgcttacgcctcaagaactacatgatgcccgctaagggcaaaaagacagacaaacagccactgcagaaaccgtcccactgcacaatttacgttgccaagaactaccccccttggcagcacaccaccctaagtgtgctccgtaaacacttcgaggctaataacggaaagttacccgataataaggtgatcgcatcggaacttggtagtatgcctgagctgaagaagtacatgaaaaaggttatgcctttcgttgccatgatcaaggaaaacctggagaaaatggggccacggatcctagacctgcagctggagtttgacgaaaaagccgtgctaatggagaacattgtgtacctgacaaactccctggagctggaacacattgaggtcaaatttgcgtcagaggcagaggataagatccgggaagactgttgtcccggcaaacctctcaatgttttccgtatcgaaccaggggtttctgtgagcttggtgaacccccagccatcaaatgggcatttctctaccaaaatagagatccggcaaggggataattgcgactctataattcgccggttaatgaaaatgaacagggggatcaaggatctcagtaaagtaaaacttatgcgattcgacgatccattgttaggccctcggagagtgccagtgcttggcaaggagtacaccgaaaaaactcccattagtgaacacgctgtatttaatgtagacctcatgtctaagaagattcatcttacagaaaatggcattcgggtggatattggggataccatcatttacctcgtgcattag

SEQ ID NO: 122211 - DNA, 3369 bp, synthetic construct
  misc_feature 1..3369: note = Description of Artificial Sequence: Synthetic coding sequence
  source 1..3369: mol_type = other DNA
atgaatggccgcctacatcttgggcatacatttagcctgagcaaatgcgaatttgctgtgggctatcagagactgaaagggaagtgctgtctttttccattcggcctccattgcactggcatgcctattaaagcgtgcgcagataaattgaagagggagatcgaactctatggctgcccccccgattttcccgatgaagaagaggaagaagaggagacctctgtgaagacggaggatattatcatcaaagacaaggccaagggcaagaaatccaaagccgcagcgaaagccgggtcgagtaagtaccagtggggtataatgaaaagcttagggcttagtgacgaggagattgttaaatttagtgaggccgagcactggctggactatttcccacccctggcgatccaggacctcaaaaggatgggacttaaagtcgattggcgccgttcattcataaccaccgatgtcaacccctattacgactcctttgtcagatggcaattcttgacactgcgggagcggaacaagatcaaatttgggaaacgatacacgatctattctccaaaagacggccagccctgtatggatcatgacaggcagacgggggaaggagtggggccccaagaatatactctgctcaaattgaaggtactggaaccctatccttctaagctgagcggtctcaaaggaaagaacattttcctcgtggccgccaccttacgccctgaaactatgttcgggcagactaattgctgggtgaggcccgacatgaagtatatcggttttgaaacagtaaatggcgacatcttcatttgcacccaaaaagccgctagaaatatgtcctatcaggggttcactaaggataatggagtggtccctgtggtgaaggagctgatgggcgaagaaattctgggggcttccctgtccgcacccctaactagttacaaagttatctatgtcttacccatgctgacaataaaggaagataagggcaccggagtcgtcacctctgttccatcggacagccctgatgatattgctgcactcagagatcttaaaaaaaagcaggccctgcgagcaaagtacgggattagggacgacatggttcttcccttcgagccagtgcccgtgatcgagatccctgggttcggaaacctttccgcagtcactatttgcgacgaattgaagattcagtcgcagaatgatcgcgaaaagctggccgaggcgaaagagaagatttatctaaagggcttttatgagggcatcatgctggtagacgggttcaagggccagaaagtccaggacgtgaaaaagacgattcaaaagaagatgattgatgctggcgatgccctgatctacatggaacctgagaagcaggtgatgtctcgcagctctgatgagtgcgtcgtcgctttgtgcgatcagtggtatctcgactatggcgaggagaactggaagaaacaaactagccagtgtcttaagaatcttgagacattttgcgaggagactcggcgcaattttgaggcaacattgggatggctccaagagcatgcttgtagccggacctatggattaggcactcacctgccctgggacgagcagtggcttatcgaaagcctctcagattcgaccatctacatggccttttacacggtggcccatttgctccaggggggcaacctgcacggccaggccgaaagtcctttagggattagacctcagcagatgaccaaagaggtctgggactatgtgttctttaaggaagccccattcccgaaaactcaaattgcaaaagaaaaacttgatcagctgaagcaggagttcgagttttggtaccccgtcgatctgagggtttcgggcaaagacctggtacctaaccatctctcctattatctgtataatcacgtagctatgtggcctgagcagagtgataaatggcccaccgctgttagggccaacggtcacttgctactgaatagtgaaaaaatgtcaaagagcacaggaaatttcttaacactcactcaggcaatcgataaattttctgccgacggaatgcgactcgctttagcagatgctggcgacacagtggaggatgcaaatttcgttgaagcgatggctgacgccgggatccttaggctttatacctgggttgaatgggtgaaggagatggttgcgaactgggactcactcaggtcagggccagcatccacttttaacgaccgcgtcttcgcctccgagctaaacgccgggataatcaagacagatcagaactatgaaaaaatgatgttcaaagaggccctgaaaaccggttttttcgagttccaggctgccaaggacaagtacagggagttagcagtcgaaggcatgcaccgggagcttgtgttccggtttatcgaagtgcagacgctgttactggcccccttttgtccacatctgtgcgagcatatctggacccttctggggaaacccgactctataatgaatgcttcctggcccgtcgctggccctgtgaatgaagtgttgatccattcatctcagtacctaatggaggtcactcacgacctgagacttcgtctgaaaaattatatgatgccagctaaggggaagaagacagataaacagcctttgcagaaaccaagtcactgtaccatctacgtagcaaaaaattaccctccctggcagcacaccacactgtcagtcctgaggaaacatttcgaggcgaataacggcaagctgcctgacaacaaagttattgcctcggagttagggtccatgccagaactcaagaagtatatgaagaaagtgatgcccttcgttgccatgataaaagagaacctggagaaaatgggacctagaattctggacttgcagctggagttcgatgagaaggccgtgctgatggagaatattgtgtatctcaccaactccttggagctcgaacatatcgaggtgaaatttgcttcagaagcagaagataaaatccgcgaggactgctgtcccgggaagcctcttaatgtctttcgcatcgaaccgggcgtgagcgtatccttggtgaatccacagcctagtaatgggcatttcagcaccaagatcgagatacggcagggcgataattgcgatagcatcatccggcggctgatgaaaatgaaccgaggtattaaggatctgtccaaagtaaagttaatgaggtttgacgacccactgctgggtccacgccgggtgccggtgctggggaaggagtatacggagaaaacccctattagcgagcatgcggtattcaacgtggacctgatgtctaaaaaaatacacctcaccgagaacgggatccgtgtggatattggggataccatcatctacttggtgcattag

SEQ ID NO: 122212 - DNA, 372 bp, synthetic construct
  misc_feature 1..372: note = Description of Artificial Sequence: Synthetic coding sequence
  source 1..372: mol_type = other DNA
atgtggcccgagcagagcgacaagtggccaaccgccgtccgggctaacggacatctgctgctcaactccgaaaagatgtccaaatcaaccgggaattttctcaccctaacacaagccattgacaagttctcagccgatgggatgcggctggccctcgcggacgcgggggacaccgtggaggacgctaattttgtggaagcgatggcagatgcggggattttaaggctgtatacctgggtggaatgggttaaggagatggtcgccaactgggatagtctgaggtctgggcctgctagtaccttcaatgatcgcgtgttcgcgtcagaactcaacgcggggattatcaaaacagatcagactatgaagcggtag

SEQ ID NO: 122213 - DNA, 1458 bp, synthetic construct
  misc_feature 1..1458: note = Description of Artificial Sequence: Synthetic coding sequence
  source 1..1458: mol_type = other DNA
atgtggcctgagcagagtgataaatggcccaccgcagttcgagcaaatggacatctactcctgaacagtgaaaagatgtccaaaagtactggcaatttccttaccctcactcaggccatagataagttttccgctgatggcatgcgtctggctctcgccgacgctggggacaccgtcgaggacgcgaatttcgtcgaagctatggccgatgccggcatcttgcgcctgtacacatgggtggagtgggtaaaggaaatggttgcaaactgggatagcctgcgcagtggacccgcatccacttttaacgatcgcgtgtttgcaagcgaattaaacgctgggattatcaagaccgatcagaattatgagaaaatgatgttcaaagaagccctgaaaaccggattttttgagttccaagccgctaaggacaagtaccgtgagctggccgttgagggaatgcaccgcgagctggtgtttcggttcatcgaggtgcagaccctgctgttagctccattctgtccccacctttgcgaacacatctggactctcttgggaaagccagatagcatcatgaatgctagttggcccgttgccggaccagtgaatgaagtgctgatccactcctctcagtaccttatggaagttactcatgacctcagactgcggttgaagaattacatgatgccagcaaaaggtaaaaaaaccgataagcagccactgcagaaaccttcccattgcacaatatacgttgcaaaaaattaccctccttggcagcacactactctgtcggtgctgcggaagcactttgaagcaaataacggcaaactcccagacaacaaggtgatcgcaagcgaactggggagcatgcccgagctgaaaaaatacatgaagaaggtgatgccattcgtcgccatgattaaagagaacctcgagaaaatgggtccccgcattctagacctgcagctggagttcgacgagaaagctgttctcatggagaatatagtctacctgactaatagcctcgagctggaacatatcgaagttaaattcgccagcgaggctgaagacaaaatcagggaggactgctgccccggaaaacccctgaatgtctttcggattgagccgggagtcagcgtaagcttagtgaatccgcagccttctaacgggcatttttcaacaaagatcgagattagacaaggcgacaattgcgatagtatcattaggagacttatgaagatgaatagagggatcaaggatctttctaaggttaaacttatgcgctttgatgatccactgctcggcccccgccgagttcccgtcttgggtaaggaatacacagagaaaacccccattagcgaacatgccgtgttcaacgttgacctgatgtccaagaaaatccaccttaccgagaacggcataagagtggatatcggggataccataatctacctggtgcattag

SEQ ID NO: 122214 - DNA, 3393 bp, synthetic construct
  misc_feature 1..3393: note = Description of Artificial Sequence: Synthetic coding sequence
  source 1..3393: mol_type = other DNA
atggccgagcggaagggcacagcaaaggtggattttcttaagaagatcgagaaggagatccagcagaagtgggacactgaaagagtgttcgaagtaaacgcctctaacctggagaagcagactagcaaggggaaatactttgtgacctttccctacccatatatgaacggtcgtttacatcttggccataccttctcactctccaagtgtgagtttgccgtgggataccagaggctcaaagggaaatgctgcctttttccttttggcctccactgcacaggtatgcccattaagagcaaggccgccgccaaggccgggtcttcaaaataccagtggggcataatgaaaagtctcgggttaagcgacgaggagatagtgaagttttctgaggccgagcattggctcgattattttccgcccctagccattcaggacctgaagcgcatgggcctcaaagtggattggcgccggagcttcatcactactgacgttaatccatattatgattctttcgtgcgttggcagttcctgacactcagggagcggaataaaatcaagttcggaaagcgctataccatttactcccccaaagacggacaaccttgcatggatcacgatcggcagactggggagggggtaggaccccaggaatacacgcttcttaaattaaaggtgcttgagccctacccctccaagctcagtggccttaaggggaagaatattttcttggttgccgccactcttaggcctgagactatgtttggacagacaaattgctgggtgaggccagacatgaaatacatcggctttgaaactgttaacggcgacatcttcatctgtactcaaaaggctgccagaaatatgtcctaccagggctttacgaaagacaacggcgtggtgcctgtggtgaaagaactgatgggggaggaaatcctgggtgcctcactctctgctcccctgacaagctacaaggtgatctatgttctacccatgctgacaattaaagaagataagggcaccggagtggtaacaagcgtgccgtccgacagtccagacgacatcgcggccttacgggacctgaagaagaaacaagcattgcgagccaaatacgggattcgggacgatatggtcttgccgtttgaacccgtgcccgttatagaaataccggggttcgggaacctgagcgcagtgaccatctgcgatgagctaaagatccagtcgcagaatgacagggaaaaattggccgaggccaaggaaaaaatctaccttaagggcttctacgagggcatcatgctggtagatgggttcaagggccagaaggttcaggacgtgaaaaagacaatccaaaaaaaaatgattgacgccggagatgctctgatatatatggaaccagagaagcaggtgatgtctaggagttcagatgagtgtgtggtcgcgctgtgcgatcaatggtacctggattacggagaagagaattggaaaaaacagacctcccagtgtctgaaaaacctggaaactttctgcgaagaaacaaggcggaacttcgaagccactcttggctggcttcaggaacatgcctgctctcgtacgtatggcttaggtacacacctgccttgggacgaacagtggctcatcgagtcgctttccgatagcacaatttatatggcattctatacagttgcccaccttcttcaaggcggaaacttacacggacaggccgaatctccgttgggtattcggccccagcagatgacgaaggaggtctgggactatgtctttttcaaggaggcgcctttcccgaaaacacaaattgcgaaagagaagcttgaccaactgaagcaggagtttgaattttggtaccccgtggatcttcgggtaagtggcaaggatctcgtgcctaaccacttgagttattacctgtacaaccatgtggcgatgtggcccgaacagagcgacaagtggcctaccgcggtccgagcaaatggacacttgcttcttaactcagaaaaaatgtccaaaagtacaggtaattttctgactctaacgcaagccatcgataagttcagtgcagacggaatgaggttagctctcgctgacgctggggataccgttgaggatgctaatttcgtcgaggccatggcggacgccggcatcctgaggctgtatacatgggtggaatgggtgaaggaaatggtggcaaactgggacagcctgcgctcaggccctgcctccacgtttaacgatcgcgtcttcgcatcggagttgaacgcaggtatcattaagactgatcagaactacgaaaaaatgatgtttaaggaggctctgaagacaggattctttgagtttcaggcggccaaagacaaataccgggagctggccgtggaaggaatgcacagggaactggtcttccgatttattgaagttcagacgctcctgttggcacccttctgtcctcacctgtgtgaacatatttggaccctgctcggaaagccggactcaataatgaatgcatcttggccagtggccggcccggtcaacgaagtacttatacattccagtcagtatcttatggaagtgacccacgatctccggttacgcctgaaaaactacatgatgcctgcgaaaggcaagaagacggacaagcagcctttgcagaagccaagtcattgcactatctacgtggctaagaattatcccccttggcagcataccactctgtcagtgctgcgcaaacattttgaggccaacaatgggaaactgcctgacaataaggtaatagcctctgagctgggctctatgcccgaactgaagaagtacatgaagaaggtgatgccctttgtagctatgatcaaggagaatcttgagaaaatgggacccagaattctggatttgcagctggaatttgatgaaaaggcagtgctgatggagaacattgtatacctgactaattcactcgaactcgaacatattgaggtaaagttcgcatccgaagctgaggacaagatccgcgaagattgctgtccagggaaacccctgaacgtgttccgcatagagccgggcgtgtcagtgtctctggtgaatccccagcctagcaacgggcatttctccacaaagatcgagattaggcagggtgacaactgtgattccataattagacgactgatgaagatgaaccgcggtataaaagacctctcaaaagtgaagctgatgcggtttgacgacccgcttctcggcccccggagagtccccgtgctcgggaaggaatataccgagaagacgcccattagcgagcatgcggtttttaatgttgatctaatgagcaagaaaattcacctgactgaaaacgggattagggtggacattggtgataccatcatatatctcgtgcattag

SEQ ID NO: 122215 - DNA, 2712 bp, synthetic construct
  misc_feature 1..2712: note = Description of Artificial Sequence: Synthetic coding sequence
  source 1..2712: mol_type = other DNA
atggcatccgtgtggcaaagactgggcttttacgcctcactcctgaaaaggcagctgaatggcggtccagatgttattaagtgggaaagaagggttattcccggatgcaccaggtctatctacagcgccactgggaaatggactaaagagtacactctccagactagaaaagatgttgaaaaatggtggcaccagcgcattaaggaacaggcttccaagatctccgaggccgacaaatcaaaacctaagttctacgtccttagcatgtttccctatcccagcgggaagctgcacatggggcacgtgcgcgtgtacacaatttctgataccattgctcgcttccagaagatgcggggcatgcaggtgattaacccaatgggctgggacgccttcggcctgcctgccgagaatgcggctgtggaaaggaacctgcaccctcagagttggacacagagcaatattaaacacatgcgcaaacaacttgatcgcttggggctatgcttcagttgggacagagaaataactacatgcctgcccgactattacaagtggactcaatacctgttcattaaactttacgaggccggtctcgcctatcagaaggaggcgctggtgaactgggatcccgtggaccagactgtccttgccaatgaacaggtggacgagcacggatgctcttggcggagcggagctaaggtcgagcagaagtatttgaggcaatggttcatcaagactacagcatacgccaaggctatgcaggatgccctggccgatctgcccgagtggtatgggattaagggcatgcaagcacactggattggcgattgcgtggggtgtcatctggactttaccttaaaggtgcatggccaggcgacaggggagaaacttactgcttatacggccactcctgaggcaatttacggcacaagccacgtagcgatctctccatcccacaggttgctgcacggtcattccagcctgaaagaggccttgaggatggcgctggttcctggaaaggattgtctgacgcccgtgatggcggtaaatatgctcacgcagcaggaagtccccgtcgtgatcctggccaaagcagaccttgagggttccctggactctaagattgggattccgagcacaagttctgaggacacaatcctagctcagacccttggtctggcatacagcgaagttatcgagacccttcctgacgggaccgaacggctgagctcttccgccgagttcaccggaatgacacgacaggatgctttcttagctctcacgcagaaggctcgaggaaagagagtgggcggcgacgtcactagtgacaaactaaaggattggcttatctcccgccagcgctactgggggactccaattcccattgtccactgtccagtgtgcggaccaactcctgtccctttggaggatcttcccgtgactctgcccaatatagcttccttcaccggcaaaggtggccctcctctggcaatggcaagcgagtgggttaactgctcatgtccgcgctgtaaaggagccgccaaacgtgagacagataccatggataccttcgtggatagtgcttggtactatttccggtacaccgacccacacaacccacactcacctttcaacaccgctgtggccgactattggatgcctgtggatctgtatatcggaggtaaagagcacgcggtgatgcatctgttctacgcccgttttttttcccatttctgccacgaccagaagatggtcaagcatagagagccgttccacaagctcctggcacagggcctgataaaggggcaaacattcaggctaccaagtggacagtacctgcagcgggaggaagtggatctgaccggttcagttccggtgcatgccaaaaccaaagaaaagctggaagtgacctgggaaaagatgagcaaatcaaagcataatggtgtggatcctgaagaagtagttgaacagtatggcatcgataccatccgcttgtacatactgttcgccgccccaccagagaaagatatcctatgggacgtgaagactgatgcgctgccgggcgttctgcggtggcagcagaggctgtggacattgaccacccgattcatcgaagctagagcctctggcaagagcccccaaccccagcttctcagcaacaaagaaaaagctgaggcaaggaaactgtgggaatataagaattccgtaatttctcaggtgacgactcacttcaccgaagacttttctcttaattccgcgatttcacagctcatgggactttcgaatgcactcagtcaggcctcacagtccgtgattctgcacagccccgagtttgaggatgctctgtgtgctctgatggtaatggctgcacctctggccccgcacgtgacctctgaaatatgggctggcctagcattggttccacgaaagctctgcgcccactacacgtgggacgcttctgtcctcctgcaagcttggcctgccgtagaccccgagtttctgcaacagccggaggtcgtgcagatggccgtgcttatcaacaataaagcctgcggtaaaattcccgtgccccaacaggttgcaagagatcaagacaaggtacatgaattcgtgctccagtccgagttaggtgttcggcttctgcagggacggagcatcaaaaaaagttttctgtcaccacggaccgcactcatcaattttctagtgcaggactag

SEQ ID NO: 122216 - DNA, 2583 bp, synthetic construct
  misc_feature 1..2583: note = Description of Artificial Sequence: Synthetic coding sequence
  source 1..2583: mol_type = other DNA
atggcctccgtgtggcaacgcctggggttttacgccagcctccttaagagacagctaaacggcgggccagatgtgataaagtgggagagacgtgtcatccctggatgtactaggtctatctattcagctactggcaaatggacaaaggagtacaccctccagacccggaaggatgtggagaagtggtggcatcaaagaattaaagagcaggcttcaaaaatatcagaggcggacgtgattaaccccatgggatgggatgcattcggtctgcccgccgaaaacgccgctgtggaaaggaacctccatccccagtcctggacacagagtaatatcaagcacatgagaaaacagctcgatcgtttaggtctgtgcttctcctgggatcgagaaatcactacatgcctgcccgattactacaagtggacacagtacttgttcattaaactgtatgaggccggcttagcttatcagaaggaggctctggtgaactgggatcctgttgaccagaccgtactcgcaaacgagcaggttgatgaacacgggtgctcgtggcgcagtggagccaaggtcgagcagaaatatttgcgccaatggttcatcaagaccactgcatacgcaaaagctatgcaggacgctctggccgatctgcccgaatggtatgggatcaaagggatgcaggcccattggataggggactgcgtagggtgccatctggactttactctgaaggtgcacggccaggcgactggcgagaagctgacggcctacaccgcgacacccgaggctatttacggcacttctcatgtggcaattagccccagccaccgcctccttcatggccacagctcattaaaggaggccctacgcatggccctggtcccaggcaaagactgccttacgccggtgatggcggttaatatgctgactcagcaagaggtgcctgtagtgatcctggccaaggcagaccttgagggatccttggatagtaaaatcggcatcccgtcgacttccagcgaggataccatactagcccagactctcggtctggcatactccgaagttatcgagacactcccagatgggacagaacggttaagttcatccgccgagtttacgggaatgacacgacaagatgccttcttggctctcactcagaaagcccgggggaaacgggtgggcggtgacgtgacaagcgataaactgaaggattggctcatttcccggcagcgctactggggcacacccatccccatcgtgcactgtccagtgtgcgggcccactccagtgcccctggaagatctgccagtgacattgcccaatattgcctcctttacaggtaaaggagggcctcccttggctatggcctctgagtgggttaattgtagttgtccccgctgtaagggcgctgccaaacgagaaacagacacaatggatacctttgttgactcggcctggtactacttccgttacaccgacccacataacccacactcacctttcaatacggccgttgccgattactggatgcccgttgatctatacatcggtggcaaggaacacgcggtgatgcacctgttctacgcccgctttttttcccatttctgccacgaccagaaaatggtcaaacacagagagccttttcataaactgctggcacaggggttgattaagggtcagacattccggctcccgtcagggcagtacctgcagcgtgaggaagttgacctgactggcagcgtgccggttcacgccaaaaccaaggaaaagctcgaggtgacctgggagaagatgagtaaaagcaaacacaacggcgttgacccagaggaggtcgtcgagcagtacgggatcgacaccataaggctttatatcctgttcgcagcccctccggagaaggatatcctatgggatgtcaaaaccgacgcactgcctggcgttctgagatggcagcagcgcctatggaccctgaccacaaggtttatcgaggctcgcgctagtggcaagagtccccaaccccagcttttatcaaataaggaaaaagcagaagctagaaagctgtgggagtataagaatagtgtgatttcccaggtcactacgcactttacagaggacttttctctgaactctgccatttcccagctcatgggcctctccaatgcgctaagccaggcaagccagagcgtgatcttgcatagcccagaattcgaagacgctctctgtgctctgatggttatggccgccccactggcacctcacgtgacaagtgagatctgggccggactggccctggtgccccggaaactgtgtgcgcattacacttgggacgcgagcgtgttgcttcaggcatggcccgccgtggacccagaattcctccagcagccagaagtggtgcagatggccgttctgattaacaataaggcctgtggtaaaattccagtcccccaacaggttgcaagggaccaggataaggtccacgaattcgtgcttcagagcgaactgggggttcggctgctgcagggacgatcaataaaaaagtcattcttgtctcctcgaacagctctgatcaattttctggttcaggactag

SEQ ID NO: 122217 - DNA, 2712 bp, synthetic construct
  misc_feature 1..2712: note = Description of Artificial Sequence: Synthetic coding sequence
  source 1..2712: mol_type = other DNA
atggcctcagtgtggcaaagactgggcttttacgcctctctgttgaagcgtcagctgaatggaggccccgacgtgattaagtgggagcggcgagtgatccccggctgtactcgaagtatttacagcgccactggtaagtggaccaaagaatacacccttcagacccgtaaagacgtggagaagtggtggcatcagaggatcaaggaacaggcctccaagatctctgaagccgataagagtaaacccaaattctacgtgctttcaatgtttccctacccatccggcaaactgcacatggggcacgttcgcgtttacaccatctccgatactattgcacgatttcaaaagatgcgcggcatgcaggtgattaacccaatggggtgggacgcttttggccttcccgccgaaaatgctgccgtggaacggaacctgcacccacagagttggacccagtctaacattaaacatatgcggaaacagttggatcgcctcggcctgtgtttttcctgggacagggagataactacttgtctgcctgattattataagtggacgcagtacctctttattaaactgtacgaggcagggttagcctatcagaaggaagccctggtgaactgggatccggtggaccagactgtgctggccaatgaacaggtggatgaacacggttgctcctggcggtcaggcgcaaaggtggaacaaaagtacttaaggcagtggtttataaagactacagcctacgccaaagccatgcaggacgccttggctgacctgccagagtggtacgggataaagggcatgcaggcccattggatcggcgactgcgtggggtgccatctggatttcaccttaaaggtacacggtcaagcaaccggtgaaaagctgactgcatatactgctacccctgaggcaatttacggcacctcccatgtggccatctctccaagtcaccggctactccatggccattcaagcctaaaggaggcactccgtatggcgctcgtgcctgggaaagactgtcttacgcctgtcatggctgtgaacatgctaacccagcaggaggtccctgtggtgatcctggctaaagcagacctcgagggatccttagacagcaagatcggcataccttctaccagtagcgaggacacaattctggcccaaaccctgggactcgcctattcggaagtgatcgaaactctgccagacggtaccgagagactcagctcttccgcggagtttactgggatgacccgccaggacgctttcctggcgctgacacagaaggcgcggggcaaacgagtgggaggcgatgttacttccgataagctgaaggattggctaatttctcggcaacggtactggggtacacctatacctatcgtgcattgcccagtctgcggtcccacccccgtacccctcgaagaccttccagtgacactgccaaacattgccagtttcaccgggaaaggaggtcccccactggcaatggcaagcgaatgggtgaactgcagttgtccccgatgcaaaggggcggcaaagagagaaaccgacactatggacacatttgttgattcggcatggtattattttcggtacacggaccctcacaaccctcattctccctttaataccgcggtggccgactactggatgccagtggacctttacatcggaggtaaagagcatgcggtgatgcatcttttttacgccagattttttagccacttttgccacgatcaaaaaatggtcaagcatcgtgagccttttcacaagttgttggctcaggggctgattaaagggcagacctttaggctgcctagtggacaataccttcaacgggaagaggtggatcttacaggctcagtccccgtccacgctaagactaaggagaagctagaagtgacgtgggaaaaaatgtccaaatccaaacataatggggtcgatcccgaagaggtagtggagcaatatggtatcgacaccatcagactatatatcctgttcgccgcgcccccagagaaggacattctttgggacgtgaagaccgatgcccttcctggcgtgctgaggtggcagcaacggctgtggacactaactactcggttcatcgaagcacgcgcatcagggaagtcacctcagccacagcttttgagtaataaagagaaggctgaggcgcgaaagctgtgggagtataaaaacagtgttatcagtcaggtcacaacccactttactgaagactttagtcttaatagtgcgatctcccaactgatggggttgagtaacgcgctgtctcaggcctctcaaagtgttattttacactctcccgagtttgaggacgccctatgtgccttgatggtaatggccgctcctttggccccccatgttacttctgagatttgggcagggctggccctcgttccaagaaaactctgcgcccactatacttgggacgccagtgtgctcctccaggcttggcccgcggtggatccggaatttctgcagcagccagaagttgtacaaatggccgtgctcattaataacaaggcttgcggtaagatccctgtgccacagcaagttgctcgagaccaagacaaggtccatgaattcgttctccagtccgagctaggtgtgcggctcctgcagggccgctcaatcaaaaaatcctttctatctccccggacagccctgattaattttttagtgcaggactag

SEQ ID NO: 122218 - DNA, 345 bp, synthetic construct
  misc_feature 1..345: note = Description of Artificial Sequence: Synthetic coding sequence
  source 1..345: mol_type = other DNA
atggccagtgtgtggcagcggcttgggttttatgcctcactgcttaaacgtcaactcaatggcggacctgatgtcataaagtgggagaggcgggtgatcccagggtgtactagatcaatctactcagccaccggcaaatggacgaaagagtacaccctgcagactcgtaaagacgtagagaaatggtggcaccaacgtatcaaggaacaggcctccaagatttccgaggcggataagtcaaagcctaagttctatgtcctgagcatgttcccgtacccaagcggaaaactccacatgggtcacgtgagggtgtatacaatctcggacactattgcgagattttag

SEQ ID NO: 122219 - DNA, 609 bp, synthetic construct
  misc_feature 1..609: note = Description of Artificial Sequence: Synthetic coding sequence
  source 1..609: mol_type = other DNA
atgaaagttctggctgccggtgtcgtccccctcctgctcgtgctgcactggaaacatggagcaggatcccctctacctataacccccgtgaatgcgacatgcgcaataaggcacccctgccacaacaacctgatgaatcagattcgcagtcagctcgcacagctgaatggtagtgcaaatgcactctttatcctgtattacaccgctcagggcgagccttttccgaataatctggacaagttatgtggccctaacgtgacggatttcccgccctttcatgccaacggtacggagaaagccaagctcgtggaactgtaccggatagtcgtctacctggggactagcttggggaacatcactagggaccaaaaaatactgaacccctccgcactgtcactacactctaagttgaatgctaccgccgacattttacgcgggctgttaagcaacgtgctttgtaggttatgtagtaagtaccacgtgggtcacgtcgatgtaacttatggccccgatacatctggcaaggacgtatttcagaagaagaagctgggctgtcagctgctgggaaaatataaacagataatagcggtcttggcgcaagctttctag

SEQ ID NO: 122220 - DNA, 3294 bp, synthetic construct
  misc_feature 1..3294: note = Description of Artificial Sequence: Synthetic coding sequence
  source 1..3294: mol_type = other DNA
atgatggatatctatgtgtgtctgaaacgccctagttggatggtcgacaataaacgaatgaggactgccagcaacttccagtggctgctgtcaactttcattctgttgtacttaatgaatcaagtgaatagccagaagaaaggcgccccacacgatctgaagtgcgtcacgaataacctgcaggtgtggaactgctcttggaaggcaccatctggcactggtaggggtactgactacgaggtgtgtattgagaatcggtctagaagctgttaccagctggagaagacttctatcaaaatccctgccttaagtcacggtgattacgagatcacgattaattcgctgcatgactttggcagttcgacaagcaagttcaccctaaacgaacagaatgttagcttgattcccgatacccctgagatcttaaacttaagcgccgacttttcgaccagtaccctgtatcttaaatggaacgaccgaggatctgtctttcctcaccgcagcaacgtaatatgggagataaaggtgctgagaaaggaaagcatggagctcgtgaagctcgttacacataataccaccctcaatggcaaggacaccctgcatcattggtcttgggcaagtgatatgcctctggagtgcgctatccatttcgttgagataaggtgctatattgataatctccattttagcgggctagaggagtggagcgactggagccctgtgaagaatatctcctggatccctgattcccagaccaaagtgtttccgcaagataaagtcattctcgtcggctcagatatcacattttgctgtgtgtcccaagagaaagtactgagcgctctgataggacatacaaattgtccactgattcatctcgacggggaaaatgtggcaatcaagataagaaatataagtgtttctgcgtcttctggcaccaatgtggtctttaccacagaggataatatcttcggtacggtgattttcgcaggctacccacctgacacaccccaacagttgaactgtgaaactcacgacctgaaggagatcatctgtagttggaaccccgggagggttacagcactggtcggacctcgcgcgacctcatataccttggtcgaaagtttctccgggaaatacgtgcgactgaaaagagctgaagctcctactaacgagtcataccagctattatttcagatgcttcccaatcaggagatttataactttaccttaaatgcccataatcctctgggtagatcacagagtacaattttggtgaatatcacagagaaagtgtaccctcacacccccacaagttttaaagtgaaggatattaactccacagccgtcaaactgagctggcacctccccggaaattttgccaaaataaatttcctgtgtgaaatcgaaatcaaaaaatccaatagcgttcaagaacaacgaaacgttacgataaagggcgtagaaaacagttcctatctggtggcactagacaagctgaacccttatactctttacacctttagaatccggtgcagcacggagaccttttggaagtggtctaagtggtccaacaaaaaacagcacctcactacggaggcctcaccaagtaaaggccctgatacgtggcgcgaatggtcgagcgacggaaaaaacctgattatttactggaagcccctcccaattaacgaggcaaacgggaaaatcctgagctataatgtgagctgttccagcgacgaagaaacacagtccctatccgagatcccagacccacagcacaaagctgaaattcgactggataagaacgactacatcatcagcgttgtcgctaaaaactccgtgggctcatcccctcctagcaagatcgcctcaatggagatccccaacgatgacctgaagatcgagcaggtggttggcatgggaaaaggaatcctgctgacatggcactatgacccgaacatgacctgcgactacgtaatcaagtggtgcaacagttccaggtccgaaccgtgtttaatggactggcgcaaggtgccgtccaacagtacggagaccgtcatcgaatctgacgaatttcgccccggcataaggtacaacttttttctgtatggctgccggaaccagggttatcaacttctcaggtctatgatcggctacattgaggagctggcaccgatagtagctcctaattttaccgtcgaggatacttccgctgacagtatactggttaagtgggaggatatacctgtagaagaacttaggggattcttgcggggctaccttttttactttgggaaaggcgagcgcgatacaagcaaaatgagagtgctggaaagtgggaggtcggacatcaaagtgaaaaacataacagatatttctcagaagacacttcgtatcgcggatctacaaggcaaaacatcgtatcatctggttctgagagcttatactgatggtggtgtcggccccgagaagtcgatgtacgtggtgacaaaagagaatagtgtggggctaatcattgccatactgatccctgtggccgtggcagtgatcgttggcgtcgttaccagtattctgtgctacagaaaaagggaatggattaaggaaacattctaccctgatatccccaaccctgaaaattgcaaggctcttcagttccagaagagtgtgtgcgagggatctagcgccctgaagaccttggagatgaacccctgcaccccaaataacgtcgaggttttagaaacccgaagcgccttccctaagatcgaggacactgagattatcagccctgtcgcagagaggccagaggacaggtccgacgccgagcccgaaaatcacgtcgtggtgagctattgcccaccaattatagaagaggagatccccaatcctgctgccgatgaggcaggcggaactgcacaggtgatttacatcgacgtccaaagtatgtatcagcctcaggcaaaacccgaagaggagcaagagaacgatcctgtgggcggcgctggctacaaacctcagatgcacctccccatcaactctaccgtggaggatatcgccgcggaagaggacctggacaagaccgctggctatcgtccacaggccaacgttaatacttggaacctggtaagccctgactcccctcgcagcattgatagcaatagcgaaattgtgtctttcggatctccgtgctccattaactccaggcaatttctcattcctcccaaggacgaggattcgcctaagagtaatggcggcgggtggagcttcactaacttcttccagaacaagcctaacgattag

SEQ ID NO: 122221 - DNA, 3294 bp, synthetic construct
  misc_feature 1..3294: note = Description of Artificial Sequence: Synthetic coding sequence
  source 1..3294: mol_type = other DNA
atgatggacatctacgtgtgcctcaaaaggcccagctggatggtggacaataaaaggatgagaacagcctcaaatttccaatggctcctgtcgacattcattcttctgtacctgatgaaccaggttaacagtcagaaaaagggcgccccgcatgacctgaagtgtgtcaccaacaacttacaggtgtggaattgttcctggaaggccccgagcgggacgggacggggaaccgattacgaggtgtgcattgagaacaggagcagatcatgttaccagctcgaaaagaccagtataaagattccggccctgagccatggagattatgagataacgatcaatagccttcatgatttcggctcctccacgagtaagttcactctaaatgagcaaaacgtttccctgatccctgacacccctgagatcctgaacttatcggccgatttctctacctccacactgtacctcaaatggaatgacaggggcagtgtgttcccccacagatctaacgtcatctgggagattaaggttctgaggaaggaaagcatggagctggtgaaactggtcactcacaatacaactctaaacggtaaggataccttgcatcactggagctgggctagcgatatgcccttggaatgtgccatccattttgttgaaatccggtgttatatcgacaatctgcattttagcggtctcgaagagtggtctgattggtcccccgtgaagaacatatcatggataccagactcccagacaaaggtctttccccaggacaaagtgatactggtcggaagcgatatcaccttctgctgcgtgagccaggaaaaggttctctctgccctcattggccacaccaactgcccactcatacacctagacggagaaaacgtggccatcaaaattcgaaacatatccgtcagtgcttcctccgggaccaacgtcgttttcacgacagaagacaatatcttcggcacagtcatctttgctggttacccacctgacacaccccaacagctcaactgtgagactcatgacctcaaagagatcatttgcagctggaatcctggacgagtaactgctttggtcgggccccgggcaacgtcatatacacttgttgagtcattctctggcaaatatgtgcgactgaagagggccgaggcgccgaccaacgagtcctaccagttactgttccagatgctccccaatcaggagatctacaattttaccttaaacgcccacaaccccctgggaagatcccagtccaccattctggtgaacattacagagaaggtgtacccgcatacccctacctccttcaaggtgaaagacatcaattccaccgccgtcaagctcagctggcatttacccggcaattttgccaagattaactttttgtgtgagatcgaaataaaaaagagcaacagtgttcaggagcagaggaatgtgacaatcaaaggcgtcgaaaatagcagttacctcgtggcattggataagttgaacccatataccttgtatacctttagaatcagatgttctactgagaccttctggaagtggtctaagtggtcaaataaaaaacaacacttgacaaccgaagccagccccagcaagggaccagacacttggcgggagtggtcttccgatgggaaaaacctaattatttactggaagcccctgcctattaatgaagccaatggaaagattctttcttacaatgtcagttgctcgtctgacgaggaaactcaaagcttatccgaaatccccgatccacagcacaaggctgaaatacgcttagataagaatgactatataatttctgtcgttgctaaaaattctgtcggatcctctcccccctccaagatagccagcatggaaattccaaacgatgacttaaagattgagcaggtcgttggtatgggtaaaggtattctgctgacctggcactatgatccaaatatgacttgcgattacgtaatcaagtggtgtaactcctctcgatcagaaccatgtctgatggactggcgcaaagttcctagcaattcgacagaaaccgtaattgagagtgacgagtttcgaccagggatccgctataatttcttcttatacggctgtcgaaaccagggataccaactgctgcgttccatgatcggatacattgaagagttagcccccatagtcgcacccaatttcactgtggaggatacatctgccgacagcatcttggtgaaatgggaggacatccccgtagaagaactccgcggcttcctccgcggctatttattctactttggcaaaggggaacgggacacctctaagatgcgggttctcgaaagcgggcgctctgacataaaagttaagaatataacagacatcagccaaaaaaccctgcgaattgctgatctgcagggaaaaacctcctaccacctagtccttcgcgcatatacagacgggggagttggccccgaaaaatccatgtatgtagtgaccaaggagaactctgtcggcctgatcatagccatcctgatccctgtcgcagtggccgtgatcgttggagttgtgacttctatcttatgttatcgcaagcgcgaatggatcaaggaaacgttttaccccgatattcctaacccagagaactgtaaggcactccaatttcagaagagcgtgtgtgagggatcttccgctttgaagaccctggagatgaatccctgtacacctaacaacgtggaagtgcttgaaacgaggagtgcctttccaaaaatcgaagatactgaaatcatttcccccgtggcagagcggccagaagataggtctgatgcagaaccagaaaaccatgtggtggtgtcctattgcccacccatcatcgaggaggagatcccaaatcctgccgcagacgaggctgggggaactgctcaggtcatttatatagatgtgcagtcaatgtaccaaccacaagcaaagcctgaagaggagcaagaaaacgatcccgttgggggcgccggttacaagccccagatgcacctgcctattaatagcactgtcgaagacatcgccgcagaggaggatctcgacaaaaccgctgggtatcgaccccaggcaaatgttaacacatggaacctggtttctcccgactcaccccggtctatcgactccaatagcgagatagtaagcttcggaagcccttgcagcattaattctcgacaattcctgatccctccaaaggatgaagactcccccaagagcaatggtggcgggtggagctttaccaacttttttcagaacaagcctaacgactag

SEQ ID NO: 122222 - DNA, 381 bp, synthetic construct
  misc_feature 1..381: note = Description of Artificial Sequence: Synthetic coding sequence
  source 1..381: mol_type = other DNA
atgatggatatctatgtgtgtctcaagagacctagctggatggtcgacaataagcggatgcgaactgcctccaactttcagtggctcctttcgacgttcattctgctctacttgatgaaccaggtgaattctcagaaaaagggagcccctcatgacttgaagtgtgtcacaaataaccttcaagtttggaattgtagttggaaagcacccagcgggacgggccgcggaactgactatgaggtctgcatcgaaaaccggtcccggagttgctatcagctggaaaagacttccataaagattccggccctgagccacggggactatgagattaccattaacagtctgcatgattttggatcttccacttccaaattcacctag

SEQ ID NO: 122223 - DNA, 228 bp, synthetic construct
  misc_feature 1..228: note = Description of Artificial Sequence: Synthetic coding sequence
  source 1..228: mol_type = other DNA
atgatggacatctacgtgtgcctaaaacgacctagttggatggtggacaacaagagaatgcgcactgcctctaactttcaatggttgctctccacatttatccttttgtatctgatgaatcaggttaactctcagaagaagggagcgcctcatgatcttaaatgcgtgactaacaacctccaggtatggaattgttcatggaaagccccttctggtaccggccgatag

SEQ ID NO: 122224 - DNA, 456 bp, synthetic construct
  misc_feature 1..456: note = Description of Artificial Sequence: Synthetic coding sequence
  source 1..456: mol_type = other DNA
atgttttcgacgaaagcgctactgctggccggattgatctcaacagctctggctggtccttgggccaacatttgcgccggtaaatcttcaaatgagattcgaacatgtgacaggcacggatgtggacagtactccgcccagcgtagccagaggcctcatcagggagtggatatcctttgttctgcaggaagcacagtatatgccccttttaccggtatgatcgtgggccaggagaagccttatcagaacaaaaacgctatcaacaacggtgttagaatcagtgggcgtgggttctgtgttaaaatgttctatatcaaacccatcaagtataaaggaccgataaaaaagggagagaagcttggtacactgctccctcttcagaaagtttacccagggatccagagccatgtgcatattgagaactgcgactcctctgaccctacagcttacttgtag

SEQ ID NO: 122225 - DNA, 1128 bp, synthetic construct
  misc_feature 1..1128: note = Description of Artificial Sequence: Synthetic coding sequence
  source 1..1128: mol_type = other DNA
atgactccaatactgactgtgctgatctgtctgggcctgtcactggaccctaggacccacgtccaggccggtccacttcctaaaccaacgttgtgggcagagcccggctcagtgattacacaaggctctccggtaacattacgatgccaagggtccctggaaacccaggagtaccacctataccgtgaaaaaaagaccgctttgtggattacccgtatcccgcaggaactggtaaagaagggccagtttcctatcctcagtattacttgggaacacgctggcaggtactgttgcatttacggatctcataccgctgggctaagtgagtcgagtgacccactcgagcttgttgtcaccggtgcatattcaaagcccaccctatctgccttacccagcccagtggtcacctcaggcgggaatgtgactatccaatgtgatagccaagtggccttcgatgggtttatcctgtgcgttagcaaaaaacctagcctgagcgttcaaccgggcccggtggtggcacctggggagaagctgacatttcagtgtggttcagacgcaggttatgacagatttgtcttgtataaggaatggggaagagattttttgcagcggcccgggcgccaacctcaggctgggctgagccaggcaaattttactcttggccccgtgtcaagaagctacggcggccaatacacatgttcaggtgcctacaatctgtcttcagaatggagcgccccctcagaccccttagatatcctgattacaggacagatacgggcaagaccgttcctgtcagtacgaccagggccaaccgtcgcaagcggagaaaacgtgacactgctatgccagagccaaggcgggatgcatacatttctcctgactaaggagggggctgctgattctcccctgagattaaagtctaagcgacagagccacaagtatcaagccgagttccctatgtctccggttacttctgcacacgctgggacatataggtgttacggttctttgtcaagcaatccctacttattgacacacccatcagatcccctggaacttgttgtgtcaggagcagcagagacactcagcccaccacaaaataaatccgatagtaaggccggggagtag

SEQ ID NO: 122226 - DNA, 1956 bp, synthetic construct
  misc_feature 1..1956: note = Description of Artificial Sequence: Synthetic coding sequence
  source 1..1956: mol_type = other DNA
atgacaccaatcttaacagtgctgatatgccttggtcttagcctaggaccccgaactcacgtgcaggcaggtcatttgcccaaaccaaccctgtgggccgaaccaggaagtgtgattacacaaggatctcccgtaacattacggtgccagggcggacaagaaacacaggagtacaggttgtaccgggaaaaaaagacggccctgtggattacgagaatcccccaggaactggtaaagaaaggccagtttcccattccaagcattacttgggaacacgctgggagatatcggtgttactatggaagtgatacagctgggcgaagcgagagtagcgatcccctggagctggtagtcacaggtgcctatatcaagccaactttaagtgctcagccatctcccgtggtaaattcaggtggaaatgtgattctccaatgtgattcacaggttgctttcgacggttttagcctttgcaaggagggagaggatgaacatccccagtgcctgaatagccagccccatgctcggggctcttcaagagccattttttccgtgggaccagttagccctagccggcgctggtggtatcgatgttacgcatacgattccaactcgccttatgagtggagcctgccgtccgacctcctggagcttctggtgctcggcgtaagcaaaaaaccatcattgtccgtacaacccgggcccatcgttgcccccgaagagactctgactctgcagtgcggatccgacgctgggtataatagattcgtcctgtacaaagatggcgagcgggatttccttcaactggcaggcgctcagccccaggccggcttgtcgcaggccaactttaccctgggaccggtcagtagatcttatggcggccaatataggtgctatggcgcgcacaacctcagctcagagtggagcgctccttcagaccccttggacattctgatcgccggccagttctacgatcgagtgtctctaagcgtgcaacctgggccaaccgtcgcctcaggggaaaatgtcacacttctatgccagagccaaggctggatgcagactttcctgttgacaaaagagggtgccgctgacgatccttggagacttcgatcaacttatcagagccaaaaatatcaagcggagtttccaatgggacccgtgaccagcgcccatgccgggacatatagatgctatggatcccagtcctcgaagccctatctgctgacgcacccttcagatccgctcgagctggtcgtgagcgggcccagcggcggaccaagctcacctaccactggccctactagtacatccgcaggacctgaggaccaacctttaacgcccactggttctgaccctcagtccggccttgggcggcacctcggggtggtgattggaatactcgttgcagtgatcctgctactgctgttgctcctgctgcttttcttgattctcaggcaccgccgccaaggcaagcactggacaagcacacagaggaaagctgactttcaacaccccgccggcgccgtcggacctgagcctacggatcgcggattgcagtggcgatcctcgcccgctgccgacgcccaggaagaaaacctttacgccgccgttaaacacactcaaccagaggatggagtggagatggatacgcgcagcccacacgatgaggatccacaggcggttacatatgctgaggtgaagcattccagaccgagaagggagatggcctcgcccccttcccctctctctggcgagttcctagacaccaaggacaggcaagctgaagaagatcgccaaatggacaccgaagccgccgccagcgaagccccccaggacgtgacctatgcccaactgcacagtctgacactgcgccgtgaagccaccgagcccccaccgagtcaggaagggccctcaccagctgtcccttcaatttatgccaccttagccattcactag

SEQ ID NO: 122227 - DNA, 1956 bp, synthetic construct
  misc_feature 1..1956: note = Description of Artificial Sequence: Synthetic coding sequence
  source 1..1956: mol_type = other DNA
atgacacccattctcacagtgctgatttgcctcggcctctccctgggtcccaggactcacgtgcaggctgggcacttgcccaagcctaccctgtgggccgagccaggtagtgtgatcacccagggatctcctgtgactcttcgttgtcagggaggccaggagacccaagagtaccgtctgtatcgcgaaaagaagacagcattgtggattacacggattccacaagaactcgtgaagaagggtcagtttccgattccttcaattacgtgggaacatgctggacgctaccggtgctattacggctctgataccgctggtcgtagtgaatcctcagatccacttgagctggtggtgaccggggcttatataaagcccactttgagtgctcagccctccccagtggtgaactcaggggggaacgtcatactccagtgtgactcccaggtggcttttgatgggtttagtctgtgcaaggagggagaggatgagcacccccagtgtcttaattctcaaccacacgcaaggggcagcagccgggccatcttttctgtgggtcctgtgagcccaagtcggcgctggtggtataggtgttatgcctatgattccaatagcccatacgagtggagtctgcccagcgatctcctggaactgctggtgttaggcgtgtctaagaaacctagtctgtctgtccaacctggcccaattgtggcaccggaagaaacactaaccttgcaatgcggctcggacgcagggtacaaccggtttgtcttatataaggacggagaacgcgactttctgcaacttgccggcgcccagccccaggcaggtctgagccaggccaacttcacacttggcccagtttcaaggagctatggaggccagtaccgatgctatggagcccataacctgtcctccgagtggagtgcccccagcgacccgctcgacattctcattgctggacagttctatgacagagtgagcctgtcagtacagcccggcccgaccgtggcttcaggcgaaaatgtgactctattatgtcagagtcagggatggatgcaaacgttcttactgacgaaagagggcgccgcagatgatccttggcggttgcggtccacctatcagagtcagaaataccaggccgagtttcctatgggcccagtgacctccgctcacgctgggacctatcgctgctatggctcccagagtagcaaaccctatttgctaacacaccccagcgaccccttggaactcgtagtgtccggcccatctgggggacccagctcgcctacaaccggacccacctcaacaagcggaccggaggatcaaccgctgacaccaacaggaagtgaccctcagtccggtctcgggcgccatctgggggtggttataggtatacttgtcgccgtgatcctgctgctcctacttcttctgctcttgtttctgatcttgaggcaccggaggcagggtaaacattggacttccacacaacgcaaagctgatttccagcacccagccggagccgttgggcccgagcctaccgacagagggctccagtggaggtcttcacctgctgccgacgcacaagaggaaaatctatatgccgctgtgaagcatactcaacctgaagacggggtggagatggatacaaggcagagcccacatgatgaggatccccaggccgtcacctacgccgaagtaaaacatagtcggccgaggagagagatggcttctcctcccagtcctttaagtggggaattcctggatactaaagatcggcaggccgaggaagatcgtcagatggatacagaggctgccgctagcgaggcgccccaggatgttacatacgcgcagttacattcattgacgctgcgccgcgaggctaccgagccaccaccatcccaagagggacccagcccagctgtcccaagcatctacgccactctggccatacattag

SEQ ID NO: 122228 - DNA, 1794 bp, synthetic construct
  misc_feature 1..1794: note = Description of Artificial Sequence: Synthetic coding sequence
  source 1..1794: mol_type = other DNA
atgactcccatcgtgaccgtcttgatctgccttggattgtcgttaggtccacgcactcatgttcagactggaacaatccccaagcctaccctgtgggccgaaccggactctgtcattactcaaggcagccctgtgaccctcagctgccaaggaagcctcgaagctcaggagtataggctgtatcgagagaagaagagtgcctcctggattacgagaattcgtccggaacttgtgaaaaacggccaattccacatcccgtccattacttgggaacataccggccgttacggctgccagtactatagcagagcaaggtggtctgagttatctgaccccctggtccttgtgatgaccggcgcgtatccaaagcctaccctgagcgctcagccgagcccagttgtgaccagtggcggacgagtgactttgcaatgtgagtctcaggtcgccttcggaggctttattctctgtaaggaaggagaggaggagcacccacagtgcttaaatagccagccgcatgcgcggggatcttctagggctattttctctgtaggtcctgtgtcccctaatcgcaggtggtcccaccgatgctacggttacgatctgaacagtccctacgtttggtcaagtccctcagaccttctggagttactggtgcccggtgtgtcgaagaaacccagtctgagtgtacagcccggacccgtagtggctccaggagagtctctgacgctgcaatgcgtgtctgacgtgggatacgacaggttcgtgctttataaggaaggcgaaagagatctccgacagcttcccgggaggcagccccaggctggcctgtcccaagccaactttacgcttggacctgtgtccagaagctatggcggtcaataccggtgctacggagcgcacaacctgagctcagaatgtagtgccccttcggatcctctggatattctcattaccgggcagattcgaggcactccatttatatcagtgcagcccgggccaaccgtagccagtggtgagaatgtgaccctgctgtgtcagagctggcgtcaattccacaccttcttgctgactaaggcaggtgccgctgacgcacctctgcgtctgcgcagcattcacgagtacccaaagtaccaggctgagtttccgatgtcccctgtgacatcggcacacgctggtacctaccgatgttatggaagtttgaatagcgacccgtatctccttagccatccatcagaaccgttggaacttgtcgtgtctggcccatcaatggggtcctccccacccccaacgggtcccatatctacgcccggtccagaagaccagcccctgactcccacaggttctgaccctcaaagcggcctcggccgacacttgggcgtcgtaatcggaatactggtcgccgtggtgctgctattgctcctactgctgcttctgtttctgatcctgcggcatagacgacagggcaaacactggacgtcgactcaaagaaaggcggatttccagcaccccgccggagccgtgggacctgaaccaactgatcggggcctccagtggagaagcagtcccgccgccgacgctcaggaggaaaacttgtacgcggcagttaaggatacccagcccgaggacggagttgaaatggatacccgcgccgctgcatcagaggccccgcaagatgtgacttacgctcagttacattctctgacattgcgtcgtaaggctaccgagcctcccccatctcaggaaagagagccccccgcggagccaagcatatatgcaactctggctatacactag

SEQ ID NO: 122229 - DNA, 1899 bp, synthetic construct
  misc_feature 1..1899: note = Description of Artificial Sequence: Synthetic coding sequence
  source 1..1899: mol_type = other DNA
atgacaccggcacttacagcactcctgtgtctcggcctttctttgggaccccgcacacgcgtgcaggccggaccttttcccaagcctaccttatgggccgaacccggctccgtgatctcatggggctcaccggttacaatttggtgccaaggatcccaggaggctcaagaatacaggctgcacaaagagggatcacccgaacctttggaccgcaacaacccactggagccaaagaataaggcacgcttttccatcccctcgatgaccgagcaccatgcaggaaggtataggtgccactactactcttccgccggatggtccgaaccaagcgatcctctggagatggtcatgactggcgcctattctaaaccaacccttagtgccctgccttctccagtggtggcatctggcggaaacatgactctccggtgtggttctcagaagggctaccaccactttgtgctaatgaaggagggcgagcaccaacttccacggaccttggattcccaacaactgcactctcggggatttcaagctttgttcccagtaggccccgtgacaccttcacaccgttggcgctttacatgctactactattatactaataccccctgggtatggtcccacccctctgaccccttagagatcctgccatctggggtatccagaaagccatctctgctgactttacagggtcctgtgttggcgccaggccaatcactcactttacagtgcggctctgatgtgggctataaccggtttgtgctttacaaggagggtgagagggatttcctccaacggcccggacaacagccccaagcgggtctatcacaagctaattttactctcgggcccgtgagtccatccaacgggggtcaatataggtgctacggcgctcataacctgagtagcgagtggtcagccccatctgatcctctgaatatcttgatggccggccagatctacgataccgtttctttgtcagcgcagcccggccccacagttgcctcgggcgagaacgtaaccctgttgtgtcagtcttggtggcagttcgacacattcctattgacaaaagagggcgccgcgcatcctcccctgcgcctcaggagcatgtacggagctcataagtatcaggccgaattccccatgtccccggtcacctccgctcacgctgggacgtacagatgctatggaagttactccagcaacccacatttgctcagccatccttcagagcccctggagctggttgtgtctgggcacagcggaggctcgtccctgccaccgacaggtccaccaagtacgccaggtctggggcgctaccttgaggtcttgattggcgtgagtgttgctttcgtgttactgctcttcctgctgctctttctgttgttgagaagacagcgccattcaaaacatcgaacatcggatcagcgcaagacagacttccagcgccctgctggggctgcagaaaccgaacctaaggaccggggactgctccggcggtccagccccgctgctgacgtgcaggaagagaatctctatgccgccgtaaaggacactcagagcgaggacagagtggaacttgactcccagcagagcccccacgatgaggaccctcaggcggtgacatatgcccccgtgaagcactcctccccccggcgtgaaatggcaagccccccaagttcactctcgggagagtttctggacaccaaggaccgacaggtcgaagaggaccggcagatggacaccgaagccgcagctagtgaagcctcacaggacgtgacctatgcccaactgcattcattaactctaaggcgcaaggcaacagaaccccccccgtcccaagaaggcgaacctccggccgagccgagcatctacgcaactttggctatccattag

SEQ ID NO: 122230 - DNA, 1344 bp, synthetic construct
  misc_feature 1..1344: note = Description of Artificial Sequence: Synthetic coding sequence
  source 1..1344: mol_type = other DNA
atgatccccaccttcacggctctcctgtgcctaggcctttctctgggacctaggacacacatgcaggcaggccctctgccgaagccaaccctgtgggccgaacccggctccgtgatcagctggggaaactccgtcactatctggtgccagggtacactggaagcaagagagtaccgcctggacaaggaagagtcacccgctccttgggaccgacagaaccccctggaaccaaaaaacaaagcccggttcagtatcccgagcatgacagaagattacgccggaaggtatcggtgttattacagatccccagtaggctggtcgcaaccatccgaccccctggagttagtgatgaccggcgcctattcaaagccaactttgtccgctttaccttctcctctggtaacgtcgggaaaaagcgttaccctcctgtgtcagtcacgaagtccaatggacaccttcctgttgatcaaggaacgtgcagctcatcctctgttgcacttgcgcagcgaacacggggcgcagcagcaccaggcagagtttccgatgtccccagtgacctccgttcatggggggacatacaggtgctttagttctcatggcttctctcactacttgttatctcatccgagtgacccactggaactgatcgtatcagggtcactggaggatcctcggccatctcccacacgtagcgtaagcactgccgcaggtccagaggaccaacctctaatgccgacgggtagcgtgcctcattccggactgaggcggcactgggaagtgctgatcggggttctggtggtatccattttgctcctgtccctccttctgtttctgctgcttcaacattggaggcagggaaagcaccggaccctggcccagaggcaagcggatttccagaggcctccaggggctgcagagcctgagccgaaagatggcggcttgcagcgtagaagctcgcccgccgccgacgttcagggcgagaatttttgtgccgctgtaaagaacactcagcccgaagatggagtggagatggacacgcggtcgccccacgatgaagatcctcaggccgttacttacgcgaaggtgaaacacagtaggccaaggcgcgagatggcctcaccgccaagccccttgtccggggagtttctggacacaaaagataggcaggcagaggaagatcgtcagatggacactgaagctgctgcttccgaagctccacaggacgtgacttatgcacaattgcattcatttactctgaggcagaaagctactgaaccgccaccaagtcaggaaggagcttcacctgcagaacccagtgtgtacgctacccttgccatccactag

SEQ ID NO: 122231 - DNA, 1476 bp, synthetic construct
  misc_feature 1..1476: note = Description of Artificial Sequence: Synthetic coding sequence
  source 1..1476: mol_type = other DNA
atgaccctcaccctgtccgttcttatatgcctgggcctgtcagtcggacctcggacctgcgtacaggccggcacactgccaaaacccactctttgggccgaaccagcatccgtcatcgcaagagggaaacccgtcaccctgtggtgccagggacccttggaaacggaagagtacaggctcgacaaagaaggcctgccctgggcccggaagcgacagaacccacttgaacccggtgcaaaagcgaagtttcacatcccgtctactgtgtatgacagcgctggcagatatcgatgttattatgagacccctgcaggttggtccgaaccaagcgaccccttggagcttgttgctaccggcgtgtcccgtaaaccatctcttctcataccacaaggaagcgtggtggcccgtggtgggtccctcaccctccaatgtcgaagcgatgtggggtacgacatatttgttctgtacaaggaaggagagcatgatctcgtccagggaagcggtcagcagccccaggctgggctgagccaggctaacttcacattagggccagtcagccgaagtcatggaggacagtacaggtgctacggcgcgcacaacctgtccccacggtggtccgctccctctgatccacttgacattctgatcgctggactgataccagacatccccgctctgagtgtgcagcccggcccgaaagtggcttctggagaaaatgtcactcttctgtgccagtcgtggcatcagatagacacgttcttcctgacaaaggagggcgccgcccatcccccgctttgccttaagtccaagtaccagtcttatcgtcaccaggcagagttctcaatgagtcctgtgaccagcgcccagggtgggacctaccgctgttattccgctattaggagttacccctacctcttgtcctcacccagctatccacaagagctggtggtgagtgggccctcaggagatccgtcactgtcccctacagggagcactccaacccccgctgggccggaggaccaaccactgacaccaaccggcctggatccgcaaagtgggctgggtcgtcatctgggtgtggtaaccggggtgtcggtagctttcgtccttctcctgttcttgctgcttttcctgctcctgcgacataggcatcagtccaaacacaggacctccgcacacttctatcgtcccgccggggctgcaggcccagagccaaaagaccagggcctacaaaaacgagcctcccccgtcgcagatatccaggaggagattctgaatgctgcggttaaggatacccaaccaaaagatggtgtggagatggatgctcgagcggccgccagcgaggctccacaggacgtcacctatgcccagcttcactccctcacccttcgtagagaggcaacagaaccccctccttctcaggagcgtgagccccccgctgagccttctatatatgcccccctagccatccactag

SEQ ID NO: 122232 - DNA, 1470 bp, synthetic construct
  misc_feature 1..1470: note = Description of Artificial Sequence: Synthetic coding sequence
  source 1..1470: mol_type = other DNA
atgacccccatcgtaacagtcctcatctgtttgcgactgagcctgggaccccgtacccatgtgcaggccgggaccttacctaaaccaaccctctgggcggaaccgggaagtgtgattacccaagggagccctgttacgctgtggtgccagggaattctcgagacgcaagaatatcgcctttatcgcgagaagaagaccgcaccctggatcacgaggatcccgcaggagatcgtcaagaaaggccagttccccatccctagcattacgtgggagcacacaggtagataccgatgtttctatggaagccataccgctggttggtcagagccatccgatccattagaactggtcgtgacgggcgcctatattaagcccacgcttagcgcgttgccatctccggttgtgacttcgggggggaatgtcaccctacattgcgtgtcccaagttgcgtttggtagttttattctctgcaaggagggcgaagatgagcacccccagtgcttgaattctcagccacgtacccacggttggagcagagcaatcttttccgttggacctgtttccccgagccggcgttggtcatacagatgctatgcctatgattctaattccccacacgtctggtcactgccttccgatttattggaactgctggtcttaggggtatctaagaagccatcactgtctgttcagccagggcctattgtggccccaggcgagtcattgactctccaatgcgtctcggacgtaagttacgatagatttgtgctgtataaggagggtgagagggacttccttcaacttcccggaccacaaccgcaggccggcctgagtcaggcaaactttacactgggccccgtctcacgaagttacggtggccagtaccggtgtagtggcgcctacaacttatcctctgaatggtccgccccatcggatccgctggacattctgatcgccggccagttccgtggtcggccgttcatatcagtgcaccctggtcccaccgtagcttctggggagaatgtcactttgctatgccagtcatggggccccttccacacgttcctgctcacaaaagccggagcggcagacgctcccctccggcttcgctccatccatgagtacccaaagtatcaggccgagtttcccatgagccctgtcacttctgcccacagtggtacatacaggtgctacggcagcctaagctcaaatccataccttctctctcacccttcagattcactagagctaatggtgtcaggggctgccgagacgttgagccctccgcagaacaagtctgactccaaagcgggggccgctaacaccctgtcccctagtcaaaataagactgcttcacacccccaggattacactgttgagaatctgatccgcatgggcattgccgggctggtactcgtggtgttaggtattctcttgtttgaggctcagcactctcaacgctccctttag

SEQ ID NO: 122233 - DNA, 1401 bp, synthetic construct
  misc_feature 1..1401: note = Description of Artificial Sequence: Synthetic coding sequence
  source 1..1401: mol_type = other DNA
atgactccaattttgacagtgctgatatgtctggggcttagcttagggccccgtactcatgtgcaggcagggcacctgcctaagcccactctgtgggccgagcctggctccgtcatcatccagggatcacccgtcaccctgcggtgccaagggtccctccaggcggaagagtaccacctgtaccgggagaacaagagcgcttcctgggttcgacggatccaggagccaggcaagaatggacagttcccaattcctagcattacctgggagcacgccggaaggtaccactgtcagtactattctcacaaccatagcagtgagtattctgatcctctcgaactcgtggtgaccggggcttacagtaagccaactctcagtgctctcccgtctcctgtcgttacgctgggtggtaacgttaccctacagtgcgtgagtcaggtcgcttttgacgggttcattttatgcaaagaaggcgaagacgaacacccacaaagattgaattcccatagtcacgctcgaggatggagctgggccatcttttccgtcggcccagtgagtccatcaaggcgctggtcttatcgctgctatgcctatgacagcaattccccatatgtgtggtctctaccatccgaccttctcgaattgctcgtgccaggagttagcaagaagccttcccttagcgtgcaacctggccctatggtggctcctggagagtctttgaccctgcaatgtgtgagcgatgttggctatgatcgctttgtcctatacaaagagggtgagagagactttctgcaacgtcccggttggcagccccaggccgggcttagtcaagctaacttcacccttggtcctgtgagcccctctcacggcggacagtataggtgttatagcgctcataatctgagcagtgaatggagtgctcctagtgaccctttagatatacttattacaggccaattctatgaccggccttccctgtctgtacaaccggtccccactgttgctccgggaaagaacgtgacactcctctgccagagcagaggccaattccacacctttctgctgaccaaggagggggcaggccacccacctttacatctgagatctgaacaccaagcccagcagaatcaggctgagtttcggatgggccctgtcacttccgcccatgtgggcacttaccgctgttatagctctcttagttctaatccttacttgctgtctctacctagtgatcccctggaactagtcgtgtccgcttccctcgggcaacatccccaggactacacagtcgaaaatctcatccgaatgggtgttgccggactcgtcctggtggtcctgggcatcctgctctttgaagctcagcatagtcagcgttcactgcaagacgccgccggaaggtag

SEQ ID NO: 122234 - DNA, 1452 bp, synthetic construct
  misc_feature 1..1452: note = Description of Artificial Sequence: Synthetic coding sequence
  source 1..1452: mol_type = other DNA
atgacccctatcctgacggtgctgatttgcctgggcctgtctttgggcccccggacccatgtccaggcgggccacctccccaagcctacactatgggcggagcctggctctgtaatcatacagggctctcctgtcacccttagatgccagggctcattgcaggctgaggagtaccacctgtatagagaaaataagtccgcctcttgggtgagaaggatacaagagcctgggaagaacgggcagtttccaatcccctccattacctgggagcatgctgggaggtatcattgccaatactactcgcataaccacagcagcgaatattctgaccccctggaactggtagtcaccggggcttatagcaagcctaccctcagtgctctgccgagcccagtcgtgaccctgggagggaatgtgaccctgcaatgcgtctctcaggtagcgttcgatgggtttatcctctgtaaagaaggcgaagacgagcacccacagcgcctgaactctcattcacatgcacggggctggagttgggccattttctccgtgggacccgtctccccatctcgtcggtggagctatagatgttatgcctacgatagcaactcgccgtacgtttggagtcttccttccgacctgctggaactcttggtccccggagtgagcaagaagccctctctgagcgttcagcctggaccaatggtggcaccgggtgagtccctcacgctgcagtgtgtctctgatgtcgggtatgaccggttcgttctttacaaggagggcgagcgagattttctccagaggcccgggtggcaaccccaggccggcctgagtcaggccaatttcaccctgggcccagtgagtccctctcacggcgggcagtaccgctgctactctgcccacaacctatcctctgaatggagcgccccttctgatccgttggatatactcattactggccagttttatgaccggccatccctcagcgtgcagcccgtgcccacagtggcccctggaaaaaacgttacactcctctgccagagtcgaggtcagtttcacaccttcctgctgaccaaggaaggtgccggtcatcctccattgcacttgagatccgagcaccaggcccagcaaaatcaggccgagttccgcatgggcccagtcactagcgcccacgtgggcacttacagatgttactctagcctatctagtaacccttatctcctcagcttgccgagtgatcctctggagctagtcgtgagtgaggccgccgaaactctgtcaccatcccagaacaagaccgactcaacaacgacctctctcggccaacaccctcaagattacacagtggaaaaccttataaggatgggagtagccggccttgtgctggtcgtcctcgggattcttctgttcgaggctcagcatagccaacgtagtctccaggacgccgccgggcggtag

SEQ ID NO: 122235 - DNA, 1452 bp, synthetic construct
  misc_feature 1..1452: note = Description of Artificial Sequence: Synthetic coding sequence
  source 1..1452: mol_type = other DNA
atgacacccatcctgactgttctgatctgcctcggcttatcccttggcccccggactcatgtacaggctggtcatctaccgaagccaaccctgtgggccgagcctgggagcgtgatcatccaggggagccctgtcaccctgcgatgccagggatcactgcaggccgaagagtaccatctgtatagggaaaacaagtctgcatcctgggttcggaggatacaggagccaggtaaaaacgggcaattccctatccctagtatcacctgggaacatgctgggagataccattgccagtattactcccacaaccacagttccgaatactcagaccccctagaactggtggttacaggcgcgtactcgaagcccactctgtctgctttgccctcaccagtcgtgacccttggtggcaacgtcactttgcagtgtgtaagtcaagtggccttcgatgggtttatcctgtgtaaggagggagaggatgagcacccccagcggctgaattcccatagtcacgccaggggctggagctgggccatcttcagcgtgggcccggtgtcaccttctagacggtggtcctacagatgctatgcctacgatagcaactcaccttacgtgtggtccctaccaagcgacctgctggaactgcttgtaccaggcgttagtaagaagccgagcttgagtgtccagcctggacctatggtcgctccaggcgagagcctgacattgcagtgcgtcagtgacgtgggttatgaccgcttcgtgctgtataaagaaggagagcgtgattttctccagcgccccggatggcagcctcaggccggattgtcccaggctaattttacattgggacccgtgtctccttctcatgggggccagtaccgttgttattcagctcataacctgtcctcagagtggagtgctccaagtgatcctcttgacatcctgatcactggacaattttatgatcgcccgtccctctccgtgcagccagtgcctactgtggccccaggcaagaacgtcactttactttgtcagagccggggacagttccatacgtttctgttgacaaaagaaggagctggccatccgcctctgcatctgcggtcagagcaccaggcccagcaaaatcaggctgagttccgcatgggcccagtgacgtccgcccacgtcgggacttatcgatgctactctagcctgtcaagtaacccatatctcctttctctgccatccgaccctctggagctcgttgtaagcgaggctgcagaaactctcagcccatcacagaacaaaactgactccactacaacaagcctcgggcagcatccccaggactataccgtcgagaatctgatacgaatgggggtggcaggattggtactggttgtgttaggaatcttgctgtttgaagcgcagcatagccagcggtctctgcaggacgccgcaggtaggtag

SEQ ID NO: 122236 - DNA, 984 bp, synthetic construct
  misc_feature 1..984: note = Description of Artificial Sequence: Synthetic coding sequence
  source 1..984: mol_type = other DNA
atgacgcccattctgaccgtccttatctgccttggcctaagcctaggaccgcgcacccacgtccaggccggtcacctgcctaaacccacgctgtgggcagagcctgggagcgtcattattcagggcagtccagttacactgaggtgccagggctcattacaggctgaggagtaccacctttacagagaaaacaagtctgcttcgtgggtcagacgcattcaggaacctggcaaaaatggtcagttccccataccctcgattacatgggagcatgcgggccggtaccactgccagtactattcccacaatcactccagcgaatattccgatcccctcgaattggtggtgactggagcatactcaaagcctacccttagcgctctgcccagtccagtcgtgacccttggtgggaacgtgaccttacaatgcgtttcacaggtggcatttgacggcttcatcctctgcaaggagggcgaagacgaacatcctcagcgtctgaactcccacagccacgccagggggtggagctgggccatcttttcagtggggcctgtgagccccagcaggagatggagctaccgctgctacgcctacgactcaaactccccatatgtatggagcctgccatccgatttgctcgaactcctggtgccaggggtctcaaagaaacccagcttaagcgtgcagccaggacctatggtcgccccaggtgaatccctcaccctgcaatgcgtgtctgacgtcggatatgaccggttcgtactgtacaaggaaggtgaacgggattttttgcagcggcctggctggcaaccccaggccgggctctctcaggccaatttcaccttagggcctgtttcgccgagccacggggggcagtacaggtgctactccgcccacaatctttcatctgagtggagcgccccaagcgaccccctggacatcctcatcactggtcagttctacgacaggccctccctgagctag

SEQ ID NO: 122237 - DNA, 1320 bp, synthetic construct
  misc_feature 1..1320: note = Description of Artificial Sequence: Synthetic coding sequence
  source 1..1320: mol_type = other DNA
atgacacccattcttacagtgctcatctgtctgggactcagcctggatcctaggacacatgtccaggctggtcccctgccaaaacccacattgtgggcagaacctggaagcgtgatcacacagggatcgcctgtaacactcaggtgccagggctccttggaaacccaggagtatcacctttaccgcgagaaaaaaacagctctatggattacacgcatccctcaggagctcgtgaaaaaaggacagtttccaatactgagtataacatgggaacatgctgggaggtactgttgcatatatgggtcccacaccgctggtttatctgagagttccgatcccttggagttggtcgtgacaggcgcttattccaaaccaaccctttccgctcttccgtcacccgtggtgacctcaggcggtaatgtcactatccagtgtgattcgcaggtcgcctttgatggcttcattctttgcaaggagggcgaggatgagcacccacagtgcctgaatagccacagtcatgctcgaggatcgtctcgggctatatttagcgtcggacctgtgagccccagtcggcgctggagttaccgctgctacggatatgatagcagggcaccatatgtctggtcacttccctccgatttgctcggattacttgtgccgggtgtgagtaaaaagccctccctttccgtgcaacctggcccagtggtcgcccccggggagaagctgacctttcagtgcggttcagacgccggctatgatagatttgtgctctataaggaatgggggcgggattttctacaacgacccggcaggcaaccacaggcagggctgagccaggcgaatttcaccctaggtcccgtgtctaggtcttatggagggcagtacacatgctctggagcttacaatctgtcatctgagtggtcagccccatctgacccactcgacatactgattaccggccagattagagcacggccatttttgtcggttaggccaggacctacagtggctagcggggagaacgtgacactgttatgccagtctcaaggcggcatgcacacgtttcttctgaccaaggagggggcagccgattcaccgttacggttgaagagtaaacgacagagtcacaaatatcaggcagaattccctatgagcccagtaaccagcgcacacgccgggacgtacaggtgctacggtagcctgtctagtaacccgtacctcttaacacacccatcagaccccctcgaactggtcgtgtcaggggctgccgagacgctttcgcccccccagaataagtccgactcaaaggccggcgaatag

SEQ ID NO: 122238 - DNA, 1371 bp, synthetic construct
  misc_feature 1..1371: note = Description of Artificial Sequence: Synthetic coding sequence
  source 1..1371: mol_type = other DNA
atgcacagaggcttgatccacccacagagcagcgccgtaggcggagatgccatgaccccgattttgacagtcttgatctgcctcggtctctcccttgaccctcgcactcacgtccaggctggaccactcccgaaaccaaccctgtgggcagagccgggtagtgtgattactcagggttctccagtaacgctgcggtgccagggcagtctcgaaacccaagaataccatctgtatagagagaagaaaaccgccttatggattactagaattcctcaggagctggtaaaaaaaggccagtttcctatcctgtccataacctgggaacatgctggtcgatactgctgtatctacgggagccacacagccggactgagtgagagcagcgacccgctagagttggttgtgacaggggcctattccaagccgaccttgtcagctttaccaagtcccgttgtaacatctggaggcaacgttaccatccagtgtgactctcaagtcgccttcgatggcttcattctctgtaaagaaggggaggacgagcatccgcaatgcctgaactctcatagccacgcgagggggtcctccagggcaatcttctccgtgggtcccgtcagtcctagccggaggtggagttaccgctgctacggatacgactctagagccccctacgtttggagtcttccgtcagacctattgggcctgctggtaccaggcgtgagtaaaaagcctagcctgagcgtacagcctggtcccgtggtcgcgcctggagagaagctgacattccagtgcggcagcgatgcgggttacgacagatttgtgctgtataaggaatgggggcgagacttcctgcagcggcccggccggcagccccaggccggcctctctcaggcaaatttcactctaggcccggttagccgatcatatggagggcagtacacatgtagtggcgcgtataatttaagctctgagtggtctgcgccatctgaccccttggacattctgattaccggccagatccgagcccggccgtttctgtcagtcaggccagggccgaccgttgcttctggcgagaatgtgaccctgctctgccagagtcagggcggaatgcatacctttttactcaccaaagagggggcggcagatagccctctgcgcctgaagtctaagcgccagagccataaatatcaagctgagtttccaatgtctcccgttacatccgcacacgcaggcacttatagatgctacgggtccctctcctccaacccttacctccttacacatcccagcgacccgctggagctggtcgttagcggggctgccgaaaccctgtctcccccacaaaacaaatccgattctaaagcgggggagtag

SEQ ID NO: 122239 - DNA, 1959 bp, synthetic construct
  misc_feature 1..1959: note = Description of Artificial Sequence: Synthetic coding sequence
  source 1..1959: mol_type = other DNA
atgactcccatcctgactgttcttatctgtttgggtctctctttaggcccaaggacgcacgtgcaggccggccatctcccaaagccaacgctctgggccgaacctgggtccgtcatcacccagggatctcccgtaacactgaggtgccaaggcgggcaagagacacaggaataccgattgtatcgggaaaagaaaaccgctctctggatcacccgtatcccccaagagctggtgaagaaggggcagtttccgattccctctatcacatgggaacacgccggacgctaccggtgttattacggctctgatactgccggaaggtcagagagttcggacccactggagttggtggtcactggggcttatattaagccgaccctctccgcccagccaagccccgtagtgaattccggcgggaatgtgatcttacagtgtgacagtcaggtcgcctttgatggcttcagtctgtgtaaggaaggcgaagatgagcatccacagtgcttaaacagccaaccacacgcacgcgggtccagcagagccatcttttcagtggggcctgttagtccctcccgacgctggtggtatcgctgctacgcctatgactctaactctccctatgaatggagtttacctagtgacttgctcgagctgctggtcctgggcgtcagcaaaaaaccctcattatctgtgcagcccggccccatcgtggctccggaggagactctaactctacagtgtggcagcgacgctggatataaccgctttgtgttatataaggatggcgagagagacttcctgcagctggcgggcgcgcagccacaggccggtctcagccaggctaacttcacactgggccctgtcagtcgcagctacggtggtcagtaccggtgctatggggcacacaatctcagtagcgaatggagtgcccccagcgacccactggatattttgatcgctggccaattctacgacagggtcagtcttagcgtgcaacccggcccaactgtcgcgtccggcgagaacgtgaccttattatgtcagtcacagggttggatgcagacctttctgctaactaaggaaggtgccgcggacgacccatggaggctgaggtctacgtatcagagtcagaagtaccaagctgagtttccaatgggccccgttaccagtgctcatgcaggcacataccgatgctacggctcccagagcagtaaaccctatctgctgacacatccgagcgacccgttggaacttgtggtgtctggaccaagcggaggcccttctagcccaacaaccggacccacatcaacatctgcaggtccagaagaccaaccgttgacaccaacaggatcagatccacagtccggactgggtagacaccttggcgttgtgattggtattctggtcgccgttattctgctgctgctgctgttactgctgctgtttctcatcctgcggcacagacgccagggcaaacattggacctcaacacaacgcaaggcagattttcagcatcccgccggggccgtgggccccgagccgacagatcgaggtctgcagtggcgcagttcccctgctgctgatgctcaggaagagaatttatacgccgcagtgaagcacactcagccagaagacggggttgagatggatacaaggcaatcgccgcatgacgaggacccccaggcagttacctacgcagaagtgaagcatagtcgtcctcggagggagatggcctcaccaccctccccattatccggtgagttccttgacactaaagatagacaggccgaagaggatcgacaaatggacactgaggctgcagcttccgaggccccacaagacgtcacatacgcacagttgcactccctgacactccgtagggaggcaacagaacctccaccctcccaggagggcccctcccccgctgtgccaagcatatatgccacattggccatacactag

SEQ ID NO: 122240 - DNA, 1953 bp, synthetic construct
  misc_feature 1..1953: note = Description of Artificial Sequence: Synthetic coding sequence
  source 1..1953: mol_type = other DNA
atgacgcctattttgaccgtcttgatctgtctaggcctgagcctggggccacgaactcacgtgcaggccggacatctacctaagcctacattgtgggccgaacctgggagtgtcatcacccagggcagcccggttactctgagatgccagggaggccaggaaacccaagagtaccgactttaccgggagaagaagacggctttgtggatcacccggatcccacaggagctcgttaaaaaaggccaatttcccattccttccattacatgggagcacgcaggaaggtatcgctgttactacggatccgatacagcgggacgttcagagagttctgacccccttgaactggtggtgacgggggcgtacataaagcctacactgagtgcccaaccttctcctgtggtgaactcggggggtaacgttatactacagtgtgactcacaggtcgccttcgacgggttctccctttgtaaggagggcgaggacgaacatcctcagtgtctgaatagccagccccatgctagagggagttcaagggccatcttttccgtagggcctgtgtccccatctaggcgctggtggtatcgttgttacgcgtacgattcaaactcaccttacgaatggtctctgccctctgatctgctcgagctgctcgtcttaggggtgagcaagaaaccaagccttagtgtgcagcctggcccgatagttgcccccgaggaaaccctcaccttgcagtgtggatctgacgccggctacaatcgatttgtgctctataaggatggggaaagagactttctccaactggccggcgcacagccgcaggctggactgtcgcaggccaactttactctcgggcccgtgagtagaagctacggaggccaataccggtgctacggggcccacaatctgagcagcgaatggtcggctccatcagaccccctggatattctgatagcaggtcagttttacgatcgggtgtcactctcagtccagcctggtccaactgtcgcatccggtgaaaatgtgacactcctctgtcagtcccaggggtggatgcagacttttttgcttaccaaggagggcgctgcagatgatccctggcgcttgagaagcacataccagagccagaagtatcaagctgagtttccaatgggacctgtgacaagcgctcatgctggaacgtaccgctgttatggcagtcagtcttcgaagccataccttctgactcaccccagcgaccccctggagcttgtggtgtcagggccctcaggcggaccctccagtcccactactgggcctacctccactagtggcccagaagaccagccccttactccaactggtagcgacccgcagagtggcctggggcgtcacctgggggtagtcatcgggattttggtggccgtaattctgctcttacttctccttcttctcttgtttctgattctgaggcacaggcgacaaggcaaacattggacatcaactcagcggaaggccgattttcagcaccccgctggggccgtgggcccggaacctacggatagagggcttcagtggaggtctagtccagccgcggacgcacaggaggagaatctttacgccgccgtgaagcatacacagccggaggatggagtggagatggatacccgttccccgcacgatgaagatcctcaagcagttacatacgccgaggtgaagcatagcaggccccgccgcgaaatggctagtcccccgtcaccgctcagtggtgaatttctggatactaaggatcggcaagccgaggaggatcggcaaatggataccgaggccgcagcatccgaggctccgcaggacgtcacatatgcacaacttcactcccttaccctaaggagagaagccacggaaccaccccctagtcaggaaggtccgagccctgctgtgccatctatttatgctacgctggccatacactag

SEQ ID NO: 122241 - DNA, 1953 bp, synthetic construct
  misc_feature 1..1953: note = Description of Artificial Sequence: Synthetic coding sequence
  source 1..1953: mol_type = other DNA
atgactccaattctcaccgtgctgatttgcttggggctgtccttgggtcccaggacacacgtccaggccgggcatctgccaaaaccaaccctctgggccgagccagggtccgtcattacacagggatccccggtgaccttacgttgtcagggtggccaagagacacaagagtatcgactgtaccgggaaaagaagactgccttatggataaccagaattcctcaggagctggtgaaaaagggtcagtttcccattccctccattacatgggaacatgctgggcgataccggtgctactacgggtctgatacggccggcagatcggagagtagtgaccctctcgaactggtcgtaaccggcgcttacatcaaacccactctgagcgcccagccatccccggtagtcaactcaggcggcaatgtaatactccaatgtgattcccaagttgctttcgacggtttcagtctctgcaaggaaggagaagatgagcatcctcagtgtctgaattcacagcctcacgctaggggctcttcacgtgctatattctcagtgggcccggtgagcccctcgcgaagatggtggtatagatgctatgcatacgactcgaattccccctacgagtggtccctgcccagcgatctgctggagcttttggtgctgggggtatcaaagaagccctctctatccgtgcagcccgggcccatcgtagctccggaggagaccctcaccttgcaatgcggatccgatgctggatacaacagatttgtattgtacaaggacggtgagagagactttttacagctggcgggggcacagccgcaggccggcctatcccaggcaaatttcaccctggggcccgtgtcaaggtcctatggcggccagtatcgctgctatggcgcgcataatttgagctcggagtggagcgctccttctgatccactggacattctgatcgccgggcagttttacgatcgagtgagcctgtcggtgcagcctgggcctacggtcgcttccggcgaaaacgtgacactcctgtgtcagtcccaagggtggatgcagacctttttgctgacaaaggaaggagcagcggacgatccctggaggctgaggtctacttaccagagccagaaataccaggctgagtttcccatggggcctgtgactagtgctcatgcgggcacttatcgctgctatggctcacagagctccaaaccctacttactcacccatccatccgaccccttggagttggtcgtaagcggtcccagcggcggcccctcaagtcccactaccggaccaacaagcacctcaggtccagaagaccagccgctgacacctacgggatcagatccccagagcggacttgggcgccacctaggcgttgttattgggatcctcgtggccgtgatcctcttgttgctcctcttgctgttgttgttcttaattctgcggcaccgccgccaggggaagcactggacctctacccagagaaaggctgactttcagcaccccgctggggcagtgggtcctgagccaactgatagaggcctacagtggcgtagctctccagctgccgatgctcaggaagaaaatttgtatgctgctgtgaagcacacgcaaccagaggacggtgtggaaatggatacgagatcaccgcatgacgaggatccacaggctgtgacctacgctgaggtgaaacatagccggcctaggagagagatggcaagcccaccttccccgctgtccggcgaattcctcgacacgaaagatcgacaagctgaggaggacagacagatggatacggaggctgccgcatctgaggccccacaggatgtcacatacgctcagttacatagcttaacgttgaggcgcgaagcaacagagcccccaccgagtcaggagggtccgagcccagccgtgccctccatttacgctactctcgccatccactag

SEQ ID NO: 122242 - DNA, 1905 bp, synthetic construct
  misc_feature 1..1905: note = Description of Artificial Sequence: Synthetic coding sequence
  source 1..1905: mol_type = other DNA
atgaccccaatccttacagtgcttatttgcctcggcctgtccttaggacctaggacacatgtccaggcgggtcatctgcccaaacctaccctgtgggcagaaccaggctccgttataacacaagggtctcctgtcactctacggtgtcagggcggacaagagacccaggaatacaggctgtacagggagaagaagaccgcactgtggatcacaaggataccacaggagttggtcaaaaagggacagtttccaattccaagcataacgtgggagcacgctggtcgatacaggtgttactatggcagcgatacagccggtcggagcgaatcctcagacccattagaactggtggtgactggcgcctatatcaagccaacactcagtgcccaacccagtccagttgtgaactcaggcggtaacgtcattctgcagtgcgactcgcaggttgcatttgacggattcagcctgtgcaaagaaggggaagatgagcatcctcagtgcttgaacagccagccccatgcacgcggctcgagtcgcgctatcttttctgtcgggccagttagcccctcacgcaggtggtggtaccggtgctacgcatatgatagcaatagtccctatgaatggtcattaccatcagatctgctagagctcctcgttctgggtgtctctaaaaagccttccctgtctgtgcaacccggaccaatcgtggcacccgaggaaaccctaaccttgcagtgtggcagtgacgcgggctacaatcggttcgtgctgtacaaggatggagaacgcgacttcctgcagctggccggagctcagcctcaagccgggcttagccaggccaactttaccctgggtccagtttctcgcagctatggaggacaatataggtgctacggtgcccacaatctttcctcagaatggtccgcgccttctgaccctctggacatacttatcgccgggcagttttacgatcgtgtgagtctgtccgtccagcccggcccaacagtcgccagcggtgagaacgtgacactgctatgccagtcacagggatggatgcagacctttttattgacaaaagagggcgccgccgacgacccttggcgactgaggagcacttatcagtcccaaaaataccaagcagagttccccatgggccctgttacatcagctcacgcagggacatacaggtgttatggcagccagtcctccaaaccatatctgttaacacacccatccgacccgttagagttggtggtatctgctggccccgaggatcaaccactgacaccaaccggcagcgatccccagagcggcctgggaagacacctgggagtagtgatcggcatcctagttgcagtcattctcctgctgttactgctgctgctcctctttctgatcttgcgacatcggcgacagggaaaacattggaccagcacacagcggaaggctgacttccagcaccccgccggggctgttggccccgaaccaacggatcgaggactacaatggcgcagcagtccggctgctgacgcccaggaggagaatctctacgctgccgtgaaacatacgcagccggaggatggcgtagagatggacacccggtctcctcatgatgaagaccctcaagcagtcacgtacgctgaagtgaaacacagtagacctagaagggaaatggcatctcctcctagccctctgtctggagagttccttgatacaaaagataggcaggcggaagaggacaggcaaatggataccgaggccgctgcatccgaggccccacaggacgtaacatacgcccagctccattctttaactttgcggcgcgaggccactgagccaccgcccagccaggaggggccctccccagccgtcccctctatctatgcgacgttagcaattcattag

SEQ ID NO: 122243 - DNA, 1953 bp, synthetic construct
  misc_feature 1..1953: note = Description of Artificial Sequence: Synthetic coding sequence
  source 1..1953: mol_type = other DNA
atgactcctattttaacggtgcttatatgcttaggcctgagcctcggcccgagaactcacgtacaagccggacatctccctaagccgaccctgtgggcagagcccggaagtgtgattacccaagggagccccgtgacgctccggtgccaggggggtcaggagacacaggaataccgtctctaccgcgagaagaaaaccgctctctggatcacaagaattccgcaggaactggtcaaaaaaggtcaattccctatcccaagcattacatgggagcatgctggacggtataggtgttattacgggtcagacaccgctgggcgcagcgagtcttccgatcctctggagctagtggtgaccggcgcttacatcaagccaacactgtctgcacagccctcaccagtggtgaattcagggggcaacgtgatattgcaatgcgattcccaggtcgccttcgacggatttagtttatgcaaggagggcgaagacgaacaccctcagtgtttgaacagccagccacacgcacggggctctagtcgtgctatttttagtgtggggccagtgagcccttcacgtcggtggtggtaccgctgttatgcctacgacagtaattctccctatgagtggagcctgccctccgatcttcttgagctgctcgtgctcggagttagtaagaaaccctcgctgtctgtacagcccggccctatcgtggcccccgaagagactctgaccttacaatgcgggtccgacgccggatacaaccgctttgttctttataaggatggcgaaagagatttcctgcagctcgcgggggcccaacctcaggctgggctatcgcaagcaaacttcacactggggccagtgtcaaggagctacgggggccaatatcgctgttacggtgcccataatctgtcttcggagtggagcgctccctcagacccactcgacattctcatagccggacagttctacgatagggtttccctctcagtgcagcctggcccgaccgtggcttctggcgaaaacgttactctcctctgtcaaagtcagggatggatgcagacttttctgctgactaaagaaggggccgcagacgatccctggcgccttcggtccacctaccagagccagaaatatcaagctgagtttcccatgggcccggtgacaagtgctcacgccggcacttatcgctgctatggcagccagagttcgaaaccatatcttctcactcacccttccgatccactcgagctggtcgtttccggaccctccggaggcccatcttcacccaccacaggccccacttctacctcgggaccagaggatcaacccctaaccccaacaggctccgacccgcagagtgggctcgggcgccacctgggtgtggttatcggtatcctggtggctgtgatactgttactactgcttcttttactcctgttcctgatcttgcggcaccggcgccagggcaaacactggactagtacacagcgaaaggccgactttcagcatccagcaggagcagtgggtcctgaacctaccgaccgcggcctacaatggagatctagtcccgccgctgatgcgcaggaagagaacctgtatgctgccgtgaagcacactcagcctgaagacggtgtggagatggacaccagatctccccacgatgaagaccctcaggctgtgacctacgcggaagtgaagcattctcggccaaggcgggaaatggcaagcccaccctccccattgagcggcgagtttctcgatacgaaggacagacaggcagaagaggacagacagatggacacagaggcagccgcttccgaggcacctcaggacgtgacctatgcacaacttcactctctgactctcagaagagaggccacagagccccccccatcccaagagggaccaagtccagcagtaccctcaatatacgcaacactcgccattcactag

SEQ ID NO: 122244 - DNA, 1533 bp, synthetic construct
  misc_feature 1..1533: note = Description of Artificial Sequence: Synthetic coding sequence
  source 1..1533: mol_type = other DNA
atgacacctattctgacggtccttatctgcctgggcctgagcctgggcccccgtacacacgtgcaggcaggccacttgccaaaacccacactttgggctgaacccggcagcgtgattacacagggctctcccgtgacgcttaggtgtcaggggggccaggaaacgcaggaatatcgcctttacagggagaaaaagaccgcgctgtggattacacgaattccccaggagttagtgaagaaagggcagtttcccataccaagcattacatgggaacatgcgggcaggtatcgctgctattatggaagtgatacagcagggcgctctgagagcagtgaccctctagagctggttgtcacaggcgcctacatcaagcctacactgtctgcacagccttccccagtagtaaactccgggggtaatgttattttacagtgtgattcccaggtagcttttgatggcttctctctgtgtaaagaaggcgaggacgagcacccgcaatgccttaactcgcaaccccacgctcgaggctcttctagagctatcttcagtgtgggacccgtttccccctctagacgatggtggtacaggtgttatgcatacgatagtaatagcccatatgaatggtcactgcctagtgatcttctggagctcctggttctgggcgtcagcaagaaacccagcctctccgtgcaacccggaccaatcgtagctcccgaggagactctcactctacaatgtgggagtgatgctggctacaataggtttgtcctctataaggatggcgagcgtgatttcctgcaactggcaggagctcagccgcaggcgggcttgtctcaggccaatttcacgctgggccctgtgtctcggagctatgggggacaatatcggtgctacggggcccacaatttatcttctgagtggtctgccccaagtgaccccctggatatcctgatcgccggccagttttacgaccgcgtctctctgtctgtccaaccaggccccaccgtggcctcaggtgaaaacgtgactctactgtgccagagccaagggtggatgcagacatttctgttaactaaggaaggtgccgcagatgacccatggagactccgctccacctaccagtcccaaaagtaccaggcagagtttcccatgggccccgttacatccgcccatgcagggacgtaccgctgttacggaagccaaagctctaagccctatctccttacgcacccgtcagatcccttggagctcgtagtgtctgggccttctggcgggcccagtagtccaacgaccggaccaaccagtacgagtggcccagaggatcagccactcacacctacaggttctgatccccaatctggcctgggccgccatctgggagttgtgattggaatcttggtcgccgtgatccttctgctgctcctgctgcttttgctgtttcttattctgagacatcgaaggcagggtaagcactggacgtctagccctgctcagctgccaatgccccgcaagaagacctccatgctgccctag

SEQ ID NO: 122245 - DNA, 1797 bp, synthetic construct
  misc_feature 1..1797: note = Description of Artificial Sequence: Synthetic coding sequence
  source 1..1797: mol_type = other DNA
atgacacctatcgtcaccgtactgatatgtctcggactctcccttggaccgaggacccatgtgcagacggggaccatccccaagcctactttgtgggccgagcccgatagtgtcatcacccaaggctcacctgtgacactgtcctgccagggtagcctagaggcgcaggagtaccgtctttaccgggagaagaagagcgcgtcctggattaccaggatcaggcccgaactggtgaaaaatggccagtttcacataccctccatcacatgggagcacacgggaaggtacgggtgccaatattattctcgggcccgctggtctgaattgtcagatcctctggtcctggtgatgaccggagcctatcccaagccaaccctgtccgcccagccaagtccagtcgttacctccggcggccgggtgacgctgcagtgcgagtctcaggtggctttcggtgggttcatcctgtgtaaggagggggaggaggagcaccctcagtgtcttaattctcaacctcatgctcgggggagtagccgagccatcttcagtgtaggccctgtgtctcccaataggcggtggagccaccgctgttacgggtacgacctgaatagtccttatgtgtggagcagcccttcggatcttctcgagcttctcgtacccggcgtgtccaagaaacctagcctctcagtgcagcccggccctgtggtggcgcccggagagtcactgactttacagtgtgtgtccgatgtgggctacgatagatttgtactttacaaggagggcgaacgggacttgaggcagctgcctgggaggcaaccacaggctgggctatcccaggctaacttcaccctaggaccagtcagcaggagctatgggggacaataccgatgttatggtgcacataacctgtcaagcgagtgctccgccccctcggaccccttggatatactgattaccggtcagatcaggggaacccccttcattagtgttcagcccggtcctactgtagcctcaggggagaatgtaacccttttgtgccagtcttggagacagtttcatacctttcttctcaccaaggctggcgctgccgacgccccgctgcgacttcggagtatccatgagtaccccaagtaccaggctgaatttccgatgagccctgtgacatccgcgcatgcagggacctatcgctgttacggctctctcaattcggatccctacctgctcagtcacccatcagagccattggaattggtggtgtcaggcccttctatggggtcttcccctccgcctacaggccctatatccacccccgccggtcccgaagaccagcccttgacaccgaccgggagcgacccacagtctggcttgggaagacatctaggcgtggtcattggcattctggtggccgttgtgcttctgctgctgctattactgctactctttctgatcctacgccacagaagacaaggaaaacattggacctccacgcagagaaaggctgactttcagcacccagcaggcgcagtcggcccagagcccactgacagaggcctgcagtggaggtcctcacctgctgcagacgcccaggaggagaacctgtatgctgcggtcaaagacacccagcccgaggatggcgtagaaatggacacgagggcagccgcctcagaagcacctcaggatgtcacctatgcccagctgcattctttaactctgaggcggaaggccacagagcccccccccagccaggaacgagaaccaccggccgaacccagtatctatgcaacgctggccattcattag

SEQ ID NO: 122246 - DNA, 1449 bp, synthetic construct
  misc_feature 1..1449: note = Description of Artificial Sequence: Synthetic coding sequence
  source 1..1449: mol_type = other DNA
atgaccggcgcttaccccaagccgaccctcagcgctcagccttcccccgtcgtgaccagtggagggcgcgtgacactgcaatgcgagtctcaggtcgcgttcgggggctttatcctttgtaaagaaggggaggaggaacacccacaatgcttgaattcacagccccacgccaggggcagcagccgcgcaatcttcagcgtcggcccagtaagtcccaaccggcgctggtctcaccggtgttatggatatgatttaaattccccttacgtatggtccagtccttcagacttactcgaattattggtgccaggagtgtcaaaaaaacctagcctcagcgtgcagccagggccagtcgtggctccgggtgagtctctgaccctgcaatgcgtgagcgatgtcggatatgaccggttcgtgttgtacaaagagggagagagagatctacgtcaactccccgggcggcagccacaagctgggcttagtcaggcgaatttcaccctcggtcccgtgtcccggtcttacggcggacagtatcgctgctacggagcccacaacctgtccagtgaatgctcagctccttccgatccactggacatcctcatcaccggccagattagaggcaccccctttattagcgtccagcccgggcctaccgtcgcgtctggagagaatgtgactctgctctgccagtcctggcgacagttccacaccttcctcctcaccaaggctggagccgccgatgcaccacttcggctgcgctccatccacgaataccctaagtatcaggctgaattcccgatgtcacccgtcacttcagctcacgccggcacatatagatgttacgggtctctgaacagtgacccgtatctgcttagccatccgagtgagcccctggagctggtcgtgagcggaccaagcatgggcagcagcccccctcccaccggtcccatcagtactccagctggcccggaagatcagcccctgacacctacaggcagcgacccacagtcaggactgggccgacatctgggggtcgtaatcggtattttagtggctgtggttctactgctgctgttgctgttgttgctcttcctaattctacgtcaccgccgacaggggaaacactggacaagcacgcagcgcaaggccgacttccaacaccccgctggagccgtagggccagaacccacagataggggcctgcagtggaggtctagccccgcagccgatgctcaggaggagaatctgtatgccgccgtcaaggatacccaaccggaagatggagtagaaatggatacccgtgcggcagccagcgaggctccgcaggacgttacatacgctcagctgcactcattgaccttaagaagaaaggccacggaacctccaccctctcaggagagggaacctcctgctgagcctagtatctatgctacactggccattcactag

SEQ ID NO: 122247 - DNA, 1932 bp, synthetic construct
  misc_feature 1..1932: note = Description of Artificial Sequence: Synthetic coding sequence
  source 1..1932: mol_type = other DNA
atgacccctgccctcactgcactgttatgtttgggcctgtctctcggacctcgcacgcgcgtgcaggctggaccttttccaaaacccaccttgtgggccgaacccggatccgtgattagctggggctctcctgttactatatggtgccaggggtctcaggaggctcaggaatacaggttgcacaaggaaggcagccccgagcctctggaccgtaacaaccctctagagcccaaaaacaaggccaggttttccatccccagcatgactgaacaccacgcggggaggtaccggtgccactactattccagtgctggctggagcgaaccatccgatcctctcgagatggtcatgacgggtgcatattccaagccgacactgtccgccctgcctagccccgtcgtagcatccgggggtaacatgaccctgagatgcggcagccagaagggctaccaccactttgttctcatgaaggagggcgagcaccaacttccccgcactctggatagccagcaactgcacagcagaggatttcaggccctgttccccgttggcccagtgaccccaagccacagatggcgcttcacgtgctattactactacactaataccccttgggtgtggtctcatccttccgaccctttagaaatactgccttcaggggtttcccgaaaacctagcctgcttaccctgcaaggccctgtgttagcaccaggacagagcctaacccttcagtgcggcagtgatgtgggatacaaccgcttcgtgctctacaaggaaggtgagcgagactttctccagcggccagggcaacagcctcaagccggcctgtcccaagcaaattttacactgggtccagtcagcccctcaaatggcggccagtaccgctgttacggcgcccacaacctgtcgtccgagtggtcagcccctagcgatcccctgaacatcttgatggcaggtcagatttatgataccgtgtctctgtctgcccagccaggacctactgtagcatcaggggagaatgtgacgctactgtgtcagagctggtggcagtttgacaccttcctcttgaccaaggaaggcgctgcacacccacctttgaggcttcgcagtatgtacggcgcacacaagtatcaagctgagttcccaatgtctcccgtgacttccgcccacgccggcacgtacaggtgttacggtagctacagcagcaatccacacttactgagccatccctccgagccgcttgagctcgtagtctccggtccagaggaccaacccctcaaccctccgggatcaggccctcagaatccacccgggctggggagtggtgccggcactagagccgcaggtcttggtcgctacctggaggtgctaatcggagtatctgtggctttcgtcctcctcctgtttctgttgttgttcttgcttctcaggagacagcggcactctaaacatagaacttccgaccaacggaagacagatttccagagacctgcaggagccgccgagactgagccgaaggacaggggattgctgcgcagaagcagtccagccgcagacgtccaggaagagaatttgtatgcagcagtcaaagatactcagtcggaagacagagtagagttggattcacagagtcctcatgacgaagacccacaggctgttacctacgccccagtcaagcattcatcaccccggcgcgagatggcctctcctccatcaagccttagcggggagttcctggatactaaggatcggcaagtggaagaagatagacagatggacacggaggcagccgcgtctgaggcctcccaagatgtaacgtatgcccagcttcactcactgacgctgcgcaggaaggccaccgagccgcccccctcacaggaaggtgagcctcctgccgagccgtcaatatacgccacactcgccatccattag

SEQ ID NO: 122248 - DNA, 1896 bp, synthetic construct
  misc_feature 1..1896: note = Description of Artificial Sequence: Synthetic coding sequence
  source 1..1896: mol_type = other DNA
atgacacccgcactgactgccctgctgtgtttgggtctatctcttggccccaggacccgtgtgcaggccggcccctttcctaaaccaacgttgtgggctgaaccaggctccgtgatcagctggggctctccagtgacaatttggtgccagggaagtcaggaggcccaggaatataggctccataaagaaggctcccccgagccactggaccgtaataatccgcttgagccgaaaaataaggcccggttcagcattccgtccatgaccgagcatcacgctggcagatacagatgccattactattcatccgctggatggtccgaaccttctgatcccctggagatggtcatgaccggggcctatagcaaacctaccctgagcgcccttccgagccccgtcgtagcatcaggtgggaacatgactcttcgatgtggttctcagaaaggttaccaccattttgtcctcatgaaagaaggcgaacatcaacttcctcggacgctggacagccagcagctgcactctcgtggattccaggccctgtttcccgtggggcctgtgacgccatctcacagatggcgctttacatgttactattactacacgaatacaccatgggtatggagccacccctctgatcctctggaaatccttccctctggcgtgtcacgcaaaccgtccttgctcacgctgcagggaccggtgcttgccccgggccagtcattgacgctccagtgcggcagcgacgtggggtacaaccgctttgtcctgtataaagaaggcgagagggatttcctccagcggccaggccagcaaccccaggccggtctctctcaggccaacttcacacttggaccagtcagtccatctaacggaggccaatacagatgctatggagcccacaatctctcctccgaatggagtgcacccagtgatccactcaatatcttaatggcaggccaaatctacgacacagtgagcttaagcgctcagcctgggcccacggtcgcttcaggtgagaacgttactctgttatgccagtcttggtggcaattcgacacctttttactgaccaaggagggggctgcgcatcctccccttagactgaggtcaatgtacggggctcataagtatcaggctgagtttcccatgtctcccgtgacatctgcccacgccggtacttatcgctgctatggatcctactcgtctaatccccacctactgagccacccatccgagccactcgagttggtcgtgagcggtcactccggtggcagtagtctgccacccacaggacctccaagcaccccagggctcggaaggtatctggaagttctgattggcgtttccgtggcctttgtactgcttttgttcttgctactcttcctgctattacgacgccagcggcactctaagcatcggacttccgaccaaaggaaaaccgattttcaacgaccggctggtgcagccgaaaccgagccaaaagataggggattgctgcgtcgctcctccccagctgccgatgttcaagaggagaacttatacgccgccgtgaaggacacgcagtccgaggatcgtgtggagctcgactcacaaagcccccatgatgaagaccctcaggccgtgacctacgcacccgtgaaacacagttcccccaggagggaaatggcatcaccaccgagtagcctgtcaggtgaatttttagacacaaaggatagacaagtggaagaagatcggcaaatggacaccgaggccgctgcatctgaagcttcacaagatgtgacctatgcccagctgcattcactaactcttcggcgcaaagcaacggaaccacccccatcccaggaaggtgagcccccagccgagcccagcatctacgccactctcgcaatccattag

SEQ ID NO: 122249 - DNA, 1947 bp, synthetic construct
  misc_feature 1..1947: note = Description of Artificial Sequence: Synthetic coding sequence
  source 1..1947: mol_type = other DNA
atgacgcccgccctcacagccctcctttgcctcgggctaagcctgggcccgcggacacgggtgcaggccggcccatttccaaagcccactctgtgggctgaacccggaagtgtcatctcctggggaagccccgtcaccatctggtgccagggaagcctcgaggcacaggagtaccaactggataaagaaggttcacccgagccactggatagaaataacccccttgagccaaaaaataaggctagattctccattccttctatgacacagcaccacgcaggtcggtaccgttgtcactattacagttccgctgggtggtcggagccttccgaccctcttgagctcgtgatgacgggggcttactctaaacccactctttctgcacttccatcaccagtggtcgcgagcggcggcaatatgacactccgttgcggctcccagaagggctatcatcatttcgtactgatgaaagaaggtgaacaccagctgcccagaaccctcgacagccagcaattacattctcggggctttcaagctctctttcccgttggaccagtgactcccagtcatagatggcggtttacttgctattattactacaccaacaccccttgggtgtggagccatcccagcgatccgctcgaaattttaccttctggtgttagtcgcaagccctcacttctgactctccagggccctgttctcgcgcccgggcagtcactgactttgcaatgcggaagcgatgtgggatacaatcgatttgtgctgtacaaagagggcgaacgtgattttctccagagaccgggtcagcagccccaggctggtcttagtcaggccaattttactcttggacccgtgtcaccatccaacggtgggcagtacagatgctacggagcccacaacctgtcatctgagtggtctgccccctcagacccacttaacatcctgatggcaggtcagatctatgacactgtgtcactctccgcacagcctggcccgacagttgccagcggcgaaaatgtgacgcttctgtgtcagagctggtggcagtttgacacctttcttctcacgaaggaaggcgctgctcaccctcctttacggttgagatcaatgtatggcgcccacaagtaccaggccgagttccccatgtcacccgtcacctctgcgcatgccggcacgtaccgatgctacgggtcatacagttctaatccgcacctgctttcacacccgtccgagccattggaactagtcgtgagcgggcacagcgggggttcatcactgccacctaccgggcccccttccacccctggaggcccggaagatcagcctctcaacccgcccggtagcggacctcagaaccgattggggcgttacctggaagtgctcattggcgtatcggtagcctttgtgctcctgttatttcttctgctctttctactattgcggcgtcagaggcacagtaagcatcgcacaagtgatcaacgaaagaccgattttcaacggcctgctggtgccgccgagacagagccaaaagaccgcggccttctcaggcggtctagccccgcagcagatgtgcaggaagagaacctatatgctgccgtgaaagacactcagagtgaggatcgcgtggaactcgattcacaatctccccacgacgaggatcctcaagccgtgacatacgcacccgtgaagcactcaagtcccaggcgggagatggcctctccgccatcgtctttaagtggggagtttttggacacaaaagaccgtcaggtagaggaggatcggcagatggacactgaggccgcagcctctgaggcgtctcaggacgtcacctatgctcagctgcacagcctaacactccgtcggaaggcaacggagccccctccatcccaggagggcgagccccctgccgaacccagcatatacgccactcttgctatccattag

SEQ ID NO: 122250 - DNA, 1896 bp, synthetic construct
  misc_feature 1..1896: note = Description of Artificial Sequence: Synthetic coding sequence
  source 1..1896: mol_type = other DNA
atgacccccgccctgaccgctttgctctgcttgggcctatctcttggcccacggacccgcgtgcaggccgggccatttccaaagccaacactgtgggctgagcctggcagcgtcatctcgtgggggtctcccgtgacaatttggtgtcaaggatctcaggaggcccaggaatatagactccataaagagggttcacccgagcccctggaccggaataaccccctagagccaaagaacaaggctaggttttctattccttccatgaccgaacatcacgctggcaggtacagatgccattactattcaagtgcaggatggtccgagccctctgatcctctggaaatggtcatgaccggagcctattcaaaacctacattgagtgccttgccttcacccgtggtcgcatcaggtgggaatatgacactacggtgtggcagtcagaagggctaccaccacttcgtccttatgaaggagggcgagcaccaactgcctcgcacgctggattctcagcagctccactctaggggttttcaagcactattcccagtgggcccagtaaccccgtcccatcgctggcgctttacgtgctattactattatacaaatacaccatgggtgtggtcccatccaagcgatccacttgaaatcttgccaagcggtgtgtcccgcaaaccgagtctacttaccctccagggcccagtcctcgcccccggtcagtccctgacactgcagtgtggtagcgatgttggctacaaccggtttgtgctctacaaggagggagagcgtgacttcttgcagaggccagggcagcagccacaggccggactgtcacaggccaacttcaccctgggaccagtgagtccgagtaacggtggccagtataggtgctacggtgcccacaacctgtcaagcgaatggtcagccccatcagaccccttgaacattctcatggccggccaaatatacgataccgtgagcctgagtgctcagcccggacctaccgtggcctccggagaaaacgtcacactgctgtgccaatcttggtggcagtttgatacttttttactgaccaaagagggggctgcccatcctcccttacgtttgcggtccatgtatggagctcataaatatcaggccgagttccctatgagccccgtgacctctgcccatgctgggacctacaggtgctacgggtcctactcctccaacccacacctgctgagtcacccaagtgaaccacttgaattagtagtgagcggacattccggaggaagctcattaccacccacgggaccgccttccacccctggcttgggtcgctacctcgaggtgttaatcggtgtgagtgtcgcttttgtactgctgctcttcttactgttattcctgctgctccgaagacaacggcattccaagcaccgcacctcagatcagcgcaagactgactttcagaggcctgcaggcgctgctgaaacagagcctaaagatcgaggccttctgcgacggtcgagtccagccgccgacgtgcaggaggaaaatctgtacgcagccgttaaagacacacagtcagaggaccgggtggaattggattctcagagcccccacgatgaagacccacaggctgtcacatacgctccagtgaaacactcatcccccagacgggaaatggccagtcctccctcgtcacttagcggagaattcctcgacacaaaggatcgccaggtcgaagaagacaggcagatggacacagaagctgccgcctcagaggcgtcccaggacgttacttacgcccagctccatagtctcaccctccggcggaaggccaccgaaccacccccaagccaggagggggagcctcctgccgagccgtctatctatgctacactggctatacattag

SEQ ID NO: 122251 - DNA, 477 bp, synthetic construct
  misc_feature 1..477: note = Description of Artificial Sequence: Synthetic coding sequence
  source 1..477: mol_type = other DNA
atgacacctgctctgacagccttgctgtgtttggggctgtctcttggccctcggacgcgagttcaggcaggacctttccctaaacctactctctgggccgaacctggctcagtcatctcctggggttccccagtcaccatttggtgccagggatcgcaggaggcccaggagtaccggctgcacaaagaggggtccccggagccgttagatagaaacaacccattagaacccaagaataaggcccgattctcgatcccttcaatgaccgagcaccatgctggcaggtacagatgccactactacagctctgctgggtggtctgaaccaagcgatccacttgaaatggtaatgactggcgcttatagtaagccaacgttgtccgcactgccgtcccccgtcgttgcgtcgggtggaaacatgacccttaggtgtgggagtcagaaaggctaccatcatttcgtccttatgaaagaatag

SEQ ID NO: 122252 - DNA, 1347 bp, synthetic construct
  misc_feature 1..1347: note = Description of Artificial Sequence: Synthetic coding sequence
  source 1..1347: mol_type = other DNA
atgatcccaacttttacagccctgctgtgcctggggctgagtttaggccctcgtacccacatgcaggctggtcctctgcctaaacctaccctgtgggctgagccagggagcgtgatttcctggggaaactctgtcaccatttggtgtcaagggacacttgaggcccgagagtacaggcttgacaaggaggagtctcctgccccttgggatcggcagaatcccctcgaaccaaaaaataaagcccgattctctattccctccatgacagaagactatgcgggcaggtacagatgttattataggtcccctgtcggatggtcacagccgtcagatcccctcgagttggtcatgaccggagcctactctaagccaactctctctgctttgcccagccctctcgtgacttctggcaaatcagtaaccctcttgtgtcagtctcggtcacctatggacactttcctgctgatcaaggagagagccgcccacccactcctgcatctgcgctctgagcacggggctcagcagcatcaggctgaatttcccatgtctccagtcacctccgtccatggaggcacatataggtgcttctcatcacacgggttcagccactacttactgtcccatccctcagatccgctcgaactaattgtctcagggtctctggaggaccctcgaccatcgcctaccaggagcgtgagtacggccgctggccccgaggaccagccacttatgccgaccggaagcgtgccacactccggccttcggagacactgggaggtcttaatcggcgtgttggtagtaagcattctcctcctgtcgttgttattatttctcttgctgcagcattggcgacaggggaaacatcggactctggctcagcgacaggcagacttccagagaccccctggagccgcagagccagaacccaaagacggaggcctccagcggagatccagccctgccgctgacgtgcagggcgagaacttctgcgccgcggttaaaaacacccagcctgaggatggtgttgagatggatacgaggcagtcaccccacgatgaggatccacaggctgtcacgtacgcaaaagtgaaacactccaggccacgacgcgaaatggccagccccccgtctcccctatctggcgaatttttagacacaaaagacaggcaggccgaggaggatagacagatggacacagaggcggcggcttccgaagcaccacaggacgtaacttacgcccaattgcactcttttactctgcgacagaaggcgacagaaccccctccatcacaggaaggggcctcccctgctgaaccctcggtgtacgccaccctggcgatccattag

SEQ ID NO: 122253 - DNA, 1347 bp, synthetic construct
  misc_feature 1..1347: note = Description of Artificial Sequence: Synthetic coding sequence
  source 1..1347: mol_type = other DNA
atgattcctacatttaccgctttgttgtgcctcggtctgtctcttggacctaggacccacatgcaggctggtcctctgccaaagccaacgttatgggcagagcctggctctgtgatttcttggggaaactccgttaccatttggtgccagggcacactggaagcaagagagtaccggcttgacaaggaggagagtccagcaccatgggataggcagaatccactcgaacccaagaacaaagcacggttcagcattccgagtatgaccgaggactatgccggtaggtaccggtgttactatagatcaccggtgggctggtctcaaccatctgaccccctagaactggtaatgaccggcgcctattcaaaacctacgctgtcagctctgccctctcctctggtcaccagtgggaagagcgtgacgttgctctgtcagtcaagaagtcctatggacacattcctcttgattaaggaacgggccgctcatccactgcttcatcttcgctcagagcatggagcccagcagcatcaggccgaattccccatgtcaccagtaacctccgtacacggcggcacttaccgctgtttcagctctcacggctttagtcactacctgttatctcatccttccgacccacttgagctgatagtgagcggaagtctggaggatccaaggccaagccccacacgttccgtgagtaccgctgcaggacccgaggatcagcccttgatgcccacagggtctgtgcctcattcaggactgcgaagacattgggaagtgctcatcggcgtactggtcgtatcgattttgcttttgtccttgctcttgttcctgttactacaacactggcgtcagggaaaacaccggacactggctcagcggcaggccgattttcagaggcccccaggcgcagcggaacccgagccaaaagacggtggattgcaaagacgttcaagtccagcggcagacgtgcagggggagaacttttgcgcagcagtaaagaacacccagcccgaggacggggtggaaatggacaccagacagagccctcacgatgaggatcctcaggcggtgacgtacgccaaggtaaaacacagccggccaaggcgggagatggcatctcctccatcaccactgtctggcgagttccttgatacaaaggaccgacaggccgaggaggaccgacagatggacacggaagctgcagcctccgaagcacctcaggatgtgacatatgcacaactacactccttcacccttcgacagaaggcaacagagccccctcctagccaagagggcgcctctcccgctgaaccctctgtttatgctactcttgccattcattag

SEQ ID NO: 122254 - DNA, 1773 bp, synthetic construct
  misc_feature 1..1773: note = Description of Artificial Sequence: Synthetic coding sequence
  source 1..1773: mol_type = other DNA
atgacactgactctctcagtattgatttgcctcggattgtctgttggaccaagaacttgtgtgcaggcaggaacattacctaagccaacgctctgggcggagcctgcctctgtgattgcaaggggaaaacccgttactctctggtgtcaaggcccccttgaaaccgaagaataccgcctcgataaggaaggactgccctgggcgagaaaacgacagaatcctcttgaaccgggagcgaaggccaagtttcatatacccagcacagtctatgattccgctggacggtaccgatgctactacgagactcctgcgggatggtccgagccatcagacccgcttgaactagtcgcaaccgggttctacgcagagcctactcttttggcactgccaagtcctgtcgtggcctctgggggaaatgttacactacagtgcgacaccttagacggcttgctgaccttcgttctggtggaagaagagcagaaactgcctcggactttgtattcccagaagctgcccaagggaccatctcaagccttgtttccagtggggccggtcactcctagttgcagatggcggttccgatgctactactactacagaaagaatccgcaggtctggtccaatccatctgacttgttagaaatcctcgtgccaggagtgagccggaagccttcactccttatcccccagggcagtgttgttgcgagaggcgggtcgctaacactgcaatgcaggagtgacgtgggatacgatatatttgtgctttataaagaaggcgaacatgacctcgtgcaggggtcaggccagcagccccaggccggactgagccaggctaatttcaccttaggtcccgtatccaggagccacggcggacagtatcgctgttacggcgcccacaatctgagcccgcgctggtccgcaccaagtgatcccctggatatcctaatcgccggactgataccggatataccggccctctcagtacagccgggaccaaaagtggcgagtggagaaaacgtgacgctcctttgtcagtcttggcatcagatcgacaccttctttttaaccaaagaaggagcagctcatccccctctgtgtttaaagagcaaataccagtcttataggcaccaagccgagttctctatgagtcctgtgacgagcgctcaaggcggaacctacagatgttattctgcgataaggtcctatccctatctgctgtcttctccatcttacccccaggagctggttgtatcagggcctagcggcgacccaagtctgtccccgacaggatccacccccacccctggccccgaagatcagcccctgactcctactggacttgacccacagagcgggttggggcgccacctcggggtggtgactggcgtttctgtggccttcgtcttactgttgtttctcctgttgttccttctgctcagacaccgacaccaaagcaaacatagaactagcgcacatttctatcgtcccgccggagccgccggtcccgagccaaaagatcaaggtcttcagaagagagctagcccagttgcagatattcaagaagaaatcttgaacgcagccgtgaaagacacgcagcccaaagacggcgtcgaaatggatgccagagccgctgcttctgaagcgcctcaggatgtgacatacgcccagctgcattccctgacattgcggagggaggctacagagcctcctccaagccaggagcgtgagccccccgccgaaccttccatctacgcaccactagcaatccattag

SEQ ID NO: 122255 - DNA, 1776 bp, synthetic construct
  misc_feature 1..1776: note = Description of Artificial Sequence: Synthetic coding sequence
  source 1..1776: mol_type = other DNA
atgacgctgactctgagcgttctgatctgccttggtctgtcggtaggacccagaacatgcgttcaggccgggaccctcccaaagccaactttgtgggccgagcccgcaagtgtgattgctcgtggcaagccagtgaccctctggtgccaggggcctcttgagaccgaggagtacaggttggataaagaagggcttccatgggccagaaagcggcagaatcccttggaaccaggggcgaaagcgaagtttcacatacccagcacagtgtacgatagtgcgggcagatatcgctgctactatgagaccccggctggatggagtgagccctctgatcctctggagctggtggcgactgggttctacgctgaacccactctcctcgccttgccttcccccgttgtggcttcagggggaaacgtgacactacagtgcgacactctcgatggacttctgacatttgttttagtcgaggaagaacagaaattgcctcgtacgctgtactcccagaaacttcccaaaggcccatcacaggccctgtttccagtgggccctgtaacaccctcgtgcaggtggcgcttcagatgctattactattacaggaagaatccccaggtgtggtcaaatccctctgatctgcttgaaatcctggtccccggcgtgtcacgcaagccctcactcctaatcccgcagggatccgtcgtagctcggggggggagtctaaccctgcagtgtaggagtgatgtgggttatgacattttcgtgctttacaaggagggtgagcatgacctcgttcaggggtccggacagcaaccgcaggcggggctgtcacaggccaacttcactctgggtccggtttcccgttcacacggcggccagtacagatgttatggagcccataatctgagtcccaggtggtcggccccaagcgaccctctcgatatcctcatcgccggacttattccggatatcccagccctgtctgttcagcccggccctaaggtggcctccggcgaaaacgtgactctgctatgccagtcatggcaccaaatcgacactttttttttgacaaaggagggcgccgctcatccgccactgtgtctgaagtctaagtaccagagttacaggcatcaggccgaattctcaatgagcccagtcacctctgcccaaggcggaacgtatcgatgctactcagctatcagaagttacccttacttactctcctcaccttcttacccacaggagttggttgtcagtggaccgtccggagatcccagtctgtctccaacaggatcgacacctactcctgccgggccggaggatcagcctcttacacctacaggattggatcctcagtccgggctcggaagacacctaggcgtcgttactggagtgtctgtggcatttgtgctgctgctctttctgctcctgtttttgctcctcagacaccgccaccaaagcaagcataggacctcggcccacttttaccgccctgccggcgctgccggaccagagcctaaggaccagggactgcagaaacgagccagtcccgtggctgatattcaggaggagatactgaatgctgccgttaaggacacccaaccaaaagacggcgtcgaaatggatgcccgggcagcagcctctgaggcccctcaggacgtcacatatgcgcagttgcattcccttaccctgaggcgcgaggcgaccgagcctcccccaagccaggagagggaaccacctgcagagccttcaatttacgcccccctggctatacattag

SEQ ID NO: 122256 - DNA, 1869 bp, synthetic construct
  misc_feature 1..1869: note = Description of Artificial Sequence: Synthetic coding sequence
  source 1..1869: mol_type = other DNA
atgactcttacacttagcgtgctgatctgcctcggtctctccgttggcccccgcacttgcgtgcaggccggaactctgccaaagccaactttatgggccgaaccagcttcagtgatcgcccgcggaaagcccgtgacactgtggtgccagggcccccttgagaccgaagaataccgattggacaaagaagggctgccatgggcccgtaagaggcaaaaccctctagagcccggggcaaaggctaagtttcacatccctagcactgtctatgattccgccggaagataccgttgttattacgagacgcctgcaggatggagcgaacctagcgaccccttggaactggtggccacggctctgccttcaccggtcgttgcctccgggggtaatgtgactttgcagtgcgataccctggacggcctcttgaccttcgtgctggttgaagaagaacagaagctgccaagaaccttatattctcagaagctgcccaagggccccagccaggcgctgtttccagttgggccagtgacaccttcctgcagatggcgttttagatgctattactattatcgcaagaatccacaggtgtggtccaacccgagtgacctgctggagatcttggtgcctggcgtttcacgcaaaccaagtctgctaatccctcagggatctgtggtagcccgagggggaagccttacattgcagtgcagaagcgacgtcgggtatgatatattcgtgctttacaaggagggagagcatgacttggttcagggaagcgggcagcaacctcaggccggactgtctcaggccaacttcactctcgggcctgtgagcaggagccatggcgggcagtatcgctgctatggagcacacaatctctcccctcggtggagtgctccatcagacccgctggacattctgatagccggcctcatccctgatattcccgccttgtccgtacagccaggccccaaagtcgcttctggtgagaacgtgacactgttgtgtcagagctggcaccagatagacaccttctttcttaccaaggaaggggcagcacaccctccactctgtctcaagtctaagtaccaatcatatagacaccaggccgagttttccatgtccccagtgacttctgcccagggcgggacataccggtgctattcggccattcggtcttacccgtacctgctgagttctccaagctatccccaggaactggtggtgagtggcccatccggcgatccttccctaagtcctaccggaagcaccccaacccctgcaggaccagaagatcagcctttgactccaaccgggctggacccgcagagtggcctgggccgccatcttggggtggtgacaggagtatcagtcgcctttgtcctgcttcttttcttgctccttttcctgctcttacgtcatcgacaccagtctaagcaccgcactagtgctcacttttatcggcctgctggcgccgcgggaccggaaccaaaggaccagggccttcagaagagagcatccccagtggctgatattcaggaggagattctaaatgctgccgtgaaggatacacaacctaaggacggtgtcgagatggatgcgcggcagtcaccacatgacgaggacccacaggccgtcacctacgcagaggtcaagcattcgcggcctagacgagagatggccagcccgccctcccccctgtccggtgagttcttagacacgaaagatcggcaggctgaggaggataggcaaatggatacggaacgggtgctcagttcaccaggcccccaagcctcacctccccccccccgctctctcccacttactctgccaaggtgtcgcctactgcatctgaagccgcctcgaatgtag

SEQ ID NO: 122257 - DNA, 2595 bp, synthetic construct
  misc_feature 1..2595: note = Description of Artificial Sequence: Synthetic coding sequence
  source 1..2595: mol_type = other DNA
atgggctgctggggtcagcttctggtctggttcggggcagccggagctatactgtgcagctcccctggcagccaggaaacttttctgcgaagtagccccctgccccttgcctccccctcacctagagaccccaaggttagcgcacccccctccatactggaaccagcatctcccctgaacagccctggtaccgaaggctcttggctttttagtacctgcggcgcctcaggacgccatggccctacacagacacagtgtgacggcgcttacgcaggcacctctgtagtggtgactgtcggtgctgccgggcagctgcgaggtgtgcagctgtggcgcgtccccggccccggtcagtaccttattagcgcctatggcgccgctgggggtaagggtgctaagaaccatctgtcacgggctcacggagtgtttgtgtcagcaatattttcgttgggcctgggcgagagcctctacatcctggtgggacagcagggagaggatgcatgccccgggggctcgccagaatcccagcttgtttgcctcggagagtctcgcgctgttgaggaacacgccgccatggatggaagcgagggagtccccggctccagaagatgggctggtggaggaggcggcggaggcggagccacttacgtgtttagggtgcgcgctggggagctggaacctctccttgtcgctgctggaggtggcggccgcgcctacttacgccctcgggatcggggccggacccaggcttccccagaaaagctggaaaatcgctccgaagccccggggtcaggcggccgtggaggagccgcaggtggaggtggtgggtggacatctcgcgctcctagccctcaggctggtcggtctttacaggagggggccgaaggcggtcaaggctgcagcgaggcctgggccactctcgggtgggcagcagctggcggctttgggggcgggggaggggcttgcacggcaggcggaggcgggggggggtatcgcggaggagacgcctctgagaccgataatctatgggcagatggagaggatggagtgagcttcattcatccctcaagtgagttgttcctgcagccacttgcggtgaccgaaaaccacggtgaggttgagattcgacggcatcttaactgttcccactgtccacttagggattgccagtggcaggctgagctgcagttagccgaatgtctgtgtccagaaggaatggaattagccgtagataatgtaacctgcatggatttgcacaagccaccggggcccctggtgcttatggtcgctgtcgtagctacaagcaccctttcattattaatggtgtgtggtgtgctgatccttgtgaagcagaaaaagtggcagggccttcaagaaatgaggctgccctcccctgagctggagctaagcaagctccggacgtctgcaatccggacagctccaaacccctattactgccaggtggggctgggaccagcacagtcctggcctctgcctcccggagtaacggaggtgagccctgctaatgtgacccttcttcgcgctctaggacatggggcatttggggaagtgtacgaagggttggtgattggactccctggagactcaagcccactacaggtggccattaaaacccttcctgagctctgttctcctcaggacgagctagactttctaatggaagcacttataatatctaaatttcgacatcaaaacatagtgaggtgcgtggggctaagtctgcgggctactccacgtctgatcctgcttgaactaatgagtgggggagatatgaagtctttcttgcggcacagtagacctcacctgggacaaccttcacccctcgtcatgagggacctcctacagcttgcccaagatatcgcccagggttgtcactatctagaggagaaccacttcatccaccgggatatagccgcaaggaattgtctcctgtcttgtgccggcccctcacgagtggcgaaaattggagacttcggcatggcacgtgacatctatcgcgccagctactatagacggggcgacagagccctgctgccagtgaagtggatgccacctgaggccttcctggaaggtatttttactagtaagacggatagctggagtttcggtgttttgctgtgggaaatctttagcctgggttacatgccatacccaggtagaacaaatcaggaggtgttagacttcgttgtgggtggcggccgcatggatcccccgcgcggctgccctgggcccgtttaccgcatcatgacgcagtgctggcagcacgaacccgaattgcgaccctcatttgcgtctatccttgagcggctccagtattgcacacaggacccagacgtcctgaatagtcttctgccaatggaacttggaccaacacccgaggaagagggcacaagtggcctcggaaaccggtccctggagtgtctgcgcccgccacaacctcaggaactatccccagaaaagttgaagtcttggggcggcagtcccctgggtccgtggctttcttctgggctgaagcctcttaaaagcagaggcttgcaaccgcagaacctttggaaccccacttacaggtcatag

SEQ ID NO: 122258 - DNA, 2412 bp, synthetic construct
  misc_feature 1..2412: note = Description of Artificial Sequence: Synthetic coding sequence
  source 1..2412: mol_type = other DNA
atgggatgttggggccagctgcttgtgtggtttggggccgccggtgccatcctctgcagttccccggggtctcaagagaccttccttcgtagcagcccattgccgctggcatctcctagtcccagagatccgaaagtctcggcccctccttccattcttgaaccagcttctccgttgaactcgcctggtaccgagggcagctggttgttctccacatgtggcgctagcggccggcacggccctacacagacacaatgtgatggcgcttacgccggcacatctgtggtcgtcacagtgggcgcagccgggcaacttagaggcgtgcagttgtggagggtgccgggacctgggcagtacctcattagtgcttacggtgccgctggcggtaagggcgcaaaaaatcacctgagtcgtgcacatggagtgtttgtgagtgccattttctctctggggctgggagagtccttatatatcctggtcggccagcaaggtgaggatgcctgccccggcggaagtcctgagagtcagctggtctgcctcggtgaatctcgcgctgtggaggagcacgccgctatggatgggtctgaaggcgtgccaggaagcagaaggtgggctggcgggggaggcggggggggaggggccacttacgtcttccgggtcagggcgggcgagctggagcccttgctagtcgcggccggaggaggcggccgagcatatcttcgtccccgagacagaggccgaacccaggcgagcccagaaaagctggagaacaggtccgaagcaccgggaagtggcggcaggggcggcgcagctgggggtgatgctagcgagaccgataacctttgggccgatggtgaggacggggtctcgttcattcacccctcatccgagttatttctccagccactcgctgtcacagagaaccatggcgaggtagagatccgtaggcacctcaactgtagccactgcccactgagagactgtcagtggcaagcagaactgcagttagctgagtgcctgtgccctgaagggatggagctcgctgtggataacgtcacctgtatggacctgcataaaccaccgggccctctggtgctaatggttgctgtcgtggccaccagcaccctgtcgctgctcatggtgtgtggggtcctcatcctggtgaaacagaagaagtggcaagggttgcaggaaatgagacttccttcacccgaattggaactttcaaagctgaggacatcggcgatccggacagcgccaaatccttattattgtcaggtcggcctggggccagcacaatcatggccgcttcccccgggggtcaccgaggtgtcgcccgccaatgtgacattgctccgcgccctggggcacggagcgtttggggaagtctacgaagggttggtaatcggactccctggggactcatcgcccctgcaggttgcgattaaaacccttcctgagctgtgctccccacaagacgaactcgacttcttaatggaggcgctgatcatctctaagttccggcaccagaacattgtgcggtgcgtcggactcagccttcgggcaacaccccgtctgattctgctggagctaatgagcggcggggacatgaagagcttcctgagacattccaggccacatctgggccaaccctcgcccttggtcatgagggatctgttacagctggcccaggacatcgctcaaggatgccactaccttgaagaaaaccactttatccacagggacattgccgcccgaaattgtctacttagctgcgctggaccctcgagggtcgcaaagatcggggatttcggcatggctcgcgacatatacagggcttcatactatcgacggggagatcgagcactgctgcctgttaagtggatgccacccgaagcttttttagaggggattttcacctccaaaacagactcatggagctttggtgtgttactgtgggaaatcttcagcttggggtatatgccttaccctggccggacaaatcaagaggttttggatttcgtggtcggtgggggcaggatggatccgcctagaggttgccctggccccgtgtaccgcatcatgacacagtgttggcaacatgaacccgagttgcgaccaagctttgcttctatcctggagcgactgcagtactgcacgcaggacccagatgtgctgaattctctcctgcctatggagttgggtccaaccccagaagaggagggcacatccgggctcggtaatcgcagtcttgaatgtctgcgtccacctcaaccccaggagctgtcccccgagaagctgaagagctgggggggttcccccctgggcccttggttgtccagcggcctcaagcccctgaagtctcgcggtcttcaaccgcaaaacttatggaaccccacgtacagaagttag

SEQ ID NO: 122259 - DNA, 1437 bp, synthetic construct
  misc_feature 1..1437: note = Description of Artificial Sequence: Synthetic coding sequence
  source 1..1437: mol_type = other DNA
atggggtgctggggtcagctgcttgtctggtttggagcggccggggccatcctgtgtagctcacccgggagccaggagacctttttgaggtcttctccactacccctcgcttctccttccccccgtgaccccaaggtttcggcacccccgtccatcctcgagccagcaagccccctcaattctccgggaacggaggggtcatggctcttctcaacctgcggagccagcggccgacacggtcctacccagactcagtgcgatggcgcttacgccggtacttctgtggtggtgaccgtcggcgccgctggacagttaaggggcgtgcagctatggcgtgtgccaggacccggccagtatttgataagcgcttatggagctgcaggcggcaaaggggccaagaatcatctctccagggcccacggcgtgttcgtaagtgccatcttctccctcggactgggtgagagtctctatatccttgtggggcagcagggtgaggacgcctgccccgggggttcaccagaatcccagctcgtctgtcttggcgagagtagggctgtcgaggaacatgcagccatggacggctcggaaggggtcccagggagcaggcggtgggcaggtggcgggggtggaggcgggggcgccacgtacgtgttcagggttagagcaggcgaactggagcccttactggttgccgccggaggcggagggagagcctacctgcgtcctcgtgatcgggggcgcacacaagcttcccccgagaaattggagaatcggagtgaagcccccgggtctggtggcaggggaggggcagccgggggcggcggcggctggacgagtcgcgccccatcccctcaggcagggaggtccctgcaggagggtgctgagggcgggcaagggtgctccgaggcctgggccacactggggtgggctgctgcaggggggttcggaggcgggggcggcgcctgtacagcaggcggcggtgggggtggatataggggtggtgacgcctctgagaccgataacctctgggccgacggtgaggatggcgtctcttttatccatccaagcagcgagttattcttacaaccactcgctgtgactgagaaccacggcgaagtagagatcaggaggcatctgaactgttctcactgtcccctgcgggattgtcagtggcaggccgagttgcagctggcagagtgtctgtgtcccgaggggatggagctggcagtcgacaatgtgacctgcatggatctgcataagccacctgggcctttggtcttaatggtcgcagttgtagctacctctaccttatcactcctgatggtatgcggggtgttaatcctcggaacaaagcgcctagctgggaccgttgactcaaggctgctcctgtctagcgagttgggctgggtgagcgctggtggcggaagaaggaggtag

SEQ ID NO: 122260 - DNA, 2205 bp, synthetic construct
  misc_feature 1..2205: note = Description of Artificial Sequence: Synthetic coding sequence
  source 1..2205: mol_type = other DNA
atgggctgctggggccagcttctagtttggtttggggctgccggggcaatcctgtgcagcagcccggggtcccaagagacctttctgagatctagcccgcttccgctggcttctccatcacccagagaccctaaagtcagtgcccccccttctattctggagcccgcttcaccgcttaactcgcccggaacagagggttcttggctgttttccacatgcggagccagcggtagacatgggccgactcagacacagtgcgacggggcatacgccggtaccagtgtcgtggtgactgtcggagccgctggtcagcttaggggggtgcagctttggcgcgttcctggccccggtcagtacctgatttctgcatacggcgccgccgggggcaaaggggctaagaatcatttgagtcgggcccatggggtttttgtctccgcaatcttctctctgggactgggcgaatctctctacatccttgtgggacagcagggcgaggatgcctgccccggcgggagcccggaaagccagctagtgtgcctgggcgagagccgcgcagtggaagagcatgccgccatggatggctctgagggtgtgccaggctcccggcggtgggccggtggaggcggagggggaggaggagccacctacgtattcagggtgcgcgcaggcgagctagagcctctacttgtcgctgcaggcggggggggacgagcctatttaaggcctcgggacaggggccgaactcaagcaagtcccgagaaacttgagaatcgctccgaggctcccggcagtggcggtagagggggtgccgccgggggcgatgctagcgagaccgacaatttgtgggccgacggggaggatggcgtttcatttatacatccatcaagcgaattattcctacagcctcttgcagtgacagagaatcatggagaggtggagatcagaagacatcttaactgtagccactgcccccttcgcgattgtcaatggcaggcggagttgcagctggctgagtgcctctgtcctgaagggatggagcttgctgtggacaacgtgacctgcatggacctgcataagcctcctgggcccctcgtattgatggttgcggtcgtggccacaagtacgttgtcactcttaatggtgtgcggcgtactgatcctggggggcgcctggccagggcccgtgctagcctccgctacccgttgtcaccggggatttccatcccaatgttattccgctcagactctgcccgaattgtgctctccccaggatgagttagactttctcatggaggctttaattatcagtaaattcagacaccaaaatatcgtgaggtgcgtgggattgagccttagggccaccccacgattgattctgctggaactcatgagcgggggtgacatgaagagttttttacgtcacagtagaccgcatttaggtcaacccagcccattggtgatgagggacctgcttcagctggcccaggatatcgcccaggggtgccactacctggaagagaaccattttatccaccgcgatatcgccgctaggaactgcctcctcagctgtgccgggccttcccgcgtggccaagataggcgactttggcatggcaagagatatctacagggccagctattacaggaggggcgatcgagccctgctgcctgtgaagtggatgcctccagaagccttcctcgaaggcattttcaccagcaaaactgactcctggtcttttggagttctgctgtgggagatcttctctctgggttacatgccttacccaggcaggacaaaccaggaggttctagatttcgtcgtgggggggggccgtatggatccacctaggggctgccccggcccggtgtaccgaatcatgacccaatgttggcagcacgagcctgaactgcggccgtcgtttgcctcaatcctcgagaggctgcagtactgcacccaagatccggatgtcctgaactcgttgttgcccatggaactggggcctacccccgaggaagagggcaccagtggactcggaaataggtcgttagagtgcttgcgcccaccgcagccccaggagctgtcacccgagaagctgaagtcctggggtggctctccactcggcccgtggctttcatcaggcctcaagccactgaagagtcgcggcctgcagccacagaatctctggaaccccacatatcgctcatag

SEQ ID NO: 122261 - DNA, 180 bp, synthetic construct
  misc_feature 1..180: note = Description of Artificial Sequence: Synthetic coding sequence
  source 1..180: mol_type = other DNA
atgctgagcagaaatgacgacatttgtatctacgggggccttggtttaggcgggctcctgctgctggctgtggtactcctgtccgcctgcctttgctggttgcataggagaggccctggcctcttgcgcgcaggaactccgctatgtattagcgccgaggccgcctccgcacagcagtag

SEQ ID NO: 122262 - DNA, 201 bp, synthetic construct
  misc_feature 1..201: note = Description of Artificial Sequence: Synthetic coding sequence
  source 1..201: mol_type = other DNA
atgctcagcaggaacgatgacatctgtatatacggaggactaggcctcggggggctcctcctgctagccgtcgtactcctttccgcctgtttatgctggttgcatcggagagcaccaagtgtgctggtgcccggacccggccttctgagggccggaacacccctatgcatcagcgcagaagccgcgtccgcccaacaatag

SEQ ID NO: 122263 - DNA, 222 bp, synthetic construct
  misc_feature 1..222: note = Description of Artificial Sequence: Synthetic coding sequence
  source 1..222: mol_type = other DNA
atgcttagccggaatgacgtgaagcgcctggaaagatcctggcacttactttcatggtcccaggcccaggggagcagcgaacaggagcttcactatgcttcccttcaaaggctgcctgtgccttcaagcgaggggcccgacttgcgaggtcgggataaaagaggaacgaaagaagatccaagggccgactacgcttgcatcgccgagaataagcctacatag

SEQ ID NO: 122264 - DNA, 201 bp, synthetic construct
  misc_feature 1..201: note = Description of Artificial Sequence: Synthetic coding sequence
  source 1..201: mol_type = other DNA
atgctgtcacggaacgacgtgaagcgcctcgagcgcagctgggcacagggttcatccgagcaggaactgcattatgctagtcttcagcgcctgccagtgccatcctcagaaggccccgatcttaggggacgggacaaaaggggcaccaaggaagacccaagagcagactatgcatgtatcgcagagaacaagcccacatag

SEQ ID NO: 122265 - DNA, 108 bp, synthetic construct
  misc_feature 1..108: note = Description of Artificial Sequence: Synthetic coding sequence
  source 1..108: mol_type = other DNA
atgttaagccgaaatgatgcaccgtcggttctcgtcccgggcccggggctgctgagggccggcacacccttatgcatctccgccgaagccgcttcagcacagcaatag

SEQ ID NO: 122266 - DNA, 315 bp, synthetic construct
  misc_feature 1..315: note = Description of Artificial Sequence: Synthetic coding sequence
  source 1..315: mol_type = other DNA
atgctgagcagaaacgatgatatttgtatctacggagggctgggactcggtgggctgctattgcttgcagtggtgcttttgagtgcatgtttgtgttggttgcacagacgcgtgaagagactggagcgctcatggcacctgctgtcttggtcacaggcacagggaagtagcgaacaagaattacattacgccagcctacagcgattgccagtgccgagtagtgagggtccagatctcagggggagagacaagagagggactaaggaagatcctagagcagattatgcctgtatcgctgaaaataagcccacttag

SEQ ID NO: 122267 - DNA, 42 bp, synthetic construct
  misc_feature 1..42: note = Description of Artificial Sequence: Synthetic coding sequence
  source 1..42: mol_type = other DNA
atgctgtcacgaaacgatgaggccgcgtctgcacagcagtag

SEQ ID NO: 122268 - DNA, 108 bp, synthetic construct
  misc_feature 1..108: note = Description of Artificial Sequence: Synthetic coding sequence
  source 1..108: mol_type = other DNA
atgttatcacggaatgacgccccctctgtcctagttcccgggccgggcttgctaagagccggaactccactctgcatttcagctgaagccgccagtgctcagcagtag

SEQ ID NO: 122269 - DNA, 276 bp, synthetic construct
  misc_feature 1..276: note = Description of Artificial Sequence: Synthetic coding sequence
  source 1..276: mol_type = other DNA
atgatttatgtgtcgaccggcgcttggggctgggcaggcagttgtttctggcagtggtctttttgtccccccgcttgtgtaggttgtatcgaagagcacttgctctcgtggtcgcaggcccaaggttcctctgaacaagagctccactacgcttccctgcagagactgcccgtccccagcagcgaaggaccggatctgaggggacgtgacaaacgcggaaccaaagaggaccctagagcggattatgcttgcattgctgagaacaagcctacatag

SEQ ID NO: 122270 - DNA, 156 bp, synthetic construct
  misc_feature 1..156: note = Description of Artificial Sequence: Synthetic coding sequence
  source 1..156: mol_type = other DNA
atgctgagtcggaacgacgtcaagaggctcgaacggagctggcggctgcccgtcccttcctctgagggccccgatctgcgcggcagagacaaacgaggcaccaaagaagacccaagagcagattacgcctgcatcgccgaaaataagcctacttag

SEQ ID NO: 122271 - DNA, 192 bp, synthetic construct
  misc_feature 1..192: note = Description of Artificial Sequence: Synthetic coding sequence
  source 1..192: mol_type = other DNA
atgcacttgtgccggggctgtcaatgtccagccgtcagggacctgacatcaggcgctgagacccgggaggcgcccaggagaattcaggagctaaccatgcctgccctcctgcgtacaaaccctcccgagcatccccgacacctcccacagcccaggagggtggatagggtgccactgtggagttctcagtag

SEQ ID NO: 122272 - DNA, 222 bp, synthetic construct
  misc_feature 1..222: note = Description of Artificial Sequence: Synthetic coding sequence
  source 1..222: mol_type = other DNA
atgctgagcagaaatgatgttaaacggttagaacgctcatggcacttactgtcatggtcccaggcccaagggtctagcgagcaggaattgcactacgccagtctgcaaagactcccggttccatcctccgaagggccagaccttcgcggtagagataaaagaggtactaaagaagatccgcgggccgactacgcatgtatcgccgaaaataaacctacatag

SEQ ID NO: 122273 - DNA, 108 bp, synthetic construct
  misc_feature 1..108: note = Description of Artificial Sequence: Synthetic coding sequence
  source 1..108: mol_type = other DNA
atgctttctaggaacgacgctcctagcgtcctggtcccaggtccagggctcttgcgcgccggaactccgctgtgtatttccgccgaagccgcatctgcccagcagtag

SEQ ID NO: 122274 - DNA, 201 bp, synthetic construct
  misc_feature 1..201: note = Description of Artificial Sequence: Synthetic coding sequence
  source 1..201: mol_type = other DNA
atgctgagtagaaacgacgacatctgcatttatggcggactggggctgggcggtctcctcctgctggctgtggtgctcctgagcgcttgcttgtgttggcttcataggagggctccatcggtgcttgtgccaggcccaggcctgctcagggctggtacccctttgtgcatcagcgcagaggcagccagcgcccaacagtag

SEQ ID NO: 122275 - DNA, 315 bp, synthetic construct
  misc_feature 1..315: note = Description of Artificial Sequence: Synthetic coding sequence
  source 1..315: mol_type = other DNA
atgctaagtaggaatgacgatatctgcatttatgggggcctggggctgggaggattgttactgctcgctgttgtattgctgtccgcgtgcctgtgctggctgcaccgcagagtaaagcgactggaaagatcatggcacttgctttcttggtcccaagcccaggggtcaagtgagcaggaactgcactacgcatctctgcagagactgcctgtcccaagctctgagggtcctgatctgcgaggacgcgataagaggggcacgaaggaagatcctcgtgctgattatgcctgcatcgcggagaataaaccgacatag

SEQ ID NO: 122276 - DNA, 135 bp, synthetic construct
  misc_feature 1..135: note = Description of Artificial Sequence: Synthetic coding sequence
  source 1..135: mol_type = other DNA
atgctgagcagaaatgacgacatctgtatctatggaggactcggcttggggggcctactgttgctggccgttgttcttctgagcgcgtgtctctgttggctccacagacgagaggccgctagcgcccaacagtag

SEQ ID NO: 122277 - DNA, 201 bp, synthetic construct
  misc_feature 1..201: note = Description of Artificial Sequence: Synthetic coding sequence
  source 1..201: mol_type = other DNA
atgttgagccgaaatgacgacatatgcatctacggaggcctgggactcggagggctgctactgctcgcagtggttttgctgtcagcctgtctgtgttggcttcaccgacgcgtgaagcggctggagaggagttggcgcctgccagtcccatcatctgaaggccctgatctccgtggacgggacaagcgcggtactaagtag

SEQ ID NO: 122278 - DNA, 201 bp, synthetic construct
  misc_feature 1..201: note = Description of Artificial Sequence: Synthetic coding sequence
  source 1..201: mol_type = other DNA
atgcttagccgcaatgatgtcaaacggttggagcgaagttgggcccagggctctagcgagcaagagttacattacgcgtcactgcaaagacttccagtgccaagctctgagggcccagacctgcggggacgcgacaaaagggggaccaaagaggatcccagggctgactatgcctgcatcgctgagaacaagcctacctag

SEQ ID NO: 122279 - DNA, 294 bp, synthetic construct
  misc_feature 1..294: note = Description of Artificial Sequence: Synthetic coding sequence
  source 1..294: mol_type = other DNA
atgctctcaaggaatgacgacatatgcatctatggggggcttggcctgggaggactactgttacttgctgtcgtgttgctctccgcctgcttatgctggttgcatcgacgggttaaacgattagagaggagctgggctcagggcagctcagaacaggaactgcactatgccagcctgcagagactcccggtgccctccagtgaaggccctgatttgaggggacgagacaagaggggaaccaaagaggatccgagagctgattatgcctgtatagctgagaacaagcctacctag

SEQ ID NO: 122280 - DNA, 180 bp, synthetic construct
  misc_feature 1..180: note = Description of Artificial Sequence: Synthetic coding sequence
  source 1..180: mol_type = other DNA
atgttgtcgagaaatgacgatatttgtatttacgggggcttgggactcgggggcctgctgctactggctgtcgtacttctgtccgcctgtctgtgttggctccatagacgcggacccggcctgctgcgagccggcaccccactttgcatcagcgccgaggcagcatcagctcagcagtag

SEQ ID NO: 122281 - DNA, 87 bp, synthetic construct
  misc_feature 1..87: note = Description of Artificial Sequence: Synthetic coding sequence
  source 1..87: mol_type = other DNA
atgctgtctaggaacgatggcccaggtctgctgcgcgccgggaccccgctgtgtatctcggcagaagccgcatcggcgcagcaatag

SEQ ID NO: 122282 - DNA, 87 bp, synthetic construct
  misc_feature 1..87: note = Description of Artificial Sequence: Synthetic coding sequence
  source 1..87: mol_type = other DNA
atgctcagcaggaacgacggcccaggtttactgcgagcaggtacccccctatgcatatccgcagaagctgctagcgcccagcagtag

SEQ ID NO: 122283 - DNA, 87 bp, synthetic construct
  misc_feature 1..87: note = Description of Artificial Sequence: Synthetic coding sequence
  source 1..87: mol_type = other DNA
atgctcagcagaaacgacgggcctggcctcctacgcgccgggacccccctttgcattagcgccgaggccgcgtcggcccagcagtag

SEQ ID NO: 122284 - DNA, 87 bp, synthetic construct
  misc_feature 1..87: note = Description of Artificial Sequence: Synthetic coding sequence
  source 1..87: mol_type = other DNA
atgctctcccgcaacgatgggccggggttgttaagagccggcacaccgctttgtatctcagccgaagctgcctcggcacagcaatag

SEQ ID NO: 122285 - DNA, 42 bp, synthetic construct
  misc_feature 1..42: note = Description of Artificial Sequence: Synthetic coding sequence
  source 1..42: mol_type = other DNA
atgttaagccggaacgacgaggccgctagcgcacagcaatag

SEQ ID NO: 122286 - DNA, 249 bp, synthetic construct
  misc_feature 1..249: note = Description of Artificial Sequence: Synthetic coding sequence
  source 1..249: mol_type = other DNA
atgctgtctaggaatgacgatatctgcatctacggggggctgggcctcggcggtctgctgctgcttgccgtggtgttgctaagtgcctgtttgtgctggttgcaccgccgcgtgaagcgcttggaaaggagttggcgtcttcctgttccttcatcagagggtcccgatcttagaggtcgggataagcgggggacaaaagaggaccctcgcgcagactatgcttgcatcgccgagaataagccgacatag

SEQ ID NO: 122287 - DNA, 201 bp, synthetic construct
  misc_feature 1..201: note = Description of Artificial Sequence: Synthetic coding sequence
  source 1..201: mol_type = other DNA
atgttgtcgagaaatgatgttaagaggctggaacgctcctgggctcagggctcatcagagcaggaactgcattatgccagtctgcagcgactgcccgtccccagcagcgagggcccggatttgcgaggcagagataagaggggaacgaaggaagatcctagggctgattacgcttgcattgccgagaataaaccaacctag

SEQ ID NO: 122288 - DNA, 201 bp, synthetic construct
  misc_feature 1..201: note = Description of Artificial Sequence: Synthetic coding sequence
  source 1..201: mol_type = other DNA
atgcttagcaggaatgacgtgaagcggctggagagatcctgggcacagggatctagtgaacaggaactgcattacgccagcctgcagcgtctgcctgtgcccagcagcgaaggtcctgacctccggggcagagacaagcggggaacgaaagaggaccctcgggccgattatgcttgcatcgccgaaaacaaacccacctag

SEQ ID NO: 122289 - DNA, 294 bp, synthetic construct
  misc_feature 1..294: note = Description of Artificial Sequence: Synthetic coding sequence
  source 1..294: mol_type = other DNA
atgctgtctcgtaacgatgacatttgtatctatggcgggctgggacttggaggcctgctgctccttgcggtcgtgctgctgtctgcatgtctgtgttggctccatagaagagtgaagcgcttagagaggtcttgggctcagggtagctccgaacaggagctccattatgcctccttacagcgcctgcctgtgccaagtagtgagggacccgatcttcggggacgggacaaacggggaactaaagaggatccacgtgccgattacgcttgcatcgcggagaataagccaacatag

SEQ ID NO: 122290 - DNA, 156 bp, synthetic construct
  misc_feature 1..156: note = Description of Artificial Sequence: Synthetic coding sequence
  source 1..156: mol_type = other DNA
atgctgtcccggaatgatgtgaaaaggctggaaagaagttggaggcttcccgttccctctagtgagggacccgacctaagaggacgcgacaaaaggggtacaaaggaagatcctagagcagattatgcctgtattgccgagaacaaaccaacttag

SEQ ID NO: 122291 - DNA, 294 bp, synthetic construct
  misc_feature 1..294: note = Description of Artificial Sequence: Synthetic coding sequence
  source 1..294: mol_type = other DNA
atgttgtcgcgcaacgacgatatttgcatttacggaggactaggactcgggggccttctcctcctcgccgttgtgctgctaagcgcatgtctgtgttggttacataggagggtgaaaaggttggaacgtagctgggcacaaggttcgagcgagcaggagctgcattatgcatccctccagcggctgccggtcccgtcctccgagggcccagatctgcgcggcagggacaagcggggaaccaaagaggaccccagagccgattatgcttgtatcgcagagaataaacctacctag

SEQ ID NO: 122292 - DNA, 315 bp, synthetic construct
  misc_feature 1..315: note = Description of Artificial Sequence: Synthetic coding sequence
  source 1..315: mol_type = other DNA
atgctcagcaggaacgacgacatttgcatttatgggggtctgggcttaggtggtctgctgctgcttgccgtggttctcttatcagcatgtttgtgttggctgcatcgccgcgtaaagcgtttggaacgtagctggcacctgctgtcctggtcacaggcacagggctcgtccgagcaggagttacattacgcctctcttcagaggctgcccgtgccatctagcgagggcccagatctgaggggacgtgacaagagggggacgaaagaggacccaagggctgactacgcctgcatcgccgagaataagcctacctag

SEQ ID NO: 122293 - DNA, 132 bp, synthetic construct
  misc_feature 1..132: note = Description of Artificial Sequence: Synthetic coding sequence
  source 1..132: mol_type = other DNA
tatcgcggaatgatgatctacgtttcaacgggtgcctggggctgggctgggtcatgtttctggcagtggagcttttgcccaccagcgtgcgttgggtgtattgaggaacggctgccagtgccaagcagctag

SEQ ID NO: 122294 - DNA, 111 bp, synthetic construct
  misc_feature 1..111: note = Description of Artificial Sequence: Synthetic coding sequence
  source 1..111: mol_type = other DNA
atgctatctagaaatgacgacatctgcatttatggggggctggggttgggtggactattgctgttagccgtcgtcctactgagtgcttgcctgtgttggctgcatagatag

SEQ ID NO: 122295 - DNA, 315 bp, synthetic construct
  misc_feature 1..315: note = Description of Artificial Sequence: Synthetic coding sequence
  source 1..315: mol_type = other DNA
atgctgtcacgtaacgatgacatctgcatctacggtggacttggcttgggcggactattgctgttggcggttgtgcttctgtcagcctgcctgtgttggttgcacagacgggtgaagaggctggagagatcttggcatctactctcctggtcccaagcccaaggttcatccgagcaggaactccactatgcaagtctccagcgactacctgtcccttcatccgagggccctgacttgcgcggtagagataagagaggcactaaagaagatccccgggccgattacgcatgcatcgccgaaaataagcctacatag

SEQ ID NO: 122296 - DNA, 141 bp, synthetic construct
  misc_feature 1..141: note = Description of Artificial Sequence: Synthetic coding sequence
  source 1..141: mol_type = other DNA
atgctgagtcgcaatgatgacatttgcatttatggtgggctcggactgggaggactcctgctgctggccgtggtcctactatctgcatgtttgtgttggcttcacagacgggaacattgccttgccctggaacctctttag

SEQ ID NO: 122297 - DNA, 42 bp, synthetic construct
  misc_feature 1..42: note = Description of Artificial Sequence: Synthetic coding sequence
  source 1..42: mol_type = other DNA
atgctctcaaggaacgatgaagcagcaagcgctcagcagtag

SEQ ID NO: 122298 - DNA, 87 bp, synthetic construct
  misc_feature 1..87: note = Description of Artificial Sequence: Synthetic coding sequence
  source 1..87: mol_type = other DNA
atgctgtcgaggaacgatggcccagggctgttacgagccggaacgccgctgtgtatctcggccgaggccgcatccgctcaacagtag

SEQ ID NO: 122299 - DNA, 201 bp, synthetic construct
  misc_feature 1..201: note = Description of Artificial Sequence: Synthetic coding sequence
  source 1..201: mol_type = other DNA
atgctctcccgtaatgatgtgaaacggctagagcgatcttgggctcaggggtcttccgagcaggaactacactacgcctccctacagcgcctgcctgtgccatcctctgaaggacccgacctgcggggcagagataaaaggggtaccaaagaggaccctagagcagactacgcttgcatcgccgaaaacaaacccacctag

SEQ ID NO: 122300 - DNA, 87 bp, synthetic construct
  misc_feature 1..87: note = Description of Artificial Sequence: Synthetic coding sequence
  source 1..87: mol_type = other DNA
atgctttcgcgaaacgatggccctggcttactccgggccggaacacccctttgcatttctgcagaagccgctagtgcacaacaatag

SEQ ID NO: 122301 - DNA, 87 bp, synthetic construct
  misc_feature 1..87: note = Description of Artificial Sequence: Synthetic coding sequence
  source 1..87: mol_type = other DNA
atgctaagtcgtaacgatggtccaggcctcctgagggccgggacccctctctgcattagtgctgaggctgccagtgcacagcaatag

SEQ ID NO: 122302 - DNA, 132 bp, synthetic construct
  misc_feature 1..132: note = Description of Artificial Sequence: Synthetic coding sequence
  source 1..132: mol_type = other DNA
tgaagtcgcaatgacgatatctgcatctacggcggactgggtctcgggggcctgctgctgctggctgtggtccttttgtctgcctgcctgtgttggctacacaggcgggaggccgccagtgcccaacagtag

SEQ ID NO: 122303 - DNA, 156 bp, synthetic construct
  misc_feature 1..156: note = Description of Artificial Sequence: Synthetic coding sequence
  source 1..156: mol_type = other DNA
atgctgtctaggaacgatgtcaagaggctggaacggagttggcgactgcccgtgccctcttcagaaggccccgacctgcgaggcagggacaaacgggggaccaaggaggatcccagagcagattacgcctgtatcgctgagaataagcctacctag

SEQ ID NO: 122304 - DNA, 108 bp, synthetic construct
  misc_feature 1..108: note = Description of Artificial Sequence: Synthetic coding sequence
  source 1..108: mol_type = other DNA
atgcttagtcgaaacgatgccccatccgtcctcgtcccaggacccggcctgctccgcgctgggacccctttatgcatcagcgccgaggctgcgtccgcgcagcagtag

SEQ ID NO: 122305 - DNA, 42 bp, synthetic construct
  misc_feature 1..42: note = Description of Artificial Sequence: Synthetic coding sequence
  source 1..42: mol_type = other DNA
atgttaagtaggaatgacgaagcagcttcagcgcaacagtag

SEQ ID NO: 122306 - DNA, 294 bp, synthetic construct
  misc_feature 1..294: note = Description of Artificial Sequence: Synthetic coding sequence
  source 1..294: mol_type = other DNA
atgttgtcaaggaacgatgacatctgcatctacggaggacttgggcttggcggcctgcttctgctggctgtcgtgcttttaagcgcatgtctctgttggttacaccggcgggtcaagcggctcgagcgtagttgggcccagggttcgagtgagcaggaactgcactatgcttccttgcagcgcttacccgtgccctctagcgagggtcctgacctgcgtggacgggataagcgcggtactaaagaggatcctagggcggactacgcatgtatcgccgaaaataaacccacctag

SEQ ID NO: 122307 - DNA, 201 bp, synthetic construct
  misc_feature 1..201: note = Description of Artificial Sequence: Synthetic coding sequence
  source 1..201: mol_type = other DNA
atgttatccagaaacgacgtgaaacggctcgagagatcttgggctcagggatcctctgaacaagagctccattatgcaagtctacagaggctgccagtcccctcttccgaagggccggaccttcgcgggcgcgacaagcgcggtacaaaggaggaccctcgtgcagattatgcctgcattgctgagaataagccgacatag

SEQ ID NO: 122308 - DNA, 141 bp, synthetic construct
  misc_feature 1..141: note = Description of Artificial Sequence: Synthetic coding sequence
  source 1..141: mol_type = other DNA
atgctctctcgcaatgatgatatatgcatttacggaggcttaggacttggcggtctgctactcctggccgtggtcttgctgtcggcttgcttatgctggctccatagacgcgagcactgccttgcccttgagccactctag

SEQ ID NO: 122309 - DNA, 132 bp, synthetic construct
  misc_feature 1..132: note = Description of Artificial Sequence: Synthetic coding sequence
  source 1..132: mol_type = other DNA
tgatctcgaaatgatgacatatgtatttacggcgggctgggactgggcggacttctcttgctggccgtcgtcctgctgtccgcctgtttatgttggttgcatcggcgcgaggccgcatcggcccagcagtag

SEQ ID NO: 122310 - DNA, 141 bp, synthetic construct
  misc_feature 1..141: note = Description of Artificial Sequence: Synthetic coding sequence
  source 1..141: mol_type = other DNA
atgctgagtcgcaatgatgatatttgtatttatgggggattgggcctggggggcttgttgctgctggccgttgtgttgctgagtgcttgtctttgttggttgcaccgcagggagcactgtttggccctcgagcccctgtag

SEQ ID NO: 122311 - DNA, 87 bp, synthetic construct
  misc_feature 1..87: note = Description of Artificial Sequence: Synthetic coding sequence
  source 1..87: mol_type = other DNA
atgctgagccgaaatgacgggcctgggctgctaagagcagggactcccctctgtatctcggcggaggcagcctctgcccagcaatag

SEQ ID NO: 122312 - DNA, 132 bp, synthetic construct
  misc_feature 1..132: note = Description of Artificial Sequence: Synthetic coding sequence
  source 1..132: mol_type = other DNA
tgaagccggaacgacgatatttgtatctatggaggactgggactggggggcctcttgctgctcgccgtagttctcttatcggcctgcctctgctggctgcaccgcagggaggctgcctctgcgcagcagtag

SEQ ID NO: 122313 - DNA, 201 bp, synthetic construct
  misc_feature 1..201: note = Description of Artificial Sequence: Synthetic coding sequence
  source 1..201: mol_type = other DNA
atgctgtctcgaaatgacgtgaagagactggaaagaagctgggctcaggggtcttctgagcaggaactgcactacgctagcctgcaacggctccccgtgccatccagcgagggtcccgatctgagaggcagagacaagagagggacaaaggaggatcccagagctgattatgcttgcatcgccgaaaataagcctacttag

SEQ ID NO: 122314 - DNA, 180 bp, synthetic construct
  misc_feature 1..180: note = Description of Artificial Sequence: Synthetic coding sequence
  source 1..180: mol_type = other DNA
atgctgtcgagaaatgacgatatctgcatctacggtgggttgggactgggcggactcttgctgctggcagtggtcctgttatcagcctgtctatgctggctgcaccgaagggggccaggactccttcgtgccggaaccccactgtgcatcagtgccgaagctgctagcgctcaacagtag

SEQ ID NO: 122315 - DNA, 222 bp, synthetic construct
  misc_feature 1..222: note = Description of Artificial Sequence: Synthetic coding sequence
  source 1..222: mol_type = other DNA
atgcttagccgaaatgatgtgaaaagactcgagcgttcgtggcacctgctgtcttggtcccaagcccagggcagctctgagcaagagctgcattacgcctcactccagaggctgcctgttccgtcctccgaagggcccgacctccgaggacgggataagcgaggaaccaaggaggacccaagggctgattatgcttgtatcgctgaaaacaaaccgacttag

SEQ ID NO: 122316 - DNA, 201 bp, synthetic construct
  misc_feature 1..201: note = Description of Artificial Sequence: Synthetic coding sequence
  source 1..201: mol_type = other DNA
atgctctctcgcaatgacgatatttgtatctatggcggcctgggcctgggcggtctcctgctcttagccgtggtcctgttgtctgcatgtctgtgttggctccatcgccgggccccctctgtgctggtccccggtccgggccttctgagagcagggacaccgctttgtataagcgcggaagcagcctctgcacaacagtag

SEQ ID NO: 122317 - DNA, 201 bp, synthetic construct
  misc_feature 1..201: note = Description of Artificial Sequence: Synthetic coding sequence
  source 1..201: mol_type = other DNA
atgctgtctcgtaacgacgtgaaaaggctggagcgttcatgggcccaaggttcctctgagcaggaactccattatgcaagcctgcagcgtctgcctgtcccaagttccgagggaccagaccttcgagggcgcgacaagagaggcactaaggaggaccctcgggctgattatgcgtgcattgccgagaataaacctacttag

SEQ ID NO: 122318 - DNA, 87 bp, synthetic construct
  misc_feature 1..87: note = Description of Artificial Sequence: Synthetic coding sequence
  source 1..87: mol_type = other DNA
atgctcagtaggaatgacggacccgggctgctgagggccggaacccctctatgtatttccgctgaggctgcctctgcccagcagtag

SEQ ID NO: 122319 - DNA, 249 bp, synthetic construct
  misc_feature 1..249: note = Description of Artificial Sequence: Synthetic coding sequence
  source 1..249: mol_type = other DNA
atgttgtctcgcaatgacgacatctgcatttacgggggactcggacttgggggtcttctgctgctggccgttgtactcctgtccgcatgcctttgctggctacacagacgagtgaagagactagagaggtcctggcggctaccagttccatccagcgaaggaccggatctgaggggaagggataagcggggaactaaagaagaccctcgcgccgactacgcctgcattgccgagaataagcccacatag

SEQ ID NO: 122320 - DNA, 156 bp, synthetic construct
  misc_feature 1..156: note = Description of Artificial Sequence: Synthetic coding sequence
  source 1..156: mol_type = other DNA
atgttgagccgaaatgatgttaaaaggctcgagcggagttggagactgcccgtgcctagcagcgaaggacccgaccttcgggggcgggacaaaagggggactaaggaagacccaagggctgactacgcttgtatcgcagaaaataaacccacttag

SEQ ID NO: 122321 - DNA, 180 bp, synthetic construct
  misc_feature 1..180: note = Description of Artificial Sequence: Synthetic coding sequence
  source 1..180: mol_type = other DNA
atgctcagtaggaacgatgacatttgtatctatggcggactcggactggggggcttgctgctgctcgccgtcgtcttgttgtccgcctgtctatgttggctgcaccgccggggtcccgggctgctgagagcagggacacctctatgtatttccgctgaggcagctagcgcacaacagtag

SEQ ID NO: 122322 - DNA, 201 bp, synthetic construct
  misc_feature 1..201: note = Description of Artificial Sequence: Synthetic coding sequence
  source 1..201: mol_type = other DNA
atgttaagccgaaatgacgtcaaaaggttggaaaggtcctgggcacagggtagtagcgaacaggaactgcactacgctagcctccagaggctgcccgtcccgagctctgaaggccctgaccttcggggcagagataaacggggcacaaaagaagacccacgggccgattatgcatgcatcgccgaaaataaacctacctag

SEQ ID NO: 122323 - DNA, 156 bp, synthetic construct
  misc_feature 1..156: note = Description of Artificial Sequence: Synthetic coding sequence
  source 1..156: mol_type = other DNA
atgctgagccgcaatgacgtgaaacgcctggaacgcagttggcggctgcctgttccctcatccgagggacccgatctgcgggggcgggataaaagaggaaccaaagaagatccccgcgcagactacgcctgcatcgccgaaaataagcctacatag

SEQ ID NO: 122324 - DNA, 249 bp, synthetic construct
  misc_feature 1..249: note = Description of Artificial Sequence: Synthetic coding sequence
  source 1..249: mol_type = other DNA
atgctgagtcggaacgatgacatatgtatttatggcggcttaggactaggaggattattgctcctcgcagtcgtgctcttgtctgcttgtctctgttggttgcatagaagagtgaagagactagaacgcagctggcgcctgcccgtgccatcgtctgaagggcccgatttgagaggccgcgataaaagggggacaaaggaggatcccagggcggactacgcatgtattgcagaaaacaaaccaacttag

SEQ ID NO: 122325 - DNA, 141 bp, synthetic construct
  misc_feature 1..141: note = Description of Artificial Sequence: Synthetic coding sequence
  source 1..141: mol_type = other DNA
atgctttcgcgtaatgacgatatatgcatttacggggggctgggattaggagggctactgttgcttgcggtggtgctgttatctgcttgcctatgctggctgcaccgtcgcgaacattgcttagccctagaacccctttag

SEQ ID NO: 122326 - DNA, 108 bp, synthetic construct
  misc_feature 1..108: note = Description of Artificial Sequence: Synthetic coding sequence
  source 1..108: mol_type = other DNA
atgctttctcggaatgacgccccctccgtactagttcctggacccggattactgcgcgcagggacacctctgtgtatatctgctgaagctgccagcgctcaacagtag

SEQ ID NO: 122327 - DNA, 249 bp, synthetic construct
  misc_feature 1..249: note = Description of Artificial Sequence: Synthetic coding sequence
  source 1..249: mol_type = other DNA
atgctatctcggaatgatgatatttgtatctacgggggcctgggcctggggggtctgctgctcctggctgtagtgctgttgtctgcatgcctgtgctggctccatcgtagagtcaagcgcttggaacgctcatggagattacctgtgcctagctccgaagggccagacctgaggggacgcgataagcgaggaaccaaagaggaccctcgggccgattacgcctgtatcgctgaaaataagcccacttag

SEQ ID NO: 122328 - DNA, 87 bp, synthetic construct
  misc_feature 1..87: note = Description of Artificial Sequence: Synthetic coding sequence
  source 1..87: mol_type = other DNA
atgctgagtagaaatgacggcccgggcttactgcgcgcgggcactccattgtgcatctctgccgaggccgcttccgctcagcagtag

SEQ ID NO: 122329 - DNA, 294 bp, synthetic construct
  misc_feature 1..294: note = Description of Artificial Sequence: Synthetic coding sequence
  source 1..294: mol_type = other DNA
atgctgtctaggaacgatgacatttgcatctatggcggtctcggccttggggggctcttactcctggccgtggtgctgcttagtgcctgcctctgctggcttcatcgcagagtcaaaagactcgaacgtagctgggcccagggatccagtgagcaggagttacactatgcatctctgcagaggctgccagttccaagtagcgagggtcccgacctgcggggcagggataaacgtggaacaaaggaggaccccagagcagactatgcatgcattgctgaaaataagcccacttag

SEQ ID NO: 122330 - DNA, 87 bp, synthetic construct
  misc_feature 1..87: note = Description of Artificial Sequence: Synthetic coding sequence
  source 1..87: mol_type = other DNA
atgcttagcagaaatgatggcccgggcctgctccgagccggtaccccactctgcatttcggcagaggctgcttcggctcaacagtag

SEQ ID NO: 122331 - DNA, 108 bp, synthetic construct
  misc_feature 1..108: note = Description of Artificial Sequence: Synthetic coding sequence
  source 1..108: mol_type = other DNA
atgctatctcgtaatgacgcaccctccgtccttgttcctggtcctggtcttctgcgggcagggacccctctgtgtatctcggctgaggcggccagcgctcaacagtag

SEQ ID NO: 122332 - DNA, 294 bp, synthetic construct
  misc_feature 1..294: note = Description of Artificial Sequence: Synthetic coding sequence
  source 1..294: mol_type = other DNA
atgctgagtcgaaacgacgatatttgcatttacggcggactggggcttggtggcctcctgctactcgccgtggtcctcttgtcagcttgtctgtgttggctccatcgtcgggttaagcggttggagaggagttgggcccaggggtccagcgagcaagagttgcattacgcctcattgcaacgtctcccagtgccatcaagcgaaggaccggacctccgcggtcgagataagaggggcaccaaggaggatcccagagcagattatgcttgcattgccgagaataaaccgacatag

SEQ ID NO: 122333 - DNA, 201 bp, synthetic construct
  misc_feature 1..201: note = Description of Artificial Sequence: Synthetic coding sequence
  source 1..201: mol_type = other DNA
atgctgtcgcgtaatgacgtgaaacgactggagcgctcctgggctcagggctcaagtgagcaagaactgcactacgcatcactgcagcgactgcccgtgccaagctcagaggggcctgatctgcgtggacgcgacaagcgcgggaccaaggaggaccctcgcgccgactacgcttgtattgcagaaaataaaccgacctag

SEQ ID NO: 122334 - DNA, 201 bp, synthetic construct
  misc_feature 1..201: note = Description of Artificial Sequence: Synthetic coding sequence
  source 1..201: mol_type = other DNA
atgctatcccgaaatgacgtaaagaggctggagcgttcttgggcccagggcagctccgagcaggagctgcactacgccagcttgcagcgcctaccagtaccatccagcgagggccctgaccttcgtggtcgagacaaacgcgggacaaaagaggatccacgggcggattatgcgtgtatcgctgaaaataaacctacctag

SEQ ID NO: 122335 - DNA, 42 bp, synthetic construct
  misc_feature 1..42: note = Description of Artificial Sequence: Synthetic coding sequence
  source 1..42: mol_type = other DNA
atgctttcccggaatgacgaggctgctagcgcccagcagtag

SEQ ID NO: 122336 - DNA, 87 bp, synthetic construct
  misc_feature 1..87: note = Description of Artificial Sequence: Synthetic coding sequence
  source 1..87: mol_type = other DNA
atgctgagtcgcaacgatggccccgggctcctgcgggctggaacgcctttgtgcatttctgcagaagccgcgtcggcgcagcaatag

SEQ ID NO: 122337 - DNA, 111 bp, synthetic construct
  misc_feature 1..111: note = Description of Artificial Sequence: Synthetic coding sequence
  source 1..111: mol_type = other DNA
atgctctcgcgaaacgacgacatctgcatttacggcggcctcggtctgggcggactgctgctgcttgcagtggtcctattaagtgcttgcctgtgttggctgcatcgatag

SEQ ID NO: 122338 - DNA, 294 bp, synthetic construct
  misc_feature 1..294: note = Description of Artificial Sequence: Synthetic coding sequence
  source 1..294: mol_type = other DNA
atgctttcccgaaatgacgatatttgcatctatggggggctcggtctcggtggcctgttgctcttagcagtggtcctgctctcggcgtgtttgtgttggctgcatagacgcgttaaacgccttgaaagaagttgggctcagggcagctcagagcaggagctacactacgcttcacttcagcgcctgcctgtgccgtcctcagaggggccagatctgagggggagagataaacggggaacaaaagaagacccccgcgcagactatgcctgtattgccgaaaataaacccacctag

SEQ ID NO: 122339 - DNA, 180 bp, synthetic construct
  misc_feature 1..180: note = Description of Artificial Sequence: Synthetic coding sequence
  source 1..180: mol_type = other DNA
atgctgtccagaaatgacgatatatgtatctacgggggtctcgggctgggaggcctgctgttactagctgtggttctcttgagtgcgtgtttatgttggctccacaggaggggccctggtttgcttcgcgcggggacccccttgtgcatttctgctgaagccgcctccgcgcaacagtag

SEQ ID NO: 122340 - DNA, 294 bp, synthetic construct
  misc_feature 1..294: note = Description of Artificial Sequence: Synthetic coding sequence
  source 1..294: mol_type = other DNA
atgctgagccgcaacgacgacatctgtatttacggcggtcttgggctaggcggtctcctcctgctggccgtagtgctcctttccgcatgcctgtgctggctgcacaggcgagtgaaaaggcttgagcggtcatgggcccaggggtcttcagagcaggagctacactatgcttcattacagcgcctgccagtccctagttcagagggacctgacctgcggggtcgggacaagagagggaccaaggaggatccccgtgctgattacgcctgcattgctgaaaacaagcctacttag

SEQ ID NO: 122341 - DNA, 201 bp, synthetic construct
  misc_feature 1..201: note = Description of Artificial Sequence: Synthetic coding sequence
  source 1..201: mol_type = other DNA
atgctttcccggaacgacgacatttgcatctatggcgggctcggtcttggagggctgctgctgctggccgtggtgctgctaagcgcctgtttatgctggctgcacaggcgggccccctccgtgctcgtgcctggtcccggcctcctcagagccggcacacctctgtgtatatccgctgaggccgcgtcagcacaacagtag

SEQ ID NO: 122342 - DNA, 87 bp, synthetic construct
  misc_feature 1..87: note = Description of Artificial Sequence: Synthetic coding sequence
  source 1..87: mol_type = other DNA
atgctgagcagaaacgacggacctggactgctgcgggccggcactcctctctgcatcagcgctgaggcggcctccgcccagcaatag

SEQ ID NO: 122343 - DNA, 180 bp, synthetic construct
  misc_feature 1..180: note = Description of Artificial Sequence: Synthetic coding sequence
  source 1..180: mol_type = other DNA
atgcttagtaggaatgatgacatctgtatctatggcggactgggactgggagggttgctgctgctcgcagttgtgttgctgagcgcatgtctgtgctggctgcatagaagaggccctggcctcctgagagccgggaccccactgtgcatcagcgccgaagcggccagcgctcaacagtag

SEQ ID NO: 122344 - DNA, 201 bp, synthetic construct
  misc_feature 1..201: note = Description of Artificial Sequence: Synthetic coding sequence
  source 1..201: mol_type = other DNA
atgctatctagaaacgacgtcaagagactggagcgatcctgggcccaaggcagttccgagcaagagctacattatgcttcattgcagaggcttccagtgccttcaagtgagggacccgatttgagaggccgagataaaaggggcaccaaggaagatcctagggctgattatgcatgcattgctgaaaataagccgacttag

SEQ ID NO: 122345 - DNA, 108 bp, synthetic construct
  misc_feature 1..108: note = Description of Artificial Sequence: Synthetic coding sequence
  source 1..108: mol_type = other DNA
atgctctccaggaacgatgcgcccagcgtgctggtgccgggccctggattactccgggcaggtaccccactctgcatctcggctgaggccgcttccgcacaacaatag

SEQ ID NO: 122346 - DNA, 201 bp, synthetic construct
  misc_feature 1..201: note = Description of Artificial Sequence: Synthetic coding sequence
  source 1..201: mol_type = other DNA
atgctaagtaggaatgatgtgaagaggctggaaaggtcctgggctcaaggctcaagcgagcaggaactgcactatgcctccctgcagcggctacctgtgccaagcagtgaagggcctgaccttcgagggcgcgataagagaggaactaaagaggatccccgagcggactatgcctgcatcgctgagaacaagcctacctag

SEQ ID NO: 122347 - DNA, 87 bp, synthetic construct
  misc_feature 1..87: note = Description of Artificial Sequence: Synthetic coding sequence
  source 1..87: mol_type = other DNA
atgcttagccgcaatgatggaccaggcctgctgcgggctggcacccccctgtgcatctctgctgaggccgccagcgctcaacagtag

SEQ ID NO: 122348 - DNA, 108 bp, synthetic construct
  misc_feature 1..108: note = Description of Artificial Sequence: Synthetic coding sequence
  source 1..108: mol_type = other DNA
atgctgtcccggaatgatgcaccctccgttctagttcctggaccaggtctgctaagagcgggtactcccttgtgcatcagtgcagaggctgctagtgcgcagcagtag

SEQ ID NO: 122349 - DNA, 132 bp, synthetic construct
  misc_feature 1..132: note = Description of Artificial Sequence: Synthetic coding sequence
  source 1..132: mol_type = other DNA
tagtcaaggaacgacgacatatgcatctacggaggcctaggtctcggagggctgctgctgctggctgtcgttttactgagtgcttgcctctgctggctccaccgccgagaagctgccagcgcccagcagtag

SEQ ID NO: 122350 - DNA, 111 bp, synthetic construct
  misc_feature 1..111: note = Description of Artificial Sequence: Synthetic coding sequence
  source 1..111: mol_type = other DNA
atgttaagccggaatgatgacatatgcatctacggaggcctcgggctgggcggactgttgctccttgctgtggttctcctctctgcgtgtctttgctggctgcaccggtag

SEQ ID NO: 122351 - DNA, 111 bp, synthetic construct
  misc_feature 1..111: note = Description of Artificial Sequence: Synthetic coding sequence
  source 1..111: mol_type = other DNA
atgttatcacgcaatgacgacatctgtatctatggaggactgggcctagggggtctcctgttgctagcagttgttctgctgtctgcatgcctgtgttggctgcaccgttag

SEQ ID NO: 122352 - DNA, 201 bp, synthetic construct
  misc_feature 1..201: note = Description of Artificial Sequence: Synthetic coding sequence
  source 1..201: mol_type = other DNA
atgctaagcaggaacgacgtgaagcggctcgaaaggagctgggcccaaggctcttctgaacaagagctccattacgcttcactacagcgactgccagtaccctcgtccgaaggccccgatttgagaggccgggataaacgcggcactaaagaggatcctcgcgcagactatgcttgtatcgccgagaacaagcccacctag

SEQ ID NO: 122353 - DNA, 294 bp, synthetic construct
  misc_feature 1..294: note = Description of Artificial Sequence: Synthetic coding sequence
  source 1..294: mol_type = other DNA
atgctatcccgtaatgacgatatatgcatctacggtggtctcgggcttggcggcctgctcttgttagcggtcgtactgctgtctgcctgtctttgctggttacacaggcgagttaagcggctggagcggagttgggctcagggaagctctgagcaagaactgcattacgcctcacttcaaaggctgcctgttccatcaagcgaagggcctgatttacgcggtcgggataaacgcggcacgaaagaagatcctagggctgattatgcctgcatcgcggaaaacaaaccaacgtag

SEQ ID NO: 122354 - DNA, 87 bp, synthetic construct
  misc_feature 1..87: note = Description of Artificial Sequence: Synthetic coding sequence
  source 1..87: mol_type = other DNA
atgctgtctcggaatgacggcccaggcttgctacgtgctggtactccactctgtataagcgcagaagctgcttccgcccagcagtag

SEQ ID NO: 122355 - DNA, 315 bp, synthetic construct
  misc_feature 1..315: note = Description of Artificial Sequence: Synthetic coding sequence
  source 1..315: mol_type = other DNA
atgctttcacggaacgatgacatatgcatttacgggggtcttggattgggagggttactcctactggccgtggtcctcctctctgcctgtttgtgctggttacacagacgcgtcaagagactggaacgatcatggcacctgctaagctggtcacaggcacagggaagctctgaacaggaattacattacgcaagcctgcagcggctccccgtgcccagctccgaaggccctgatctgcgaggacgggataagcgtggcacaaaagaagacccacgggccgattatgcatgcatcgcggagaacaagccaacatag

SEQ ID NO: 122356 - DNA, 201 bp, synthetic construct
  misc_feature 1..201: note = Description of Artificial Sequence: Synthetic coding sequence
  source 1..201: mol_type = other DNA
atgctctcaaggaacgatgttaagcgccttgaaaggtcgtgggcacaagggtcttctgagcaagagcttcattatgcttcccttcagaggctgcccgtccccagcagcgagggaccagatctgcgtgggagagacaaacgagggacaaaggaggaccccagagcggattatgcatgcatagcagagaacaagcctacctag

SEQ ID NO: 122357 - DNA, 111 bp, synthetic construct
  misc_feature 1..111: note = Description of Artificial Sequence: Synthetic coding sequence
  source 1..111: mol_type = other DNA
atgctctctcgtaacgacgatatttgcatttatgggggcttaggactcgggggactgctcctgctggctgtggtgctcctgtcagcttgtctttgctggctgcacaggtag

SEQ ID NO: 122358 - DNA, 294 bp, synthetic construct
  misc_feature 1..294: note = Description of Artificial Sequence: Synthetic coding sequence
  source 1..294: mol_type = other DNA
atgctatcaaggaatgacgatatttgtatctacggcggactgggattaggcggcctcttattactggccgtcgtgctcctgtcagcctgcctttgttggcttcaccggagagtgaagcgtctcgaaaggtcttgggcccaggggagtagtgaacaagagcttcattatgcttccctgcagcggctgcctgtgccctcgagcgaaggtcccgatcttcgcggcagggataagagaggaaccaaggaggaccccagggctgattacgcatgtatcgctgagaacaaacctacgtag

SEQ ID NO: 122359 - DNA, 156 bp, synthetic construct
  misc_feature 1..156: note = Description of Artificial Sequence: Synthetic coding sequence
  source 1..156: mol_type = other DNA
atgttgagtcggaatgacgtaaaaagactggaaaggtcttggagattgcccgtcccgtcatccgagggtcctgatctccgcggccgcgacaagaggggcacaaaagaagacccacgcgccgactacgcgtgcatagctgagaataaaccaacctag

SEQ ID NO: 122360 - DNA, 315 bp, synthetic construct
  misc_feature 1..315: note = Description of Artificial Sequence: Synthetic coding sequence
  source 1..315: mol_type = other DNA
atgttgagcagaaatgacgatatctgtatatacgggggtctcgggctaggaggcctcctactgctcgctgtcgtgcttttgagcgcttgcctgtgttggctccacagacgggtgaagaggctcgaacggtcctggcatctcctgtcttggtcgcaggcccaagggagttccgaacaggagttacactacgctagtctccagcgcttgccagtgccctcgtcagaagggcctgatctgagaggtcgggataaaagaggtacaaaagaggaccctcgcgccgattatgcttgtatcgccgaaaataagccaacatag

SEQ ID NO: 122361 - DNA, 294 bp, synthetic construct
  misc_feature 1..294: note = Description of Artificial Sequence: Synthetic coding sequence
  source 1..294: mol_type = other DNA
atgctgagtaggaatgatgatatatgcatctacggggggctagggcttggcggtttactgctcctggcagtggtgctcctgtcggcttgcttgtgctggctgcaccggcgggttaagcggctggagaggtcgtgggcgcagggcagcagcgagcaagagctacattacgcctctctgcagagactgcctgtcccatctagtgagggaccagacctgcgcggcagggataagcgcggcaccaaagaggatccccgggcagactatgcatgcatcgccgagaataagcccacctag

SEQ ID NO: 122362 - DNA, 315 bp, synthetic construct
  misc_feature 1..315: note = Description of Artificial Sequence: Synthetic coding sequence
  source 1..315: mol_type = other DNA
atgctgagccgcaacgacgacatttgtatctacggcggtttgggcctgggaggcttgctgctgttagcagtggtgctcctttctgcatgcctttgctggctccatcgccgggtcaagagactggaacgctcttggcacctcctgtcctggtcacaggcccaggggtcgtctgagcaggagctgcattatgcatccctgcagcgactacccgtcccttcatccgaaggccctgacttaagagggagggataagcgcggtaccaaggaggatccccgagccgattacgcctgtatcgcggagaataaaccaacttag

SEQ ID NO: 122363 - DNA, 156 bp, synthetic construct
  misc_feature 1..156: note = Description of Artificial Sequence: Synthetic coding sequence
  source 1..156: mol_type = other DNA
atgctgtctagaaatgacgtgaaacgccttgagagaagctggcgattgcccgtgcccagttccgaggggccggaccttagaggcagggacaagcgcggtaccaaagaagacccaagagccgactacgcatgcatcgccgaaaataagcccacctag

SEQ ID NO: 122364 - DNA, 201 bp, synthetic construct
  misc_feature 1..201: note = Description of Artificial Sequence: Synthetic coding sequence
  source 1..201: mol_type = other DNA
atgctcagtcgcaacgacgacatttgcatctacggcgggctagggttggggggcctcttgcttttggccgtcgttctgctgagtgcctgcctctgttggttgcacagacgggcaccatcagtcctcgtgcccggcccagggctactgcgcgccggtactcctctgtgtattagcgcagaagcagcctccgcgcaacagtag

SEQ ID NO: 122365 - DNA, 111 bp, synthetic construct
  misc_feature 1..111: note = Description of Artificial Sequence: Synthetic coding sequence
  source 1..111: mol_type = other DNA
atgctttcacggaacgacgacatctgcatttacggtgggctcgggctcggcggtcttctcctactcgcggtcgtactgctgtcagcctgcctctgttggcttcacaggtag

SEQ ID NO: 122366 - DNA, 222 bp, synthetic construct
  misc_feature 1..222: note = Description of Artificial Sequence: Synthetic coding sequence
  source 1..222: mol_type = other DNA
atgttgagcaggaacgatgtgaaaaggctggagagatcgtggcatctgttgagttggtcacaggcccaggggagctccgagcaggagctgcactatgcctcactgcaaaggttaccggtcccatcctctgagggccctgacctgcggggacgggacaaacgcggtacaaaagaagaccctagagctgactatgcctgcatagctgaaaataaaccaacatag

SEQ ID NO: 122367 - DNA, 201 bp, synthetic construct
  misc_feature 1..201: note = Description of Artificial Sequence: Synthetic coding sequence
  source 1..201: mol_type = other DNA
atgcttagtagaaacgatgtcaaacgtctggaaaggtcatgggcccagggcagctccgagcaggaactgcattacgcgtcattacagcgattgcccgtccctagcagcgaaggtccagacttgagaggccgcgacaagcgcggcaccaaagaggacccaagggccgactacgcatgtatagcagaaaataaacctacttag

SEQ ID NO: 122368 - DNA, 201 bp, synthetic construct
  misc_feature 1..201: note = Description of Artificial Sequence: Synthetic coding sequence
  source 1..201: mol_type = other DNA
atgctatctagaaacgacgtgaaaagactggaacggtcttgggctcagggaagcagcgagcaagaactgcactacgcgagcttacagagactacctgtgccatcctcagaggggccggacctccggggacgagataagcgggggaccaaagaggacccaagagccgattacgcgtgtatagccgagaataagcccacatag

SEQ ID NO: 122369 - DNA, 108 bp, synthetic construct
  misc_feature 1..108: note = Description of Artificial Sequence: Synthetic coding sequence
  source 1..108: mol_type = other DNA
atgcttagccgtaacgacgccccatccgtacttgtgcccggcccaggcctactgagggctggaacaccactatgtatttctgctgaggccgcctccgcccaacagtag

SEQ ID NO: 122370 - DNA, 87 bp, synthetic construct
  misc_feature 1..87: note = Description of Artificial Sequence: Synthetic coding sequence
  source 1..87: mol_type = other DNA
atgctgagcaggaatgatgggcccggccttttgcgggcaggcacacctctgtgcatctccgcagaagccgcctcagctcagcaatag

SEQ ID NO: 122371 - DNA, 141 bp, synthetic construct
  misc_feature 1..141: note = Description of Artificial Sequence: Synthetic coding sequence
  source 1..141: mol_type = other DNA
atgctctcccgaaatgatgacatctgcatctatggcggcttgggtctggggggcctgctgctgcttgctgtggtgctgctgagcgcgtgtctatgctggctgcaccgaagggaacactgtcttgcgcttgaacccctttag

SEQ ID NO: 122372 - DNA, 141 bp, synthetic construct
  misc_feature 1..141: note = Description of Artificial Sequence: Synthetic coding sequence
  source 1..141: mol_type = other DNA
atgctgtctcggaacgacgacatatgtatttacggtggccttggcctcggaggcctgctgctgctcgcagttgtgctcctttccgcctgtctttgttggttacatcgtcgtgagcattgtctggcactagagcctttgtag

SEQ ID NO: 122373 - DNA, 201 bp, synthetic construct
  misc_feature 1..201: note = Description of Artificial Sequence: Synthetic coding sequence
  source 1..201: mol_type = other DNA
atgctaagtcggaatgatgacatctgcatttatggcggattaggtctaggtggactcttgttgctagctgtggtccttctttctgcatgcctatgctggctgcaccgccgagctccatctgtactggtgcccggacctggcctcctccgagcaggcactcctctctgcatttccgcagaagccgcttcggcccagcagtag

SEQ ID NO: 122374 - DNA, 141 bp, synthetic construct
  misc_feature 1..141: note = Description of Artificial Sequence: Synthetic coding sequence
  source 1..141: mol_type = other DNA
atgttgagcagaaacgacgacatatgcatatacggcgggctggggctcggaggcctgcttctgttggccgtggtcttgctgtcagcttgcctctgttggctgcacagacgcgagcactgtcttgccctggagccgttgtag

SEQ ID NO: 122375 - DNA, 87 bp, synthetic construct
  misc_feature 1..87: note = Description of Artificial Sequence: Synthetic coding sequence
  source 1..87: mol_type = other DNA
atgctctctcgcaatgatggacccggactgttacgggccgggaccccactctgcatcagtgccgaggctgcatccgcacagcagtag

SEQ ID NO: 122376 - DNA, 294 bp, synthetic construct
  misc_feature 1..294: note = Description of Artificial Sequence: Synthetic coding sequence
  source 1..294: mol_type = other DNA
atgctcagtcggaatgacgacatctgtatctacggaggtttgggccttgggggccttctgttgctggcagtcgtgcttctgagcgcttgtctttgctggctccatcggcgcgtcaagcgcctcgagcgctcgtgggctcaggggtcttccgagcaagagctacactatgcatccctacagcggcttcctgttccatcatctgaggggcctgatctcaggggccgcgataaacgtggcactaaggaagatccacgggctgactatgcctgtattgccgagaataaacccacttag

SEQ ID NO: 122377 - DNA, 180 bp, synthetic construct
  misc_feature 1..180: note = Description of Artificial Sequence: Synthetic coding sequence
  source 1..180: mol_type = other DNA
atgctgtccagaaacgatgacatctgtatctacggtggtctagggttgggcgggctcctgttactcgcagtggtattgctatccgcttgcctctgttggctgcataggcgcggccccggactgttgcgagcaggaacaccactgtgcatatcagccgaggccgctagcgcacagcagtag

SEQ ID NO: 122378 - DNA, 294 bp, synthetic construct
  misc_feature 1..294: note = Description of Artificial Sequence: Synthetic coding sequence
  source 1..294: mol_type = other DNA
atgctgagccggaatgacgacatttgtatctacggcggtctgggcctgggtggtctgctgcttctagctgtggtcctgttaagcgcgtgtctgtgctggttgcatcgccgagttaaacgcttggagcgatcttgggcccagggcagctctgaacaagagttacactacgcttctctgcaaaggctgcctgtcccaagcagtgaggggccagacctgagaggccgcgacaagcggggcaccaaagaggatccacgagctgactatgcatgtatagccgagaacaagcccacgtag

SEQ ID NO: 122379 - DNA, 87 bp, synthetic construct
  misc_feature 1..87: note = Description of Artificial Sequence: Synthetic coding sequence
  source 1..87: mol_type = other DNA
atgctgtctagaaatgacgggccaggtctgctgcgggcggggactcccctttgtatcagcgctgaggctgcttcggcgcaacagtag

SEQ ID NO: 122380 - DNA, 111 bp, synthetic construct
  misc_feature 1..111: note = Description of Artificial Sequence: Synthetic coding sequence
  source 1..111: mol_type = other DNA
atgctgagccggaacgatgacatttgcatttacggcggcctaggcctaggtgggctgcttctcctagcagtggtactactctccgcatgtctttgctggctgcataggtag

SEQ ID NO: 122381 - DNA, 156 bp, synthetic construct
  misc_feature 1..156: note = Description of Artificial Sequence: Synthetic coding sequence
  source 1..156: mol_type = other DNA
atgctcagtagaaatgatgtcaagcgcctggaacgatcctggagattgccggtcccttcctcagagggccccgacttgaggggtagggacaaacggggcaccaaggaggatccccgtgctgactatgcctgtatcgccgaaaataagcccacttag

SEQ ID NO: 122382 - DNA, 42 bp, synthetic construct
  misc_feature 1..42: note = Description of Artificial Sequence: Synthetic coding sequence
  source 1..42: mol_type = other DNA
atgctgagtaggaacgacgaagcagcctcagcccaacagtag

SEQ ID NO: 122383 - DNA, 201 bp, synthetic construct
  misc_feature 1..201: note = Description of Artificial Sequence: Synthetic coding sequence
  source 1..201: mol_type = other DNA
atgctgtctaggaacgacgttaaaaggcttgaacggagttgggcccagggatctagcgagcaggagctccactatgctagtctgcagagattaccggtgccttcctccgagggcccggacctacggggcagagacaaacgcggtacgaaagaagacccgagggcagattatgcatgcattgccgagaataagcctacttag

SEQ ID NO: 122384 - DNA, 87 bp, synthetic construct
  misc_feature 1..87: note = Description of Artificial Sequence: Synthetic coding sequence
  source 1..87: mol_type = other DNA
atgctctcaagaaatgacggccctggtttgttacgggccggtacgcccctgtgcatctcggccgaggcagcttccgcacagcaatag

SEQ ID NO: 122385 - DNA, 315 bp, synthetic construct
  misc_feature 1..315: note = Description of Artificial Sequence: Synthetic coding sequence
  source 1..315: mol_type = other DNA
atgttgagtcgcaacgacgacatctgcatttatggcggactcggcttgggcggcctgttgttactcgccgttgttctcttgagcgcttgcctgtgttggttgcatcggagagtgaaacgactggagcggagttggcatcttctcagttggtcacaggctcagggatccagcgaacaggaactccactacgcatcattgcagcgactgcctgttcctagctcagaagggccagatctccgagggcgtgacaaacgcggcaccaaggaagatccaagagccgactatgcttgcatcgccgaaaataagccgacgtag

SEQ ID NO: 122386 - DNA, 249 bp, synthetic construct
  misc_feature 1..249: note = Description of Artificial Sequence: Synthetic coding sequence
  source 1..249: mol_type = other DNA
atgctaagcaggaatgatgatatctgtatttatggcgggttagggttaggcggcctgctgctattagccgtcgtgctgctttccgcctgcctttgttggctgcaccggagggtaaagcgcctcgaacggagctggaggctcccagtgccgagctccgaggggcccgatctccgcggcagagacaagagaggaacgaaggaggatcctagggccgactatgcctgtatcgccgagaacaagcccacatag

SEQ ID NO: 122387 - DNA, 201 bp, synthetic construct
  misc_feature 1..201: note = Description of Artificial Sequence: Synthetic coding sequence
  source 1..201: mol_type = other DNA
atgctgtctaggaacgatgtaaaacgcttagagagatcctgggcccaagggagttctgaacaggaactgcattacgcctcacttcaaaggctgccagttccatcatctgaaggccccgatttgcggggccgcgacaaacgcggtaccaaggaggatcctcgtgccgactacgcttgcattgcagagaataaaccaacatag

SEQ ID NO: 122388 - DNA, 87 bp, synthetic construct
  misc_feature 1..87: note = Description of Artificial Sequence: Synthetic coding sequence
  source 1..87: mol_type = other DNA
atgctgtctcgtaatgatggccccggactgctgagggccggaacacctctctgcatcagcgcagaggccgcttcagcacagcagtag

SEQ ID NO: 122389 - DNA, 132 bp, synthetic construct
  misc_feature 1..132: note = Description of Artificial Sequence: Synthetic coding sequence
  source 1..132: mol_type = other DNA
taaagcaggaacgatgacatctgcatatacggaggtctcggactcgggggcctattgcttctggcagtagtcctcctttctgcatgcctgtgctggctccatcgccgggaggccgcaagtgctcaacagtag

SEQ ID NO: 122390 - DNA, 249 bp, synthetic construct
  misc_feature 1..249: note = Description of Artificial Sequence: Synthetic coding sequence
  source 1..249: mol_type = other DNA
atgctcagtcgcaatgacgatatatgcatatatggcgggctgggcctgggaggcctcctgctattggccgtggtgctcctgtctgcctgcctgtgttggttacaccgtcgggtaaagcgtctagaaagaagctggcggctgcccgtcccgagcagtgagggcccggaccttagaggacgcgacaagaggggtaccaaagaagatcctcgggccgactatgcctgtattgccgagaacaaacccacctag

SEQ ID NO: 122391 - DNA, 201 bp, synthetic construct
  misc_feature 1..201: note = Description of Artificial Sequence: Synthetic coding sequence
  source 1..201: mol_type = other DNA
atgttaagcaggaacgatgtgaaacgactcgagcgatcgtgggcccaggggagcagcgagcaggagctccattatgcaagcttacagcggctgcctgtaccttcttcagaaggacctgatctcaggggaagagataagcgcggaactaaggaagatcccagggccgactacgcatgtattgctgagaataagccaacatag

SEQ ID NO: 122392 - DNA, 180 bp, synthetic construct
  misc_feature 1..180: note = Description of Artificial Sequence: Synthetic coding sequence
  source 1..180: mol_type = other DNA
atgctgagcagaaatgacgacatttgtatctatggaggactgggcctgggaggactgctgcttctggctgtggtgctcttgtcagcctgcctctgctggttgcacagacgcgggcccggcctgctgagggcaggaacaccactgtgtatctccgcagaggccgcatccgcccaacagtag

SEQ ID NO: 122393 - DNA, 87 bp, synthetic construct
  misc_feature 1..87: note = Description of Artificial Sequence: Synthetic coding sequence
  source 1..87: mol_type = other DNA
atgctttccagaaacgatgggcccgggctgttacgcgccggtactcctctctgcatctccgctgaagccgcctccgcacagcagtag

SEQ ID NO: 122394 - DNA, 249 bp, synthetic construct
  misc_feature 1..249: note = Description of Artificial Sequence: Synthetic coding sequence
  source 1..249: mol_type = other DNA
atgctgtctcgcaacgacgacatttgtatttacggagggttgggtctcggtggactcctgcttctggcagtcgtgctgttgtcagcttgtttgtgctggttgcaccggcgcgtgaagcgccttgagcggtcgtggagactgcccgtaccaagctctgaggggcccgatctgcggggtcgagacaagcgtgggactaaggaggatccgagggcggattacgcctgtatagctgaaaataagccgacgtag

SEQ ID NO: 122395 - DNA, 111 bp, synthetic construct
  misc_feature 1..111: note = Description of Artificial Sequence: Synthetic coding sequence
  source 1..111: mol_type = other DNA
atgctctctagaaacgatgacatttgtatctatgggggtctggggctaggcgggctgctgctgttggcggtagtgctgctcagtgcctgcttgtgctggttgcaccgctag

SEQ ID NO: 122396 - DNA, 222 bp, synthetic construct
  misc_feature 1..222: note = Description of Artificial Sequence: Synthetic coding sequence
  source 1..222: mol_type = other DNA
atgcttagtaggaatgatgtgaaaaggttggaaagatcttggcacctgctctcctggagtcaggctcagggctcatctgagcaggagcttcattatgcaagcctccaacgactgccggtccctagctcagaaggccccgaccttagaggtagagataagcgagggaccaaggaggaccctcgcgcagattacgcctgcatcgccgagaataaacccacatag

SEQ ID NO: 122397 - DNA, 201 bp, synthetic construct
  misc_feature 1..201: note = Description of Artificial Sequence: Synthetic coding sequence
  source 1..201: mol_type = other DNA
atgctgagccgaaatgacgttaagaggctcgagcggagttgggcccagggcagcagtgagcaggaacttcactacgcttctctgcagcgcttaccagtgccatcgtccgaaggcccggacctgagaggccgagataaacgggggaccaaagaagacccacgtgccgactacgcctgtatcgcagagaataagcccacatag

SEQ ID NO: 122398 - DNA, 87 bp, synthetic construct
  misc_feature 1..87: note = Description of Artificial Sequence: Synthetic coding sequence
  source 1..87: mol_type = other DNA
atgctgtctcgaaatgacgggccaggccttctgagggccggcacccccctgtgtatatctgccgaggcagcgtccgctcagcagtag

SEQ ID NO: 122399 - DNA, 201 bp, synthetic construct
  misc_feature 1..201: note = Description of Artificial Sequence: Synthetic coding sequence
  source 1..201: mol_type = other DNA
atgctgagcaggaacgacgacatctgtatctacggcggtctggggctcggcggtcttttattattagccgtagtcctgttgtccgcttgcctgtgctggctacacagacgggcgccatccgttctggttcccggccccggcctcctaagagccggcacacccctgtgtatctctgcagaggccgccagtgcgcagcagtag

SEQ ID NO: 122400 - DNA, 222 bp, synthetic construct
  misc_feature 1..222: note = Description of Artificial Sequence: Synthetic coding sequence
  source 1..222: mol_type = other DNA
atgctttcaagaaatgacgtcaagcgtttagaaagaagctggcatctgttgtcctggtcacaggcacagggaagcagtgagcaggaactgcattacgccagtctccaaaggctgcctgtcccctcgtcagaagggcccgacttgaggggccgggataaacggggcacgaaagaggatcctcgcgctgattatgcatgtatcgccgaaaataagccaacatag

SEQ ID NO: 122401 - DNA, 201 bp, synthetic construct
  misc_feature 1..201: note = Description of Artificial Sequence: Synthetic coding sequence
  source 1..201: mol_type = other DNA
atgctatcacggaatgacgatatctgtatctatggaggcctcggactgggcgggctgctccttcttgccgtcgtcttactgagtgcgtgcctgtgttggttgcatcggagagcaccaagtgtgctcgtccccggcccgggcctccttagagccggcactccactgtgcatctctgctgaggctgcctcggcccaacagtag

SEQ ID NO: 122402 - DNA, 87 bp, synthetic construct
  misc_feature 1..87: note = Description of Artificial Sequence: Synthetic coding sequence
  source 1..87: mol_type = other DNA
atgctgtctcggaatgacggacccggtctgttgcgtgctggaacacctctctgtatttccgcagaggcagctagcgcacagcagtag

SEQ ID NO: 122403 - DNA, 87 bp, synthetic construct
  misc_feature 1..87: note = Description of Artificial Sequence: Synthetic coding sequence
  source 1..87: mol_type = other DNA
atgttgtcaagaaatgacgggccaggactcttgcgcgcagggacacctctctgcatctctgccgaagctgcctccgcccagcagtag

SEQ ID NO: 122404 - DNA, 87 bp, synthetic construct
  misc_feature 1..87: note = Description of Artificial Sequence: Synthetic coding sequence
  source 1..87: mol_type = other DNA
atgttatctagaaatgatggtccgggcctgctgcgcgccggcacaccactatgcatctctgctgaggccgcgagtgcccagcaatag

SEQ ID NO: 122405 - DNA, 87 bp, synthetic construct
  misc_feature 1..87: note = Description of Artificial Sequence: Synthetic coding sequence
  source 1..87: mol_type = other DNA
atgttatctcggaatgatggacccggactgctgagagccggcacaccactttgcatctccgctgaggcagcatcagcccagcagtag

SEQ ID NO: 122406 - DNA, 294 bp, synthetic construct
  misc_feature 1..294: note = Description of Artificial Sequence: Synthetic coding sequence
  source 1..294: mol_type = other DNA
atgctgagtcggaatgacgatatttgtatttatggcgggctgggtctgggcggcctattgttgcttgcagttgtgctgttatcagcttgcctctgctggctacacaggagggttaaacgacttgaacgatcctgggcccagggctcttctgagcaagagctgcactacgcctcactccagcgactccccgttccatcttctgagggcccagatctcagaggacgggacaagagaggaaccaaagaggaccctcgcgcggactacgcttgtattgcggaaaacaagcccacttag

SEQ ID NO: 122407 - DNA, 222 bp, synthetic construct
  misc_feature 1..222: note = Description of Artificial Sequence: Synthetic coding sequence
  source 1..222: mol_type = other DNA
atgctatcaagaaacgacgtgaaaagactggagcggtcctggcacctgctgtcatggtcccaagcgcagggcagctccgagcaggagttgcactacgcctcgctccagagactgcccgtgccctcctccgagggaccagaccttcgcgggagagacaagcgagggactaaggaagacccgagagcggactatgcctgcattgccgagaacaagccaacgtag

SEQ ID NO: 122408 - DNA, 87 bp, synthetic construct
  misc_feature 1..87: note = Description of Artificial Sequence: Synthetic coding sequence
  source 1..87: mol_type = other DNA
atgctgagccggaacgacgggcccggacttctgagggcaggtactcctttatgtatttccgctgaagccgcaagcgcccagcagtag

SEQ ID NO: 122409 - DNA, 294 bp, synthetic construct
  misc_feature 1..294: note = Description of Artificial Sequence: Synthetic coding sequence
  source 1..294: mol_type = other DNA
atgctgtcccggaacgacgacatctgcatttacggaggcctgggtctgggcggtcttcttctcctcgctgtggtgctgttatccgcatgtctctgttggcttcaccgacgggttaagaggctcgagaggtcgtgggcacagggcagcagcgaacaggagcttcattacgcgtcccttcagaggcttcccgttccatcctctgaggggcccgatctaagggggcgggataagcgcggcactaaggaagatccccgcgcagattatgcgtgcatagctgagaacaagccaacctag

SEQ ID NO: 122410 - DNA, 201 bp, synthetic construct
  misc_feature 1..201: note = Description of Artificial Sequence: Synthetic coding sequence
  source 1..201: mol_type = other DNA
atgctttcacgcaacgacgtaaaacggctcgagaggtcttgggcacaaggcagctctgagcaggagctacattatgcatcgctgcagcggttacccgtccccagtagcgagggcccagacttgagagggagggacaagcgcgggaccaaagaagacccccgggcagattatgcatgtattgctgagaataagccaacttag

SEQ ID NO: 122411 - DNA, 87 bp, synthetic construct
  misc_feature 1..87: note = Description of Artificial Sequence: Synthetic coding sequence
  source 1..87: mol_type = other DNA
atgctatcacggaatgacggtcctgggctgttgcgcgcgggaacacctttgtgcatcagcgctgaagccgcatctgcacaacagtag

SEQ ID NO: 122412 - DNA, 201 bp, synthetic construct
  misc_feature 1..201: note = Description of Artificial Sequence: Synthetic coding sequence
  source 1..201: mol_type = other DNA
atgctctcccgcaacgacgtgaaaaggctcgagcgaagttgggcccagggcagctccgagcaggaattacactatgcatcgcttcagcggttacccgtcccctccagcgaaggaccagatcttagaggccgggataagcgggggacaaaagaggatcccagggcagattacgcttgcatcgcagagaacaaaccaacgtag

SEQ ID NO: 122413 - DNA, 42 bp, synthetic construct
  misc_feature 1..42: note = Description of Artificial Sequence: Synthetic coding sequence
  source 1..42: mol_type = other DNA
atgctgagtcggaacgatgaggctgcttctgcgcaacagtag

SEQ ID NO: 122414 - DNA, 132 bp, synthetic construct
  misc_feature 1..132: note = Description of Artificial Sequence: Synthetic coding sequence
  source 1..132: mol_type = other DNA
tatcgcggcatgatgatatatgtatctactggtgcctgggggtgggccggcagttgcttttggcagtggagtttctgtccccccgcctgcgtagggtgcatcgaggaacggttacctgtgccatcttcctag

SEQ ID NO: 122415 - DNA, 201 bp, synthetic construct
  misc_feature 1..201: note = Description of Artificial Sequence: Synthetic coding sequence
  source 1..201: mol_type = other DNA
atgctgtccaggaatgacgtgaagagactggaaaggtcgtgggcccaggggtcgagtgagcaagaactgcactatgcctcactacagagacttcctgtgccttccagtgaaggacccgatctgagaggtcgggacaagaggggaaccaaagaggatcctagagcagactatgcctgcatcgccgaaaacaagcctacttag

SEQ ID NO: 122416 - DNA, 294 bp, synthetic construct
  misc_feature 1..294: note = Description of Artificial Sequence: Synthetic coding sequence
  source 1..294: mol_type = other DNA
atgttgtctaggaatgacgatatttgtatctacggaggtctgggtttaggtgggctactccttctggctgtggtcctgctgtccgcatgtctgtgttggcttcaccgtcgcgtgaagcgcctggaacgctcatgggctcagggctcttcagagcaagaactgcactacgctagcttgcagcggctgcctgtcccttcctctgagggtccagatttgagagggcgcgacaaacgtggcactaaagaggaccctcgtgcggattacgcctgcattgccgagaacaagcctacttag

SEQ ID NO: 122417 - DNA, 222 bp, synthetic construct
  misc_feature 1..222: note = Description of Artificial Sequence: Synthetic coding sequence
  source 1..222: mol_type = other DNA
atgctgagtaggaacgatgtcaaacgtctggaacgctcatggcaccttctgagttggtctcaggctcagggatctagtgaacaggagctacactacgccagtcttcagcgtctgccagttcccagttccgagggccccgatctgagaggacgtgacaagcgaggcacaaaagaggatccacgcgcagattacgcctgcattgccgaaaataagcctacttag

SEQ ID NO: 122418 - DNA, 42 bp, synthetic construct
  misc_feature 1..42: note = Description of Artificial Sequence: Synthetic coding sequence
  source 1..42: mol_type = other DNA
atgttaagcaggaatgacgaggccgctagtgctcagcaatag

SEQ ID NO: 122419 - DNA, 276 bp, synthetic construct
  misc_feature 1..276: note = Description of Artificial Sequence: Synthetic coding sequence
  source 1..276: mol_type = other DNA
atgatctacgtgagcacgggagcctggggctgggccggctcttgtttctggcagtggagcttttgtcctcccgcgtgcgttgggtgcatcgaagaacacctgctgtcatggtcccaggcacagggcagctcagaacaggagctgcactatgcaagcttgcagagacttccagtgccgtcatcggagggccctgatctgaggggccgagataagagaggtacgaaagaggacccacgggccgactacgcctgcatcgcagagaacaaaccaacctag

SEQ ID NO: 122420 - DNA, 276 bp, synthetic construct
  misc_feature 1..276: note = Description of Artificial Sequence: Synthetic coding sequence
  source 1..276: mol_type = other DNA
atgatctacgtgtctacaggagcttgggggtgggctggaagttgcttttggcaatggagcttttgtccaccagcctgtgtcggctgtattgaagagcatctgctcagctggtcccaggcacagggctcatctgagcaggagctccactatgcctcgctgcagcgcctgccagtgccttcttccgaaggtccagatctgcgaggacgcgacaaacgcgggacaaaggaagacccccgggctgactacgcctgtatagccgagaacaagcctacatag

SEQ ID NO: 122421 - DNA, 276 bp, synthetic construct
  misc_feature 1..276: note = Description of Artificial Sequence: Synthetic coding sequence
  source 1..276: mol_type = other DNA
atgatttatgtgtccacaggagcctgggggtgggctggatcctgcttctggcagtggtcattctgccctcctgcctgcgtgggctgtatagaggagcatctgttaagctggtctcaggcacaaggatcttccgagcaggaactgcactacgcgagcctccaacgcctcccagtgccaagctcagaagggcctgacctacggggacgcgacaagagaggtacaaaggaggaccctcgagcagactatgcatgcattgccgagaataaacctacctag

SEQ ID NO: 122422 - DNA, 108 bp, synthetic construct
  misc_feature 1..108: note = Description of Artificial Sequence: Synthetic coding sequence
  source 1..108: mol_type = other DNA
atgttatcacgtaacgacgccccctccgtgttagtgcccggccccggccttctcagagctggcactccattatgcatctcagcagaggccgcgagcgcccagcagtag

SEQ ID NO: 122423 - DNA, 276 bp, synthetic construct
  misc_feature 1..276: note = Description of Artificial Sequence: Synthetic coding sequence
  source 1..276: mol_type = other DNA
atgatctatgtgagtacgggggcctggggttgggcaggcagctgtttttggcagtggagcttttgtccacccgcttgcgtgggctgtattgaggaacatctgcttagctggagccaggctcaggggtccagtgaacaggagctccactacgccagtctccagcgtctgccagtccctagctcagagggccctgatttgcgaggccgagataagcggggtaccaaggaagatcccagagctgattatgcttgcatagccgaaaacaaacccacctag

SEQ ID NO: 122424 - DNA, 108 bp, synthetic construct
  misc_feature 1..108: note = Description of Artificial Sequence: Synthetic coding sequence
  source 1..108: mol_type = other DNA
atgttgtcccggaacgacgctccatcagtcctagtcccaggccccgggttgctgcgggccggtactcctctctgtattagtgccgaggccgcctccgctcagcaatag

SEQ ID NO: 122425 - DNA, 108 bp, synthetic construct
  misc_feature 1..108: note = Description of Artificial Sequence: Synthetic coding sequence
  source 1..108: mol_type = other DNA
atgctctcacggaatgacgccccctctgtgctcgtgcctgggcccggcctgttgcgggccggaacacctttatgcatctcagcagaggcggccagcgcacagcagtag

SEQ ID NO: 122426 - DNA, 276 bp, synthetic construct
  misc_feature 1..276: note = Description of Artificial Sequence: Synthetic coding sequence
  source 1..276: mol_type = other DNA
atgatttacgtgagcacaggagcctggggctgggcgggcagttgcttttggcagtggagcttctgtccccccgcgtgtgtcggctgtattgaagaacacttgctgagttggtcacaggcccagggctccagtgagcaggagctgcattacgcttccctgcagagactgccagtcccctcctccgagggaccagacttaagaggccgagataagcggggaaccaaggaagatcctcgagcggactacgcgtgcatagccgagaataagcccacatag

SEQ ID NO: 122427 - DNA, 276 bp, synthetic construct
  misc_feature 1..276: note = Description of Artificial Sequence: Synthetic coding sequence
  source 1..276: mol_type = other DNA
atgatctatgtatcgacaggcgcgtggggctgggctgggtcctgtttctggcagtggagcttctgcccacctgcttgtgtgggctgcattgaggaacatcttttgtcctggagccaggcacagggcagcagcgaacaggagctgcattacgcttctctgcagcggctgcccgtcccgtctagtgagggacccgacttgcgcggacgcgacaagagaggcaccaaagaagatccaagggccgattatgcatgcatcgctgagaataagcctacatag

SEQ ID NO: 122428 - DNA, 108 bp, synthetic construct
  misc_feature 1..108: note = Description of Artificial Sequence: Synthetic coding sequence
  source 1..108: mol_type = other DNA
atgctctctaggaacgacgcccccagtgtcctggtgcccggtcccgggctgctccgagcagggaccccactgtgcatcagtgctgaggcagcatctgcacagcagtag

SEQ ID NO: 122429 - DNA, 108 bp, synthetic construct
  misc_feature 1..108: note = Description of Artificial Sequence: Synthetic coding sequence
  source 1..108: mol_type = other DNA
atgctctctaggaacgacgcaccaagcgttctcgttcctggaccaggccttctgcgggccggcacccccctgtgtataagtgcagaggcagccagtgctcagcagtag

SEQ ID NO: 122430 - DNA, 108 bp, synthetic construct
  misc_feature 1..108: note = Description of Artificial Sequence: Synthetic coding sequence
  source 1..108: mol_type = other DNA
atgttgagcaggaacgacgcaccatcggttttggtgccaggccccggactattgagggcggggacacccttgtgtatcagcgcggaagctgcatctgcccagcagtag

SEQ ID NO: 122431 - DNA, 108 bp, synthetic construct
  misc_feature 1..108: note = Description of Artificial Sequence: Synthetic coding sequence
  source 1..108: mol_type = other DNA
atgctgagcaggaacgatgctccgtcggtcctcgtccctggtcctgggttactgcgcgccggcactcccctttgtatcagtgcggaggctgccagcgcacagcaatag

SEQ ID NO: 122432 - DNA, 276 bp, synthetic construct
  misc_feature 1..276: note = Description of Artificial Sequence: Synthetic coding sequence
  source 1..276: mol_type = other DNA
atgatctatgtgagtaccggcgcatggggctgggctggttcctgtttttggcagtggagcttttgtcctcctgcttgtgtaggatgcatcgaggaacacctgctcagctggtcacaagcacagggcagtagtgagcaggagctgcactacgcctctctacaacgactccctgttccatcttctgagggacctgatttacggggcagagacaagagaggcaccaaggaggaccctcgtgcggattatgcctgcattgccgaaaataagcccacctag

SEQ ID NO: 122433 - DNA, 843 bp, synthetic construct
  misc_feature 1..843: note = Description of Artificial Sequence: Synthetic coding sequence
  source 1..843: mol_type = other DNA
atggaacgtgaaatggtattatgtctggcccagactatccacactcaggaagatcttcccagacccagcatatccgcggagcccggcacagtcatccctctaggatctcacgtgacatttgtgtgtagaggacccgtgggggtccagacatttcgcttggagcgggaaagccgtagtacatacaacgacacagaagacgtttcgcaggcttctcctagtgagagcgaggcaaggttccgaatagacagcgtttctgaggggaatgcaggcccttaccggtgcatctattacaagcccccaaaatggagtgaacaatccgactacctagagctcctggtgaaggagacaagcggtggtccagatagccccgacacagagccaggtagttccgccggaccaactcaacggccctccgataattcacacaacgaacatgctcccgccagccagggccttaaggctgagcacctgtacatcctgatcggtgtatcggtcgtttttttgttctgcctactacttctcgtgttgttttgcctgcaccgccagaatcagattaagcagggacccccgcggagcaaggacgaggaacagaaaccccagcagaggccagacctcgccgtcgacgtcctcgagcgaacggccgataaggctacggtgaacggactccccgaaaaggacagagagacagacacgtccgctttggccgctggcagctcccaggaggttacgtatgcacagctggatcactgggctctgactcagcggactgcacgggctgtttctcctcaatctaccaagccaatggctgaaagtataacatacgccgccgtggctcggcactag

SEQ ID NO: 122434 - DNA, 813 bp, synthetic construct
  misc_feature 1..813: note = Description of Artificial Sequence: Synthetic coding sequence
  source 1..813: mol_type = other DNA
atgagtcctcacccaacagccctgttaggtctagtgctatgcttggcacagacaatccacacacaggaggaggatctcccaagaccgtccatcagtgccgagcctggcacagtgatacctctgggatcccacgtgacttttgtttgtcgcgggcccgtgggggtgcaaaccttccgtctggaacgggagtcacgtagcacttacaacgacactgaagatgtctctcaggcttcaccgagtgaatcggaggctcggtttaggattgatagcgtcagtgagggcaacgccggaccctataggtgtatatattataagccacccaaatggtcagaacagtcagactatttggagctgctcgtcaagggtccaactcagagaccaagcgataattctcacaatgaacatgctcccgccagccagggcttgaaagccgagcacctctacattttgattggcgtgagcgtggtgttcctcttttgtctgctgctcctcgtacttttttgcttgcacaggcaaaaccagataaagcagggccccccccgatctaaagatgaggaacagaagccacagcaacgtccagacttggcagttgacgtgttagaaagaacagcagacaaggctaccgtcaatgggctacctgagaaagatcgtgagaccgatacatccgccctggccgccggaagctcccaggaggttacatatgcgcagttagaccattgggccctgacccaacgtaccgcgcgagctgtttcaccacagtctactaaacctatggctgagagtataacctatgcagcggtggctaggcattag

SEQ ID NO: 122435 - DNA, 864 bp, synthetic construct
  misc_feature 1..864: note = Description of Artificial Sequence: Synthetic coding sequence
  source 1..864: mol_type = other DNA
atgagcccccaccccacagctttgctcggcctggtgctctgcctagcgcaaaccattcatacccaagaagaggacctcccacggccctccatttctgctgagcctggaactgtgattcccctgggcagtcatgtgacattcgtgtgtagaggtcccgtgggcgtgcagacatttaggcttgagagagaaagccgttcaacttacaacgatactgaggatgtgagtcaggcttcccccagcgagtctgaggcgcgattccgtattgacagcgtgagcgagggcaatgcgggaccgtataggtgtatctactacaagcccccaaaatggagcgagcaatcagattacctggagttgcttgtgaaggagaccagcggaggccccgactcaccggacacagagcccggttcatcggctggcccaacacagaggccatccgataactctcataatgagcacgcacccgcgagtcagggcctgaaggctgagcacctctatatattgatcggtgtgtcggtggtctttctgttttgtctcctgttgctggtactcttttgcctacatcgccagaaccagatcaaacagggcccacctcgctctaaagacgaggagcagaagccccagcagcggcctgatttggcggtggacgtactagagcgaaccgccgataaagccacggtgaacgggcttcctgagaaggatcgggagaccgatacaagcgctctcgccgctggttcgtcacaagaggtgacctacgcccagcttgaccattgggcacttacccagaggaccgcccgcgcagtgtccccacagtctactaaaccaatggccgaatccatcacttacgctgccgtggctagacactag

SEQ ID NO: 122436 - DNA, 1545 bp, synthetic construct
  misc_feature 1..1545: note = Description of Artificial Sequence: Synthetic coding sequence
  source 1..1545: mol_type = other DNA
atgctcacccgcgtgaagagcgcagtggccaattttatgggaggtatcatggctgggtcaagcggaagcgagcatgggggcgggtcctgcggaggtagcgatctgccactgcgattcccctatggtcggccagagttcctgggcttaagccaggatgaagtcgaatgtagcgctgatcatatcgctcgaccgatccttattctaaaagagacaagaagacttccttgggctaccgggtatgctgaagtgataaatgctgggaaatcgacacacaacgaggatcaggcctcttgtgaagtactcaccgtcaagaagaaggcaggcgcggtcacctcaacccccaatagaaactcctccaagaggaggagtagcctaccaaacggtgaaggactccagctcaaggaaaattctgaatccgaaggagtcagctgtcactactggtccctgttcgacggccatgccggctctggagccgctgtggtagcatcgcgcctgttgcaacaccatattacagagcagctacaggacattgtggatatactcaaaaacagtgcagtgttgccaccaacctgcctcggggaagaaccagaaaatacccccgctaactctagaacactgacacgcgctgctagtttgaggggtggagtgggcgcgcccggcagtccctcaacaccaccaacacgcttcttcacagagaagaagataccacacgaatgtcttgtgattggcgcgctggaaagtgccttcaaggagatggacctgcaaattgagagagagcggtcatcctacaatatttctggaggctgcacagccctgatagtgatttgcctccttgggaagctctatgtggcaaacgccggtgacagccgcgcaatcatcatccggaatggggagatcattcccatgtcctccgaatttactccagagaccgaacggcagagactgcaatacctcgcgttcatgcaaccacatctgctgggcaatgaatttactcacttagagttcccacgccgtgtgcagaggaaagagcttggcaagaagatgctgtatcgggacttcaacatgacagggtgggcgtacaagaccattgaagatgaggatctcaagttcccactgatttacggggaggggaaaaaggctcgcgttatggctaccattggagtgacgaggggcttgggtgaccatgaccttaaggttcacgactccaacatttatatcaagcctttcctgtcttctgcgccagaagtgaggatttacgatcttagcaaatatgaccatggttctgatgatgtcctgattctcgctactgatggactatgggatgtgctgagcaatgaggaagtcgctgaggccataactcagttcctacccaattgcgatccagacgaccctcatcgttacacgctggccgcccaagacctcgtgatgagggcccgaggggttctcaaagataggggctggcggatttccaacgaccgcctcggcagtggggatgacatatccgtgtacgtgatacccctgattcacgggaataaactgagctag

SEQ ID NO: 122437 - DNA, 1527 bp, synthetic construct
  misc_feature 1..1527: note = Description of Artificial Sequence: Synthetic coding sequence
  source 1..1527: mol_type = other DNA
atgttgccgcagcgaaatctgtctaagcgtcaggttcctactatgcatatcccagtaaaaaccaggcgtctgctcgccgcgttaaaagtgcttgacacaaaggatctgacaattgaaaaagtagtcataaatggtcaggaggtgaagtatgctctgggtgagcgccagtcctataagggcagccctatggagattagtctgccaattgccctgagcaagaatcaggagattgtgattgaaatatcattcgagaccagtcccaaatcttccgcgttgcagtggctgaccccagaacagaccagcgggaaggaacatccttatctgttctcccagtgccaagccattcactgtcgcgcaatcctcccctgccaggacacaccatctgtaaaactcacttatactgcggaagtctctgtgccaaaggaattagttgccctcatgagtgctatcagggatggggagacgcctgatccagaggatccatctcgtaagatttataaatttatccagaaggtacctatcccctgctacctgattgccctggtggttggcgctctcgagtctcgacagatcggcccaagaactctggtgtggtccgaaaaagagcaggtggagaagtctgcctatgaattctctgagacggaaagcatgctcaagatagccgaggatctgggcggcccttacgtatggggacagtacgacctcctggtgctccctccctcgttcccctacgggggcatggagaatccatgcctgacattcgtgactcccaccctactggccggagacaagagtctgagtaacgtgatcgcacacgagatcagtcattcctggacgggcaatctggtgacaaataagacatgggatcacttctggctgaatgaagggcacacagtgtatttggagcggcacatatgtgggcgtctgttcggcgaaaagtttcggcattttaacgcgctggggggttggggggagttacagaactctgtgaagacttttggagagacacatccattcacgaagctcgttgtggatctgactgatattgacccagacgtagcctatagtagtgtgccctacgaaaagggtttcgctttgctattttacttggagcagcttctgggcggacctgagatttttctcggcttcctgaaggcatatgtcgaaaaattttcatacaagagtatcacaactgatgactggaaggactttctgtattcttactttaaagacaaagttgatgtgctgaatcaggtggactggaacgcatggctctattcacccgggctgccccctatcaaacccaactacgacatgacccttaccaacgcgtgcatcgccctgtcccagaggtggattactgcaaaagaagatgatctaaatagctttaatgcgacagacctaaaggacctctcatcacaccagctgaatgagtttcttgcccagacactgcagcgtatggctgccgccctgcatagtattcaggtgggggggcggaacagctttggcgccaaggatgggaactag

SEQ ID NO: 122438 - DNA, 1764 bp, synthetic construct
  misc_feature 1..1764: note = Description of Artificial Sequence: Synthetic coding sequence
  source 1..1764: mol_type = other DNA
atgctcccccagcgcaatcttagcaaaaggcaggtcccaactatgcacattcctgtgaagacgcgacggcttctcgcagctctcaaggtactggacactaaggacctaactatcgagaaggtcgtcatcaatgggcaagaagttaaatacgctttaggcgagcgtcagtcttataagggaagtccgatggagatctcgcttccaattgctttaagcaaaaaccaggaaatcgttattgagatctcatttgagacctcacccaagagcagcgcgctgcagtggctcactccggaacaaaccagcggcaaggagcacccctacctgtttagtcaatgccaagctattcactgcagggccattctgccctgccaggacaccccaagcgttaagctgacttatacagccgaagtgagcgttccaaaagagcttgtggccctgatgagcgccatccgggatggcgagaccccagaccccgaggacccttcaaggaaaatttacaaattcattcagaaagtgcccataccttgctacttgatcgctttagtcgttggagccctcgagtccagacagattggccctaggaccctcgtttggagcgagaaggagcaggtcgagaagtccgcttacgaattctcagaaacagagtccatgctgaaaatcgcggaggacctgggcggcccatacgtgtggggacaatatgatttgctggtgttacccccgagcttcccctatggcggtatggaaaacccctgcctcaccttcgtgactccgacactgttggcaggggacaagagccttagcaacgtgatcgcgcatgagatctcacactcttggactgggaatctcgtgactaacaagacttgggaccatttctggctcaacgaggggcacacagtctatctggagcgccatatttgtggtcggctgttcggggaaaaattccgtcattttaatgcccttggcgggtggggcgaacttcagaattcagtgaaaactttcggggaaacccacccatttaccaagctggtggtggacctgaccgatatcgacccggatgtggcctattcaagcgtcccatatgagaagggttttgccctccttttctatctggaacagctcttgggcggcccagaaattttcctcggttttctaaaagcctatgttgaaaagttctcttataagagcattaccactgatgactggaaggatttcttgtactcatatttcaaggacaaggtggacgtgctaaaccaggtggattggaatgcttggttatacagtccaggattaccgcccattaagcccaattacgatatgactctcaccaacgcctgtatcgccctcagccagaggtggataacagcgaaggaggacgatcttaactccttcaacgccacggacctcaaagatttgtcttcccaccagctcaacgaattcctggcgcagaccctgcagcgggccccgcttcctctggggcatattaaacggatgcaagaggtgtacaattttaatgcaattaataattctgaaattaggtttagatggctgcggctgtgtatccagagcaagtgggaagacgcaatacccctggccctcaagatggctaccgagcaggggaggatgaaattcactagacccctttttaaagatctcgccgcatttgataagagtcacgatcaggccgtccggacgtaccaggaacataaagcatcgatgcaccctgtaaccgctatgctcgtggggaaagacttgaaagtggattag

SEQ ID NO: 122439 - DNA, 1059 bp, synthetic construct
  misc_feature 1..1059: note = Description of Artificial Sequence: Synthetic coding sequence
  source 1..1059: mol_type = other DNA
atgaatactacatcgagtgctgctccacctagtcttggcgtcgaattcatcagtcttctcgctatcatactcttatccgtagcactggcggttggcttacctggtaattccttcgttgtgtggtcaatcctgaagcgcatgcagaagcggtcagtcaccgcactcatggttttaaacctggccctcgccgatctcgcggttctcctgacagctccattcttccttcatttcttggcgcagggtacttggagctttggtcttgccggatgtagattgtgtcattacgtgtgcggcgtgagtatgtatgctagtgtgttgctgatcaccgctatgagcctcgaccggagcttagctgttgcccgccctttcgtttctcaaaagctgagaactaaggccatggcccggcgggtgctggccggaatctgggttttatcatttttgttggcaacccctgtcctagcctacagaactgtggtgccttggaagactaatatgtccctatgttttcctcggtacccttcagagggccaccgcgccttccatttgatctttgaggccgtcactggattcctgctacccttcctggcggtagtggcatcttactcagatattggcagacgtctgcaagcgagaagatttcgacgaagccgacggaccggacggctggttgtgttgatcatcctcaccttcgctgccttctggctcccttatcacgttgtgaacctagctgaggctggtcgggcattggccggtcaggccgccgggctgggtctggtaggcaagaggctctcattggctagaaatgtgctcattgccctggcctttctgtcctcttcagtgaatcctgtcctgtacgcctgtgctggcggcggcctgctgcgcagcgcaggcgtcggatttgtcgccaaactgctggagggaaccggctcagaagcttcctcaactcgtagaggaggttccctcggccagaccgcacgcagtggtcctgccgctttagaacccggcccaagtgaatctctaaccgcatcatccccactgaagctgaacgaactgaattag

SEQ ID NO: 122440 - DNA, 1059 bp, synthetic construct
  misc_feature 1..1059: note = Description of Artificial Sequence: Synthetic coding sequence
  source 1..1059: mol_type = other DNA
atgaacaccacatcttcagctgctcccccatcgctgggggtggagttcatcagcctcctggcgataatccttctgtccgttgccctagccgtcggtcttccggggaatagctttgtggtctggtccatccttaagagaatgcagaagagatccgttactgcactaatggtgttgaacctagccttagctgacctggcagtcctcctgaccgcacctttcttcctgcacttcctcgcccaggggacatggtccttcggcctggctggctgcagattgtgccactatgtgtgcggtgtgagcatgtacgccagcgtgctcctgatcactgcaatgtccctcgacaggtctctggccgtcgctaggccatttgtgagtcaaaaactccggactaaggcgatggcacgtagggttctcgccggcatctgggtattatcattcctgttggccactccagtcctggcataccgcaccgtggttccatggaaaaccaatatgtcactctgcttcccccgctatccgtcagagggccaccgcgcttttcacttgatctttgaggcagtaaccggttttctgctcccatttctggctgttgtggcctcatattccgatattgggaggcggcttcaagcaagaaggttccgacggtcccggcgtaccggtcgcctcgtagtcctgatcattctaactttcgccgccttctggctgccatatcacgtcgtgaacctagcagaggcagggcgtgcattggcggggcaggccgccggccttggcctggtggggaaacgccttagtctggcaaggaatgtacttatcgctctggcattcctgagttccagcgtgaacccggtgctatacgcatgcgctggcggggggctcctcaggtctgcaggcgtggggtttgttgctaagctactggaagggacaggcagtgaagcttcttccactagaagagggggtagcctaggccagacagcccggtctggcccagcagctctcgagccggggccttccgaaagtctgaccgcatcgtcaccactcaagctcaacgagctgaactag

SEQ ID NO: 122441 - DNA, 1059 bp, synthetic construct
  misc_feature 1..1059: note = Description of Artificial Sequence: Synthetic coding sequence
  source 1..1059: mol_type = other DNA
atgaacactacaagctccgcagctcccccatccctgggcgtggaattcattagtttgctagccattatcctgctaagcgtcgcattggccgttggcctgccgggcaattctttcgttgtttggtcaattttgaagagaatgcaaaagcggtccgtgacggcactcatggtcctaaacttagcccttgccgaccttgccgtcctgctcaccgcccccttcttcctgcacttcttggcgcagggtacctggagctttggcttggccggatgtcgcttatgccattatgtgtgcggcgtttccatgtacgcatcagtcttactaatcacagctatgagtctggataggtccttggcagtggcaaggccctttgtttcacagaaactccggacgaaggcaatggctcgccgggtccttgcaggcatctgggtgttatccttcctgttagcgaccccagttctggcctacaggactgtagtcccttggaaaaccaacatgtctttgtgttttccacggtacccctcagagggacatcgtgcctttcatcttattttcgaggccgtcacaggcttcctattacccttcttggctgtggtcgcgagctactccgatattgggcggaggttgcaggcaagacgcttccggagatcacggagaacagggcgcttagtcgtgctgattattctgacattcgctgctttttggctcccatatcacgtggttaatctggccgaagctggtagggctctggccggccaagccgccggactggggcttgtgggcaaacgtctgagccttgcacgtaacgtcttaatcgcactagcattcttgagcagctcggtcaaccccgtgctgtatgcttgtgcaggcggaggactgctacgctctgcaggagtgggcttcgtggcgaagttgctggaaggaacaggcagcgaagccagcagcacaagaagaggtgggagcctcggccaaactgccagatcaggccccgcggccctcgagcccgggccctcggagagccttactgcttccagtccactgaagctgaacgagctgaactag

SEQ ID NO: 122442 - DNA, 309 bp, synthetic construct
  misc_feature 1..309: note = Description of Artificial Sequence: Synthetic coding sequence
  source 1..309: mol_type = other DNA
atgaatactacctctagcgccgcacctccatccctgggggtcgagtttatatcactgctggccatcattctgttatctgtggccctagctgtcggactcccaggcaactccttcgtggtctggagtatcctgaagcgcatgcagaagagatccgtgacagctcttatggttctaaatctcgctttggccgacctagccgtcctcctgacggcaccattctttttacacttcctcgcccagggcacctggtcattcggactggccggttgccgcctctgccattacgtctgcggagtgagcatgtactag

SEQ ID NO: 122443 - DNA, 483 bp, synthetic construct
  misc_feature 1..483: note = Description of Artificial Sequence: Synthetic coding sequence
  source 1..483: mol_type = other DNA
atgtctgtgtgttaccgaccgcccggtaatgagacactcctgagctggaaaaccagcagggccactggaaccgcctttttgcttctggctgcccttctaggccttccaggaaacggctttgtcgtgtggtccctggccgggtggcggccagctcgtgggcgcccactagctgccactctagtcctgcatctggcactcgctgacggcgcagttctgttacttactcccctcttcgtggcctttctaactcggcaagcttggcctcttggacaggccggctgcaaggctgtgtactacgtgtgtgcgctttcaatgtacgcaagcgttctcctcaccgggctcttgtcacttcagaggtgtctggcggtgacccgtccatttctggccccgcggcttcggagtccggcccttgcaaggaggctgctgctggccgtttggttggccgcgttgctcttagccgtcccagcagccgtctacaggtag

SEQ ID NO: 122444 - DNA, 1170 bp, synthetic construct
  misc_feature 1..1170: note = Description of Artificial Sequence: Synthetic coding sequence
  source 1..1170: mol_type = other DNA
atggccccatcacaccgggcgagccaggtcggcttttgccctacccctgaaaggccactctggaggttgccgcccacttgccgtccacgccgaatgagtgtctgttatagaccaccaggcaacgaaacgctgctgtcttggaagacctcccgtgccacaggtactgcattcctcttgctggccgcactgctgggcctccccggaaacgggtttgtggtgtggagcctggccggttggcgaccagcccgaggcaggccattagctgccactctcgtgttacatctcgccttggctgatggagccgtgctgctgttgacccccctctttgtggcgttccttacgagacaagcctggcccctcggccaggccggatgtaaggcagtgtattatgtttgtgctctgtcaatgtatgcgagcgtactgctcactggattgttatctttgcagcggtgcctggctgtcacacgaccgttcctcgcgccacgtttgaggagccccgccctcgcgcggagacttttactggcagtgtggttggcagcactcctgctggccgttcctgccgcagtataccgtcacttgtggcgcgaccgcgtgtgtcagctctgtcatccaagccccgtgcatgcagccgcccacctgtcactggagacactgaccgcttttgtactgccttttgggttaatgctaggatgctatagcgtcactctcgccagattgcggggtgcaagatggggatcaggtcgtcacggtgccagagtgggtcgcttggtgagcgccatcgtgctcgcatttggactcctgtgggctccttaccacgcagtgaacttgttgcaggccgttgccgctctcgccccccccgagggcgccctggccaagctgggaggggctggacaggctgcaagggctggaacaacagctctcgcctttttcagtagcagcgtgaaccctgtgctgtacgtatttacagccggtgatttgctgcccagagcgggcccccggtttttgactcggctgtttgaagggtccggcgaggctcgcggcggaggtagatcgagggaaggtactatggagcttcgcactactccacaactaaaggtggtaggccaggggcgcgggaacggggacccgggggggggcatggaaaaggacggaccagagtgggatctgtag

SEQ ID NO: 122445 - DNA, 960 bp, synthetic construct
  misc_feature 1..960: note = Description of Artificial Sequence: Synthetic coding sequence
  source 1..960: mol_type = other DNA
atgtctgtgtgctatagaccgcctggcaacgagacccttctgagttggaaaaccagccgcgctacaggtactgcttttctactactcgctgccctactgggtctgcccggcaacggtttcgtggtgtggtctttggccggctggaggcctgccagggggcgccctttggcagccaccctggtgttacacctcgccctggccgatggggcagttctgctgctcaccccactctttgtggcattcctcacaagacaggcttggcctttaggccaggcgggctgcaaggcagtctactatgtgtgcgccctttcaatgtacgcctccgtgctccttactggactgcttagcctccagcgatgcctggcagtcaccaggccattcctggcgccacggttgcggtctccggccttagcccgcaggctgctgctcgccgtctggctagccgctttgcttctcgccgtcccggctgccgtgtatcgacatctgtggagagaccgtgtctgtcagctgtgtcatcctagtccagttcacgcagcagctcatctgagtctcgaaacacttaccgctttcgtgctgccgttcgggctgatgctcggatgctactctgtcacacttgccaggctacgaggagcccgttggggatctggacggcatggtgcgcgtgtaggtagattagttagcgcaattgtgttggctttcggactcttgtgggccccttaccacgctgttaatttgctgcaagccgtggctgctctggctcctcccgaaggggccctggccaagctgggaggggcaggccaggcagcaagagccgggaccaccgccttggcattttttagctcgtccgtgaaccctgtactgtacgtgttcactgcgggggatcttctgcctagggctgggcctaggttcctcacgagactcttcgagggatccggagaggcccgcggcggtggccgctag

SEQ ID NO: 122446 - DNA, 1077 bp, synthetic construct
  misc_feature 1..1077: note = Description of Artificial Sequence: Synthetic coding sequence
  source 1..1077: mol_type = other DNA
atgtccgtgtgttatcgtcctcccggcaacgagactctgctttcttggaagacatcccgcgcgactgggacagcttttctcctgcttgctgcactgctaggcctgccaggaaacgggtttgtggtttggtctttggccggttggcggcccgcgagaggcaggccgttggccgcaactttggttctgcatctcgctttagccgatggagccgttctgttgttgactcccctgttcgtggcctttctcacccgccaggcctggcccttaggacaggcagggtgcaaagccgtgtattatgtatgtgcactgagcatgtacgcctctgtgctgctgaccggtttgcttagccttcagcggtgtctcgcagttaccaggccgtttctagctcctagattacggagccctgcactcgcccgccggttgttactggctgtctggctcgcagccctgctccttgccgtgccagcagcagtctataggcatctgtggagagaccgggtgtgtcagctttgtcacccatcccctgtgcacgctgccgcccacctgtcattggagacgcttaccgccttcgtcctgccgtttgggttgatgctcgggtgttacagtgtgacactggcccgcttacgcggggctagatggggctccggcaggcatggggcccgcgttgggcgactcgtctctgccattgtgttggcctttggactgctttgggccccataccatgccgtgaatctacttcaggcggtcgctgcactggctcctcccgagggagctctcgcgaagctgggcggtgccggccaagctgcgcgtgccgggaccacagcccttgccttcttcagttcttcggtgaatcccgtgctgtatgtgttcaccgccggggatctcttaccaagggcaggcccaagattcctgactcggctgttcgagggcagcggggaggctcggggtgggggaaggtctcgcgaaggcacaatggagctgaggactacaccacagctcaaggttgttgggcagggacgcggaaacggagatccaggtggtggtatggaaaaagatgggcctgaatgggacctgtag

SEQ ID NO: 122447 - DNA, 1077 bp, synthetic construct
  misc_feature 1..1077: note = Description of Artificial Sequence: Synthetic coding sequence
  source 1..1077: mol_type = other DNA
atgagcgtctgctatcgtccaccaggaaacgagaccctcctttcctggaaaaccagtcgcgcaactggcaccgctttcttgcttctcgccgcactcctgggcctgccgggaaacggattcgtcgtttggtctctggcgggttggcgacctgctagagggcgcccactggccgctaccctagtcctacatcttgccctcgccgatggggcagtgctgcttttgaccccgttgttcgtagcatttttgaccagacaggcctggccactcggacaggctgggtgcaaagccgtttactatgtttgcgccctctcaatgtacgcttccgtcctgctgaccgggttgctcagcctgcagaggtgcctggccgttacccggccatttttggccccccggcttagatcccccgctctggccaggcgcctgcttttagctgtttggctggctgcactgctcttggccgtgccagccgccgtgtaccgccacctgtggcgggatcgagtatgtcagctttgccatccatcgccagtccatgccgccgcccacctgagcctggagacattgaccgccttcgtactgccattcggcctcatgttagggtgctactctgttacgttggcacgattgcgaggagctcgttggggctctggcaggcacggcgccagagtgggcaggctggtgagcgctattgtgcttgccttcggcctgctatgggccccctatcacgctgtgaacttgttacaagctgtggccgcactggcgcctcccgagggggcactggctaagctgggaggggccgggcaagccgcccgtgcagggactacggcactcgccttcttttcctcctccgtcaatcccgtgctgtatgtatttaccgcgggcgatttactccctcgtgcgggaccccggttcttgaccaggctgttcgagggatccggagaagctcgggggggaggacgttcaagggaaggcactatggagcttcgcactaccccccagttaaaggtagtgggccagggcagggggaacggagaccccggaggaggcatggagaaggacgggccggagtgggatttatag

SEQ ID NO: 122448 - DNA, 453 bp, synthetic construct
  misc_feature 1..453: note = Description of Artificial Sequence: Synthetic coding sequence
  source 1..453: mol_type = other DNA
atgaaggacgaggtagctttgcttgccgcagtaacgctgctcggagtcctactgcaggcctacttcagcctacaggtgattagcgccagacgcgcgttccgagtgagtcccccacttacaaccggccccccagaattcgaacgcgtttatcgagcccaggtgaattgtagcgagtactttccactcttcttggccacactttgggtggccggaatcttcttccatgagggggccgcagcactctgcggcctagtgtatctgtttgcccggctgcgctactttcagggctatgcccggagtgctcagttgcgacttgccccgctgtacgcttcggcgcgcgcactctggcttctggtggccctcgccgccctcgggcttttggcgcatttcctccccgccgccctgagagccgctcttttgggtcggttgagaaccctgctcccatgggcttag

SEQ ID NO: 122449 - DNA, 1161 bp, synthetic construct
  misc_feature 1..1161: note = Description of Artificial Sequence: Synthetic coding sequence
  source 1..1161: mol_type = other DNA
atggaagagctggatgccctgctggaagaactcgaaaggtctactttacaggatagcgacgaatattctaaccctgcacctctcccgctggatcaacatagccggaaagagacgaacctggacgaaacatctgaaatcctgagcatccaagacaatacctcccccctcccagcccaactggtttacacgacgaatattcaggaattgaatgtgtacagtgaagctcaggaacccaaagaatccccacctccttccaagactagcgccgcagcacagctagatgagctgatggctcatttaactgaaatgcaggcaaaagtggccgttagagccgacgccggaaagaaacacctcccagacaaacaggatcataaagcttcattggattctatgcttggagggctggaacaggaactgcaggatctgggcatcgccactgtgcccaagggacactgtgcaagctgtcagaagcctatagccggaaaagtgattcatgcccttgggcagtcctggcacccggagcacttcgtatgcacccactgcaaggaggagatcggttcatctcctttttttgagaggagtggtctcgcctactgccccaatgattatcaccagttattttccccgaggtgtgcttactgcgcggctcctatactagacaaggtgctgacagctatgaatcagacctggcatcctgagcattttttttgctctcattgtggggaggtgttcggagccgaggggttccatgagaaggacaagaagccctattgtagaaaagacttcctggcaatgtttagtccaaagtgtggagggtgtaatcggcctgttctggaaaattacctctcagctatggacaccgtgtggcaccctgaatgtttcgtttgtggcgactgtttcacatctttttctactgggtcttttttcgaactcgacggcagaccgttctgtgagcttcattaccatcatcgccgagggaccctgtgccatggctgcgggcagccgattacaggccgatgcatttccgccatgggatataagtttcatccagagcactttgtgtgcgcattctgtctgacacagttaagcaaaggcatattcagagagcagaatgataagacctactgtcagccatgtttcaataagctctttccactgtag

SEQ ID NO: 122450 - DNA, 1176 bp, synthetic construct
  misc_feature 1..1176: note = Description of Artificial Sequence: Synthetic coding sequence
  source 1..1176: mol_type = other DNA
atgtcaaccctccttatttcatcgtctgatgccctgctggaggagctggagagatctacattacaggattccgacgaatactcaaatcccgctcccctccctctggatcagcactcccggaaggagactaatctcgacgagacgtccgagatcctatccattcaggataatacatccccacttcctgcacagcttgtatataccacaaatatccaggagttaaatgtgtattccgaggcgcaagaacctaaagagtctccccctccttccaagacgtcagcggcagctcagcttgacgagcttatggcccacctgacagaaatgcaggctaaagtggccgtacgcgcggatgctggaaaaaaacacctcccggacaagcaggaccataaagcatcgcttgatagcatgctgggcgggctcgagcaggagctgcaagacctgggaatcgccactgtgccgaagggtcactgcgcctcatgccagaagccaatagccggcaaagtgatccacgcactcggccagagctggcacccggagcattttgtgtgcacacactgtaaagaggagatcggttcctctccattttttgagagatctgggctcgcctactgccccaacgattaccaccagttattcagtccaagatgcgcctattgcgcggcgcccattctcgacaaagtcctgactgcaatgaatcagacctggcaccctgaacatttcttttgctcacattgtggcgaggtattcggggcggaaggcttccacgagaaggataaaaagccttactgcaggaaagacttcctggcaatgttttcacctaagtgtggtggatgcaatcggcctgttctggagaactatctatccgccatggacacagtttggcaccctgagtgttttgtctgtggagattgcttcaccagtttcagtacggggtcattctttgagttggatggaagaccattttgtgagttgcattatcaccaccgccgtggaacactatgccacggctgcgggcagcctatcactgggagatgcatttctgctatgggctataaattccatcctgagcactttgtgtgtgctttttgcttgacccagctcagtaagggtatcttccgtgagcagaacgacaaaacatattgccaaccttgttttaataaactctttccactgtag

SEQ ID NO: 122451 - DNA, 1131 bp, synthetic construct
  misc_feature 1..1131: note = Description of Artificial Sequence: Synthetic coding sequence
  source 1..1131: mol_type = other DNA
atgaactacgaattcgaaagagagattgggttcatcaactcacagccatccttagcggagtgcttgacctcttttccaccagtggcagatacattccaaagctcatcaataaagacctctactctgtctcacagtacccttatcccaccccccttcgagcagacaattccatctctgaaccctgggagccatccaagacacggggccgggggcagacccaaaccaagtccagccggttcgcgggggagtcctgtccccgccggcgccctccagccacctgagtacccttggatgaaagagaagaaagctgcaaagaagacagcccttctgccagcagctgccgccgctgcaacagccgcggctactggacccgcttgccttagtcacaaggagtcactggagatagccgatgggtccgggggcggaagccggagactgagaacagcatatacgaatactcagctgttagaactggagaaagagtttcatttcaataagtatttatgccggccacgaagggtggagatagccgcactcctagatctcactgaacggcaggtgaaggtgtggtttcagaataggagaatgaagcataagcgccaaacccaatgtaaggagaaccaaaattcagagggcaaatgtaaatctttggaagactccgagaaagttgaagaagacgaggaagaaaaaactctgttcgagcaggccttgagcgtgtccggcgcactgctggagcgcgagggatatacgtttcaacaaaatgccctgtcccagcagcaggctcctaatggacataatggggatagccagtctttccctgtttcgccattaacatccaacgagaaaaacctcaagcatttccagcaccagtcgcccaccgtgcccaactgtttgagcaccatggggcagaattgtggggccggtcttaacaacgactcgcctgaggccctggaagtgccaagcctgcaggatttttctgtcttctccacagactcatgtctccagctgtctgatgcagttagccccagtcttcccggatctctggatagccctgtggacatcagtgccgattctttggattttttcaccgacaccctgacgacaatcgacttacagcatcttaactactag

SEQ ID NO: 122452 - DNA, 753 bp, synthetic construct
  misc_feature 1..753: note = Description of Artificial Sequence: Synthetic coding sequence
  source 1..753: mol_type = other DNA
atgacacccggtcgatgttgcctcgcagccgacatccaggttgaaactttcatcttcactgatggggaggacgaggcacttgcccgccacactggaaatgtggttatcaccaactgctcggcggcccattcccgccaggccctcagctgtaaaatggctgtggaatatgacaggtttatcgagtcagggagaaagtggttctgtcacgtggacgacgataactatgttaatcttagagccttgttacgactgctggcatcttatccacacacgagggatgtctatgtagggaaaccctccctggatagacccattcaggccatggagagagtttccgagaacaaagtgagacctgttcacttctggtttgcaactgggggggccggcttctgcatttcacgaggtctggccctgaagatgagtccttgggctagcggcggacacttcatgaatacagctgaacgtattagactgccagatgactgtacaatcggctacatcgtggaggcattgctgggcgtgcccctgatacgaagcgggctctttcatagtcacctggaaaatcttcagcaggtgcccacaagtgagctgcatgaacaagtaactctgagttacggaatgttcgaaaacaaaagaaatgccgtgcatgtcaaagggccattcagtgtggaggccgacccttcgagatttcggagcatacactgtcacttgtatccagacaccccatggtgcccaaggaccgctattttctag

SEQ ID NO: 122453 - DNA, 1086 bp, synthetic construct
  misc_feature 1..1086: note = Description of Artificial Sequence: Synthetic coding sequence
  source 1..1086: mol_type = other DNA
atgctgaaaaggtgtggaagacgtctgcttctggccctggccggcgcactgctggcatgtttattagttctgacagcggaccccccacctccgcccctcccggcagaaagaggccggcgtgctctaagatcgctggctggtcccgctggggccgctcctgcccctggcctgggcgccgcggcagccgcccccggcgcgcttgttcgggacgtccactctttgtccgaatatttcagtctgctgacaagggctagacgagatgctggaccacctcctggagcagctccaaggcccgctgacggccaccccaggcctctggccgaacccttagcaccaagggatgtgttcattgctgtgaaaaccacaaagaaatttcaccgcgccaggctcgatctgctgctcgagacgtggatcagccgacacaaggagatgactttcattttcacagacggagaggacgaggccctggcaagacacaccggaaatgtggtcattaccaattgttccgctgcgcattcacgccaagcattatcatgcaaaatggcagttgaatacgatcggttcattgagtccggacggaagtggttctgccatgtagatgatgataattatgtgaatttgagggcgctgctaagactgctggcaagctatcctcacacgcgagacgtttatgtggggaaacccagtctggacaggcctatccaggccatggagcgagtctctgagaacaaagttagaccagtgcatttttggtttgccaccggaggagctgggttctgcatctcacgcggtctggcactgaaaatgtcaccttgggcaagcggaggccattttatgaatacggccgaacggattagacttcctgatgattgtacaatcggctacatagtggaagcgctcctgggcgtccccctgatccgctctggactctttcattcacacctcgagaatctccaacaggtgcctacgagcgagttgcatgaacaggtcaccctttcgtacggaatgtttgaaaataaaagaaatgcagtacacgtgaagggcccctttagcgtggaggcagatccgtctcgctggggcaactag

SEQ ID NO: 122454 - DNA, 753 bp, synthetic construct
  misc_feature 1..753: note = Description of Artificial Sequence: Synthetic coding sequence
  source 1..753: mol_type = other DNA
atgaccccaggacgatgttgcctggccgccgacatccaagtggagacattcattttcaccgacggcgaagacgaagccctggcccgacacaccggaaatgtagtgattacaaactgttctgctgctcactccagacaggccttgtcatgcaagatggctgtggagtatgacaggttcatcgaatcgggacggaagtggttctgtcacgtcgacgacgacaactacgttaacctgcgagcactgctgcggctattggcgtcgtacccccatactagagacgtctatgtgggcaaaccctcattggaccgtcctatccaggccatggagcgcgtatccgaaaacaaagtgcgccccgtgcacttttggttcgctacgggaggcgccggcttctgcattagccggggcctggctctgaaaatgtcaccctgggcgtctggaggacatttcatgaacactgctgagaggatccgtcttccagatgattgcaccatcggctacatagtggaagcgctcctaggagtgcccctgatccgatccggactgtttcactcgcaccttgaaaatctacagcaggtccccacctccgagctccatgaacaggtgacacttagttacggcatgttcgaaaataagcgtaatgctgtacatgtcaagggaccgttctccgtggaagcagacccgtctaggttccgttctatccactgtcatctgtatccggacactccgtggtgcccaaggaccgcaattttttag

SEQ ID NO: 122455 - DNA, 927 bp, synthetic construct
  misc_feature 1..927: note = Description of Artificial Sequence: Synthetic coding sequence
  source 1..927: mol_type = other DNA
atggacgaacagaccggaagactgcggctcgatacttactgcatgtctgcaaaacagatttgggcttggtcaaaatgtagtggccgcttgtgggatgagcacatgaaatggatggaggggtggaccgaccgttggactgatgggtggatggacggctggatggatgagtggtctcccacccctgcgttgaggtcttacggcggggggctttcacagcagacttttatttttaccgatggagaagatgaggcactggcaagacatacaggcaatgtggtcattaccaactgtagtgcggcccacagccgacaggcactgagttgtaagatggccgtcgagtatgatcggttcatcgaatccggacgtaaatggttttgccatgttgacgacgacaactacgtgaatttgagagccctcttgcggctgctcgcaagttatccccacacacgagacgtttacgttggcaaaccctctctggaccgaccgatacaagctatggagagagtatcagaaaacaaagtgcgtcccgtgcacttttggtttgccactggcggcgccgggttttgtatctctaggggcctggcattgaagatgtctccctgggcaagtggaggtcattttatgaatacagccgagagaatccggctgccggacgactgcactatcgggtatattgtggaggcactactgggggtgcccctcattcgatccggtctgtttcattcacatctggaaaacctccagcaggtgcccacttccgaattgcacgagcaggttactctttcatacggaatgttcgagaataagcgcaacgcagttcatgtgaaaggaccattcagcgtcgaagccgatccaagtaggttccgctctatacattgccatctgtaccctgataccccgtggtgcccacggaccgccattttttag

SEQ ID NO: 122456 - DNA, 1302 bp, synthetic construct
  misc_feature 1..1302: note = Description of Artificial Sequence: Synthetic coding sequence
  source 1..1302: mol_type = other DNA
atgcagcgaatgatccagcagtttgccgccgagtacacgtctaagaacagctctacccaggacccatcccaaccaaacagcacaaaaaaccagtcactccctaaggccagtccagttactacctctccaaccgctgcaacaacacaaaaccctgtattatcaaagcttctgatggcagaccaggattctccactggacctcacggtgaggaaatcccagtctgaaccatccgaacaggatggggtgctcgacctgagcacaaagaagagcccgtgtgctgggagcaccagcctgtcacactcacccggctgtagcagtacccaggggaacggacgccccggccgtccttctcagtatcggccagacgggctgcgcagtggagatggagttcccccacgaagtctacaggacggtactcgtgagggatttggtcactctacctccttgaaggtgccccttgccagatcactgcagatcagcgaggaactgctatcaagaaatcagctgtcgaccgcagcttccctaggccctagcgggctgcaaaaccatggtcaacacctcattttgagccgcgaggcctcctgggccaagccccactatgaatttaacctttcccgcatgaagttcaggggaaatggggcgctgagtaatatcagcgacctgccctttctcgccgaaaactcagcttttcccaagatggccttgcaggccaagcaagacggcaagaaagatgtctcccatagctccccagtcgacctcaagatacctcaagtacgaggcatggacctgtcatgggaaagtaggaccggtgaccagtactcttattcttctctcgttatggggtcgcaaacagaaagtgcactctctaagaagttacgcgcaatcctgcccaagcaaagcaggaagtctatgctcgacgctgggcctgattcctggggatcggacgctgagcagagcacttccggacagccttatcccacatccgatcaggagggggatcctgggtcaaaacaacctagaaaaaaaagaggtagatataggcagtacaacagcgaaattctggaagaggctattagtgttgtgatgtcagggaagatgtcagtgtcaaaggcccagtccatttatggaatcccacactccaccttagagtacaaagtgaaagagagactcggcaccctgaagaatcctcctaaaaaaaaaatgaaactgatgcgtagtgaaggccctgacgtctccgtaaaaatcgagctggacccgcaaggtgaggccgcacagtcagcaaatgaaagcaagaacgaatag

SEQ ID NO: 122457 - DNA, 1302 bp, synthetic construct
  misc_feature 1..1302: note = Description of Artificial Sequence: Synthetic coding sequence
  source 1..1302: mol_type = other DNA
atgcagagaatgattcagcagtttgccgcagaatatacttcaaaaaacagcagcacccaggacccatcccagcctaacagtacaaagaatcagtccttacctaaagcgagtcctgtcaccaccagccctaccgcagccacgactcaaaaccctgtcttgtccaaactattaatggcagaccaggacagcccccttgacctgaccgtgcggaagtcacagtctgaaccgtctgagcaggacggcgttctggacttgtctaccaagaaaagcccttgcgccgggagcactagcctgtcacactcccccggatgtagtagcacacaaggcaatggccgcccaggtaggccctcacagtatagacctgatggactcaggagcggggatggggtcccacccagaagcctgcaggacggtaccagggaaggctttgggcactccacaagcctaaaggtcccgctggcacggtcactgcagatatccgaagaactcctgtccagaaaccagcttagcaccgcagcctctttgggcccctcaggacttcagaatcacggtcagcacctgattctgagccgggaggcatcttgggccaaaccacattacgagttcaatctgagtcgcatgaagtttcgcggaaacggtgctctcagcaacatttcagacttgccatttctggcagagaattccgcttttccaaagatggccttacaagccaaacaagacggcaaaaaagacgtgagccattcctctcccgtggacctgaagatccctcaagttagaggaatggatttgagttgggagagtaggacaggtgatcagtacagttatagttcactcgtcatggggagccagaccgaaagcgctctaagtaaaaagctgcgtgctatattgcccaagcagtcacgcaagtcaatgttggatgccggccccgatagctggggttccgatgcagagcagagtacttccggccagccgtaccccacatcagaccaagaaggagatcctggcagtaaacaacctcggaaaaagcggggccgttaccgacagtacaactccgagatcttggaggaggcgatttcagtggtgatgagcgggaagatgagcgtctcaaaagcccaatccatttacggcatccctcacagcacacttgagtacaaagtgaaggagcggctgggaacgctcaagaacccccctaagaagaagatgaagctgatgcggtcagaaggtcccgacgtcagcgttaaaatcgaattagatccacagggagaggcggctcagtccgccaatgagtccaagaatgagtag

SEQ ID NO: 122458 - DNA, 1302 bp, synthetic construct
  misc_feature 1..1302: note = Description of Artificial Sequence: Synthetic coding sequence
  source 1..1302: mol_type = other DNA
atgcagagaatgatccaacagtttgctgccgaatatacgtctaagaactcatctactcaagatccctctcagcctaacagtacgaagaatcagtctctgcctaaagcctccccagtaaccaccagcccaacagccgcgacaacgcaaaatccagtcctctctaagctgcttatggctgatcaggactccccgctggacctgaccgtgaggaaatctcagagtgagcccagcgagcaagatggggtgctggatcttagcacaaaaaaatctccatgtgccggatccacgagtctgtcccacagtcccggctgctccagcacacaagggaacgggcgccctggacggccaagtcagtataggcctgatggcctcaggtcaggtgacggggtcccccctaggtccctgcaagacggaactagagagggcttcgggcacagcacgagtctgaaagtaccactggccagaagcctccagatcagtgaggaactgctgtctaggaatcaactgtccaccgccgcaagcctgggcccgtcagggctgcagaatcacgggcagcatctcattctgtcgcgcgaagcatcgtgggccaagccccattacgaattcaatttaagtcgaatgaaattccgtggcaacggcgctttgtctaatatttcagacctcccctttctggcggagaacagtgcatttccgaaaatggcgcttcaggcgaaacaagatggtaaaaaggacgttagccactcatccccagtagatctcaaaatcccccaggttcggggaatggatttgagttgggagtctcgtactggagatcagtacagctatagcagcctggtgatggggagtcagaccgaatctgccctgtctaaaaaactgagggccatcctgcctaagcagtcccgtaagagtatgctggatgccgggccggacagctggggcagcgacgctgaacagagtacttctggtcaaccttatcccaccagcgaccaggagggcgaccccgggtctaagcagcctagaaagaaacggggacgctacagacaatataattctgaaatccttgaggaagccatctcagtagtgatgagtggtaaaatgagcgtctccaaggcccagtccatttacgggataccccacagtacgctggaatacaaagtgaaggagcggctcggaacactcaagaatccaccgaagaaaaagatgaagctcatgcgctcagaagggcctgatgtgagtgtcaaaatcgaattggatccgcagggcgaggcagcacaatctgccaatgaatccaagaacgaatag

SEQ ID NO: 122459 - DNA, 1221 bp, synthetic construct
  misc_feature 1..1221: note = Description of Artificial Sequence: Synthetic coding sequence
  source 1..1221: mol_type = other DNA
atgcagcgtatgatccagcagtttgcagccgaatacacaagcaaaaacagctccacacaggatccttcccaacctaatagtaccaaaaatcagagtctgccaaaagccagtcctgtcactaccagtccaaccgctgcaaccacacagaatcccgtattgagtaaactcctgatggccgatcaggactcaccactcgacctgactgtgcgcaagagccagagcgaaccatctgagcaggatggcgtcctggacctttcgacaaaaaaatccccatgcgccgggagcacctccctctcacattcgccaggttgttcatcaactcaaggcaatggtcgccccgggcgcccctctcagtaccggcccgacggactccgctccggagacggcgtcccaccgcgaagcctccaggacgggacccgggaagggttcggccacagcacctccttgaaagtgccactggcgagatctcttcagatttccgaggagctgttatctagaaatcagctttcaacagcagcttccttgggaccctcaggcctgcagaatcacggccagcacctaatcttatcccgggaggcctcgtgggcaaagccacattacgaattcaacctctcccgtatgaagttccgggggaatggcgccctcagtaatatttctgacctacctttcctggctgaaaactcagcgtttcctaagatggctctgcaagccaagcaggatgggaagaaggatgtcagccactcctcccccgtcgacctgaaaatccctcaggtgagggggatggatttgtcctgggagagtcgtactggagaccagtactcatattcaagtttagttatgggttcacaaacagaaagtgcattgagcaaaaaactgagagcaattctgccaaaacagagccgaaaaagtatgctggacgccggtcctgatagctggggatccgacgccgagcagagcacctctggccagccctatcccacatcagatcaagagggcgaccccggttccaaacagccccggaaaaagcgaggtcggtacagacagtacaacagtgagatcctcgaagaggcaatctccgtggtgatgtccggcaagatgtctgtttctaaagcccaatcaatatatggtatccctcactctaccctggagtacaaggtgaaggagcgactaggtacattgaaaaacccccccaaaaagaagatgaagctcatgagtggatag

SEQ ID NO: 122460 - DNA, 957 bp, synthetic construct
  misc_feature 1..957: note = Description of Artificial Sequence: Synthetic coding sequence
  source 1..957: mol_type = other DNA
atggataaaggcagagagcgaatggccgccgccgccgccgctgccgcagcggcagcagcggctgcacagtgtcgatctccaagatgtgccgcggaacgccgaggttttcgacgcgagctggattcgtggcggcaccgcttaatgcattgcgtcggttttgaatctatcctcgagggactgtacgggcctcgtctgcggcgggacctgagtctctttgaggactgcgagcctgaggagctcactgattggtcgatggatgaaaagtgttccttttgtaatctccaacgggaagcggtgtctgactgtatccccagtctggatagctcccaaagtacgcctactgaggaattgtcaagccagggccaaagcaatactgataagatcgagtgtcaggccgagaactacttgaacgcactctttagaaaaaaggacttacctcagaactgtgaccctaatattccccttgtggcccaggagttgatgaaaaagatgatcaggcagttcgccattgagtacatcagcaagagtggcaagacgcaagaaaatcgcaatggatccatcggaccttcaatagtgtgtaaatcgattcagatgaaccaggccgaaaatagcctgcaggaggagcaagagggtccattggacttaaccgtcaaccgtatgcaggaacaaaatacccagcagggcgacggcgtcctagatctgtccaccaagaaaacttccatcaagagtgaggaaagttccatctgcgacccctcttccgagaatagtgtagctggcatgttgcaagtgaaaacggatgaaaaactgaatgtatctgatgagaacactgcatcctgtccactgtctccgatcaaaatgtgcctcaaccggccaatcgagtggaatctcaacttgactaccgcatctctgacgtcatgcaccgtgcataaccagaatctcaaaagcgaggagaaatag

SEQ ID NO: 122461 - DNA, 1557 bp, synthetic construct
  misc_feature 1..1557: note = Description of Artificial Sequence: Synthetic coding sequence
  source 1..1557: mol_type = other DNA
atggacgagaagtgtagcttttgcaatctccagcgcgaggcagtgagtgactgtatcccttcactggatagctcccaaagcacaccaacagaagaactctcatcacaggggcaatccaacaccgataaaatcgagtgccaagccgagaattatctgaacgcacttttccggaaaaaggaccttccacagaactgcgacccaaacattcctttagtcgctcaagaactgatgaagaagatgattagacagtttgcgatcgagtacatctcaaagagtggaaagacccaggagaacagaaacggcagcatcggaccgagcatcgtgtgtaagtcgattcagatgaatcaagctgagaattctctacaggaggaacaagaaggacccctcgatctcacggtaaacagaatgcaggagcagaatactcagcagggggacggggttcttgacctctctaccaaaaagactagcatcaaaagcgaagagagctccatttgcgaccccagctccgaaaattccgtagcagggaggttacatcggaatagagaagactacgtggagagatccgctgagttcgccgacggtctcttgtccaaagccctaaaagacatccaatcgggagccttagacataaataaggcgggcattctatatgggatcccacaaaagaccctgctcttgcatttggaggccctgccggcaggaaagcccgcttcattcaagaacaagactagagacttccacgactcatacagctataaagattcaaaggagacatgtgcggttttacaaaaggtagcgctttgggcccgcgcccaagcagaacgtacggagaaatctaaactgaatctgctagaaacttctgagataaagtttcccacggcatccacctacctgcatcaactcactctgcagaaaatggttacccagtttaaggaaaagaacgaatcactgcagtacgaaacttccaacccaactgtgcagctaaagatcccacagctgcgcgtctcttcagtttctaaaagtcagcccgacggatcaggtctcctggacgtcatgtatcaggtgtccaagaccagctcggtgcttgaaggatccgccctgcagaagctcaagaacatcttgcctaagcagaacaagatcgaatgtagtggacctgtcactcactcctccgttgactcctattttctgcacggcgatcttagtcccctctgcctgaactctaagaatggcactgtggatggtacttcagagaacaccgaagacggtctggacagaaaagattcaaagcagcccagaaaaaaacgtggccgctatcgccagtacgatcacgaaattatggaggaggccatcgccatggtcatgtctggaaagatgtcagtttcaaaagcccaagggatctacggcgttccgcatagtactctggaatacaaagtaaaggagcggagcgggacgctgaagaccccacccaagaagaagctcaggttaccggacaccggcctgtacaatatgaccgatagtggaacaggttcttgcaaaaactcctcaaaacccgtctag

SEQ ID NO: 122462 - DNA, 1809 bp, synthetic construct
  misc_feature 1..1809: note = Description of Artificial Sequence: Synthetic coding sequence
  source 1..1809: mol_type = other DNA
atggataaagggagagaaagaatggcagccgcagccgcagctgcagctgccgccgctgctgctgcccagtgccgtagccccaggtgtgccgctgagcgaaggggctttagacgcgaactggatagctggcgtcaccggctgatgcattgcgtgggattcgaatctattctggaaggactttatggacccagactgcgcagagacctgagcctctttgaagattgtgagcctgaggaactgacagattggtccatggacgaaaagtgtagtttttgtaatttgcagcgagaggcggtgtctgactgcatcccctcactggatagcagccagtcaacccctacagaggagctgagttcgcaggggcaatcgaatactgacaagatcgagtgtcaagcggagaattacctgaatgccttgttccggaagaaagatttaccgcaaaattgtgaccccaacatccctctcgtggcgcaggaattaatgaagaagatgatcaggcagtttgcaattgaatatatttccaagtctggaaagactcaggaaaaccgcaacgggagtatcggcccgagcattgtttgcaaatccattcagatgaaccaagccgagaactccctgcaggaggagcaggaaggtccactggatctcaccgttaacagaatgcaggagcagaatacccaacaaggggatggggttcttgatctaagtaccaagaagacctctatcaagtcagaagagagctccatttgtgatcctagttctgaaaatagtgtggcggggaggttgcacagaaatagagaggattatgtggagagaagcgccgagttcgccgatgggctactgagtaaagccctaaaggatatccagagtggcgcactcgacatcaataaagcgggaatcctttacggcatcccccagaagaccctactcctacatctagaggcattgccggctggtaaacctgcctccttcaaaaataagactcgcgattttcatgatagttactcctacaaagactctaaggagacctgtgctgttctgcagaaggtggcactgtgggcccgagcccaagctgagcggaccgagaaatccaagttaaaccttttagaaacatctgaaatcaaatttccaactgcttctacatacctccatcagcttaccctgcagaagatggtgacacagtttaaggagaagaacgaaagcttgcagtatgaaaccagtaaccctacagtgcagcttaagataccacagctcagagtgagctcagtttctaaatcccagcccgatggtagtggcctgctcgatgtgatgtaccaggtgtccaaaactagcagtgtgttggagggctccgcactgcagaagctgaagaatatcctgcctaaacaaaacaaaatcgagtgctctggacccgtgacccacagctctgtggattcttactttcttcacggcgatctttctcctctgtgcctaaactctaagaacgggaccgtggatgggacttccgagaataccgaggacgggctagacagaaaggactccaaacagcctaggaagaagcgcgggcggtatcgacaatatgaccatgaaatcatggaggaggccatcgctatggtcatgtccggcaaaatgtctgtgtctaaggctcaaggtatctacggggtcccacacagtaccctggaatacaaggtgaaagaaagatctgggactctaaagacacctcctaagaagaaactgcggcttccggatacaggtctgtacaatatgacggactcaggtactgggtcgtgtaaaaactcgagtaaaccagtgtag

SEQ ID NO: 122463 - DNA, 435 bp, synthetic construct
  misc_feature 1..435: note = Description of Artificial Sequence: Synthetic coding sequence
  source 1..435: mol_type = other DNA
atggatcacggatatgaagaaacttccgtgtatttgaaggactgcattccaagccttgactccagccaatccacaccaacagaagagctgagcagccaggggcagagcaatacagataagatcgaatgccaggccgaaaactacctgaatgcactgttccggaaaaaggatttaccgcagaactgtgacccgaacattccactggtggcccaagaactgatgaagaagatgatcagacagtttgcgattgagtacatctcgaagtctgggaagacccaagagaatcggaatggctcaataggaccaagcattgtatgcaaatcaattcagatgaaccaggcggagaacagtctgcaggaagaacaggagggaccgcttgatctcacagttaaccgtatgcaggaacagaacactcaacaagcctgctataagtag

SEQ ID NO: 122464 - DNA, 2187 bp, synthetic construct
  misc_feature 1..2187: note = Description of Artificial Sequence: Synthetic coding sequence
  source 1..2187: mol_type = other DNA
atgaaccagcccgagagcgccaatgaccccgagccactgtgtgctgtgtgcggtcaggcccattccctggaagagaatcacttttacagttatcctgaggaggtcgacgacgatttgatttgtcatatctgtctccaagccctcttagatccattggacactccctgtgggcatacatattgtactctgtgcctgactaactttttggtggaaaaggacttttgtcctatggacaggaaacccctcgtcctgcaacattgtaaaaagtcaagcattttggttaacaagctactgaacaaattgttagttacatgccccttccgcgaacactgtacccaggtgctacagcgctgtgaccttgaacaccatttccagacatcctgcaagggcgccagccactacggcctgacaaaagaccggaaaagaagatcgcaggacggctgtccagatggctgtgcctcactcactgcaacagcgcccagtccagaggtgtcagcagctgctacaatctctctgatgaccgacgagcccggcctggacaaccctgcatacgtatcaagcgccgaagatggccaaccggctatatctccagtggacagcgggcgttccaatcgaactagagcaagaccattcgagaggtctacaatcaggtctcgaagttttaagaaaatcaacagggccctttcagtattaagacggactaagagcggctccgcagtcgcaaaccacgccgatcaaggacgcgaaaactctgagaacacaaccgccccggaggttttccccagactgtaccatctaattccagacggagaaataaccagtataaaaataaatagggtggaccctagcgaatcccttagcattcggctcgtaggaggctcagagactccgttggttcacattatcattcagcacatttacagggatggggtaatcgcacgagacggccgcctactccccggcgacattatattaaaggtgaacggaatggatattagcaacgtgccgcacaattacgccgtcaggcttctgagacaaccttgtcaggtgctctggctcacagtcatgcgagagcagaagtttaggagccggaataacggtcaggccccagacgcgtaccgccccagggacgactccttccatgtgattcttaataaatccagcccagaggagcaattgggcatcaagctcgtgcggaaggtggacgagcctggagttttcatctttaatgtgctcgacggtggcgtagcatacaggcatggacagctcgaggaaaatgacagggtgctggccatcaacgggcatgatttgcgctatggttctccagaaagcgcggctcacctgatacaggcttcagagaggcgggtgcacctagttgtgtccaggcaagtccgacagcggagccccgatatatttcaggaggctggatggaactctaatggatcctggtctccaggccccggcgaaagaagcaacacccccaaaccactacatcccaccatcacttgccatgagaaagtggtcaacatccagaaagaccctggcgaatcactgggcatgaccgtggcaggaggcgcgtcacaccgggagtgggaccttcctatttacgtgatcagtgtcgagccgggcggagtaatctcacgagatgggagaatcaagactggcgacatactcctaaatgtggacggtgtggaactaaccgaggtctccaggtctgaggccgtggcactactgaagcggacctcttcatctattgtcttgaaggctttggaagtgaaagagtacgagccgcaggaggactgctcttctcccgccgctctggacagcaaccataacatggctccgccaagtgattggtcaccatcctgggtcatgtggctggaattaccccgttgtctgtataattgtaaggacatagttctccgccgcaacaccgcgggaagcctgggattttgcatcgttggagggtatgaagaatacaacggtaacaaaccattctttatcaagtcgatcgtagagggtaccccggcatacaacgacggtcgcatccgatgcggagatattttactcgcagtgaacggaagatctaccagcggaatgatacacgcctgcttagctagactcctcaaagagctcaaaggccgcataacccttaccattgtttcttggcctgggacctttctgtag

SEQ ID NO: 122465 - DNA, 1899 bp, synthetic construct
  misc_feature 1..1899: note = Description of Artificial Sequence: Synthetic coding sequence
  source 1..1899: mol_type = other DNA
atgaaagctttgctgctgctcgtgctcccttggctctcacctgctaattacattgataatgtagggaatcttcattttctctactctgagttgtgtaaaggagcctcacattatgggcttaccaaagacaggaaacggcggtcgcaggacggttgccctgatggctgcgcctccctaaccgctacagcccctagtcccgaggttagtgcagctgctaccatatctctgatgactgacgaaccggggctggacaatccggcttacgtctcatcggccgaagacggacagccggccatttcccctgtggattccggtagatccaaccggacgcgcgcacggccgtttgagcgcagcactataaggagcagatcttttaagaagataaaccgcgctttatcggtcctgcgtaggacaaagagtggaagcgccgtagccaaccacgccgaccaggggagagaaaattccgagaataccacagctcccgaagtatttcctcgcttgtatcatctcattcccgacggtgaaattacttccatcaagattaatagggtcgacccctcagaatcattaagcatccgcttggttggcggcagcgaaactccacttgttcacattattatacaacatatctatagggatggagtcatcgctagggatggcagactgctgcctggcgacatcattttaaaggttaatggaatggacatatctaacgtgccccataattacgccgtgagactgctgcggcagccatgccaggtgctgtggttaaccgtcatgcgagagcagaaattccgatctcggaataacggccaggccccagatgcctaccgcccgcgcgatgattccttccatgtcatcctcaataaatccagtccagaagaacagttgggtattaagctggtccgcaaagttgacgaacccggagtcttcatcttcaacgtcctggatggcggggtagcctacagacacggtcagcttgaggagaacgaccgtgtgctggctatcaatggacacgatctgcgatatggttctcccgagagtgccgcacacctcatacaggcctcagaacgcagggttcatttagtggtgtctaggcaggtgagacagcgcagccccgatattttccaagaggccgggtggaattcaaacggctcctggagcccaggcccaggcgagagatctaacaccccaaagcctctgcatcccacaatcacatgtcacgaaaaagttgttaacattcaaaaggacccaggggagagtctgggaatgaccgttgccgggggggcatcacatagagagtgggacctccccatttatgtgattagcgtcgagcctggaggcgtaatcagccgtgatggaaggatcaaaacaggggatatcctactgaacgtagacggggtcgagctcaccgaagtaagtcggtctgaggccgtggcacttctgaagaggacctccagctcaatcgtgctgaaggcgttggaggtgaaagagtacgaaccccaagaggactgttcctctcctgccgctctggactcaaatcacaacatggccccaccctcagattggtccccatcttgggtgatgtggcttgagctccctcgctgtctgtataattgtaaagacattgtgctgagacgtaacactgcagggagcctggggttctgtatagtaggtggatatgaggagtacaacggcaacaagcccttcttcatcaaatctatcgtcgagggaacacccgcctataatgatggccgcattcgctgtggggatattttactcgctgttaacggacgctcgacttctggtatgattcacgcatgtttagcccggctgctgaaggagctcaagggcagaataactctcacaatcgtaagttggcctggaacctttctctag

SEQ ID NO: 122466 - DNA, 21 bp, synthetic construct
  misc_feature 1..21: note = Description of Artificial Sequence: Synthetic coding sequence
  source 1..21: mol_type = other DNA
atgaaccagccagagagctag

SEQ ID NO: 122467 - DNA, 51 bp, synthetic construct
  misc_feature 1..51: note = Description of Artificial Sequence: Synthetic coding sequence
  source 1..51: mol_type = other DNA
atgaatcagccagagtctgctaacgatccagaacccctgtgcgccgtctag

SEQ ID NO: 122468 - DNA, 300 bp, synthetic construct
  misc_feature 1..300: note = Description of Artificial Sequence: Synthetic coding sequence
  source 1..300: mol_type = other DNA
atgaaccaacccgaatcagcaaatgatcctgaacccctttgcgccgtttgcggacaagcccactcactcgaagagaaccatttctactcctatcctgaagaagtggatgacgatctgatatgtcatatctgtctgcaagccttgctggatccactagacaccccatgcggtcatacgtattgtaccctgtgtctcactaattttctcgtggagaaagatttttgcccgatggaccgaaagcccctcgtgctccagcactgcaagaaatcaagcatcctcgtgaacaagctgctcaactag

SEQ ID NO: 122469 - DNA, 273 bp, synthetic construct
  misc_feature 1..273: note = Description of Artificial Sequence: Synthetic coding sequence
  source 1..273: mol_type = other DNA
atgaatcagccagagtccgctaatgatcccgaaccgctctgcgccgtgtgcggtcaggcccacagcctggaggaaaaccacttttattcctacccagaggaggtggacgacgacctaatatgccacatttgtctgcaggccttgttagatccattggataccccatgcggacatacctactgcacactctgcctgacaaacttcctggtcgagaaagacttctgcccgatggaccggaagcccctcgtgctgcagcactgtaagaaatcttag

SEQ ID NO: 122470 - DNA, 381 bp, synthetic construct
  misc_feature 1..381: note = Description of Artificial Sequence: Synthetic coding sequence
  source 1..381: mol_type = other DNA
atgaatcaacccgaatccgctaacgaccccgaacctctgtgtgcagtgtgtggtcaggcccactccctagaggaaaaccatttctactcgtatcccgaagaggtggatgacgacctcatatgtcacatttgtttgcaggctctactggaccccctcgataccccatgcggacatacatattgtactctctgcctcaccaatttcctggtggaaaaggacttttgtccgatggatcgcaagccattggtgcttcagcactgcaagaagtcttccattctggtgaacaagctcctcaataaattgctggtcacatgcccattcagagagcactgtacccaggtactgcaaaggtgcgaccttgagcaccactttcagacctag

SEQ ID NO: 122471 - DNA, 1701 bp, synthetic construct
  misc_feature 1..1701: note = Description of Artificial Sequence: Synthetic coding sequence
  source 1..1701: mol_type = other DNA
atggcagtgcagacagcagtcagagcctcacagccaagattaccccccctggacaaccctgcctatgtgagctccgcagaggacgggcagcccgccatcagtcctgttgacagtgggcgttccaacagaacgagggctaggcctttcgagaggagtaccatccggagccggtcttttaaaaagatcaatcgtgcactgtcagtgctgaggcgcactaagtcaggtagtgccgtcgcaaatcacgctgaccaaggccgagagaattccgagaacacgacagccccagaagtgttccctagactctaccacttaatccccgacggggagattactagtatcaagatcaaccgggtagaccccagcgagtccctctccattaggcttgtgggcggctccgagacgcccttagtccatataataatccaacacatatacagggacggcgtaatagcccgagatggccggctgcttccaggggacattatactcaaggtgaatggaatggatatctcaaacgtcccacacaactacgcggtcaggctactccgacagccctgccaggtcctttggctgacagtaatgcgtgagcagaagttccgctctcgcaataacggtcaagcccctgacgcgtatcgcccaagggatgacagtttccacgttatccttaataagtcctctccggaagaacagttgggtataaaattggtgcgcaaagtggacgagccgggcgtgtttatcttcaatgtgttggatgggggggttgcctataggcacgggcagctggaagagaatgaccgcgttctggccatcaatggacacgacttaaggtatgggtctcctgagtcagccgctcacctgatccaggccagtgaacgtcgggtccacctggtggtctcccgacaggtaagacagcgctcccccgacatattccaagaggcaggctggaattctaatggatcttggtctcccggtccaggagagcgctcaaatacaccaaaacccctccatcccactattacatgccatgaaaaggtggtgaatatccagaaagaccccggcgagtcccttgggatgaccgtggctggaggagcgtcacaccgcgagtgggacctacctatttacgtgatctcagtcgagccagggggggtcatcagcagagatgggcgaatcaagaccggtgatatcctcctgaatgtagacggagtggagttaactgaggtatctcggtccgaggctgtggcccttctgaagagaacctcttcctcaatcgttctaaaggctctcgaagtgaaagagtatgaacctcaggaggactgttctagccccgctgccctcgactcgaaccacaatatggcccccccaagcgattggagcccttcatgggtcatgtggctggaactgcctcggtgtctgtataattgtaaggatattgtgctgcggaggaatacggcagggagcctcggtttttgtatcgttgggggctatgaggagtataatgggaataagcctttcttcattaagagcatagtggagggcacccctgcgtataacgacggccggatccggtgcggcgatattttacttgcagttaacgggcgcagtacttccggcatgatccatgcctgtctcgctcggttactgaaggagctgaaggggagaatcaccctaaccattgtctcatggcccggaactttcctgtag

SEQ ID NO: 122472 - DNA, 2073 bp, synthetic construct
  misc_feature 1..2073: note = Description of Artificial Sequence: Synthetic coding sequence
  source 1..2073: mol_type = other DNA
atgggcacaacaagtgatgagatggtttctgtggaacagactagttcctctagtctcaatcctctgtgcttcgaatgcggccagcagcactggacaagagaaaaccatctgtataactaccagaatgaggtggacgatgacctggtgtgccatatctgccttcaaccgttactgcaaccccttgatactccgtgcggccatactttctgctacaagtgccttcgcaatttcctgcaggagaaagacttctgcccactggaccgaaaacgactacactttaaactgtgcaaaaagtcgtcaatccttgtacataaattgctggataaactactggtcttgtgccccttcagcagcgtctgcaaagacgtgatgcaacggtgtgaccttgaggcacacctgaagaacaggtgcccgggagctagccatcgtcgggtggccctcgagcggcggaagacttcccgaacccaggcagaaattgagaacgagaatggacccacactgctggacccggccgggacactttctccggaggcagattgtctcggaaccggagcagtgccagtggagcggcacctaacatccgcttcgctcagtacttggtccgaagaacctggactcgacaatccagcgtttgaggagtctgcaggcgcagacaccactcagcagccgctgtctctgcccgaaggggaaattaccacaattgagatacatagatccaatccttacatccaactcggcatcagcattgtgggtggtaacgaaaccccactgatcaatattgtgatccaggaggtttaccgggacggagtgatcgctcgcgacggacgtttgctggcgggagaccaaattctccaggtgaacaactataacatcagcaatgtatcacataattacgcacgggctgtcctcagccagccctgtaatacgctccatctcacagtgttgcgggagaggcgcttcgggaaccgagcacataaccactccgactctaactccccaagggaggagattttccaagtggctttgcataaacgcgactctggcgagcaactcggcatcaaactggtaaggcgaaccgacgagccaggggttttcatccttgatctcctggagggtggcttggccgcgcaggacggaagactgtcttccaatgacagggtgctcgcaattaacgggcacgatctcaagtatggcaccccggaactggctgcccagattattcaggcctcaggagagcgcgtaaatcttaccatcgcccggccagggaagcctcagccaggtaataccatcagggaggcaggcaatcactccagttctagccagcaccatactccccctccttattactcacgcccttcttcacacaaagatctgactcagtgcgtaacatgtcaggagaagcacatcacggtgaaaaaagagccccacgaatccctaggaatgacagtagccggaggcaggggctcaaaaagtggtgagcttccaatttttgtgacatctgtaccacctcatggctgtctggcgagagacggaaggatcaagcggggtgatgttttactgaatatcaacggaattgacttgaccaacctcagccatagtgaggcagtggcaatgctgaaagcctcagccgcgtccccagccgtcgctctgaaggccctggaagtgcagattgttgaggaggccacacagaatgctgaagaacagccctctacattctccgagaacgaatatgatgcatcttggtccccatcctgggtgatgtggctgggtttaccgagcacattacattcctgccacgacattgtgctccggagaagttacctcgggtcatggggattcagtattgtggggggctacgaggagaaccatacaaaccaacccttcttcatcaaaactattgtgctgggaacacctgcctactacgacggccggctgaagtgcggagatatgattgtggcagtgaacgggctctccactgtggggatgtcacatagcgctctggtgcccatgctcaaggagcagcgaaataaggtgactctcaccgtgatttgctggccaggaagcctggtttag

SEQ ID NO: 122473 - DNA, 2115 bp, synthetic construct
  misc_feature 1..2115: note = Description of Artificial Sequence: Synthetic coding sequence
  source 1..2115: mol_type = other DNA
atgctgggcatttgtagaggaaggaggaaattcctcgcggcgagcctgagtctcctgtgtatccccgccatcacatggatttacctcttcagtgggtccttcgaggatggcaaacccgtatcactctcccctctagagtctcaggcccattctcccaggtacacagcttcttcccagagggaaagggagagtttggaggtccgaatgcgcgaggtggaagaggagaacagggctctgaggagacaactgtcactcgctcagggccgcgcaccttctcatcgccgtggtaatcattccaaaacttactccatggaagaaggtacgggcgatagcgagaacctgcgggcaggaatcgtcgctggtaactcatcggagtgcggccagcagcccgtggtggaaaaatgtgagaccattcacgtggctattgtctgcgctggctacaatgcctctagggatgttgttacactagttaaaagcgtgcttttccacaggagaaacccactacattttcatctgatagcagatagcatcgccgagcagattctggccaccttgttccaaacctggatggtccccgcagtcagagtggacttttacaatgccgatgagttgaagagcgaagtatcctggattcctaacaagcactatagtgggatttacgggctgatgaagctagtgctaactaagaccctgccagctaatctggaacgggtgatcgtgctggacacggatataactttcgccacagatattgcagaactgtgggctgtttttcataagttcaaaggccagcaggtgctgggcctcgtggagaaccagagtgactggtacctcgggaacttatggaaaaaccaccggccgtggccagctttaggccgcggatataatacaggcgtaatactattattacttgataagctgcgcaaaatgaagtgggaacagatgtggcgcctgactgccgaacgagagctgatgggcatgctttccacatctctggccgaccaggatatttttaacgcagtaatcaagcagaatccgtttctggtctatcagctgccatgtttttggaatgtgcagctctccgatcacacacgcagtgaacagtgttacagggatgtgagcgatcttaagctccagaagcagttatccgaactcgatgaagacgacttgtgctatgagttccgcagagagcgctttaccgtgcatagaacccacctttattttttacactacgaatacgagcctgctgcggatagtaccgacgtgactctggtggcgcagctgtctatggacaggctgcaaatgttggaggccatatgcaaacattgggaaggacccatttcactcgccctgtacctaagtgatgcggaggcccagcagttcctgcgctacgctcaaggcagcgaggtcctcatgagtagacataacgtcgggtatcatattgtttataaagaaggccaattctacccagtaaaccttctgaggaacgttgctatgaagcacattagtactccttatatgtttctcagcgacattgactttctcccaatgtacgggttatacgagtacctccgtaaatccgtaattcagctcgacctcgcaaacacaaagaaggccatgattgtgcctgcgtttgagactcttagatatcgtctttcttttccaaagagcaaagctgagctgctctcaatgttagacatggggactctgttcacattccggtatcacgtgtggacgaaggggcacgctccaaccaatttcgctaagtggcgcactgcaaccacaccctatcgggtagaatgggaggccgactttgagccatacgtggtggtcaggagagactgtccagaatatgaccgaaggttcgtgggattcggctggaataaggtggctcatatcatggagctggatgtgcaggagtatgagtttatcgttctaccgaacgcctacatgatccatatgccgcatgcaccctctttcgatattaccaaatttaggtccaataaacagtaccggatctgcctcaaaactctcaaagaagagttccaacaggatatgagtcgtcggtacggctttgccgcacttaaatatttgactgccgagaacaacagttag

SEQ ID NO: 122474 - DNA, 2271 bp, synthetic construct
  misc_feature 1..2271: note = Description of Artificial Sequence: Synthetic coding sequence
  source 1..2271: mol_type = other DNA
atgctcgggatatgtcgaggccgacgcaaattcctcgcagcctctctcagcctgctttgtatcccagctattacctggatctacttgttcagcggaagctttgaagatgggaaacccgtgtctctgtctcctctggaatctcaagctcacagccccaggtacactgcatcttctcagcgcgagcgcgaatccctggaagtccggatgagggaagttgaggaggagaatcgcgcactccgccgtcaactgagtctcgcccaaggccgcgcgccttctcacagaagaggcaaccactctaaaacctacagcatggaagaaggaacaggtgactctgaaaacctccgtgcagggattgtcgcaggaaattctagcgagtgtggtcaacagcccgtggttgagaagtgcgagacaatccacgtagccatcgtgtgcgccggttataatgcctcgcgggacgtggtgacgttggtgaagtctgttctgtttcataggagaaatccacttcactttcatcttatcgccgatagcattgccgaacagattctggctacattgtttcaaacatggatggtgcccgctgtccgggtggatttttacaacgccgatgagttaaaatccgaggtatcatggatcccaaacaaacattattccggaatttatggcctcatgaaattagtgctgaccaaaaccctacccgccaacctggagagggtgattgtgcttgatactgacatcactttcgctacagacattgctgaactttgggctgtcttccacaaatttaagggccagcaagtgctcggactggtggagaatcagagcgactggtacctcggcaacttatggaaaaatcaccggccgtggccggcactgggcaggggttacaatacgggggttatcctgttgctgctggacaaactgaggaagatgaagtgggaacagatgtggaggttaacagctgagcgggaactcatgggcatgttgtctacaagcctggctgatcaagatatctttaatgcagtgattaagcaaaacccgttccttgtatatcaactcccctgcttttggaatgtccagttgtccgaccacacacggtcagaacagtgttacagggacgtgtccgatctcaaggtcatccattggaattcgcccaagaaactacgcgttaaaaacaagcacgttgaatttttccgaaatctgtatctcacctttcttgaatacgacggcaatctgctgaggagagagctcttcggatgcccttcagaagcggacgttaacagtgaaaaccttcagaaacagttaagtgaactagatgaagacgatctctgctacgagttccgccgagagcgtttcaccgtccacagaacacacctttacttcctccactacgagtacgagccggctgcagattctacagacgtcacactggtggctcaattaagcatggacaggctccagatgctggaagcaatttgtaaacattgggaagggcccatcagcttagccctatacctgagtgacgctgaggcacagcagttccttcggtacgcacaaggttccgaggtccttatgtcccgccacaatgtcggatatcatattgtctacaaagagggtcagttttaccctgttaacctgctgcggaacgtagccatgaagcacatctccacaccttacatgtttctgtccgacatagattttctacctatgtacggcctgtacgagtacctgagaaagtctgttatacaactggacctggcaaacacgaaaaaggccatgatcgtgccggcttttgagaccctacggtataggctaagctttcctaaaagcaaagcagaactcctgtctatgttggatatggggactctttttacattcaggtatcatgtgtggacaaaaggacatgctcccaccaactttgccaaatggaggacggccactaccccataccgggtggagtgggaagcagactttgaaccgtatgtggtagtcagacgggattgccctgagtacgatagaagattcgtcggtttcggttggaataaggtggctcatattatggagcttgatgtacaagaatatgaattcattgtcttgcctaatgcttacatgatccatatgccacacgcgccctctttcgatattaccaagtttagatccaacaagcaatacagaatatgtctgaaaaccctcaaggaagaatttcagcaggacatgtccagacgctatgggtttgctgcactgaaatacttaacggcagaaaacaactcatag

SEQ ID NO: 122475 - DNA, 2271 bp, synthetic construct
  misc_feature 1..2271: note = Description of Artificial Sequence: Synthetic coding sequence
  source 1..2271: mol_type = other DNA
atgctgggcatctgcagaggacggcgtaaatttctggccgcctcactatcattgctgtgcatccccgcgataacttggatctacctgtttagtggctcatttgaggatggaaaacctgtatcgctttctcccttagagagtcaggcgcactctcctcgctacacagccagctcgcagagagagagagagtcgctagaggttcgcatgcgggaggtcgaagaagaaaatcgggccctgcgccgccagctatctctcgcccagggacgcgcgccttcgcataggcggggaaaccactcaaagacctactcaatggaggaaggtacaggggacagtgaaaatctgcgcgcagggatcgtggccggaaacagttcagaatgtggccagcagccagtggtggagaagtgcgagacgattcatgtagctattgtatgtgctggttacaatgccagtcgcgacgtggttaccctggtaaagagtgtgctcttccacaggcgtaatcccctacacttccatctgatcgccgacagcattgcggagcaaatcctggcaactttgttccaaacttggatggtccctgcagtgagagtcgacttttataatgccgatgagcttaaaagcgaagtttcttggatccccaacaagcactattctgggatctatggccttatgaaactggtgttaactaaaaccttgcctgcaaatctcgagcgcgtcatcgtgctggatacagatattaccttcgcgacggacattgctgagctctgggccgtgttccataaattcaaaggtcaacaagttctgggcttagtggaaaaccaatcagattggtacttggggaacctgtggaagaaccatcgcccatggccagccctaggtcgggggtacaataccggcgtcattctccttcttcttgacaagctacggaaaatgaagtgggaacaaatgtggcggctcactgcagaaagggaactgatggggatgctgagtactagcctggctgaccaagacatcttcaacgctgttataaaacagaacccttttcttgtctatcagttgccatgcttttggaacgtccagctgagcgatcacactcgatccgagcaatgttatagggatgttagcgacctcaaagtcattcactggaatagtcccaaaaagctgagagtcaagaataagcatgtggaattctttagaaatctgtatctgacctttcttgaatacgatggaaacttactcagaagagagctgttcggatgtccctctgaggccgatgttaatagcgagaatctccaaaaacagttgagtgagctggatgaggacgacctctgctacgaatttaggagggaacgcttcaccgtgcatcggactcacctttactttctgcactatgagtatgagccagccgctgacagcactgacgtaacactggtggcccagctctcaatggatcgactgcagatgctggaggccatatgcaagcactgggaaggaccgatctctctcgccctgtacctgagcgatgccgaggcacaacagttcctaaggtacgctcaggggtccgaagtgctcatgtcacggcacaacgttggataccatattgtgtataaagaggggcagttttatccggtcaatctgctgcggaacgtagccatgaaacacatctcaaccccctatatgtttctaagcgacattgattttctaccaatgtatggcctgtatgagtatctcagaaaaagtgtgatccagcttgatctggccaacaccaagaaggctatgatcgtcccagcctttgagaccctacgctatcgcctttcctttccaaaatcaaaggccgagctgttaagcatgctagatatgggaacgctatttaccttccggtaccacgtgtggactaagggacacgccccaaccaacttcgctaaatggcgcaccgccaccaccccataccgggtggagtgggaagccgacttcgaaccttacgtggtggtgcggcgggactgtcccgagtatgacagacggtttgtcggatttggatggaataaagtggctcacatcatggaactcgatgtacaggagtacgaatttatagtgctgcccaacgcatatatgattcatatgcctcatgcaccctctttcgatattacgaagttcagatcaaacaagcagtatcgcatctgccttaaaacattgaaagaggagttccaacaagatatgagtcgtcggtatggcttcgctgccctcaaataccttaccgcagaaaacaactcatag

SEQ ID NO: 122476 - DNA, 2115 bp, synthetic construct
  misc_feature 1..2115: note = Description of Artificial Sequence: Synthetic coding sequence
  source 1..2115: mol_type = other DNA
atgctgggtatttgtcgcgggcgacggaagtttttggccgctagtctctccctcctgtgtatcccagcaataacgtggatttatctcttcagcggttctttcgaagatgggaaacctgtctctctgagccctctggagagccaagcgcactcaccacggtatactgcctccagtcagcgggagagggagtccctggaagttcgcatgcgggaagtcgaggaagaaaaccgcgccctgcggagacagctgtctctggctcagggtagagcaccctcccaccggagaggcaatcatagcaaaacctactccatggaggagggcactggggattccgaaaatctccgtgcagggattgttgcaggtaactccagcgagtgcgggcagcagcccgtggtcgaaaaatgcgagacgatacacgtggccattgtttgtgctgggtacaatgcaagccgggacgtggtcaccctcgttaagagcgtgttgttccatcgcagaaacccactgcattttcacctgatagcagatagcatagctgagcaaattcttgcaactctgtttcagacctggatggtaccagccgttagagtggatttctacaacgctgacgagttgaagtctgaggtctcttggatcccaaacaaacattactctggcatctatggactcatgaagctagtgctgaccaagaccctgcctgccaatttagagagggtaattgtgctggacaccgacatcaccttcgctacagacatcgccgaactctgggctgtgttccataagtttaaaggacagcaagtattgggcctggtggagaaccagtcagactggtacctgggtaacctgtggaaaaatcatcgaccttggcctgccctcgggagaggatacaacacgggagtaattctgctgctgctggataaactccgaaagatgaagtgggagcagatgtggcggctgaccgcggaaagggagctgatgggcatgttgagcacctcacttgcagatcaagacatcttcaacgctgtaatcaagcagaaccccttccttgtctaccaacttccatgcttctggaatgtccaactcagcgaccacacccgaagtgagcagtgttatagggacgtgagcgatcttaaactccaaaagcaactctcagaattggacgaagatgacctctgctatgaattcaggcgggaaagatttaccgtgcatcgtactcatctgtattttctgcactacgaatacgagcctgctgccgactccacagatgttaccctggtcgcgcagctgagcatggaccgcttacaaatgctcgaggccatttgcaaacattgggagggccctatatccctcgcactctacctttcagatgccgaggcccagcaatttctgcggtatgctcagggctctgaggtgctgatgtcacggcataatgtgggctaccacattgtctacaaagaggggcagttttatcccgtgaatcttctccgtaacgtggctatgaaacacattagcactccatatatgttcctgtcagatattgattttctccctatgtacgggttgtatgaatatctgcgaaagtccgtaattcagctcgacctggctaacaccaagaaggccatgattgtccccgcgttcgagaccctgcgctatagactgtcctttccaaagtcaaaggccgaactgctttccatgctggatatgggcaccttgtttacttttcgataccacgtgtggactaagggtcacgcccctacaaattttgctaagtggaggacagcaaccactccttatcgggttgaatgggaggctgactttgaaccatatgtagtggtccggcgggattgtcccgaatacgacagaaggttcgttggattcggctggaataaagtggctcacatcatggaactggacgttcaggaatacgaattcatagtcttacctaacgcctatatgatccacatgccgcacgcaccctcttttgatatcaccaaattccggagcaataagcagtaccgaatttgcttgaaaaccttaaaagaggaattccagcaggatatgtcccgccgatacggatttgcagccctgaagtatctcacagcggagaacaactcctag

SEQ ID NO: 122477 - DNA, 408 bp, synthetic construct
  misc_feature 1..408: note = Description of Artificial Sequence: Synthetic coding sequence
  source 1..408: mol_type = other DNA
atgcttggcatctgtaggggtcgccgcaaatttctggctgcaagcctgtctctactgtgcatacctgccattacatggatttacttatttagcggttctttcgaagatggcaaaccagtgtccctctcccccctcgagtcccaagcccacagtccaaggtatacagcaagctcccaacgcgagcgggaaagtctcgaagttcgtatgagagaggttgaggaggagaatagagccctcaggcggcagttgagtctggcacaggggcgagcaccctcacacagaagggggaaccacagtaagacttactcaatggaagaagggacaggtgattcagagaatttaagagctgggattgttgctgggaacagcagcgaatgcggccagcagccagtggtggaaaagtgctag

SEQ ID NO: 122478 - DNA, 144 bp, synthetic construct
  misc_feature 1..144: note = Description of Artificial Sequence: Synthetic coding sequence
  source 1..144: mol_type = other DNA
atgctcggcatctgcagaggaaggcgcaagtttctggcagcttcactgagtctgctttgtattccagctattacatggatttatctgtttagtggctcctttgaagatgggaaaccagttagtctgtctcccctcgaatcctag

SEQ ID NO: 122479 - DNA, 411 bp, synthetic construct
  misc_feature 1..411: note = Description of Artificial Sequence: Synthetic coding sequence
  source 1..411: mol_type = other DNA
atgctcggtatttgtcgcgggcggcgaaaatttcttgccgcctctctgtctctgttgtgcatcccagccattacctggatatacctgttctctgggtcttttgaagatggcaagcccgtgtcattatccccattggagtcccaggcccactcccctcgctataccgcaagctcgcaacgcgaaagagagtccttggaggttcgcatgcgcgaagtggaggaggaaaatagagccctgcgtaggcagttgtcacttgcgcaggggagagcacccagccatcgcagaggcaatcattcaaagacctacagtatggaggagggcaccggagatagtgagaacttgagggcaggtatcgtcgccggaaactcctccgagtgcggacagcaaccggtcgtggaaaagtgcgagtag

SEQ ID NO: 122480 - DNA, 183 bp, synthetic construct
  misc_feature 1..183: note = Description of Artificial Sequence: Synthetic coding sequence
  source 1..183: mol_type = other DNA
atgctgggcatttgtagaggtcggagaaaatttttggccgcaagcctctcactgctctgcatcccagctatcacctggatttatctgttctcgggatctttcgaagatggcaagcccgtgtcactctcacccctcgaatcacaagctcactctccacgctataccgcctctagtcagaggtag

SEQ ID NO: 122481 - DNA, 330 bp, synthetic construct
  misc_feature 1..330: note = Description of Artificial Sequence: Synthetic coding sequence
  source 1..330: mol_type = other DNA
atgctaggcatttgcagaggaagacgaaaattcttagctgcgtctctgagcctgctgtgcattccagcgattacctggatatacttgttcagcggaagcttcgaagacggcaagccagtgagtctgagtcccctggagagccaggcccatagcccaagatacaccgcgtccagtcagcgagaacgagaatctctggaagtaaggatgcgggaagtcgaggaggagaatagggctctcagacgccagcttagccttgcccagggccgagccccctcccatagaaggggaaatcactccaagacctacagcatggaagagggaacgggctag

SEQ ID NO: 122482 - DNA, 2124 bp, synthetic construct
  misc_feature 1..2124: note = Description of Artificial Sequence: Synthetic coding sequence
  source 1..2124: mol_type = other DNA
atgctaggaatttgccggggtcggcgcaaattccttgctgctagcttatcccttctctgcatcccagccataacctggatctacctattttccggctcattcgaggatggaaaaccggtctcactgtccccactggaatcccaggcacacagtccccggtacaccgctagctcccagcgagagcgcgagtcattggaggtacgcatgcgcgaagttgaggaagagaatagggcactaagacgtcaactgagcttggctcaggggagggcgccttcccaccgtcgcggtaaccatagtaaaacctattcgatggaagaaggaacgggcgactctgaaaacctgcgcgctggaatcgtcgccgggaatagctcagaatgcggccagcagcctgtcgttgaaaaatgcgagactatccacgtggcaatcgtctgtgcaggatataatgcatccagggatgtggtcacccttgtcaaaagcgtgttattccaccgacggaacccgctgcactttcatctgattgccgactccatcgctgagcagatcctggccaccctgtttcagacgtggatggttcctgccgtgagagtcgatttttacaacgccgatgaactgaagtcagaggtgagctggattccgaataaacattattcaggcatctacggactgatgaagctggtgctcaccaagactctcccagcgaacttagagcgcgtgatcgtgctggacaccgatattacctttgccaccgacatcgcagagctgtgggcagtcttccacaagttcaaaggccagcaggtgttgggactagtcgagaatcagagtgactggtacctgggtaacctttggaagaatcaccgtccttggcccgccctgggtcgaggctataataccggagtgatccttcttctcctggataagctgaggaagatgaagtgggaacagatgtggagacttaccgcggagcgtgagctgatgggtatgctgtccaccagtctggcggatcaggacattttcaacgcggtgattaagcagaacccgtttctggtctaccagctgccctgtttttggaacgtccagctcagtgaccatactagatccgaacagtgttacagggacgtgagcgacctcaaagtgattcactggaattcgccgaaaaagttgcgggtgaagaacaaacatgtggagttctttcggaatctctatttgacttttcttgaatatgacggcaatttactgagaagagaacttttcggctgtccctctgaggctgacgtgaattcggagaatttgcagaagcagctgtcggaattggacgaggacgatctgtgttatgaattccggcgcgaaaggttcactgtgcaccgcacccatctctacttccttcactacgaatacgagcccgcagccgactccaccgacgtgaccctggtggcacagctgagtatggacaggctacaaatgttggaggccatctgtaagcattgggaaggacccatctcccttgcactatatctgagcgatgccgaggctcagcagtttctccgctacgcccaaggcagcgaggtcctgatgtcacgccataacgtgggctatcacattgtttacaaagaggggcagttctacccagtgaacctcctgcggaatgtagccatgaagcatatcagcacaccgtacatgtttcttagcgatatagattttctccccatgtacggcctctatgagtaccttagataccatgtatggacaaagggtcacgcccccactaattttgccaaatggagaaccgcaaccactccttaccgggtggaatgggaggcagacttcgagccgtacgtggtagtcagacgtgattgcccagagtacgacaggcgttttgtgggcttcggatggaataaggttgctcatatcatggagcttgatgtgcaggagtatgaattcatcgtcctgcccaacgcttacatgatccacatgcctcacgccccatcgtttgacatcacaaaatttaggagcaacaagcagtatagaatctgcctgaagactttgaaagaggagtttcaacaggacatgagccgcaggtacggcttcgctgcccttaaatacctgactgctgaaaataatagttag

SEQ ID NO: 122483 - DNA, 1668 bp, synthetic construct
  misc_feature 1..1668: note = Description of Artificial Sequence: Synthetic coding sequence
  source 1..1668: mol_type = other DNA
atgcttatatggagcgaggtatcctggattcccaacaagcactattcgggcatctacggcttgatgaaactggtcttgactaaaacgcttcctgccaacctcgaacgggtgattgtactggatactgacataacctttgcaacggacattgccgagctgtgggccgtttttcacaaattcaagggacagcaagtactcggccttgtggagaatcagagcgattggtaccttggaaatttatggaagaaccaccgaccctggcctgccttagggagaggttataacactggagtgattctacttctgcttgataagctgaggaagatgaaatgggaacagatgtggagattgaccgcagaaagagagctgatgggaatgctttccacatccctggccgatcaggacatctttaatgctgtgattaagcagaacccattccttgtataccagctgccctgcttttggaatgtacagctttcggatcacaccaggagcgagcagtgctatagggacgtctctgatctgaaggtgatccactggaacagccctaagaagcttagggtaaagaacaagcatgtggagttcttcaggaatttgtatttgaccttcctggagtacgatgggaacctactccggcgagaactgtttggatgcccctccgaagcggacgtgaactctgaaaacctgcaaaaacagcttagtgagctcgatgaggacgacttgtgctatgagtttagacgcgagcgcttcactgtgcatagaacgcacctctattttctccactatgagtacgagcccgccgctgattccacagatgtaactttagtagcacaactgagcatggaccgcttgcagatgctcgaggcaatctgtaagcactgggagggtcctatttcattggcactgtatctgtctgacgctgaagcgcagcaattcctgagatacgcccagggcagcgaggtgctcatgtctaggcacaatgtgggttatcatattgtctacaaagagggccagttctaccccgttaatctgttgcggaatgtggccatgaagcacattagcactccatacatgtttctgtccgacatcgactttctgcctatgtacggtctgtatgagtatctgcgaaagtctgtgattcagctagatctggccaacacgaaaaaggcaatgattgtcccagcatttgagacactcaggtacagactatcttttccaaaaagcaaagccgaactgctctctatgttggacatgggcacattattcactttccgataccacgtgtggactaaaggccacgcccctacaaacttcgctaagtggcgcaccgctactaccccctaccgagtagaatgggaagcggactttgaaccgtacgtggtcgtgcgtcgcgactgtcccgagtatgatcgacgcttcgtgggcttcggatggaacaaagtggctcatatcatggaattggatgtccaggaatacgagtttatcgtattgcccaacgcttacatgatccacatgccccatgctccctcttttgacattaccaagttccggtccaacaagcagtaccgcatctgtctcaagacactgaaggaagaattccagcaggatatgtcaaggagatacgggtttgccgcacttaagtacttgacggccgagaacaactcttag

SEQ ID NO: 122484 - DNA, 1098 bp, synthetic construct
  misc_feature 1..1098: note = Description of Artificial Sequence: Synthetic coding sequence
  source 1..1098: mol_type = other DNA
atggctaaggtcgcaaaagaccttaaccccggggtaaagaaaatgtcattgggacagctgcagtctgctcggggtgtggcctgcctggggtgcaaggggacttgtagcggatttgagccacatagttggcgaaagatctgcaagtcctgcaaatgctcccaggaggatcattgcctcacctcagatctggaggacgatcgtaaaataggtagacttttaatggactccaaatactctactctcactgccagagtcaaaggcggtgacggaatacggatctacaaacgaaacaggatgatcatgaccaaccccattgcaactggtaaagaccctacgttcgacactataacgtacgagtgggcccccccgggggttacacagaagctgggcctgcagtacatggaactcattccaaaagaaaaacagccagtgacggggactgaaggcgcgttttacaggaggcggcagctgatgcatcagctgcctatctacgaccaggacccctcacgctgtagaggccttcttgaaaacgagctgaagttaatggaggagttcgttaagcaatataagagcgaagcgctcggggttggagaggtggctcttccagggcaggggggcctgcctaaggaagaaggtaagcagcaggaaaaacccgaaggggcagaaacaactgcagcaactaccaacggcagcttaagcgatccaagcaaggaagttgagtacgtgtgcgaactgtgtaaaggtgcggcccctccagattccccagttgtatatagcgatcgggccggctacaacaaacagtggcacccaacctgctttgtttgtgccaaatgttcagagcctctcgtggacctgatatatttttggaaggacggcgccccctggtgcggaagacattattgtgaaagcctgaggccaaggtgctccggatgtgatgagataatttttgcagaagattatcagcgagtggaagacttggcttggcaccggaagcacttcgtgtgcgaaggatgcgaacagcttctcagcggtcgggcatacatagtgactaaaggccagttgctgtgtcccacttgctcaaagtccaaacgttcctag

SEQ ID NO: 122485 - DNA, 762 bp, synthetic construct
  misc_feature 1..762: note = Description of Artificial Sequence: Synthetic coding sequence
  source 1..762: mol_type = other DNA
atgttcggtatgcagggagatgtgtttggtctgcgagccacttttatggaaggcctgcagtacatggagttaattccgaaggaaaagcaaccggtgaccggaaccgagggggcgttttaccggcggcggcagctgatgcaccagctgcctatttacgaccaggacccttcaagatgtaggggcctactagaaaatgagctgaaattgatggaagaatttgttaaacagtataagagcgaagctctgggggtgggcgaagtcgctctgccggggcagggcggcctcccaaaggaagagggaaagcaacaagaaaagcccgaaggggctgaaaccacagccgcaacaaccaatgggtccctgtctgatccaagcaaggaggtcgagtacgtttgcgaactttgtaaaggcgcagctccaccggacagtccagtagtgtacagcgatagggccggatacaacaagcaatggcatccgacatgttttgtttgcgcaaaatgtagcgaaccgcttgtggacctcatttacttctggaaggacggtgctccctggtgtgggcgccactactgtgaaagtctccgcccaaggtgtagtggatgcgatgagattatctttgcagaggactatcagagagtcgaggacctcgcttggcacagaaaacacttcgtgtgcgaaggttgcgaacagcttctgagcggtcgcgcgtatattgttactaagggacagctcctctgccccacatgttcaaagagcaagagaagttag

SEQ ID NO: 122486 - DNA, 879 bp, synthetic construct
  misc_feature 1..879: note = Description of Artificial Sequence: Synthetic coding sequence
  source 1..879: mol_type = other DNA
atggattctaagtacagcaccctgaccgctcgcgtcaagggaggggacggaataagaatctacaagcgaaatcggatgatcatgaccaatcctatcgccacaggaaaagatcctaccttcgacacaatcacctacgagtgggcacctccgggggtgacacagaaactggggctgcaatacatggagttaatccccaaggagaaacagcctgtgacaggtacggagggtgccttttacaggcggagacaactgatgcaccagcttcctatttacgatcaggacccaagtagatgtagagggctcctggaaaacgagttaaagctcatggaagagttcgttaagcagtacaaatctgaggctctgggcgtgggcgaggtggccctgccagggcaagggggtcttccaaaggaggaaggaaagcagcaggaaaagcctgaaggtgctgaaaccaccgccgccacaacgaacgggtccctctctgatccctcaaaagaggtggagtacgtgtgtgagctgtgcaagggtgcggctccccctgacagcccagtagtatactcagacagggccggatataacaaacaatggcatcccacttgcttcgtgtgcgccaaatgttccgaacccctggtagatctgatctacttctggaaggacggcgctccctggtgcggtcgccactactgtgaatccctgagacctcgatgctcagggtgcgacgaaattatcttcgccgaagactaccagcgcgtggaagatctggcgtggcacaggaagcattttgtctgtgaaggctgcgaacagctgctctctggtagggcgtatatagttaccaaggggcagctgctgtgtccgacatgcagcaaaagcaaacgaagctag

SEQ ID NO: 122487 - DNA, 744 bp, synthetic construct
  misc_feature 1..744: note = Description of Artificial Sequence: Synthetic coding sequence
  source 1..744: mol_type = other DNA
atggccaaggtagctaaggacctcaaccctggcgtcaaaaagatgagtctcggccaactgcaatccgcaagaggagtagcatgtctgggctgcaaaggaacatgcagcgggtttgagccccatagctggcgtaagatctgtaagtcttgcaagtgctcccaagaggatcactgcctgacctcagacctcgaggatgatcgcaagatcggccggcttctgatggattctaagtacagtacactgactgctagggtgaaaggtggagacgggattcggatatataagagaaataggatgatcatgactaatcctattgctacaggtaaggatcctacattcgatacaataacgtacgagtgggctcccccaggggtcacacagaaactaggtctacagtacatggagctgatacccaaagagaagcagccagtgactggcaccgagggagcattttacagacggcgccaactgatgcaccagttgcctatttacgatcaggaccccagccgttgtagaggactccttgagaacgagttgaagcttatggaggaattcgtgaagcagtacaagtccgaagctctgggcgtaggggaggttgcccttcctgggcagggcgggttgccaaaggaagaaggaaagcagcaagagaagccagagggtgctgaaaccactgcagccaccactaatggaagtttgtccgatccctctaaagaggtggaatataagcctgttcccctcgtttag

SEQ ID NO: 122488 - DNA, 786 bp, synthetic construct
  misc_feature 1..786: note = Description of Artificial Sequence: Synthetic coding sequence
  source 1..786: mol_type = other DNA
atgaatcccaattgtgctcgctgcggtaaaatcgtctatccaactgaaaaggttaactgcttagacaagttctggcacaaagcctgctttcattgtgagacgtgtaaaatgactctgaatatgaaaaattacaaggggtacgagaagaaaccctactgtaatgcccattaccccaaacagagctttactatggtggctgacactcctgagaatctccggctcaagcagcaatcagagctgcagagtcaggtcaggtataaagaggaattcgagaaaaacaaaggaaaaggctttagtgtcgtagcagatacgcccgagctgcagagaatcaagaagacacaggaccagatcagtaacatcaagtatcacgaagaattcgaaaagtccaggatgggaccttctgggggagagggcatggagcctgagaggcgggacagccaggatgggagctcatacagaaggccactggagcaacaacaaccgcatcatataccaaccagcgccccagtttaccagcagccacagcagcaaccagttgcccaaagctacggcggatacaaagaacctgccgcccccgtgagtattcagcggtccgcaccaggcggcgggggaaaaagatatagagccgtgtacgattattctgcagcagatgaggacgaggtgagttttcaggacggggacactattgtgaatgtgcagcagatcgacgacggttggatgtacggaaccgtggaacgcaccggcgacactggtatgctgcctgcgaattatgtggaggcaatctag

SEQ ID NO: 122489 - DNA, 501 bp, synthetic construct
  misc_feature 1..501: note = Description of Artificial Sequence: Synthetic coding sequence
  source 1..501: mol_type = other DNA
atgaccctgaatatgaagaattacaagggctatgaaaaaaagccctactgcaacgctcattatcccaaacaatccttcactatggtagctgatacgccagaaaatctcagattgaagcagcagtcagagctccaatctcaggtccgctataaagaagaattcgagaagaacaaagggaagggtttttctgttgtggccgatactcccgaattgcagagaatcaagaaaacccaagaccagatcagcaacatcaaatatcacgaagaatttgagaaatcaaggatgggccctagtggaggcgaggggatggagcccgaaagaagagactcacaagacgggtcttcctaccgccgaccactcgagcaacagcagccacaccacattccaaccagcgctcccgtgtaccagcagcctcagcagcagcccgtagcccagtcatacggaggatacaaggaacctgcagcccctgtgagcatacagcggagcgcgcctggcggctag

SEQ ID NO: 122490 - DNA, 618 bp, synthetic construct
  misc_feature 1..618: note = Description of Artificial Sequence: Synthetic coding sequence
  source 1..618: mol_type = other DNA
atgctgcccttacgagaccttcaagatgacacagaacacgaggaacttcagggactcagggaggaggcgctcctgcagcgggttcgttataaagaagagttcgagaaaaacaaaggcaagggtttttccgtagtcgcggataccccagaattgcaacgaatcaagaaaacgcaggatcaaatctcgaatataaagtaccacgaagaatttgagaagtctcggatgggcccaagcgggggtgagggaatggaacccgagaggcgggatagtcaggatggatcttcatatcgccgacccctcgaacagcaacagccccatcatatccccacttctgcgcccgtgtatcagcagccccagcagcaacccgtggcccaatcttacggcgggtataaggagcctgctgccccagtaagcattcaacgctcagcccctggcggcgggggaaaaaggtaccgcgcagtctatgattatagtgctgccgacgaagatgaggtttcatttcaggacggcgacacaatcgttaacgtgcagcagattgacgacgggtggatgtacggtaccgtggaacggacgggggatactgggatgctgcctgctaattatgtggaggccatatag

SEQ ID NO: 122491 - DNA, 786 bp, synthetic construct
  misc_feature 1..786: note = Description of Artificial Sequence: Synthetic coding sequence
  source 1..786: mol_type = other DNA
atgaacccaaattgtgcacggtgtggcaagatcgtgtaccccacagagaaggtgaattgtttggacaaattctggcacaaggcatgcttccactgcgaaacctgcaagatgacactcaatatgaagaattacaagggatatgaaaagaaaccctactgcaatgcccattatcccaagcagagctttaccatggtcgccgacacccccgagaatcttagactcaaacagcaaagtgagttacagtcacaggtgcgatacaaggaggagtttgagaaaaacaaggggaaaggtttctccgtagtggcagatacacctgaactacaacgcattaagaagacccaggatcagatatcaaacatcaaataccacgaagaattcgagaagtctagaatggggcccagtggtggcgaggggatggagccagaaaggcgcgatagccaagatggcagctcctaccggagaccactggaacaacagcagcctcaccatatcccaactagcgcgcctgtttatcaacagccacagcaacagcccgtagctcagtcctatggagggtacaaagaacccgcagcacctgttagtattcagcgctcggccccggggggagggggtaagaggtatcgcgcagtgtatgactattccgccgcggacgaggatgaagtatctttccaggatggcgatacgattgtgaacgtccaacagattgatgatggatggatgtatgggaccgtcgagcgcacaggcgatacgggtatgttacccgccaactatgttgaagccatctag

SEQ ID NO: 122492 - DNA, 378 bp, synthetic construct
  misc_feature 1..378: note = Description of Artificial Sequence: Synthetic coding sequence
  source 1..378: mol_type = other DNA
atgaaccccaactgcgcacgttgcgggaagattgtctatccgaccgaaaaagtgaattgtctggacaaattttggcataaagcttgtttccattgcgagacttgcaaaatgacactgaatatgaagaattacaagggttacgagaagaaaccatattgtaatgcacactatccaaagcagtcattcactatggtggctgatactccggaaaaccttcggcttaaacagcagagtgaattgcagagccaggtccgatacaaggaagaatttgagaaaaacaaagggaaaggcttctctgtggtggcagatactcccgagctccagcggtcatcactcggattcctctggaatgaaattcccccttcaccacatctatag

SEQ ID NO: 122493 - DNA, 4050 bp, synthetic construct
  misc_feature 1..4050: note = Description of Artificial Sequence: Synthetic coding sequence
  source 1..4050: mol_type = other DNA
atgaaaaaaattaggatttgccacatattcacgttctattcatggatgtcttatgatgtgctttttcagcgcaccgaactcggtgctctcgagatctggagacaactcatctgtgcccacgtgtgcatctgcgtgggttggttatacctgagggaccgggtgtgcagcaaaaaggatattatactacgaactgaacagaattcaggacgtactattcttattaaggcagtgaccgagaagaacttcgaaacaaaggacttccgcgcaagccttgaaaatggcgtcctgctgtgtgaccttattaacaaacttaaaccaggcgtcataaaaaagataaatcgtttatcaactccaattgcgggtcttgacaacattaacgtgtttttaaaagcctgcgagcagatcggcctaaaggaagcacagctgtttcatcccggcgacttgcaggatctgagtaaccgcgtgacagtgaaacaggaggagacggacaggcgcgtcaagaatgtgctgatcaccctgtattggctgggccgcaaggcacaaagcaatccctactataacggtccccatctgaatcttaaggccttcgagaacctcctgggacaggcccttactaaagcgctggaggactctagtttcctgaagagaagtgggcgggattctggctacggcgacatctggtgccctgaacgcggtgaattcctcgcaccgccaaggcaccataagcgcgaagacagtttcgagtctctggactcgcttggctctcggagcttgacctcttgctcctcagatattaccctccgggggggaagagaaggctttgagtcagatacggattctgagtttacctttaaaatgcaggactacaacaaggatgacatgagctatcgtaggatctcagctgtagaaccaaagactgcattaccatttaaccgctttcttcctaataaaagtcggcagccttcgtacgttcctgcgcctttaagaaagaagaagcccgacaagcacgaggacaatcgcaggagttgggccagtccagtatacacggaggccgatggcactttcagccgattatttcagaaaatttacggcgaaaacggctctaagtctatgtccgatgtatctgctgaggacgtccagaacttgcgacagctgagatacgaggaaatgcagaagattaagtcacagctgaaagagcaggaccaaaaatggcaggatgacctagctaagtggaaagatcgccgaaagagctatactagcgatttgcaaaaaaagaaagaagagcgagaggagatagagaagcaggcattggagaagtctaaacgcagcagcaaaacattcaaagaaatgttgcaggacagagaatcacagaaccagaagtctaccgttcctagcagacgcagaatgtattcctttgatgatgtgctggaggagggaaaaagacccccgactatgaccgtgagcgaggcctcctatcagagcgagcgcgtcgaggagaaaggcgccacttatccgagcgaaattccgaaggaggactctacaacattcgcaaaaagagaggatcgtgtgactaccgagattcaattaccttcccagagccctgtcgaggagcagagccccgctagcctctctagcctacgctccaggtccacacaaatggagtctaccagggtgagcgccagcttgccacggtcctacagaaagaccgacacggtcagacttacaagcgttgtaacccctcggccgtttggctcacagacacgtgggatcagttcacttccgagatcctacaccatggatgatgcttggaaatacaatggtgatgtggaggatatcaagcggacgcccaacaacgtggtcagcacaccagctccctctcccgacgccagccagctggcaagcagcctgagcagccagaaagaagtggccgccacagaggaggatgtgacgagactgccttcacctacctctcctttcagttctcttagccaggatcaggccgctacctcgaaagccacattgtccagtacatctggactcgacctgatgtccgagtctggcgaaggtgagatctctcctcaacgcgaagtcagtagatcccaagatcagttctctgacatgagaatctccatcaaccagaccccagggaagtcactcgattttggatttacgatcaagtgggatatccctgggattttcgttgctagcgtcgaggcaggcagccctgccgagttcagccagcttcaagttgacgatgaaataatcgccattaataatactaaattcagttacaatgattcaaaagaatgggaagaagctatggctaaggctcaggaaacaggccaccttgtcatggatgtgcggcggtatggaaaagctggaagtccggagaccaaatggatcgacgctacctcaggaatttacaacagcgagaaatcatcaaatctgagcgtgaccactgacttctctgagagccttcagtcgagcaatattgaatcaaaagagataaacggcattcacgatgaatctaatgcattcgaaagcaaagcctccgagtccatttctcttaagaatttaaaacgccgctcacagttctttgaacaaggcagctcagacagcgtggttcctgatcttcccgttccgacaataagtgcccccagccgctgggtgtgggaccaggaggaagagcgcaaacgccaggagcgatggcagaaagagcaagataggttgctccaagagaaataccagcgggagcaagaaaaacttcgcgaggagtggcagcgcgccaagcaggaggctgagcgggaaaactcaaagtatctcgacgaagagctgatggtgttgtcttctaatagcatgtccctgaccactcgggaacctagtcttgccacttgggaagctacttggagtgaaggctctaagtcgagcgatcgcgagggaacccgcgcaggtgaggaggagaggaggcaaccacaggaagaggtggtacatgaagaccaaggaaagaaaccacaagaccaactggttatcgagcgtgagcggaagtgggaacagcagttacaggaggagcaggagcaaaagagactgcaagctgaagccgaagagcaaaagcgccccgctgaagagcagaaaaggcaggctgagatcgaacgtgagacgtcggtgcgtatttaccagtatcgaaggcccgtcgattcgtatgatattcctaagaccgaggaggccagctcaggttttctgccgggagatagaaacaagagtcggtccactacggaactggacgattatagcaccaacaagaatggaaacaataaatacctcgatcagattggcaatatgacttccagccagcggagaagtaagaaggagcaggttcctagtggcgcggagctggaaaggcagcagattctgcaagaaatgagaaagagaaccccactgcacaacgacaacagttggattcgccaaaggagcgcaagtgtgaacaaagagccagtaagtctccctggcataatgcgacgcggtgaatccctcgataacttggatagtccgcgatctaacagctggcgccagcctccatggctcaatcaacccactggattttatgcttcctctagcgtgcaggactttagcagaccccctccccagttagtatccacttctaatagggcctatatgagaaatccctcttcatcagtaccacccccatccgctggatcagttaaaacctccactaccggagtggccactacccagtctcctactccccggtcgcacagcccgtcagcatcccagtctggaagccagctgcgaaatagaagtgtatctggtaaacgcatctgcagctactgcaacaatatactcgggaagggcgccgcaatgatcatcgagagtcttgggttgtgctaccacttgcattgctttaagtgcgtggcatgcgaatgtgatttaggcgggtcgagttccggggctgaggtccgaatcaggaatcatcagctgtactgcaatgactgttatttaaggtttaagagcggccggccgaccgccatgtag

SEQ ID NO: 122494 - DNA, 5013 bp, synthetic construct
  misc_feature 1..5013: note = Description of Artificial Sequence: Synthetic coding sequence
  source 1..5013: mol_type = other DNA
atgaaaaagatccggatttgccatatcttcacattttacagctggatgtcatacgacgttcttttccaaagaactgagctgggcgcattagaaatctggagacaactgatttgtgcccacgtgtgcatatgtgtaggctggctgtatctgagggatcgtgtgtgttccaaaaaagacatcatcctgagaactgagcagaacagcggccgcactatattaatcaaggcggtaactgagaagaattttgagaccaaggattttcgagcctccctcgaaaatggagtcttgctctgtgacctgatcaacaagctgaagcccggggttatcaagaagataaacaggctgtctacccccattgccggcttggataacattaacgtgttcctgaaagcatgtgaacagattgggctgaaggaggcccaactgtttcaccccggagatcttcaggatttgtctaatagagtcacggtcaagcaggaggagaccgataggagagtaaagaatgttctgattactttatattggctgggcaggaaggctcagagcaatccctactacaatgggccgcacttaaatctgaaagccttcgagaatctgttgggtcaggccctgactaaagcgctggaggactcctcattcctcaagagatccggtcgggatagcggctatggagacatctggtgccctgagagaggcgagttcttagcgccacctaggcaccacaaaagagaggattcatttgagagcttggacagtttgggcagtcgaagtctgacttcgtgcagtagtgatatcactctcagaggtggtcgcgagggatttgagtcggacaccgactcggagtttacctttaagatgcaagactataacaaagacgatatgtcatacagacgcatcagtgccgttgaacccaagacagcgctgccatttaacagattccttcccaacaagagtcggcagccctcttacgtacctgccccacttaggaagaagaagccggacaaacatgaggacaatcgccggtcttgggcatccccggtttataccgaagccgacggcactttctcctcgaatcaacggcgcatttggggcactaatgttgaaaactggccaacagtccaggggacatccaaaagcagttgttacttggaggaggagaaagcaaagactcgcagcattcctaacatagtaaaggacgatctgtacgtgcgcaagctatcccccgtaatgccaaaccccggcaacgcctttgatcaatttcttccgaagtgttggacacctgaggatgtaaactggaaacgtatcaagcgggaaacttataaaccatggtataaggagtttcaaggtttttctcagttcctcctgctgcaggcacttcaaacctacagtgatgacatactgtcctctgagactcatacaaagatcgatcctacgagcgggccgcgactgattacgcgccgcaaaaacctgtcttacgcccccggctaccgccgtgatgacctggagatggccgctcttgacccagacctggagaacgacgatttcttcgtacgtaaaaccggggccttccacgccaacccctacgtgcttagggcgttcgaagattttaggaaattctcagaacaggacgactctgttgagcgggatatcatcctccagtgccgggaaggagagctcgtactgcccgatctcgagaaagacgatatgatcgtgagacgcattccagcacagaaaaaggaggtccccttgtccggggcacccgacaggtaccaccctgtgccctttccggagccctggaccctgccacccgaaatccaggctaaattcctgtgtgtgctggaaaggacgtgtccttccaaggaaaaatccaactcttgtaggattctggttccatcctacagacagaagaaggatgacatgcttacccggaagatacaatcctggaagctgggcaccactgtgccccccatttcttttacgcccggtccctgctctgaagctgatctcaagagatgggaggctatacgcgaggcaagtaggctgcgccataagaagcgactgatggtggagcgcctgtttcagaagatttacggcgagaatggctccaagtccatgagtgatgtctcagccgaagatgtccagaatctgaggcaactgcgctatgaggaaatgcagaagatcaaatcccaactaaaggaacaggatcagaaatggcaggatgatttggctaaatggaaggatcgtcgaaagagttatacatccgatcttcaaaagaagaaggaagaacgagaagagatcgaaaaacaagcattagaaaagagcaagaggagctccaaaacctttaaagaaatgctgcaggaccgagaaagtcagaaccagaagagcaccgttcccagcagacgcaggatgtattcctttgatgacgtccttgaggaagggaaacggccgcctacaatgactgtgagcgaagcctcatatcagagcgaaagggtggaggaaaaaggcgccacttacccctccgaaatccctaaggaggacagtacgaccttcgcgaagcgcgaagaccgtgtgacaaccgaaatccagcttccctcccaaagtccagtcgaggagcaatcaccagcaagtctttctagcctgaggtctcgcagcacgcagatggagtctaccagggtgagcgccagcctgccgcgttcctaccggaagaccgacacggtccgcctaaccagcgtggtaacccctagaccctttggctcgcagactagaggcatctcgtcacttcccagatcctacactatggacgatgcatggaaatataatggcgacgttgaggatatcaaacgaacacctaacaacgtcgtgagtacacctgcccccagccctgacgccagtcagctggcaagctcattatcgtcacagaaggaggtcgcggctactgaggaggatgtgactcgtctcccatcccctacatcccccttctccagcctcagccaggatcaggctgccacaagtaaggcaacgctctcatctacctccggcctggatttgatgagtgagtctggcgagggtgaaatcagcccacagcgtgaggtcagccgaagccaagatcagttctctgatatgaggatttctattaaccagacccccggaaagagtttggactttggattcaccataaagtgggacatccccggaattttcgttgcctcagtggaggcgggtagtcctgcagagtttagccagctgcaagttgacgacgaaatcatcgccatcaacaacacgaagttttcctataacgattcaaaggagtgggaggaggctatggccaaggcccaagagaccggccacctggtgatggacgtgcgccgatacggcaaggcgggatcccctgagaccaagtggattgacgccacctcggggatatacaattcggagaaatcctctaatctgtccgttaccacagacttctctgagtccctgcaaagctcaaacattgagagtaaggaaattaatgggatccatgacgaatctaacgccttcgaaagtaaggcctctgagtcaatctcactcaagaatctcaaacgccggagtcaattttttgagcagggcagcagcgacagcgtcgttccagacttgccagttcctaccatcagtgcgccttcgcgatgggtgtgggaccaggaagaggaacgcaagagacaagagcggtggcagaaggaacaggacagactgctccaggagaaatatcagcgtgagcaagaaaagctcagggaggagtggcagagagctaagcaggaagcggagcgcgaaaattcaaaatacctcgacgaggaactcatggtcctgtccagtaattccatgtcactgacaactagggaacccagcctggcgacatgggaagccacctggtcagagggctcgaaaagctctgaccgggagggtactagagcgggggaggaagagcggaggcaaccccaagaggaggtcgtgcatgaggatcagggaaagaagccacaggatcaacttgtgattgaaagagagcgcaagtgggagcagcagctgcaagaagagcaggagcagaagcgcctgcaggcagaggccgaggaacagaagcgcccagccgaagagcaaaaacggcaggcagaaatagagcgagagacctcagtgcggatataccaatacaggcgccccgtggacagctatgacatccctaagactgaggaagccagcagcggttttctgcccggcgatcgaaataagtcccggtctacaacagagcttgacgactacagcaccaataagaacggaaacaacaaatacctggatcaaattggtaacatgacttctagtcagcgtaggagcaaaaaggaacaggtgccgagcggtgccgaattagaaagacagcaaatccttcaggaaatgaggaaaagaacaccactgcacaatgacaactcctggattagacagcgcagtgccagcgtgaacaaggaaccggtgtcactgcctggaataatgcgccggggagaatcactcgataatctcgatagtccacgctccaacagctggcgccagcccccttggctgaatcagccaacaggcttttacgcttcttcatccgtgcaggatttctcgcggcccccgccccagttggtgtccacctccaacagggcctatatgagaaacccttccagcagcgtacccccacccagcgcgggtagcgtgaagacctcaaccactggagtagccaccacccagagtccaactcccaggagtcatagtccttcggcctctcaatcgggctcccagcttcgaaattccgttctgccagtgagcgttacttctgaagcccttccacaggagctcaaatcagggtctgaaacaactaactgtaccgctactacagccattagcgactccaacctcgacggccagccaccatgtgatgtgagccttcacaccaaagcactgcttcagatcgaagaggaggtggtggctgctcacgtcgacctgtag

SEQ ID NO: 122495 - DNA, 4845 bp, synthetic construct
  misc_feature 1..4845: note = Description of Artificial Sequence: Synthetic coding sequence
  source 1..4845: mol_type = other DNA
atgaagaagatccgaatatgccatatatttaccttttatagctggatgagctatgacgtactgtttcagaggactgagcttggagcactcgagatttggagacagctgatctgtgcccacgtttgtatttgcgtcggctggctgtacctccgagatcgagtttgttctaaaaaggatatcatccttaggacggaacaaaattctggccggacaattctgatcaaagccgtgaccgagaagaactttgagacaaaggactttagggcatctttggaaaacggcgttctgctgtgtgacctcattaacaagctgaaaccgggggttatcaagaaaattaaccggctgagtacacctatcgccgggctcgacaacattaacgtgttcctgaaagcctgtgaacagattggcctgaaagaagcccagctgttccatccaggggatctgcaggacctcagcaacagggttacagtgaaacaggaggaaacagaccgtcgagtgaaaaacgtcttaattacgctttattggctgggtcgcaaggcccagtctaatccatattacaacgggccgcacttgaacctcaaggcatttgagaacctgctcggccaggctttgaccaaagccctggaagactcatcatttctcaagcggagcgggcgtgatagtgggtatggggatatctggtgccctgagcgcggggagtttttggcccctccccgtcaccacaagcgggaggattcattcgagtctttggattccctcggctcacggagcctcacaagctgttcttccgacataacgctcagaggaggacgtgaaggattcgagtcagacacggacagcgaattcacatttaagatgcaggactacaataaggacgatatgtcctatcgccgcatttcagccgtcgaacctaagaccgcactgccatttaataggtttctccctaataagtctcgccagccttcttatgtgcctgccccactgcgcaagaaaaaacctgataaacatgaggacaatcgaaggtcgtgggccagtcccgtctacactgaggctgatgggacttttagtagtaatcagagaaggatttggggaaccaacgtggagaattggcccacagttcaggggaccagcaaatcttcttgctacctcgaagaagagaaggcaaagacccgttccatcccaaacattgtgaaagatgatctttacgtccgcaaactgtctccagtgatgcctaatccaggaaacgcattcgatcagttcctgccgaagtgctggacgccagaggatgtcaactggaaaaggatcaagcgagagacttacaaaccatggtacaaagagtttcagggattttcccagttcctgttactgcaggccctgcaaacctatagcgacgacatcttatcctccgagacacatacaaaaattgatcctacctctggaccccgtctaatcaccagaaggaaaaatttaagttacgcccctggctaccgccgagatgacctcgaaatggctgcactggatcctgacctggaaaatgatgatttctttgtgcgcaagaccggtgcttttcacgccaacccttatgtcctcagagcatttgaagactttcgcaagttctccgagcaggatgacagcgtagagcgtgatatcatcctccagtgcagggagggagaactggtattaccagacctggagaaagatgacatgattgtgcgacgtattcccgcacagaagaaggaggtgccgcttagtggcgctcccgatagataccaccctgtgcctttccccgagccatggacccttcccccagaaatacaggccaagttcctgtgtgtgcttgagcgcacctgtccctctaaagaaaaatccaatagctgtagaatactcgtccccagctacagacagaaaaaagatgacatgctaactagaaaaattcagagttggaagctcggtaccacagtgccccccatttcattcaccccaggaccctgttctgaggccgacctgaagcgctgggaagccatcagagaggcatcccggctgcgccacaagaagagactcatggtcgagcgattattccagaagatatatggtgagaacgggtcaaagtcaatgtctgacgtgagcgccgaagatgtgcagaacttacgtcagctacgctatgaggagatgcagaagattaagagtcagcttaaagaacaggatcaaaagtggcaggacgatctagccaagtggaaggaccgccgtaaatcttatacctcggacctacagaagaaaaaagaagagagagaggaaatcgaaaagcaggccctggagaagagcaaaaggtcctctaagacctttaaggaaatgctgcaggatagggagtctcaaaatcagaaatcaacggtcccttcccggcgccgcatgtattccttcgacgacgttctcgaggaggggaagcgtccgcctactatgacagtcagtgaggccagctaccagagcgaaagagtcgaggagaaaggagcaacatacccttccgaaattcccaaagaggactccaccacctttgcaaagcgcgaagaccgggtgacaacggagattcagctgccttctcagagccccgtcgaggagcagtcgccagccagcctgtctagtctcaggtcaagaagtacacagatggaatctaccagggtttccgctagtctccctaggagttatcgcaaaaccgatactgtaaggctgacaagtgtcgtgacacctcgaccatttggcagtcagaccagagggatcagctctctgccaagatcctacactatggatgatgcatggaaatacaatggagacgtggaggacatcaagcgtacacccaacaacgtagtaagtactcccgccccatcacccgatgccagtcagctagcatcgtctctgagctcccagaaggaggtcgccgccactgaagaggacgtaactcggctcccttccccgacctccccattctcttcactgagtcaggatcaggctgctacgtccaaggcgactttatctagtacaagcgggctggatcttatgagcgagtccggcgagggtgaaattagcccacagagagaagtctctagatcccaggaccagttcagtgatatgaggatctcgatcaaccagacaccgggtaagtcactcgatttcgggtttacaatcaagtgggacatcccagggatcttcgtggctagcgttgaagccgggagccccgccgagttttctcaactccaggttgacgatgaaatcatcgcaatcaacaacacaaaattcagctataatgacagcaaggagtgggaagaggccatggccaaggcccaggagaccggtcatctggtgatggacgtcagacgttacggcaaggccggctcaccggagacaaagtggatcgatgcgacgtctggtatctacaattcggaaaaaagctctaacctgagcgtcacaaccgatttttcggaaagtctacagtccagcaacatcgaatcgaaggaaatcaatggtattcatgatgagtccaatgccttcgagtctaaggcatcagagtcaatttctctgaaaaatttaaagaggcggagccagttcttcgaacagggctcttccgactcagtggtacctgatttgcctgtgcccacgatcagcgccccctctcggtgggtgtgggatcaggaagaggagcgaaaaagacaggaacgctggcagaaagagcaagatagactccttcaggaaaaataccagcgagaacaagaaaagctgagagaggaatggcagcgagccaagcaagaagccgaacgtgaaaacagtaaatacctggacgaagagctaatggtgctgtcctccaactctatgagcttgaccacacgggaacctagcctggcaacctgggaagctacatggagtgaggggtccaagtcaagtgacagagaaggaaccagagctggtgaggaggaacgccggcagccccaggaggaagtcgttcacgaagaccagggcaaaaagcctcaggatcagctcgtgatcgagagggaacgtaaatgggagcagcagctgcaggaagagcaggaacagaaacggttacaagcagaagcggaggaacagaagcggccagcagaggagcagaagcggcaggccgagattgagcgagagacctcagtacgaatctaccagtaccgcaggcccgtcgatagctacgatatccctaagaccgaagaagcatcatccgggtttctgcccggcgacaggaataagtctaggagcaccaccgagctggatgactactcaactaacaaaaacggaaacaacaagtatcttgaccagatcggcaatatgacatcatctcagagacgttcaaagaaggagcaggtgccgtctggagcagagctggagaggcagcagattctccaggagatgagaaagagaacacccttacataacgacaacagttggatcagacaacgcagcgcgtctgtaaacaaggaaccagtctcactcccggggatcatgcgccgcggtgaaagcttagataacctggattctccacgctccaactcttggcggcaacccccttggttaaaccagccaactggattctacgcaagttcttcggtgcaggattttagcaggccgccccctcagctggtcagtacttcaaatagagcctacatgcggaacccctctagcagcgtcccccccccgtcagcaggaagtgtgaaaacaagtactacaggggtagctactacgcagagcccaacacctcgctcccactcaccgtcagcctctcaaagcgggagtcagctaaggaattcctggaccgcgaatagacacgtcatgtag

SEQ ID NO: 122496 - DNA, 4158 bp, synthetic construct
  misc_feature 1..4158: note = Description of Artificial Sequence: Synthetic coding sequence
  source 1..4158: mol_type = other DNA
atgcaagattacaataaagatgatatgtcttaccgccgcatcagtgcagtcgagcctaagacagctctgcccttcaatcgcttcctgcccaacaagagtcgccaaccatcctatgtgcctgctccccttcgcaaaaagaagcctgataaacatgaagacaataggaggagttgggcttctcccgtatatacagaggcagatggaacatttagcagtaaccagagacgcatttggggcactaatgtagagaattggcctacggtgcagggaacaagtaaatcgtcctgctacctcgaggaggagaaggcaaaaacacggtccatcccaaacatagtcaaggatgacctctatgtaaggaagctgagcccggtgatgccgaaccccggtaacgcgttcgaccagttcctgccaaagtgctggacacccgaggatgtcaattggaagagaattaagagagaaacctataagccttggtacaaggaatttcagggattttcccagttcctgctcttgcaagccctgcagacctatagcgacgacatcctgagcagcgaaacgcacactaaaattgaccccacctcaggccccaggctcataacacggcgaaagaacctgtcttacgcacctggctaccgtcgggatgacttagagatggccgcgctggaccctgaccttgagaatgatgatttctttgtcaggaagaccggcgcgtttcatgccaatccctacgtcctgcgagcctttgaggatttccgaaagttcagcgagcaagatgactccgtcgaaagagacataatcttacagtgtagagaaggcgagttagtgctcccagatttggaaaaagatgatatgattgtgcgccgaattcccgcacaaaaaaaggaggtaccgttgtccggagcccctgaccgttatcaccctgttcccttcccagagccgtggacgctgccacccgagatccaggctaagttcctttgtgtgctcgaacggacctgcccaagtaaggagaagtccaactcatgtagaattctggtgccaagttaccggcaaaagaaggacgatatgcttacccgtaagatacagtcatggaagctagggacgacagtcccgccaattagctttactcctggcccctgtagtgaggccgatctgaaacgctgggaagccattcgggaggcttcccggctgcggcacaagaagcggcttatggttgaacgcctgttccagaagatatatggcgaaaatggttccaagagcatgtctgatgtgtccgctgaagatgtgcaaaatctgcggcagctacgttatgaggagatgcagaaaatcaagtcccaactgaaggaacaagatcagaaatggcaggatgacctcgcaaagtggaaagatagacgcaaatcttacacttcagacctgcaaaagaaaaaagaggagcgggaggagatcgagaagcaggcacttgaaaaatctaaacgaagcagcaagacctttaaagaaatgcttcaggacagagaatcgcaaaatcaaaagtccacggttccaagtagaagacggatgtattcattcgacgatgtcctggaggagggaaaacgtcccccgaccatgacggttagcgaagcttcttatcagtcagaaagggtggaggagaagggggccacatatccgtctgagatacccaaggaggactcaaccacattcgcaaagcgcgaagatcgtgtaactacagagatccagttgccgagccaatcaccagtcgaggaacagtctcccgcgagcctttccagtttgagaagcaggagtacgcaaatggagtcaactagggtgagcgcctctttgccacggagttacagaaagactgataccgtgcgcctgactagcgtggtcaccccacgcccatttggaagccagactcgaggcatcagctcactccccaggtcttatactatggatgatgcttggaagtacaacggggacgtcgaagatataaaaagaaccccgaacaacgttgtgtcgactcctgctcccagccccgacgcctcgcagctggcttcctccctgtcgagccagaaagaggtggcagcaaccgaagaagacgtgacaaggttgccaagtccaacttcaccatttagtagcctctcacaggaccaggccgccacctccaaagccactctcagctccacgagcgggctggatctgatgagcgaatcaggagaaggggagatctcccctcagagggaagtgtcccgctcacaggatcagttctctgacatgcggatttctattaatcaaactccaggtaaatctttagacttcggcttcacaattaaatgggatatcccaggaatttttgtcgcctcagtggaagctgggagcccagccgaattttcgcagctacaggtggacgacgaaattatcgcaataaataatacgaagtttagctacaatgattcaaaggaatgggaggaagctatggcgaaagctcaagaaaccggacacctcgtcatggacgtcagacgttacggcaaagccggttcgccggaaaccaagtggatcgacgcaacctccggaatatataacagtgagaaatccagcaatctctccgtgacaacagacttctcagagagtcttcagtcctccaatatcgagtcaaaggagatcaatggaatccacgacgagtccaatgccttcgagagcaaagccagcgagtctatttccctcaaaaacctgaagagacgcagccagttctttgagcagggctcctctgacagtgtagtgcctgacctgcctgtcccaacgatcagcgccccatccaggtgggtttgggaccaggaggaggaaagaaaacgccaggagcgctggcaaaaggaacaggataggttgctacaagagaagtaccaaagggagcaggagaagttgcgcgaggagtggcaaagagctaaacaagaagccgaaagggagaattctaagtatctggacgaggagcttatggtattaagctccaactctatgagtttaacgactagagaacctagccttgctacatgggaagccacctggagtgagggatcaaagtcatctgaccgagagggcacgcgagcaggtgaggaagagcgtcggcagcctcaggaggaggtcgtccacgaagatcagggcaagaagccgcaggaccagctcgtgatcgaacgcgaacgaaagtgggaacagcaactgcaggaggaacaggagcaaaaacggttacaagcagaagctgaggagcagaaaaggcctgctgaggagcagaagcggcaagctgagatcgaaagagagacctccgtgcgcatctatcagtaccgcagaccggtggactcatacgatatcccgaaaaccgaagaagcctctagtgggtttctcccgggagatagaaataagagtcgtagcactaccgagttagatgactatagtacaaacaaaaacggcaacaacaagtacctggatcagatcggtaatatgacatcaagtcagcgaaggtctaaaaaggagcaggtgccatctggtgcagagctcgaaaggcagcagatcctgcaggagatgaggaaaagaacccctttgcataatgataactcctggatccggcaacggtcagcatcagtgaacaaggaacccgtttcgctacccgggattatgcggcggggagagtccctggataacctggactctccccgaagcaatagttggcggcagccgccctggctgaatcaacccacaggcttttatgcatcttctagcgtgcaggatttcagtcggcccccacctcagcttgtgagcacgagcaatagagcttatatgcgtaaccccagctcttctgttccgcctccatctgcaggctctgtcaagactagtactaccggagtcgctactacccaatcccccactccacggtctcacagtccgtctgctagccagtctgggtcacagctgagaaattccgtccttcccgtctctgtgacgtcagaagctctgccacaggagcttaaatccggatcagaaacgacaaactgtacagcaactacagccattagcgatagcaacctcgatggccaacccccgtgcgacgtgtccttacatacgaaggcactgctgcaaatagaggaagaggttgtcgcagcgcacgtagacctgtag

SEQ ID NO: 122497 - DNA, 2280 bp, synthetic construct
  misc_feature 1..2280: note = Description of Artificial Sequence: Synthetic coding sequence
  source 1..2280: mol_type = other DNA
atggaaagctctcccttcaaccgccgccagtggaccagcctgtctctccgcgtcaccgccaaggagctttcactggttaacaagaacaaatcttccgctatcgtggaaattttttccaaatatcaaaaggcagccgaagaaaccaatatggagaagaaacggtctaacacagaaaatctgtcccagcacttcagaaaaggaactttaaccgtgcttaagaagaaatgggaaaacccgggcctgggtgcagagagccatacagacagccttagaaatagtagcacagaaatccgacatcgtgccgatcacccgcccgcagaggttacctcccatgccgccagcggtgcaaaagcagaccaggaagagcagatccacccaagatcgagattaagatctccacctgaagcactcgtgcagggaaggtacccccacatcaaagatggtgaagatctcaaagatcattctactgagtcgaagaagatggaaaactgcctcggggagtcaagacacgaggtagaaaagtcggagatctccgagaacactgatgcctccggcaagatagaaaaatacaacgtcccacttaacaggcttaagatgatgtttgaaaagggtgaaccaactcagacaaagatcctgagggcacaatccaggtccgccagcggtaggaaaataagcgagaactcctattcccttgacgacctggaaattggccccggtcagctgtcttcgagtaccttcgacagcgaaaagaatgaaagcaggaggaacctggagctcccaagattgagtgagaccagcataaaagatcgcatggctaagtatcaagccgctgtgtccaaacagtcctcttccactaattacacgaacgagctaaaagccagtggcggcgagattaagatacataagatggagcagaaggagaacgtcccccctggccccgaagtgtgtatcacccatcaagaaggcgagaagatttccgccaatgaaaacagcctcgctgtgagaagcactcctgccgaagacgatagccgcgacagtcaggtgaagtcagaagttcagcagcctgtgcacccaaagccgctgtcacccgacagccgcgccagctcgctgagcgaatctagccccccaaaagctatgaagaaatttcaggccccagctcgggagacatgtgtggagtgccagaaaactgtgtatcccatggagaggttgctcgctaatcagcaggtgttccatatcagctgtttccggtgcagctattgtaacaataagctttccttgggtacatacgcctctctccatgggcgcatctattgtaagccgcactttaatcagctgtttaaatccaagggcaattatgatgagggcttcgggcatagacctcataaggacctgtgggcatccaaaaacgagaatgaagaaatattggagcgtcccgcccaactggccaacgccagagaaacaccgcactctccgggagtggaagacgcccccattgcaaaggtgggcgtattggccgcatctatggaggccaaagcctcttcacagcaagagaaagaagacaaacctgccgagacaaagaagctgagaatcgcttggccccctcccacagaactcggcagctccgggtctgctctcgaagagggaattaagatgtccaagcccaagtggcctcctgaggatgaaataagcaagcccgaggtcccagaggacgtagacctggatctgaagaaactacgaagatcttcttctctgaaagagcggagtagaccctttacagtagcggcatcttttcagtccaccagcgtgaaaagtccgaaaacggtgagcccacctatccgtaagggctggagcatgtctgagcagagtgaagaatccgtcggggggagagttgctgaacgaaagcaggtcgaaaacgccaaagcttctaagaagaacgggaacgtgggaaagaccacgtggcaaaacaaagaatctaaaggcgagacaggcaagcggtcaaaggagggccactccttagaaatggagaatgaaaacttggtggaaaacggagctgattctgacgaggatgataatagcttcttaaagcagcaatctccgcaagaacccaaatctttaaactggtcttcctttgtggataacaccttcgctgaagagtttacaactcagaatcagaaaagccaggatgttgaactgtgggagggtgaagtggtcaaagagctcagcgttgaagaacagattaagcggaatcggtactatgacgaggatgaggacgaagagtag

SEQ ID NO: 122498 - DNA, 2283 bp, synthetic construct
  misc_feature 1..2283: note = Description of Artificial Sequence: Synthetic coding sequence
  source 1..2283: mol_type = other DNA
atggagtccagcccatttaataggagacagtggacatctttatcccttagggtgacagcgaaagagctgtccttagtgaataaaaacaagagttctgcaatcgtggaaatttttagtaagtaccaaaaagctgctgaggaaaccaacatggaaaaaaagcgcagcaatacggagaacctgagccaacacttccggaagggcaccctgacagtccttaagaagaagtgggagaatccaggcctgggggctgagtctcacacagactctttgagaaactcctcgaccgagatccggcacagggcagaccatcctcccgcagaggtcacctcccacgctgccagcggcgctaaagccgatcaagaagaacaaattcaccccagatcgcggctgcgcagcccaccggaagctttagtacagggtcgttatccacacataaaggatggcgaagatctgaaggaccattccactgaaagcaaaaaaatggagaattgcttgggcgagagtaggcatgaagtggaaaagagcgagatctctgaaaatacagatgccagtggcaaaattgagaagtacaacgtccctctgaaccggttaaaaatgatgtttgagaagggcgaacccacgcagacgaagattttgcgtgcccaaagccgttccgcaagtggaagaaaaatttctgaaaacagttacagcttagacgatctggagatcggtcctgggcaactgagctcctccaccttcgattcagagaaaaatgaaagccgaaggaatctagagctcccacgcctgtcagagaccagtataaaagataggatggccaaataccaggcggctgtcagtaaacagtcttcaagcacgaattatactaacgagctgaaggcctctggaggagagatcaagatccacaagatggaacagaaagagaatgttccccccgggcctgaggtgtgcattacacatcaggagggagagaagatttccgccaatgaaaacagtctggcagtacgcagtacacccgctgaggatgacagtcctggcgactcccaggtcaaaagtgaagtgcagcaaccagtccacccgaagcctctctcccctgattcaagggccagttctctctcggagagttctccccctaaggctatgaagaagtttcaggcaccagccagagaaacctgcgtcgaatgtcagaagacagtctacccaatggaacgattgcttgcaaaccagcaagtgttccatattagttgcttcagatgctcatactgtaacaacaaattgagtcttggcacctatgcttccctgcatggccgcatttactgtaagccacactttaatcagctgttcaaatcaaaagggaactacgacgaggggttcggacaccgtccgcacaaagatttgtgggcttccaagaatgaaaatgaggaaatactggagcggcctgcccagctggccaacgccagagaaaccccccactcgcccggcgtggaggacgcgcctatcgccaaggttggggtactggctgcctctatggaggccaaagcatcctcccaacaagagaaggaagataaacctgccgagaccaagaaactgagaatagcatggccaccccccactgagctgggctctagcggcagcgccctcgaagaaggaatcaagatgtcaaagccaaagtggccccctgaagacgagatatccaaacccgaggtgccagaagatgtcgatctggacttaaagaagttgcggcgctcgtctagtctcaaggaacgctccagaccctttacggtggcggcttcttttcagtccacatccgtgaagtcacccaaaacagtcagtccaccaataaggaaaggctggtcaatgtccgagcaaagcgaagaatctgtgggtgggagagtcgctgagagaaaacaggtcgagaatgccaaggccagtaaaaagaacgggaatgtgggcaagactacttggcagaacaaagaatctaagggagagactggcaagcggagtaaggaaggccacagcctagagatggagaatgagaatctggtcgagaatggtgctgattcagacgaggacgataacagtttcctcaagcagcagtcgccgcaagagccgaagagtcttaattggagcagcttcgttgataacacgttcgccgaagagtttactacccagaaccagaagagccaagatgttgagttgtgggaaggagaggtagtgaaggagctctctgtggaggaacagatcaagcggaatagatactacgacgaagacgaggacgaagagtag

SEQ ID NO: 122499 - DNA, 2037 bp, synthetic construct
  misc_feature 1..2037: note = Description of Artificial Sequence: Synthetic coding sequence
  source 1..2037: mol_type = other DNA
atgtggcagggatgcaattgcagccagctctccgagactgcagtggaccaagagcagctgggtgtgctgacttttattctgcaaaggaccacttgtctcaatgttagcgcagatcaggaggagcagatccacccaagatcgcgactcagatcccccccggaagcgctagtgcagggacgctacccccatataaaagatggcgaggacttgaaagaccacagcactgagtctaaaaaaatggaaaattgtctcggcgaatctcgccatgaagtagagaaaagcgaaatctcagagaatactgacgcaagcggaaaaattgaaaagtacaatgtccccctgaaccgcctgaagatgatgttcgagaagggggaacctactcaaactaaaattctgagagcgcagtctcgcagcgccagtgggcggaagatctccgagaactcttactcacttgacgatttggaaataggccccggccagctctccagcagcacttttgattcagagaaaaatgaaagcaggcgcaacttggaactgcctagactttccgagacctctattaaggatcggatggcgaaataccaggctgctgtcagtaagcagagttcttcaactaactacactaatgagctaaaagctagcggtggggaaatcaagatccacaagatggagcaaaaagagaacgttcccccgggccccgaggtgtgtatcacccatcaggaaggcgaaaagattagcgcgaacgagaattccctggccgtgcgtagcacccctgccgaggacgattctagggactctcaggtgaaatctgaagtgcaacaaccagtacacccaaagcctctctcgccagactcaagggcctccagtctgtcagagtcatcgccacccaaggctatgaaaaagttccaggcaccagcccgcgaaacgtgtgtggaatgccagaaaaccgtctaccccatggaaaggcttttagcaaatcagcaggttttccatataagctgctttagatgtagttattgtaacaataagttatccctcggaacttacgcctcacttcatgggaggatatactgtaaaccacatttcaaccagttgttcaagtcgaaggggaactatgacgaggggttcggacacaggccccacaaggacctctgggcaagcaagaatgagaacgaagaaattttggaacggccagcacagctggccaatgcccgcgagacccctcactctcccggggttgaagacgccccgatcgccaaggttggggtcctcgctgctagcatggaagccaaggctagctcccagcaagaaaaagaggacaagcctgcggagaccaagaaattgaggatcgcctggccccctcccaccgagctgggcagcagtggcagtgctttggaagaagggatcaagatgagcaagcccaagtggccaccggaagatgagatctctaaacccgaggtccctgaggacgtcgatctagaccttaaaaaactgaggagatcttcctcactgaaagagcgctcaaggcctttcaccgtggcggcatcgttccagtcaacatcagtgaagtcccccaaaaccgtctccccacctatccgaaaaggttggtcaatgtctgagcagtcagaagagtccgtgggagggcgggtggcggaaaggaaacaagtcgagaacgcgaaggcttcaaaaaagaatggtaacgtcgggaaaaccacatggcagaataaagagtcaaaaggagaaaccgggaagcggtcaaaggaggggcactccctggaaatggagaacgaaaatctcgtggaaaacggagcagattcagatgaggacgataacagctttcttaagcagcagtcaccgcaagaacctaagtccttaaactggagttcgtttgtggataataccttcgccgaggaattcacaactcagaaccagaagagccaggatgtggagctctgggaaggggaggtagtgaaggaactctccgtagaagagcaaatcaagaggaatcggtattacgacgaagacgaagacgaggaatag

SEQ ID NO: 122500 - DNA, 1374 bp, synthetic construct
  misc_feature 1..1374: note = Description of Artificial Sequence: Synthetic coding sequence
  source 1..1374: mol_type = other DNA
atggagcagaaagaaaatgtgccaccagggcctgaagtgtgcatcacccaccaggagggggaaaagatcagcgcaaatgaaaactcattggcggtgagaagcactcccgccgaagatgactctcgcgactctcaagtcaagtctgaggtccagcaacctgtgcaccctaaacctctcagcccagacagtcgggccagcagtttgtctgagtctagcccccccaaagccatgaagaaattccaggcccccgcccgcgaaacttgtgtcgagtgtcagaagactgtatatccgatggagcgcctgctcgctaatcagcaggtctttcacatctcttgttttcgttgcagctactgcaataacaaactgagtttgggcacttacgcatcactgcacggccggatctattgcaaaccacacttcaaccagctgtttaaatccaaaggtaactacgacgaggggttcgggcatagaccccataaggatctctgggctagcaaaaatgaaaatgaggaaattctggagcggccagcccaattagccaacgctcgagaaacaccccattccccaggcgtagaagacgctccaattgccaaggtgggggtgctggccgcctcaatggaggctaaggctagtagccaacaagaaaaagaggataagcccgcagagaccaagaaactgcgtatcgcatggcccccccctacagaattaggatcctcgggctcagccctagaggaggggattaaaatgtccaaacctaagtggcccccagaagacgagattagtaaacctgaagtaccagaggacgtagatttggatcttaagaaattacgaagatctagttccttgaaggagaggagccgtccattcaccgtagctgcgtcattccaatccacctctgtgaagtctcccaaaacagtgtccccacccattcgcaagggttggtctatgtcagaacaaagcgaggagtccgtcggggggagagttgctgagcgtaaacaagtggagaacgcaaaggccagtaagaagaatggcaatgtggggaagaccacttggcaaaacaaggaatctaaaggcgaaacgggcaagcgttccaaggaaggacactctctggagatggaaaacgagaatctggttgagaatggtgcagactccgatgaagatgacaattctttcctaaaacaacagtccccacaggagccaaaatccctgaactggtcatctttcgtcgacaatacattcgctgaagagttcactacacagaaccagaagagtcaggacgtggaactgtgggagggcgaggttgttaaggagctcagtgtagaggagcagattaagaggaatcgatactatgatgaggacgaggacgaggagtag

SEQ ID NO: 122501 - DNA, 336 bp, synthetic construct
  misc_feature 1..336: note = Description of Artificial Sequence: Synthetic coding sequence
  source 1..336: mol_type = other DNA
atggaaagctcaccatttaataggcgccaatggacatcgctgtccctacgggtaacggctaaagagctctcattagtaaacaaaaataaatcctcagcaatcgtggagattttctccaaataccagaaagccgccgaggagacaaatatggagaagaaaaggagcaataccgaaaacctctctcagcacttccggaaggggacgctcactgtgttgaagaaaaagtgggagaatccagggctcggcgcggagtcacacaccgactccctgcggaattcatctacagaaatacgccatcgcgccgaccatcctcctgcagaggtgacgtctcactag

SEQ ID NO: 122502 - DNA, 393 bp, synthetic construct
  misc_feature 1..393: note = Description of Artificial Sequence: Synthetic coding sequence
  source 1..393: mol_type = other DNA
atggaatcttcaccctttaatcgccgacagtggactagcctgagcttgcgggtaacagctaaggaactgagcctggttaataagaacaaaagctcagccatcgttgagatattcagtaagtatcagaaggccgcagaggaaacaaacatggaaaaaaagaggtctaatactgagaatctgagtcagcattttcggaaaggtactctcaccgtcctgaagaaaaagtgggagaaccccggtctcggggccgaaagtcacacagattctttaagaaatagctctacagaaattcgacacagggccgaccatccacccgctgaggtgacttcacacgctgcaagcggcgccaaggctgaccaggaggaacagatccacccgaggtcgaggttgtag

SEQ ID NO: 122503 - DNA, 1371 bp, synthetic construct
  misc_feature 1..1371: note = Description of Artificial Sequence: Synthetic coding sequence
  source 1..1371: mol_type = other DNA
atggaacaaaaggagaacgtgcctcccggacctgaggtgtgcatcacgcaccaggaaggtgagaagatttccgctaacgaaaatagtcttgccgtgaggtctacacctgccgaggatgactcgagggacagccaggttaaaagtgaggttcaacagccagtccatcctaagcctctcagccccgacagtcgggcttcatccttgagcgaatcatcccctcctaaagcaatgaaattccaggccccagcgcgagagacttgtgtggaatgtcaaaagaccgtgtaccccatggagaggctgctagcgaatcagcaggtgttccatatatcttgttttcgttgtagttactgtaataacaaactgtccctggggacatacgctagcttacacgggcgcatatactgtaaaccacatttcaaccagctgttcaagagcaaagggaactatgatgagggatttggtcacaggccgcataaggacctgtgggcaagcaagaacgagaatgaagagattcttgaacgtcctgcacagctggccaacgcacgcgagaccccgcattctccgggagtagaggacgcacctatagccaaggttggggttttggctgcctccatggaagcgaaggcatcctctcagcaggagaaagaagataagcctgccgaaactaaaaagttgcgcatcgcctggccccctccaactgagctggggtccagtggcagcgctctggaggaaggaataaaaatgagcaaacccaaatggccacctgaggacgagatttcaaaacccgaggtacccgaggatgtggacctggatttgaaaaagcttcgacggagcagtagcttaaaagaaagaagccgtccattcaccgtcgctgccagctttcagtctacaagcgtgaagagccccaagaccgtcagccccccaattaggaagggatggagtatgagcgagcagtctgaagaatccgtgggagggagagtggccgagagaaagcaggtggagaatgctaaagcatccaagaagaatgggaacgtcggaaagaccacttggcagaacaaggagtccaagggtgagacaggtaaacggtccaaggagggacacagcctcgagatggagaacgaaaatctggtcgagaacggagctgactcggatgaagatgataacagtttccttaagcagcagtcacctcaggaaccaaagagcctgaactggagttctttcgtagacaacactttcgcggaggaatttacgactcaaaatcaaaaatctcaggacgtcgagctgtgggagggcgaggtcgtcaaggagttaagcgtggaggagcagatcaaacggaatcggtactacgatgaggacgaagacgaggagtag

SEQ ID NO: 122504 - DNA, 1803 bp, synthetic construct
  misc_feature 1..1803: note = Description of Artificial Sequence: Synthetic coding sequence
  source 1..1803: mol_type = other DNA
atggaaaattgcctcggtgagagtcgtcatgaggtcgagaaatctgagatttctgaaaacaccgatgccagtggcaagatcgagaaatacaatgtccccctaaatcgccttaagatgatgtttgaaaagggggaacccacccagaccaagatccttagagctcagagcaggtccgcctccggaagaaaaatcagtgaaaactcatattccctggatgatctggaaattggtccaggacaactctcctcgagcacattcgattccgaaaagaacgaatcaagaaggaacttggagctgccaagactgtccgaaacgtctataaaggaccggatggctaaatatcaggccgccgtatctaagcagtctagcagcacgaattacactaatgagcttaaagcgtccgggggtgagattaagattcacaagatggagcaaaaagagaacgtgccgccgggacccgaggtgtgtattacacaccaggaaggtgagaaaatttctgctaacgaaaactcattggccgtcagaagcactcctgccgaggatgacagccctggtgactcccaggtcaaaagtgaagtgcagcagcctgtgcaccctaaacctctgtcacctgactcccgcgcctctagtctgtcggagtcatcacctcccaaggccatgaaaaaattccaggcaccagccagggaaacctgcgtcgaatgccagaaaacggtttaccctatggagcggctcctggcaaatcagcaagtgttccacatctcatgttttagatgttcatattgcaataataaactatctctcggaacctatgccagtctgcacggcagaatttactgtaagcctcattttaatcagctgttcaagtcgaaaggtaactacgatgaaggatttggccataggccacataaagatctttgggcatccaagaatgagaatgaggaaatactcgagaggcccgcacagcttgctaatgcacgcgagactcctcacagtcccggagtcgaggatgcccctatcgcgaaagtgggggtacttgcagcatctatggaagcgaaggcttctagtcagcaggaaaaggaagataaacctgcggaaacaaagaaattgcggatcgcctggcctccgccaaccgagttgggcagttcgggttctgccttagaagagggcatcaagatgagtaagccaaaatggccacctgaagacgaaatctccaagccagaggttcctgaagatgtggatctggacctgaagaagctgcgacgaagtagtagcttgaaggagcgctcccgcccatttaccgtagccgcctccttccaaagcacttcggttaagtcgccaaaaacagtatccccaccaatcaggaaaggctggtccatgtccgaacaatctgaggagagtgttggcggacgagtggccgaaaggaagcaggtggaaaacgctaaagctagtaagaaaaacggtaacgtcggcaagacaacctggcagaataaggaaagtaagggggagacgggcaaaagatcaaaggaaggccatagtctcgagatggagaacgagaacttagtggagaacggtgcagatagtgacgaggacgacaactcttttctaaagcagcagagcccacaggagcctaaaagccttaactggtcaagttttgtggataacacattcgcagaagagtttaccacacagaatcagaagtcccaggatgtggagctgtgggaaggcgaagtggtgaaggagctcagcgtcgaagagcagatcaagcggaaccgatattacgacgaggacgaggatgaagagtag

SEQ ID NO: 122505 - DNA, 1800 bp, synthetic construct
  misc_feature 1..1800: note = Description of Artificial Sequence: Synthetic coding sequence
  source 1..1800: mol_type = other DNA
atggagaattgtctcggtgaatctaggcacgaagtggagaagagtgagatctcagagaacactgatgcttctggcaaaatcgagaaatataacgtgcctctcaaccgactcaaaatgatgttcgaaaagggcgagccaacacaaacaaaaatccttcgggcccagtcccgaagtgccagcggcaggaaaatctccgagaacagttactctctggacgacctcgagatcggacccgggcaactaagttcaagcaccttcgacagcgagaaaaacgagtcccgacgcaacctcgaacttccccggctctcagagacctcgatcaaagacagaatggcaaagtatcaagcggctgtgtctaaacagtccagtagcactaactatacaaatgagctcaaagcttctggaggagagatcaagattcataagatggagcagaaagagaatgtcccccccggacctgaagtgtgtataactcaccaggaaggtgaaaaaatcagtgccaacgagaacagcctggcagtgagaagtacacctgccgaggatgatagccgcgattctcaggtgaagtcggaggtgcagcagccagtgcacccaaagccgctcagcccggactctcgagccagttcgctgtctgaatcatcaccccccaaggccatgaagaaatttcaggcccctgctcgcgagacttgcgttgagtgccagaagacagtgtaccctatggagcgattactagccaatcagcaggtctttcacattagttgctttcgctgtagctattgtaacaacaagctgtccttgggaacctacgcgagcctccatggtcgcatatactgtaaaccccattttaatcaactgtttaagtctaagggtaattacgatgagggatttggtcaccgcccacacaaggatctttgggcctcaaagaacgagaacgaggagattctggaacgccccgcccaattggccaacgcccgggagactccacattcaccaggtgtagaggacgctcctattgccaaggtgggagtgctagctgcaagtatggaggccaaggcctctagccagcaggagaaggaggacaaacctgccgagacaaaaaaactgcgtatcgcttggccgcctcccaccgaactgggctcctccgggtccgctctggaggagggtatcaaaatgagtaagccgaaatggcctcctgaagacgagattagcaagccggaagttcctgaagacgtcgaccttgacctaaaaaagctgagaagaagcagttctttaaaagagagatcacgcccgtttacagttgcggcatccttccagagcacctccgtcaaatcccctaagaccgtctctccccccatccgcaaggggtggagtatgagcgaacaaagtgaggaatcagtgggtggacgcgtcgcagaaagaaagcaggtggaaaatgcaaaggcaagcaaaaaaaatggcaacgttggaaaaacaacttggcagaacaaggagtctaaaggcgagaccggtaaacgttcaaaggaaggacactctctggagatggagaatgagaatctggtcgaaaacggcgccgactcggatgaagatgacaactcgttcctgaagcagcagtcaccccaggagcccaagtcacttaattggagctccttcgttgacaatacatttgcagaagaattcacgacacagaatcagaaatctcaggacgtcgagctgtgggagggagaagtggtgaaagagctgtccgtagaagagcagattaaacggaataggtattatgatgaagatgaggacgaagagtag

SEQ ID NO: 122506 - DNA, 1128 bp, synthetic construct
  misc_feature 1..1128: note = Description of Artificial Sequence: Synthetic coding sequence
  source 1..1128: mol_type = other DNA
atgctggacagggacgtaggtcccacacctatgtacccccccacttacctggagcctggaattggtaggcatactccgtatggaaatcaaaccgactataggatatttgagctcaacaaaaggctccaaaactggaccgaagagtgtgataacctctggtgggacgcatttacaacagaatttttcgaggacgacgcaatgcttacaatcacattctgcctcgaagacggcccgaagcgttacaccatagggcgcacgctgataccccgatattttagatcaatttttgagggaggggcgaccgagttatactacgtactgaagcaccccaaggaagcgttccattctaactttgtgtctctggactgtgatcagggcagtatggtgacccagcacgggaagccaatgtttacgcaggtgtgtgtagaaggcaggctgtatttagagtttatgtttgacgacatgatgagaatcaagacttggcacttcagcatcagacagcatcgcgaactcatccctcggtctatactcgcaatgcatgcccaggatccccagatgctcgatcaactctcaaagaacatcactagatgcggccttagcaacagcaccctcaattatctcagactgtgtgtgattctggaacctatgcaggagctgatgtctagacacaagacgtactcgctctccccaagggactgcctcaaaacctgtctgtttcagaagtggcagagaatggtagcccctcccgcagagcctacacgacagcagccttcaaaacgccggaaacgaaagatgagcggaggctcaaccatgtcctcgggtggcggcaatacaaataattctaattctaaaaagaagtcccccgcgtcaacattcgccctctcgtcacaggtccccgatgtgatggtggtaggagaaccgactctgatgggcggggaattcggagatgaggatgaaaggttaattactaggctggagaacacccagtttgatgctgccaacggaattgacgatgaggactcattcaacaattccccagccttgggcgcaaacagcccgtggaactccaaaccacctagtagccaagaaagcaaatcagagaatccgactagccaggcttcccaatag

SEQ ID NO: 122507 - DNA, 1236 bp, synthetic construct
  misc_feature 1..1236: note = Description of Artificial Sequence: Synthetic coding sequence
  source 1..1236: mol_type = other DNA
atgtccgtgggctgcgcctgtcccgggtgtagctctaagtctttcaaactgtattcccccaaggaacctcctaacgggaacgcctttcctccattccaccccggtacaatgcttgatagggacgtcgggccgacccctatgtaccccccaacctatctcgaacctgggattggaaggcatacaccttacggcaaccaaacagactataggatcttcgagctgaataagcgcctgcagaactggacagaagaatgcgacaatttgtggtgggacgcttttacaacggaattttttgaagacgatgcaatgctcacaataacattctgtctcgaggatggccccaagcgatataccattggccggaccctgattcccaggtactttagaagcatcttcgagggcggagccacagaactttattacgtgctaaaacacccaaaagaggctttccacagtaacttcgtaagcctggactgcgaccagggaagcatggtcacacagcacggcaaaccaatgttcactcaagtgtgcgtggaggggaggctgtacctggagtttatgttcgacgacatgatgcgcatcaaaacttggcactttagcattagacaacatcgggaactgattccgaggagcattttagcaatgcacgctcaagacccacaaatgcttgatcaacttagtaaaaacatcaccaggtgcggcttgtccaactctacgctgaactacttgaggttgtgcgttattctcgaacctatgcaggagctgatgagcaggcacaagacctattccttatccccacgagactgtctgaaaacgtgcctgttccagaaatggcagagaatggtggccccccccgctgagccgacaagacaacaacccagcaaacgtcgcaagcgaaaaatgagcggtggtagcacaatgtccagcggcgggggcaatactaacaatagtaactccaagaagaaatctcccgcttcgacattcgccctttcatcccaggtgcccgatgtgatggtcgttggcgaaccgacgttgatgggcggggagttcggcgatgaagacgagaggctgatcacaagattggagaacacacagttcgacgccgccaatggcattgacgacgaagatagcttcaataactccccagcgctgggggcaaactctccctggaatagcaaaccgccgtcttctcaggagtctaagtccgaaaacccaacgtcacaggctagccaatag

SEQ ID NO: 122508 - DNA, 1122 bp, synthetic construct
  misc_feature 1..1122: note = Description of Artificial Sequence: Synthetic coding sequence
  source 1..1122: mol_type = other DNA
atgtccagcactccccacgatccattctactcttctcccttcggccccttctatcgtcgccacacaccttacatggtgcagccagaatatcggatctatgagatgaataaaaggctgcagtctcgcacagaggacagtgataacctgtggtgggacgcctttgctacagagttttttgaggatgacgctacactgacactgtcattctgtctcgaggacggccccaagaggtacactatagggcgaaccctcatcccccgttacttttcgaccgtgttcgaaggtggagtgactgacctgtattacattttgaagcatagcaaggagtcatatcacaacagttcgatcactgtggattgtgaccagtgcacaatggtgactcagcacgggaagcccatgttcacaaaagtttgtactgaggggcggctgatcctggaatttacctttgacgacttaatgcggatcaaaacctggcattttactatccgccaatatagggagctggtccctcggagcattctagcaatgcacgctcaggatccacaggtcctagatcagttaagcaagaatatcactagaatgggattaactaatttcaccctcaattatctgagactttgcgtcatcctggaaccaatgcaggaacttatgagcagacacaagacatataacctgtcaccacgcgactgtctgaaaacatgccttttccaaaaatggcagcgcatggtcgctcctcccgccgagccaacccgccagcctactacaaaaaggagaaagcggaaaaactcaacctctagcacgtcaaatagcagcgctggtaataacgccaactccaccggctcaaagaaaaagaccactgcagccaacctaagcctgtcctcccaggtgccggatgtgatggtggtcggagagcctacgctgatgggtggggagtttggagacgaggacgaaagattgattacgcggcttgagaacacgcaatacgatgctgcaaatggaatggatgatgaagaggatttcaataattcaccggctctcgggaataattcaccttggaacagcaagcccccagccacccaagaaaccaagagcgagaacccaccacctcaggcgagccagtag

SEQ ID NO: 122509 - DNA, 996 bp, synthetic construct
  misc_feature 1..996: note = Description of Artificial Sequence: Synthetic coding sequence
  source 1..996: mol_type = other DNA
atgtccagtacgccccacgaccctttctattcttctcctttcggacctttttaccggagacacaccccctacatggtccagcccgagtacaggatctatgaaatgaacaagcgcctgcaaagtagaaccgaggatagtgataatctttggtgggacgcatttgcgactgagtttttcgaagatgatgccactctcacactgagtttttgcctggaagatggcccaaaacgttacacgataggacgaaccctgattcctcggtactttagtaccgtgttcgagggtggtgtaaccgatttatactacatccttaagcattccaaagagagctaccataattcctccatcaccgtggattgcgaccagtgtactatggtcacacagcacggtaaaccaatgtttaccaaggtatgcacagaggggcgcctaatcttagagtttacattcgatgatctgatgaggataaagacatggcacttcacaatccggcagtatcgggagctggtcccccgttcaatactggctatgcacgctcaagatccccaggttctggatcagctctcaaagaacatcacacgcatgggactcaccaactttacattgaattacctgagattgtgtgtgattctggaacccatgcaagagcttatgagccgacataaaacttacaatctcagtccgcgcgattgtctgaagacatgtttattccagaagtggcagagaatggtggccccacctgccgaaccgacacgccagcctacaacaaagcgccgcaaaagaaagaactcaaccagttcgacttctaacagctccgccggcaacaatgccaactccactggctctaaaaaaaagactaccgccgctaatctgtcgctgtctagccaggtacccggtctcggcgccatcccgaactgttccctgaacccaggtcgcgatggggacctctgtcacagcacagcagtgaccccatccgggcaatttaaggagaaacactag

SEQ ID NO: 122510 - DNA, 942 bp, synthetic construct
  misc_feature 1..942: note = Description of Artificial Sequence: Synthetic coding sequence
  source 1..942: mol_type = other DNA
atgagttctaccccacacgacccattctattcttcccctttcggccctttttatcgacgacacacgccatatatggtacaaccagagtatcgcatttatgaaatgaataaacgattacagagcagaactgaggactccgataatctctggtgggatgcgttcgcaactgagttttttgaagacgacgccaccctcactctgtctttctgtcttgaggatggacccaaaagatacactatcggtcggacgctaatccccaggtatttcagtactgtctttgaaggcggcgttaccgatctgtactacattcttaaacacagtaaagagagctatcataattcctccataacagtagattgtgatcaatgtaccatggtcacacaacatggcaaaccaatgttcacaaaagtctgcaccgagggcaggctgatcctggagtttacattcgacgacctgatgcgaataaagacttggcatttcactatccggcagtatagagaattagtccctcgcagcatcttggctatgcatgctcaggaccctcaggtgctcgaccagctgtcgaaaaatatcaccaggatgggcctgacaaatttcaccctgaattacctccgattatgcgtgattctggagcccatgcaggaactcatgtctagacacaagacctacaacttgagtccgcgagattgtttgaaaacttgtctgttccaaaaatggcagcgtatggtcgcaccccccgccgaacctaccaggcagccgacaacgaaaagaagaaagcgaaagaactctacttccagtacctctaacagctcagcaggcaacaatgcaaatagtacaggcagcaaaaaaaagaccaccgcagccaacctgagcctgtctagccaagtgccaatcgcaagcattgcccggagccccgtgtcgggatgtgctctccgaacttag

SEQ ID NO: 122511 - DNA, 570 bp, synthetic construct
  misc_feature 1..570: note = Description of Artificial Sequence: Synthetic coding sequence
  source 1..570: mol_type = other DNA
atggtcacccagcatggaaaacctatgttcactaaagtttgtacggagggccgcctgatccttgagttcactttcgacgacctaatgcgtatcaagacttggcacttcacaattcgtcaatatagagagttggttcctaggtccatcctcgccatgcacgcccaggacccacaggtactggaccagttaagtaaaaatataactcgcatgggcctcacaaacttcaccctgaactatctgcgactgtgcgtgattctggagccaatgcaggagttgatgagcagacacaaaacatacaatctttcacctcgagactgtctgaagacatgcttattccaaaagtggcaaagaatggtggccccacccgcagagccaactcggcagccaaccaccaagcggcggaaacgcaaaaattccacctcctctacttccaatagctcggccggcaataacgcaaattccaccggcagtaaaaaaaagaccacggccgccaacctgagtctttcgtcccaggtgccaatcgcctctatcgctcgctctccagtctccggctgtgctctcaggacttag

SEQ ID NO: 122512 - DNA, 495 bp, synthetic construct
  misc_feature 1..495: note = Description of Artificial Sequence: Synthetic coding sequence
  source 1..495: mol_type = other DNA
atggtgcagcccgagtatagaatatatgaaatgaataagcggctccaatcacgaaccgaagacagtgacaacctctggtgggacgctttcgcaactgaattcttcgaagatgacgctaccttaactttatctttttgcctggaggacggaccgaagcgatatacgattggtagaacactgatcccccgctacttttccaccgtgttcgaaggcggagttaccgatctgtattatatactgaaacactccaaagaatcataccataactctagcattacagtggactgcgatcagtgcacaatggttacacaacacgggaagcctatgtttacgaaggtttgtaccgagggacgactgatcctggagtttacgtttgatgatctgatgagaattaagacgtggcatttcaccatcagacaataccgcgagttggtccctagatcaatcctggccatgcatgctcaggacccccaagtactcgatcagctatcctag

SEQ ID NO: 122513 - DNA, 333 bp, synthetic construct
  misc_feature 1..333: note = Description of Artificial Sequence: Synthetic coding sequence
  source 1..333: mol_type = other DNA
atgtcatccacacctcatgaccccttctattccagtccattcggccccttttacagacgacacacaccttacatggtacagccggaataccgcatttacgagatgaacaaacgactccagtccagaacggaggactccgacaacttatggtgggacgcctttgccaccgagttttttgaggacgacgcaaccctcaccctttccttctgtttggaagatggcccgaagcgatacatagtccacagcgccgctgatgcacgggggaactgcaaccagctgggggactccgaaccggacgcctgcgatggcttgctccagttccctatcatgtag

SEQ ID NO: 122514 - DNA, 321 bp, synthetic construct
  misc_feature 1..321: note = Description of Artificial Sequence: Synthetic coding sequence
  source 1..321: mol_type = other DNA
atgtcctctacccctcacgatccattttattcgtctccgtttggaccattctatcggcgccataccccatacatggtgcagcctgaatacagaatttatgaaatgaataagagactgcaaagtcggacagaagattccgacaacttatggtgggacgcatttgcgactgagttttttgaggacgacgccacacttaccctgtctttttgtctcgaagacggtcctaagcgctaccgcaccaaaaatctgcgacccatcggcgaaaagatgaatattaatggcaagtgctaccgtcaggacccacatccccccctcctgtag

SEQ ID NO: 122515 - DNA, 1116 bp, synthetic construct
  misc_feature 1..1116: note = Description of Artificial Sequence: Synthetic coding sequence
  source 1..1116: mol_type = other DNA
atgtcctcaacacctcatgaccccttctactcttccccctttgggcccttttaccggcgacatacgccttacatggtacaacccgaataccggatatacgagatgaacaagaggctgcaatcacggacggaagattccgacaacctctggtgggacgccttcgccactgagttttttgaggatgacgctaccctgacattgtccttctgtctggaggacggcccaaaacgatacactatcgggaggacactgattccacgctatttcagcaccgttttcgaagggggagtgaccgatctgtattacatactgaagcatagcaaggaaagctatcataattcttcaatcacagtggactgtgaccagtgcaccatggttacccaacacggcaagcccatgtttacgaaagtgtgcactgagggaaggctcatcttggagtttacgttcgatgacctgatgcgaataaaaacctggcacttcaccatccgacaatatcgggagctggtgccccggtctatcctggctatgcatgctcaggatccccaggtcctggatcagctaagcaaaaacatcactaggatggggctcactaatttcactctgaattacctgcggctctgcgtgatcttggagcccatgcaggagttgatgtctagacacaaaacctacaacctgtctcccagagactgccttaagacatgtctgttccaaaagtggcagaggatggtggctccaccggccgaacccaccaggcagcccaccacaaaaaggaggaagcgcaagaactccacatcatccaccagtaatagttcagcaggtaacaacgctaactctactggtagcaagaagaaaactactgccgctaacctttccctgagctcacaggatgtaatggtcgtgggggaacctacactgatgggaggtgaattcggggacgaagatgagaggctgattacaagactggaaaatacgcaatacgatgctgcaaatggaatggacgatgaagaggattttaacaactccccagctctcgggaacaacagtccatggaattccaagccccctgctactcaagagaccaagagtgaaaatccgcccccccaggcctcacagtag

SEQ ID NO: 122516 - DNA, 1854 bp, synthetic construct
  misc_feature 1..1854: note = Description of Artificial Sequence: Synthetic coding sequence
  source 1..1854: mol_type = other DNA
atgtcttattccgtgactctcaccggcccgggcccttgggggttccggctccagggcggaaaggatttcaatatgcccctcaccatctcccggataacgcccggttcaaaggcagcccaatcacagctgtcacaaggtgacctcgtggtcgctatagacggggttaacacagatacaatgacccatcttgaagcgcaaaataagataaagagtgcctcctacaatctctccctcactctccagaagtctaagagacccatacccatcagcaccactgccccgcctgttcagactccacttcccgtaataccccatcagaaggttgtggtgaacagccccgccaacgcagattaccaggagaggtttaacccatccgctctaaaagatagtgccctgagcacgcacaaacctattgaggtgaaagggctggggggcaaagccaccataatccacgcccaatacaacacccccatttcaatgtacagccaggatgccattatggatgctattgccggtcaggcacaggcgcagggcagcgacttctccgggagtctgcccataaaggatttagcagttgactctgctagccccgtgtaccaggccgtgattaagagccagaacaagcccgaggacgaggccgatgagtgggcgcgaaggagttctaatctccagtcacggagtttccgaattctggctcagatgacaggcaccgaattcatgcaggaccccgacgaggaggccttaaggagatcaaggcctcaggcctccagttacagccctgctgtcgcagcatccagtgcacctgcgactcacacatcatatagtgaggggcccgcagctccagcaccaaagccaagagtggtgactactgccagcattcggccttcagtctatcaacccgtgccagcgagcacttattcgcccagcccaggcgccaactattccccaacaccttatacccccagtcctgctcccgcttacacacccagccctgctccagcctatacaccgtctcctgtgcccacgtacacgcccagcccagctccggcttacacgccttctcctgctcctaactacaatccagctcctagtgtagcctacagcggaggacccgcagagcccgcatctcgaccaccctgggtgacagacgacagcttctcccaaaagttcgctccggggaaaagcaccacgagcatatccaaacaaacactacctcgagggggcccagcttacaccccggctgggcctcaggtgccaccgctggcaagaggtacggtgcagcgggccgagcgcttcccagccagtagcagaacccccctgtgtggacactgcaacaatgtaattaggggtccgttcctggttgcaatgggtagatcctggcaccccgaagaattcacgtgtgcctactgcaaaacttctctcgcggatgtgtgcttcgtcgaagagcagaacaacgtgtactgcgagcgatgctatgaacaatttttcgccccactctgtgcaaaatgtaacaccaagatcatgggtgaagttatgcacgctctcaggcagacctggcatactacatgcttcgtgtgcgccgcatgcaaaaagccatttggtaacagcttattccatatggaagacggcgagccctattgtgaaaaggactacatcaaccttttttctacgaagtgccacggttgcgattttccggtagaagcgggagataaatttattgaagccttaggccatacgtggcacgatacgtgctttatctgcgccgtgtgccatgttaacctggaaggtcagcctttttattctaagaaagacagacctctgtgtaagaagcatgcccacaccatcaacctttag

SEQ ID NO: 122517 - DNA, 993 bp, synthetic construct
  misc_feature 1..993: note = Description of Artificial Sequence: Synthetic coding sequence
  source 1..993: mol_type = other DNA
atgagctattctgtcacccttacaggtccaggcccatgggggtttcgtcttcagggaggcaaagactttaacatgcctttaactatttctagaatcaccccggggagcaaagctgcccagagtcagctgtcacagggggacctggtagttgcaatagatggggtgaacaccgacactatgacccaccttgaggcccaaaataagatcaaaagtgccagctacaacttgagcttgacactgcagaaaagcaagagacccatccccatctccacaactgctccccccgttcagacccccttgcccgtcattccgcatcaaaaggacccggccctggataccaacggcagcctggttgccccctcaccgagtccagaggcaagagcttctcctggcacccccggaacccccgaactcagaccaacatttagtcccgccttctcacgccctagtgccttttcctcccttgccgaggcctccgacccaggtcctccgcgggctagtctacgggctaaaacctccccagaaggagctagagacttactgggtcctaaggctctccccggctccagtcagcccaggcaatataacaatcctatcgggctttacagcgccgaaacgctccgggaaatggcccagatgtatcagatgtctctcagaggaaaggcgtccggcgtggggctgcccggtggaagtctcccaatcaaggatctggccgtggattcggctagtcccgtctaccaagcggtcattaaaagtcaaaataaaccggaggacgaggctgatgagtgggcccgccggtcttctaatctgcagagcaggtcatttagaatcttagcccagatgactggcaccgaattcatgcaggaccccgacgaggaagccctgcgtcggtctcgcgagagatttgaaaccgagagaaattctccacggttcgccaagctgcgcaactggcaccatggcctgagtgctcaaatcctcaatgtgaagtcatag

SEQ ID NO: 122518 - DNA, 1413 bp, synthetic construct
  misc_feature 1..1413: note = Description of Artificial Sequence: Synthetic coding sequence
  source 1..1413: mol_type = other DNA
atgtcctacagcgttaccctgaccggtcccggtccgtggggtttcaggctacaaggaggcaaggactttaatatgccattgactatctcaaggatcacgccaggatcaaaggctgctcagtcacagttgagccaaggtgacctcgtcgttgcaatcgacggagtgaacacagatacgatgacacacctcgaggctcagaacaagattaaatcagctagctataacctttccttgaccctgcagaaatctaaaaggccaatccccatcagtaccaccgcgccccccgtgcaaacacccctccccgtcattccacaccagaaggcttcatcatactcaccagccgttgccgctagttctgctcctgcgacccataccagttactccgaaggccccgcggctccagcccccaagccgcgtgtggtgacaactgccagtatccgtcccagcgtttaccagcccgtccctgcctcaacttacagccccagcccaggagccaactacagccctacaccctatacaccctctccagcccccgcttatactccctcccccgctccagcctatacaccctccccggtcccaacatacacacccagtcctgccccagcgtataccccaagccccgctcccaattacaatcccgctccatccgtagcctacagcggaggtcccgccgaaccagcatcacgcccgccatgggtgactgacgattccttttctcagaagttcgcgcccgggaagagcaccaccagcatatccaaacagaccctgcctcggggggggcccgcatatactccagccggcccccaggtgccgcctcttgctcgggggaccgtgcagcgagctgaaaggttcccagccagttctaggactccactgtgcggtcattgcaacaacgtcatcagggggccctttctcgtagcaatggggaggagctggcatcctgaagagttcacatgtgcatactgcaaaacatcactggcggacgtgtgcttcgtagaagagcagaacaatgtttattgcgaaagatgttacgaacagttctttgcaccactgtgcgccaagtgtaatacaaagattatgggagaggtcatgcatgcgctgcggcagacgtggcatacgacttgtttcgtctgcgccgcttgcaagaagccttttggaaattcgctctttcacatggaagatggagaaccctattgcgagaaggactatattaatctgttcagcaccaaatgccatggctgtgacttccccgtagaagctggtgacaaattcatcgaagcgctggggcacacctggcacgatacctgcttcatctgtgctgtctgtcatgtgaacctggagggacagcctttctatagtaaaaaggacagaccactgtgcaaaaaacatgcgcatacgattaatttgtag

SEQ ID NO: 122519 - DNA, 2184 bp, synthetic construct
  misc_feature 1..2184: note = Description of Artificial Sequence: Synthetic coding sequence
  source 1..2184: mol_type = other DNA
atgtcctattccgtcactctgacaggacccggaccttggggattccggttgcagggaggaaaagatttcaacatgcccctaactatttcccgcattaccccaggaagcaaagccgctcaatcccaactgtcccagggtgatttagtggtcgccatcgatggtgtgaacactgatactatgacacacctcgaggcccaaaacaagataaagtcagcctcctataatctatcactgactttgcagaagagcaaaagaccaattcccattagtacaactgctcccccagttcagacgcccttacccgttatcccacaccaaaaggatccagccttggacacaaacggcagccttgtcgccccatcaccatctccggaggccagggcttcacctggaacccccggtacccccgagctgagaccgacctttagtccagctttctcaagaccaagcgcgttctccagcctcgccgaggcctcggacccaggccccccacgggccagtctgcgcgcaaagaccagtcctgagggtgcccgtgatttgctagggccaaaagcgctgcccgggtcgtcccagccccgtcagtacaataatcccatcggactctattccgccgaaacgctgcgcgaaatggctcagatgtaccagatgtccttacgaggcaaggcatctggcgttggccttccaggcggcagcctgcctattaaggacctggctgttgatagcgcctcccctgtttaccaagcagtcataaagtctcagaacaaacccgaagatgaagccgacgagtgggctcggcgaagctccaatctgcaaagccgatcatttcggattctggcccaaatgactggaacggagtttatgcaggacccagacgaggaagctttgcggaggagctccacaccaattgaacatgccccagtctgcaccagccaggctacaacccctttgttaccagcaagtgctcagccccccgccgctgcaagtcccagtgctgcaagccctcccttagcaacagctgccgcccacacagcgattgctagcgcctccacgaccgccccggctagcagcccagctgacagccctaggccacaggccagtagttactctcccgcagtggctgcctctagtgcacccgcaacccatacaagttattccgagggcccagccgccccggctccaaagcctagggtggtaaccactgcttctattagaccctcagtctaccagcctgtgcccgcctccacatattcaccctcacccggggccaactatagcccaactccatatactccaagtcccgctcccgcttacaccccttcccctgcccccgcttacacaccatcgcctgttcctacctacactccttctccagcacccgcctacactccatctcccgctcctaattataatcctgctccctctgtggcgtacagcggcggtcccgccgaacctgcatcgcgccccccctgggtgactgatgattcctttagtcagaagtttgcgcccggcaaatccaccacaagtatctccaagcagactttaccacgggggggcccagcgtatactcccgcaggcccacaggtcccccccctggcccgcggaaccgttcaacgcgctgagagattccctgcctccagccggacgcctctgtgtggccattgtaacaacgtgattagaggcccattcctggttgccatgggcaggtcctggcatcccgaggagttcacatgcgcctactgcaaaacaagcctggcggatgtgtgctttgttgaggagcagaataatgtatattgtgagcggtgttacgaacaattcttcgcacccctgtgcgcgaagtgtaacaccaagataatgggggaggttatgcacgccctgcgccagacctggcatactacctgttttgtctgcgctgcatgtaaaaaaccgtttggtaactctctctttcatatggaagacggggagccatactgcgagaaggactatataaatttgttttccacaaagtgccacggctgcgatttccctgtggaagcaggcgacaagtttatcgaagcccttggccatacttggcatgacacatgctttatttgcgcggtctgccatgtgaatctcgagggacagcctttttactcaaaaaaggatcgcccactgtgtaagaagcatgcacacactattaacttatag

SEQ ID NO: 122520 - DNA, 1197 bp, synthetic construct
  misc_feature 1..1197: note = Description of Artificial Sequence: Synthetic coding sequence
  source 1..1197: mol_type = other DNA
atgtcatactctgtgacattgacaggacccggaccttggggattccgtctccaaggagggaaagactttaatatgcccctcacaatctcccggatcaccccagggtctaaagccgcccagagccaactatcacaaggcgatttagtggtcgctatagacggtgtgaacacagacacaatgacccacttagaggcccagaataagatcaagtcagctagctataacttgtctctgacccttcagaaaagtaagaggccaatccccatcagtaccactgcaccacccgtccaaactccactcccagtgatcccccaccagaaagatcccgccctggataccaatggtagtttagtggctccgtcgccgagccctgaagcccgagcaagcccaggtacgcccggcactccagagctgaggccaacctttagtcccgcgttctcccggccaagcgcattctccagccttgcagaggcctctgacccaggccctccacgggcaagcctcagagctaagacatcgcccgaaggagcgagggatctgttgggaccaaaggctcttcctggctcgtctcaaccacggcagtacaataaccctatcgggctgtacagtgctgaaacgctgagagagatggcacagatgtatcagatgagtctccgcggcaaagcctccggggtaggccttcctggcggtgctgattaccaggaacgttttaatccttcagccttgaaagactccgccctgtcaacacataagccaatcgaagtgaagggcttagggggcaaggctactattatccatgctcagtataatacaccaataagcatgtattcccaggatgcaatcatggacgccatagcagggcaggctcaggcgcaggggtcagactttagcggtagtcttcccatcaaggacctcgctgtggacagtgcatctccggtttaccaggcagtgatcaagagccagaacaaaccagaggacgaagctgatgagtgggcacggaggagctccaacttgcaatctcggagctttaggatccttgcacagatgaccgggaccgaattcatgcaggatcccgacgaggaggccctgcgacgcagtcgcgagaggtttgaaactgagcgcaacagtccgcgattcgccaaattacgcaactggcaccatggactgagcgctcagattctcaatgttaagtcctag

SEQ ID NO: 122521 - DNA, 852 bp, synthetic construct
  misc_feature 1..852: note = Description of Artificial Sequence: Synthetic coding sequence
  source 1..852: mol_type = other DNA
atgtcctatagcgtcacactcaccggccccgggccctggggctttcggctgcagggtggtaaagatttcaatatgccactcacaatttcaaggatcacccctggcagcaaagccgcacagtctcagctctcccaaggagaccttgtggttgcaattgatggggtgaacactgatacaatgacccacctcgaggctcagaataagatcaagagcgccagctacaatctcagcctgaccctgcaaaagtctaagagacctataccaatctccaccacggccccccctgtccaaacaccgcttcccgtcattcctcatcaaaaggtagtcgtcaactcccccgccaatgcagattatcaagagcgctttaatccttctgcactcaaagattcggctttgagcacacataagcccattgaggttaaaggactcgggggcaaggcaaccatcatccacgcccagtataacaccccgattagcatgtattcccaggatgctatcatggacgccatagccgggcaggcccaggcccaagggtctgattttagtggcagcctaccaatcaaggacctggctgtggattcagcctctccggtctaccaagctgtcatcaaaagtcaaaataagcccgaagacgaagcagacgagtgggcccggagatcttctaatctgcagtctagaagttttaggattttagcccagatgacaggaacggaattcatgcaggatccagacgaagaagcactacggcgaagtcgtgagcgtttcgaaactgagaggaattcgccccgatttgccaaactgcgaaactggcaccatggcctgtcagcccagattctcaatgtcaagtcctag

SEQ ID NO: 122522 - DNA, 2199 bp, synthetic construct
  misc_feature 1..2199: note = Description of Artificial Sequence: Synthetic coding sequence
  source 1..2199: mol_type = other DNA
atgtcttacagtgtcacactgacaggccctggcccatggggttttaggctgcagggaggcaaggatttcaacatgcccctcacaatctcacgcatcaccccggggagcaaggcggctcagagccaactcagtcaaggcgacttggtggtggcaatcgatggggtaaataccgacactatgacacacctagaggctcagaacaaaattaaaagtgcttcatacaacttgtccctgacattgcagaagagtaaacgccctattccgattagtaccactgcccccccggtgcagacccctttacctgtcattccgcaccagaaggaccccgccctggacacgaatggttctctggtggcaccatcaccgtctccagaggcacgggcgagcccagggacgccaggaacacctgagctgcgacccactttctcaccagcttttagtcgccctagtgccttctcttccctagccgaagcttcggatccaggtcccccaagagcaagtctgagggcaaagactagcccagagggggcccgcgaccttctgggccctaaagccttacccggcagtagtcagccaagacagtacaataaccccataggcctgtactcagccgagactttgcgcgagatggctcagatgtaccagatgagcctgagaggaaaggcctccggtgtaggcctacctggaggcgcagattaccaggaacgatttaacccgtcagcactcaaagattccgctctgtcaacacacaagccaatcgaggtgaaagggctaggaggaaaagctacaatcatccacgctcagtataataccccaatctccatgtacagtcaggatgctatcatggatgccatcgcgggccaggcccaagcacagggttcggacttttccggatcgctgccgataaaggacctcgccgtagacagcgctagtcctgtgtatcaggcggtgatcaagagccagaacaagcccgaagacgaagctgatgagtgggccaggaggtcttccaacctgcagtcacgctccttccggattcttgcacagatgaccggaacggagttcatgcaagatccagacgaagaggcacttcgcaggtcccgaccccaagcctctagctactcaccagcggtcgccgcttcgtctgctcctgcaacacataccagctatagcgagggacccgccgccccagctcccaaaccccgggtggttaccaccgcgagcattcgcccttccgtttaccaacccgtgcccgcatctacctacagccccagccctggtgctaattacagccctactccttatacgccctcacccgcccctgcttacaccccatctcctgcacccgcctacaccccctcacctgtgcccacatatacacccagtccggcccccgcttacactcccagccctgcgcccaactataatcctgctcctagtgtcgcttactctggcggacctgccgaacctgccagtcgaccgccttgggtcactgacgacagcttcagtcagaagtttgcacccggaaagtccaccaccagcattagtaagcaaactctgccgcggggtgggccggcttataccccagctggtccccaagttcccccccttgcccggggcacagtgcagcgggcagaaagatttcctgcttccagtaggaccccactctgcggccactgtaacaacgtgattcgggggccgttcctagtggccatgggtagaagctggcaccccgaggagttcacctgtgcgtactgtaagaccagtctggccgatgtatgcttcgtagaagagcagaacaatgtttactgtgaaagatgttatgaacagttctttgcgcccctgtgtgctaagtgcaatactaagattatgggagaagttatgcacgctctccggcagacttggcatacaacatgctttgtatgtgccgcttgcaagaaaccttttggaaactctctcttccacatggaagatggcgagccctattgcgaaaaagactatatcaacctcttctcaactaaatgtcatggctgtgacttccctgtcgaagcaggagataagtttatagaggcattgggccacacctggcatgacacctgcttcatctgtgccgtatgtcacgtgaatttagaaggtcagccattttattctaaaaaagataggccactgtgcaagaagcatgcgcatactatcaatctttag

SEQ ID NO: 122523 - DNA, 1854 bp, synthetic construct
  misc_feature 1..1854: note = Description of Artificial Sequence: Synthetic coding sequence
  source 1..1854: mol_type = other DNA
atgagctattcagtgacgctgaccggtcctggaccctggggcttccgcttgcagggtggaaaggacttcaatatgcctttaaccatctctagaatcacaccaggtagcaaggccgcccagagtcagcttagtcagggggacctggtcgtggctatcgacggcgtgaataccgatactatgactcatctggaggctcagaacaagatcaagtcagcttcctacaaccttagtttgactctgcagaaatccaaacggcccatacccatctccaccaccgcaccacctgtgcagacaccgctgcctgttattcctcatcagaaggtggtggttaactccccagctaacgccgattaccaggagcgtttcaacccctctgccctgaaggactctgctctttcgacacataaacccatagaggtcaaaggcctcggagggaaagcaaccatcattcacgcccagtacaatactccaatcagtatgtactcccaggatgccataatggacgctattgctgggcaagcccaggcacaagggtctgactttagcggctccctccctattaaggatcttgcggttgatagtgcctctcctgtctatcaagcagtcattaagtctcagaacaagccagaagacgaggccgacgaatgggcccgacgatcttccaatctgcaatcgagatccttcaggattctggctcagatgactgggacagaattcatgcaggaccctgacgaggaggcattgcggaggtcacggccccaagcgtctagctactccccagcagtggctgccagcagtgcccccgctacacacacatcttactccgagggacccgcggccccagcaccaaaaccaagggtggtcacaactgcgagcattaggccttcagtgtatcagcccgtgcccgcctccacatatagtccctcacctggcgctaactacagccccaccccctacaccccctccccagccccagcatataccccaagtcccgcccctgcctataccccctcgcctgtcccgacctacaccccatctccggctcctgcttacacaccttcgcctgcgcctaactacaacccagctccatctgtggcatactcgggcgggccggcggaaccagccagtagacctccctgggtgaccgacgatagtttctctcagaagtttgcccccggtaaaagcacgacatcaattagtaagcaaactctgccacgaggaggacctgcatatacacccgcaggcccacaggtccccccactcgcccgcggtactgtgcagcgtgcagaacgattccctgcttcttctagaactcccctgtgtggtcactgtaataacgtgattcgggggcctttcctggtggcaatgggccgctcatggcacccggaagaatttacttgcgcctactgcaaaacttccttagctgacgtttgcttcgttgaagagcagaacaacgtgtactgcgaacggtgctatgagcaattcttcgccccactctgcgctaaatgcaataccaagataatgggagaggtcatgcatgccctgaggcaaacgtggcacaccacatgcttcgtgtgcgccgcatgcaaaaaacctttcggcaatagtctatttcacatggaagacggggaaccctactgcgagaaggattatatcaatctgttctccaccaagtgccacggatgtgacttccctgttgaggcaggagataaatttattgaggccttggggcatacatggcatgacacctgcttcatctgtgctgtgtgccatgtgaatctcgagggccagcccttttactccaagaaggataggccgctgtgcaagaaacacgcccacacaatcaatctatag

SEQ ID NO: 122524 - DNA, 1947 bp, synthetic construct
  misc_feature 1..1947: note = Description of Artificial Sequence: Synthetic coding sequence
  source 1..1947: mol_type = other DNA
atgtcctacagcgttaccctcaccgggcctggcccctggggattcagacttcagggtgggaaagattttaacatgcccttgactatatcaagaatcacacccggcagcaaagccgctcagagtcagctgtcccagggcgatctggtcgtggctatagacggggtgaacactgacacgatgactcatcttgaggcccagaataaaattaaaagtgcctcttataacctttcattgaccttgcagaagagcaaaagaccaatccccattagtaccaccgcccctcctgtccagactcccttaccagtgattccacaccagaaggaccccgcactcgatacaaatggatctctggtcgcccccagtccaagccctgaagcccgagcctccccagggacacccggcactccggaactacgccccaccttctccccagccttctcccgcccaagcgctttctccagtcttgctgaggcttccgaccctggtcctccacgggctagtctgagagccaagactagcccagaaggagcacgagacctgcttggtcccaaggctctgcccggttcaagtcaacctaggcagtacaacaaccccatcggactatatagcgcagagacactgcgtgagatggcccagatgtaccagatgtccctcagaggcaaggcctctggagtgggtttgccggggggatcgttacccattaaggatcttgccgtggattccgcgagtccagtctaccaggccgtgattaagagtcagaataagcctgaggacgaagccgacgagtgggctagaaggtcaagcaatttgcagtcaagatctttcagaattttggcccaaatgactggtaccgagtttatgcaggatccggacgaagaagctcttagacggtcaagaccacaagcctcctcttattctcccgctgtagctgcctcatctgcgcccgccactcacacgtcttactctgaggggccagccgcacccgcccccaagccacgcgtcgtgaccacagctagcattcgtcccagcgtttatcaacccgtacccgctagcacttacagtcctagcccaggtgcaaattattcaccaaccccatatactccgagccctgtccccacttacaccccttctccggccccggcgtatactccctctccagcacctaattataaccctgcaccttcagtggcctacagcggtggccccgctgaacccgctagtcgccctccctgggtgaccgatgactcgttttctcagaagttcgctccggggaagagcacaacctcgatatctaaacagacgcttcctaggggcgggcctgcctacacgcccgccggtccgcaggtcccgcctcttgctcgcggtaccgtccaaagggccgagcgctttcccgcctcatcccggacgccactgtgcggccactgtaacaacgtcatcaggggaccgtttctggtcgcaatgggcagatcctggcacccagaggagtttacctgtgcgtactgcaagactagtcttgcggacgtctgcttcgtcgaagaacagaataatgtgtattgtgagcgttgttacgagcagttctttgctcccctatgcgccaagtgtaacacaaagatcatgggagaggtgatgcatgcactgcggcagacttggcatacaacttgtttcgtgtgtgcagcttgtaagaagcctttcggcaactcactgttccacatggaggacggggaaccttattgcgagaaggactatatcaaccttttttccactaaatgccacggctgtgactttccagtcgaggccggggacaaatttattgaggccctcggtcatacttggcatgacacctgcttcatttgtgctgtgtgccatgttaatctcgaggggcagcccttctacagcaagaaggatagacctctgtgcaagaagcacgctcacacaattaatctctag

SEQ ID NO: 122525 - DNA, 696 bp, synthetic construct
  misc_feature 1..696: note = Description of Artificial Sequence: Synthetic coding sequence
  source 1..696: mol_type = other DNA
atgtcttactctgtgacactcactggtcccgggccctggggatttcgcctccaagggggaaaggattttaacatgcccctgaccatcagccgaatcacgcccggctcaaaggcagcacagtcgcagttatcccagggtgatctcgttgttgcaatcgacggggtgaatacggataccatgacccaccttgaggctcagaataaaatcaaatcagctagctataatctctctctgactctgcagaagagtaaacgcccaatacccatcagtactaccgccccacccgtccagactccactgccggtgatcccccaccagaaagatcccgcactggacacgaatggatctctcgtggcgccttccccatccccagaagctagagcctcaccaggtactccggggactccggagctgagacctactttctcacccgcgttcagccggccgagtgcgttttctagtctggctgaggcctcagatcccggccctccgcgcgcttcactccgggctaagactagcccggaaggcgctcgcgacttgctgggcccaaaggccctgccaggatcctctcagcctaggcagtacaacaatcctatcggcttgtacagcgcagaaacgctccgggagatggcacaaatgtatcagatgagtttaaggggcaaagcctccggcgtggggcttccaggcggatggtag

SEQ ID NO: 122526 - DNA, 1839 bp, synthetic construct
  misc_feature 1..1839: note = Description of Artificial Sequence: Synthetic coding sequence
  source 1..1839: mol_type = other DNA
atgagtcacccatcttggctaccccccaaatccactggggaacccctggggcacgttcccgctcgtatggaaaccacacatagctttggaaatcctagcatttcggtctctacgcagcagcctcccaagaagttcgcccccgtggtagctcccaagcctaagtataatccttataagcagcccgggggggagggagatttcctccctccaccacccccccctttagacgatagctcagcgctcccaagcatctctgggaacttccccccccctcctccgctcgacgaggaggcattcaaggttcagggtaaccctggcggcaaaaccctggaagagaggagatcaagcctagacgcggagatcgatagtttgacctcaattcttgccgatctggagtgttcaagtccgtacaagccccgccctccccagtcttctacaggatccacggccagcccacccgtgagtacgcctgtgacaggccataagcgtatggtcatacctaatcagcctccactgacggccactaagaagtctacccttaaaccccagcctgctcctcaggctgggcctatacccgtggcccctatcgggaccctcaagcctcagccccagccagtcccggcatcttacacaacagcatcaacaagctctagaccaacttttaatgtccaggtgaagagcgctcagccgtcccctcactatatggccgccccatccagcggacagatttacggctccggaccccagggctataacacacagcccgtgcctgtatcgggccagtgtccccctcctagcacaaggggaggaatggattatgcttacatcccaccacccgggctgcagcccgaaccgggttacggctacgctccgaatcagggaagatattacgagggttattacgctgcaggcccaggctacggtgggaggaatgattctgatccaacctatgggcagcaaggccacccgaatacttggaagagggagccaggctacactcctcctggcgctggaaaccagaacccccctggaatgtaccccgtgacaggccctaagaaaacttacattactgaccctgttagcgccccgtgcgcgcctcccttacagccaaaaggcggccattctggacagctgggtccttcttcggttgcaccttctttcaggccggaagacgagctggagcatttaactaagaagatgctgtatgatatggagaatccaccggcagatgaatactttggcagatgtgcaagatgtggagaaaatgtggtaggggagggcaccggctgtaccgccatggaccaggtgttccacgtggattgcttcacctgtatcatttgcaataataagctcagaggccagcctttttatgccgttgagaagaaggcgtactgtgaaccatgctatattaatacgctcgagcagtgtaacgtttgctctaagcctatcatggagagaatactgcgggctacaggcaaggcctaccacccacattgtttcacctgcgtcatgtgtcacaggtccctagacggcattccattcaccgttgatgcagggggattaattcattgtattgaggactttcacaaaaagttcgcacctcgttgcagcgtctgcaaggaaccaatcatgccagccccaggccaggaggagactgtgaggatcgtggccttggatagggactttcacgtgcattgttaccgatgcgaggactgcggaggcttgctgtccgaaggggataaccaaggctgctatccactcgacggccacattttgtgcaagacgtgcaatagcgctagaataagagtgctcaccgcgaaggccagtaccgatttatag

SEQ ID NO: 122527 - DNA, 282 bp, synthetic construct
  misc_feature 1..282: note = Description of Artificial Sequence: Synthetic coding sequence
  source 1..282: mol_type = other DNA
atgagccaccctagttggttgccacctaaatccaccggagaacccctcgggcatgtgcccgctcgcatggaaactacgcatagcttcggcaaccccagcatctccgtatcaacccaacagccccccaaaaaatttgccccagtggtggccccaaagcctaaatacaatccatacaaacagccgggcggtgaaggagacttcctgccccctccacctccacccttggatgactcttccgcattgccctcaatcagcgggaactttcccccacctccgccatag

SEQ ID NO: 122528 - DNA, 456 bp, synthetic construct
  misc_feature 1..456: note = Description of Artificial Sequence: Synthetic coding sequence
  source 1..456: mol_type = other DNA
atgtcccacccgagctggctgcctccaaaatctaccggcgaacccttgggccatgttcccgcccgcatggaaactactcattcatttggaaatccatccataagtgtctcaacccagcagcctcccaaaaagttcgccccagtagtggcacccaaacccaagtataatccatacaaacagccggggggcgaaggtgattttctgcccccaccgccacctcctctggatgattcgagcgcccttccgtctatatccggtaacttcccacccccaccccctctcgacgaggaggcttttaaggttcagggaaatcccgggggaaaaacgctcgaggagagaaggtcttctttagacgcagaaattgatagcctgacgtctatcttagcggacctggagtgctcctctccgtacaagccgcggcccccacagtcaagcaccggctccacagcttcttag

SEQ ID NO: 122529 - DNA, 336 bp, synthetic construct
  misc_feature 1..336: note = Description of Artificial Sequence: Synthetic coding sequence
  source 1..336: mol_type = other DNA
atgagtcatcccagctggctcccgcccaagtccacaggtgagccactggggcacgtgcccgcccggatggaaaccacccactcctttgggaacccatcgattagcgtgagcactcaacaaccacccaagaagttcgcgcccgtcgtggcccctaagccaaagtataatccatataagcagccaggaggagagggggacttcctacctcccccaccccccccactggacgacagtagtgctctcccatcaatcagtgggaactttcctccacctcctccactggatgaggaagccttcaaagtccagggcaatccaggaggtaagactctagaatag

SEQ ID NO: 122530 - DNA, 201 bp, synthetic construct
  misc_feature 1..201: note = Description of Artificial Sequence: Synthetic coding sequence
  source 1..201: mol_type = other DNA
atgagccatccaagctggcttcctccgaagagcaccggcgagcctctgggccacgtcccagcccggatggagaccacccacagctttgggaacccgagtatttcagtgtctacacaacagccaccgaagaagtttgcccctgtggtggcgccaaagccaaaatataacccctataagcagcctggcggcgagggagactag

SEQ ID NO: 122531 - DNA, 162 bp, synthetic construct
  misc_feature 1..162: note = Description of Artificial Sequence: Synthetic coding sequence
  source 1..162: mol_type = other DNA
atgagccaccctagctggttgccgcccaaatccactggcgaacccctggggcatgtgccagcaaggatggaaacaactcacagcttcgggaacccatccatctctgtcagtacccagcaaccaccaaaaaaattcgctcccgtcgtggcacctaaaccctag

SEQ ID NO: 122532 - DNA, 144 bp, synthetic construct
  misc_feature 1..144: note = Description of Artificial Sequence: Synthetic coding sequence
  source 1..144: mol_type = other DNA
atgtcccatccgtcatggctcccccccaaaagtactggggagccgctgggtcatgttcctgcgcggatggagaccacccactcctttggaaacccttctatttcagtgtcaactcagcaaccccccaagaaatttgccccatag

SEQ ID NO: 122533 - DNA, 1287 bp, synthetic construct
  misc_feature 1..1287: note = Description of Artificial Sequence: Synthetic coding sequence
  source 1..1287: mol_type = other DNA
atgtctcacccatcctggctgccccccaaatcaactggcgaaccgctagggcatgtcccagcacgcatggaaacgacgcactcatttggaaacccaagtatatccgtaagcactcagcagccacctaaaaaattcgcacccgtggtggctccaaagcccaagtataacccctataagcagccagggggggagggagactttttgccaccccccccgccccccctggacgattccagcgctttacctagtatttcgggcaactttccgccgcctccccctctcgacgaggaggccttcaaggtccagggcaaccctggtggaaagacccttgaggaaagaaggtctagcctggatgctgagattgactccctgacgagcattttggccgatttggagtgcagctcaccgtacaaacctcggccgccacagtccagcactggcagcacggcctcaccgccagtaagcactcccgtcacaggccacaagcgcatggtgatccccaaccaacctccgctgacagctaccaaaaaaagcacacttaagcctcagcccgccccgcaggcaggtccgatacccgtggctcccatcggaacgctcaagccacagcctcaaccagttccggcctcctatacaaccgccagcacatcctcccgccccactttcaacgtgcaagtaaagtccgcccagccgtcacctcattacatggctgcccctagctccggacagatctatggctctgggccacaaggctacaatacacagccggtgccggtaagcggccaatgccctcccccgtccacgcgaggcgggatggactatgcatacattccaccgcccggtctccagccagagccaggctacggctacgcccctaatcaaggacgatactacgaaggatactatgcagctgggcctggctatgggggccgaaacgatagtgatccaacctacggccagcagggccatccaaacacgtggaagcgcgagccaggatataccccccctggtgcgggaaatcagaatcctcccggcatgtacccagtgaccgggcctaaaaaaacctatattaccgatccggtgtcagcgccttgtgcgccgccactccaacctaagggtggccacagtggccagctcggtccctcttctgttgccccaagctttcgcccagaggatgaactggagcatctgacgaaaaaaatgctgtacgacatggagaacccaccagcggacgaatatttcggcgagtgggggttggagctgactagtgaagtcactatactactgtag

SEQ ID NO: 122534 - DNA, 198 bp, synthetic construct
  misc_feature 1..198: note = Description of Artificial Sequence: Synthetic coding sequence
  source 1..198: mol_type = other DNA
atgagccatccgtcatggttgcctccaaagagcacaggagaaccactcggacacgtccccgctagaatggagacgacacactccttcggcaacccttccatttccgtctctacacagcagccgcccaaaaaatttgcccctgtcgtggctccaaaaccaaaatataacccgtataagcagccaggcggcgaaggttag

SEQ ID NO: 122535 - DNA, 174 bp, synthetic construct
  misc_feature 1..174: note = Description of Artificial Sequence: Synthetic coding sequence
  source 1..174: mol_type = other DNA
atgtctcatccctcttggctcccacctaagtccacgggtgaacctctcggacatgtacctgctcgcatggaaacaacacacagtttcggcaatcctagcatcagcgtgtctacccaacagcctcccaaaaagtttgctcctgtggtcgccccaaaacccaagtataacccttag

SEQ ID NO: 122536 - DNA, 1839 bp, synthetic construct
  misc_feature 1..1839: note = Description of Artificial Sequence: Synthetic coding sequence
  source 1..1839: mol_type = other DNA
atgagtcatccttcttggcttccgccaaagtcgaccggggaaccactaggacatgtgcctgctcgtatggaaacgacgcacagcttcgggaacccaagcatttctgtatccacacagcagcctccaaaaaagtttgctcctgtggttgcccccaagcctaagtacaacccttataagcaaccaggaggagaaggcgatttcttacccccaccacccccccccctggatgattcatccgccttaccttccatttctggtaatttccctcccccgcctcctttagatgaagaggccttcaaagtccaaggaaacccaggcggtaagactctggaggagcgtcgatcttcgctcgatgcagaaatcgattcactgacaagcatactagcggatttagagtgctcctcaccatacaaacctaggcccccacagtcctcaactggatcgactgcctccccccctgtgtctactcccgtgaccgggcataaacgcatggtgatacccaatcaaccgccccttaccgctaccaaaaaatccactctgaagccacagccagcaccccaagctggacctatccctgtggcccctattggaaccctgaagcctcagcctcagcctgtgcctgcctcctatactacagcatctactagctcgcggccaacgttcaatgtacaggtcaaatccgcccagcccagcccccattacatggctgccccaagctctggccagatttacggctctggtccccagggctacaacacccagccagtaccagtgagcgggcagtgtcccccaccctcgacccggggcggaatggactacgcatacattccaccacccgggctccagcctgagcctggttatgggtacgcacctaatcagggccgatactatgaaggctactacgctgccggcccaggctacgggggaagaaacgactccgatcctacctatgggcagcaaggccaccctaacacatggaaaagagaaccaggatacacccccccaggagctgggaatcaaaatccacccgggatgtaccctgtgactgggccaaagaaaacctacattacggatcctgtcagtgcaccctgcgccccgcccctgcaaccaaagggaggccacagcggccagctaggaccatcaagtgtcgccccatccttcaggccagaagatgagcttgagcatctgactaaaaaaatgttatatgacatggaaaacccccctgctgacgaatatttcggccggtgtgcgaggtgcggagaaaacgtcgtgggcgaaggcacgggatgcaccgccatggaccaagtgtttcatgtcgactgcttcacctgcattatttgcaacaacaagctccgtggacagccattctatgccgtggaaaaaaaggcctactgcgagccttgttatattaatacgctagaacagtgcaacgtgtgttcgaaaccaatcatggaacgcattctgcgggcgacaggcaaggcctaccatccccattgttttacttgcgtgatgtgtcaccgctcactggacggaattccattcaccgtcgatgctggagggctgatccattgtatcgaggattttcacaaaaaatttgccccgcgctgttccgtgtgcaaagagcctataatgcctgcacccggtcaagaggaaaccgtgcgaatagttgctctggacagagactttcacgttcactgttaccgatgcgaggattgtgggggattgctcagcgagggggacaaccagggttgttaccccctcgacggccatattctgtgtaaaacttgtaacagcgcgaggatcagagttctcacagccaaggcctccaccgatctctag

SEQ ID NO: 122537 - DNA, 471 bp, synthetic construct
  misc_feature 1..471: note = Description of Artificial Sequence: Synthetic coding sequence
  source 1..471: mol_type = other DNA
atgcagaagaaagaaaagtcttttggcatccagatgttaagtgtccagcctgataccaaaccaaaagggtgcgcgggatgtaacaggaaaataaaagaccggtatctcctgaaggccctggacaagtactggcatgaggattgtctcaagtgcgcctgctgcgattgtcgcctgggagaggtgggtagtaccctttatacaaaagccaatctcatcctatgtcggcgcgactatctaagattgtttggcgtgactggaaactgcgctgcctgctctaagctgattccagcgttcgagatggtgatgagggctaaggacaatgtgtatcatttggactgttttgcctgtcagttgtgtaatcagcggttctgcgttggcgacaagtttttcttgaaaaataacatgatcctctgccagactgactacgaggagggtctgatgaaagaggggtacgctccacaagttcgctag

SEQ ID NO: 122538 - DNA, 438 bp, synthetic construct
  misc_feature 1..438: note = Description of Artificial Sequence: Synthetic coding sequence
  source 1..438: mol_type = other DNA
atgttgagcgtgcagcccgataccaagccaaaagggtgtgccgggtgcaatcgcaagatcaaggatcgctatctgctgaaggcgctcgacaagtactggcatgaggactgtctgaagtgtgcttgctgcgattgtagattaggtgaagtcgggagcaccctctatacgaaagccaacctaatcttatgcaggagagactatctgcggctgttcggggtcactggcaactgcgctgcttgttctaagctcatcccggccttcgagatggttatgagagccaaagataacgtttatcaccttgattgcttcgcatgccagctgtgtaaccagcgattctgcgttggggacaagttcttcctgaagaacaatatgattctctgccagactgactacgaagaggggctgatgaaagagggctatgccccgcaggttaggtag

SEQ ID NO: 122539 - DNA, 438 bp, synthetic construct
  misc_feature 1..438: note = Description of Artificial Sequence: Synthetic coding sequence
  source 1..438: mol_type = other DNA
atgctgtcggtgcagcctgacaccaaacccaagggctgcgccggctgcaatcgcaagattaaggatcgctacctgctcaaggctctggataagtactggcatgaggactgtctgaaatgcgcatgctgcgattgccggctgggggaggtgggctccaccctgtataccaaagctaatctcatcttatgccggagagattacttgagactgttcggcgtcacaggcaactgcgccgcatgctcaaagctaatacccgcgttcgaaatggtcatgcgcgctaaggataatgtctaccatctggattgtttcgcatgccagctgtgcaaccagagattctgcgtcggagacaagttcttcctgaagaacaatatgattctatgccagaccgactatgaagaaggtttgatgaaagaagggtacgccccacaggtacgttag

SEQ ID NO: 122540 - DNA, 438 bp, synthetic construct
  misc_feature 1..438: note = Description of Artificial Sequence: Synthetic coding sequence
  source 1..438: mol_type = other DNA
atgctcagcgttcagccggacactaagccgaaaggctgtgctggctgcaatcgtaagataaaagaccgctacctactcaaggccttggataaatattggcacgaagactgccttaagtgtgcgtgctgcgattgcaggctgggtgaggtcgggtcaacactgtataccaaagccaatctgatcctctgcagaagagactatctgcgcctgttcggagtgactggaaattgcgctgcctgttctaagctcatacctgccttcgagatggtgatgagggccaaagacaatgtatatcatctggattgcttcgcctgccagctgtgtaatcagaggttttgcgtgggcgacaagttcttcctgaaaaacaacatgatcctgtgccagaccgactatgaggaggggctaatgaaggaaggatatgccccccaagtaagatag

SEQ ID NO: 122541 - DNA, 438 bp, synthetic construct
  misc_feature 1..438: note = Description of Artificial Sequence: Synthetic coding sequence
  source 1..438: mol_type = other DNA
atgttatccgtgcagcctgacaccaagcccaagggctgcgctggctgcaaccgtaagattaaggatcgttatctgttaaaagctctggataagtattggcacgaggattgcctgaaatgtgcctgttgcgattgcaggctgggtgaggtaggaagtaccttatatactaaagctaacctaattctgtgcagaagggactatctgcgcctgttcggtgtgactggcaactgcgccgcgtgtagtaagctgataccggcctttgagatggtgatgagggccaaggacaacgtgtatcatcttgattgctttgcttgccagctgtgtaaccaacgcttctgcgtaggggacaagttcttcctgaagaacaatatgatcctctgtcagactgactatgaggaggggctgatgaaggaaggttacgccccgcaggtgcggtag

SEQ ID NO: 122542 - DNA, 438 bp, synthetic construct
  misc_feature 1..438: note = Description of Artificial Sequence: Synthetic coding sequence
  source 1..438: mol_type = other DNA
atgttatccgtccagcccgacacgaaacccaaagggtgtgcaggttgcaaccgcaaaataaaggaccggtatctcctgaaggccttggacaaatattggcacgaagattgtctgaagtgcgcttgctgtgattgtcgcttaggagaggtcggatcaacactgtacactaaggccaatttaatattgtgtcggagggattacctgcggctgttcggcgtcacagggaattgcgcagcctgctctaaactaatacccgcgtttgaaatggttatgcgagccaaggacaatgtgtatcatctcgactgctttgcctgccaactgtgtaaccagagattctgtgtaggggataaattcttcttgaaaaacaatatgatactgtgtcagacggattacgaggaggggctgatgaaagagggctacgcaccacaggtaaggtag

SEQ ID NO: 122543 - DNA, 438 bp, synthetic construct
  misc_feature 1..438: note = Description of Artificial Sequence: Synthetic coding sequence
  source 1..438: mol_type = other DNA
atgttgtctgtgcagccggacactaaacccaagggatgcgcaggttgtaatagaaagatcaaagaccgctatctgctgaaggcattggataagtactggcacgaggactgcctgaaatgcgcatgctgcgattgtagacttggcgaggtgggttcgaccctctataccaaagccaatctgattctgtgcagacgcgactaccttcggctcttcggggtgacaggtaactgcgccgcttgcagtaaactgatccctgcatttgagatggtgatgcgcgcaaaggataacgtgtaccatctcgattgcttcgcctgccagctgtgcaaccagcggttttgcgtgggcgacaaatttttcctgaaaaacaacatgattctgtgccagactgactacgaggaaggactgatgaaggaggggtacgctccccaggtcaggtag

SEQ ID NO: 122544 - DNA, 438 bp, synthetic construct
  misc_feature 1..438: note = Description of Artificial Sequence: Synthetic coding sequence
  source 1..438: mol_type = other DNA
atgctctccgtccagcctgacaccaagccgaaggggtgcgctggctgcaatcgcaaaatcaaagacagatatctgctcaaggcactcgataagtattggcacgaggattgtctgaagtgtgcatgctgcgattgccgcctgggagaagtcggatctaccctgtatacaaaagcaaacttgatcttatgccgtagggattatttgcgtctgttcggggtcaccggcaattgtgcggcatgctcgaaactgattcccgcatttgagatggtgatgcgcgccaaggacaacgtttatcatctcgactgcttcgcctgccaactgtgcaaccagcgcttttgcgtaggcgataagtttttcttgaagaacaatatgatcctctgtcagactgattatgaagagggactgatgaaagagggctatgctcctcaggtgcgttag

SEQ ID NO: 122545 - DNA, 357 bp, synthetic construct
  misc_feature 1..357: note = Description of Artificial Sequence: Synthetic coding sequence
  source 1..357: mol_type = other DNA
atgctctccgtccagcctgatactaagcccaaagggtgcgctggatgcaatcgcaagatcaaggacaggtatctgttgaaggcgttggacaaatactggcacgaggactgccttaaatgcgcctgctgtgactgcaggctaggggaggtgggcagcacgttgtataccaaagccaacctgattctgtgcaggagggattacctgagactcttcggcgtgacaggaaactgcgcagcctgctccaagctgatccctgccttcgaaatggttatgagagccaaggacaacgtttatcacttggactgctttgcatgccagttgtgtaaccagcgcttctgcgtgggtgataagttttag

SEQ ID NO: 122546 - DNA, 177 bp, synthetic construct
  misc_feature 1..177: note = Description of Artificial Sequence: Synthetic coding sequence
  source 1..177: mol_type = other DNA
atgctttcagtgcagcccgataccaagccaaaggggtgtgccgggtgtaatcgaaaaatcaaagatcgctacctacttaaagctctggataaatattggcatgaagactgcttgaagtgtgcatgttgtgactgtagactcggggaggtcggctcaacactttatactaaagcttag

SEQ ID NO: 122547 - DNA, 294 bp, synthetic construct
  misc_feature 1..294: note = Description of Artificial Sequence: Synthetic coding sequence
  source 1..294: mol_type = other DNA
atgctgtctgttcagcctgacaccaagccaaagggttgtgctggctgcaacaggaaaattaaagaccgctatctcctgaaggctctggataaatattggcatgaagactgcctgaaatgtgcatgctgtgactgtcgccttggagaggtgggatccactctgtatacgaaggccaatctgattctctgccgccgtgactacctgcgcctgtttggagtgaccggcaattgtgcagcgtgcagtaagctgattccagcattcgaaatggtgatgcgtgcaaaggacaatgtctag

SEQ ID NO: 122548 - DNA, 357 bp, synthetic construct
  misc_feature 1..357: note = Description of Artificial Sequence: Synthetic coding sequence
  source 1..357: mol_type = other DNA
atgttgagcgttcagccagatacaaagcctaagggttgcgcaggttgtaaccgcaagatcaaagaccgctatctcctgaaggccctggataagtactggcacgaagattgcctgaaatgcgcctgctgtgactgtcgccttggtgaggtaggttcaaccttatataccaaagcgaacctgattctgtgtaggagggactatctaagattatttggagtgacaggcaactgcgcggcctgctccaaactcatcccggcctttgaaatggttatgagggcgaaagataacgtctatcacttagattgtttcgcgtgtcagctttgtaatcagcgcttttgcgttggagacaaattctag

SEQ ID NO: 122549 - DNA, 255 bp, synthetic construct
  misc_feature 1..255: note = Description of Artificial Sequence: Synthetic coding sequence
  source 1..255: mol_type = other DNA
atgctgagtgttcagcctgacaccaaacccaaaggatgcgcaggctgtaaccgcaagattaaagatcgctatctgctcaaggctctggataaatactggcacgaggactgcctaaagtgcgcatgttgcgattgccgcctgggtgaggttggcagtactctgtatacaaaagccaacctgattctttgtaggcgcgattaccttcgcctctttggggttaccgggaattgcgcggcctgttcaaagctgatctag

SEQ ID NO: 122550 - DNA, 438 bp, synthetic construct
  misc_feature 1..438: note = Description of Artificial Sequence: Synthetic coding sequence
  source 1..438: mol_type = other DNA
atgctgtcagtgcagcccgatacaaaacccaaggggtgcgccggctgtaacaggaaaataaaagaccggtacctgctgaaggccctcgataaatactggcatgaagactgcctgaagtgcgcgtgttgcgactgccggctcggggaagtggggtccacactttacaccaaggccaatttaattttatgcaggcgggattacctgcgtctctttggtgtgactggtaattgtgccgcttgctcaaagttgatcccagcatttgagatggttatgcgcgcgaaagacaatgtatatcacctggactgtttcgcttgtcaactgtgcaaccaaaggttttgtgtcggggacaagtttttcttgaaaaataatatgattctgtgtcagactgactatgaagaaggtctgatgaaggagggatatgctccacaggtgcgctag

SEQ ID NO: 122551 - DNA, 492 bp, synthetic construct
  misc_feature 1..492: note = Description of Artificial Sequence: Synthetic coding sequence
  source 1..492: mol_type = other DNA
atgctcatggaaggcggaagagcagccgcagcccgcaatgtgagctccattcagatgctgagtgtgcagccagacactaagcctaagggttgtgccggctgcaatagaaaaatcaaggatcgctacctcctgaaagcactcgataagtactggcacgaggactgccttaagtgcgcctgttgtgactgtcgcctgggcgaagttggatcaactttgtacactaaggcaaatctgattctctgccgcagagactatctgcggcttttcggtgtcactgggaattgtgcggcctgctcaaagctgatccccgccttcgagatggtgatgcgcgccaaggacaatgtttaccacttagactgttttgcctgtcagctctgcaaccagagattctgcgtgggagacaaattcttcctgaagaacaacatgatcctttgtcagaccgactacgaagagggactaatgaaggagggctacgccccccaggtccgatag

SEQ ID NO: 122552 - DNA, 438 bp, synthetic construct
  misc_feature 1..438: note = Description of Artificial Sequence: Synthetic coding sequence
  source 1..438: mol_type = other DNA
atgctctcagtgcaacctgacacaaagcccaaaggttgtgccggatgtaacagaaaaatcaaggacagatatctcttgaaagccttagacaagtattggcacgaggattgcctaaaatgtgcatgctgcgactgtcgattaggggaggtgggctctacactttacactaaagccaacctgatcctttgtcgtagagactacctgcggttgttcggcgttaccgggaactgtgccgcatgctctaaattgattccagcctttgagatggtaatgagggctaaagataacgtctatcacctagactgttttgcatgtcagctttgcaatcaaagattctgtgtgggagataagttctttctcaaaaacaacatgattctgtgtcagactgactacgaagagggcctgatgaaggaaggatacgctccccaggtccgctag

SEQ ID NO: 122553 - DNA, 378 bp, synthetic construct
  misc_feature 1..378: note = Description of Artificial Sequence: Synthetic coding sequence
  source 1..378: mol_type = other DNA
atgctctccgtccagcctgacactaaacccaaaggatgcgccgggtgtaatcgcaagattaaagatcggtacctgcttaaggcacttgacaaatattggcatgaggattgcctcaaatgcgcatgctgcgattgtcgctgggagagactgtttggcgtgaccggcaattgcgcggcctgtagcaagctgattcccgcttttgagatggtgatgagggccaaagacaatgtgtatcatctggattgttttgcgtgccagctctgtaaccaaagattctgcgtgggcgacaaatttttcctcaaaaacaatatgatcctttgccagaccgactatgaggaggggctcatgaaggaagggtacgccccacaagtaagatag

SEQ ID NO: 122554 - DNA, 267 bp, synthetic construct
  misc_feature 1..267: note = Description of Artificial Sequence: Synthetic coding sequence
  source 1..267: mol_type = other DNA
atgctgtcagtacaaccagacactaaacccaaagggtgtgccggatgtaatcgcaagatcaaggaccgctatctcctgaaggcgctggacaaatattggcacgaagactgcttaaaatgcgcgtgctgtgactgtcgcttgggagaggtgggctcaactctttacacgaaggccaatctgattctatgccggagagactaccttcgactctttggcgtaaccggaaactgtgctgcctgctcaaaactcatccccgcatttgagtag

SEQ ID NO: 122555 - DNA, 333 bp, synthetic construct
  misc_feature 1..333: note = Description of Artificial Sequence: Synthetic coding sequence
  source 1..333: mol_type = other DNA
atgctgtccgttcagccggacaccaaacccaaggggtgtgctgggtgcaatcggaagattaaggatcgctacctgctgaaagcattggacaagtattggcatgaggattgtctgaaatgtgcttgctgcgactgccggttgggcgaagtgggtagcaccctatataccaaagccaatctgattctttgtcgccgggattatctcagactgttcggggtcaccggaaattgcgccgcctgttccaagcttattccagcgtttgagatggtgatgagggcaaaggacaacgtgtaccacctagactgcttcgcctgtcagctgtgcaaccagtag

SEQ ID NO: 122556 - DNA, 357 bp, synthetic construct
  misc_feature 1..357: note = Description of Artificial Sequence: Synthetic coding sequence
  source 1..357: mol_type = other DNA
atgctgtcggtgcagccagatacaaagcctaaaggctgcgctggctgcaatcggaagattaaagatcgctatctcctgaaggctttagataaatactggcacgaggactgcctgaagtgcgcctgttgtgactgccgcctcggtgaggtgggatccaccttatacactaaagctaacctgatcctgtgccgtagggattacctaaggctgttcggagtgacaggcaattgtgcggcctgctctaaactcattcccgcatttgaaatggtaatgcgggccaaagacaatgtgtaccatcttgactgctttgcatgccagctctgtaaccagagattttgtgtcggcgataaattctag

SEQ ID NO: 122557 - DNA, 498 bp, synthetic construct
  misc_feature 1..498: note = Description of Artificial Sequence: Synthetic coding sequence
  source 1..498: mol_type = other DNA
atggtgaacccagggagctcaagtcagcctccaccagtgacagctggctctcttagttggaaaaggtgtgccggttgcggaggcaaaattgctgataggttcttgctgtatgcaatggactcatattggcattcccggtgtctgaaatgctcgtgttgccaggcccagcttggggatatagggacatcctgttacaccaaatctgggatgatcctgtgccggaacgactacatacgattattcgggaacagcggcgcctgttctgcctgtggacagtccatacccgcttccgaattggtcatgagggcacagggaaacgtttaccacctgaagtgtttcacctgcagtacttgcagaaacagactagtgcccggcgatcgatttcattacatcaatggttcgctgttttgtgagcatgaccgccctacagctctgattaacgggcatctgaattccctgcagtccaatcccctcctgcccgatcagaaagtgtgctag

SEQ ID NO: 122558 - DNA, 498 bp, synthetic construct
  misc_feature 1..498: note = Description of Artificial Sequence: Synthetic coding sequence
  source 1..498: mol_type = other DNA
atggtcaatcccggctcatcttctcagccccctcctgtgacagcaggctccctttcatggaaacgttgcgccggatgcggcgggaagatcgctgaccgctttctactctatgccatggactcatactggcacagtaggtgcctaaaatgcagctgctgccaagcccagctgggggacataggtaccagctgctacaccaaatctggcatgatattgtgtaggaatgattatattaggctttttggcaattccggggcctgctcagcctgcgggcagtctatccccgccagcgagttggttatgcgggcacaaggaaatgtctaccatctgaagtgtttcacatgttcaacttgtcgcaacagactggtccccggtgatcgattccactatattaatggatcgcttttttgtgagcatgaccgacccactgctttgattaatggtcatctgaattccctacagagtaacccactgctgccagaccagaaggtttgctag

SEQ ID NO: 122559 - DNA, 2031 bp, synthetic construct
  misc_feature 1..2031: note = Description of Artificial Sequence: Synthetic coding sequence
  source 1..2031: mol_type = other DNA
atggataaatatgacgatctgggtctagaagcctccaaatttattgaggacttgaatatgtacgaggcatctaaagacggacttttccgcgttgataagggcgcaggaaataacccagagtttgaggaaacacgccgggttttcgccacgaaaatggccaaaattcacctccagcagcagcagcagcaactcctgcaggaagagacattaccaagggggagtcggggccctgtgaatggaggaggcagacttgggccccaagctaggtgggaggtggttggctcgaaactgacagtggatggcgccgccaaaccacctcttgctgcttctacgggagcacctggtgcagttactacactcgccgctggccagcctccctatccaccgcaagagcaaagatctagaccttacctacacggcaccaggcacggcagtcaggactgcggatccagggagtcactggccacctccgaaatgtctgcattccaccagcccggcccatgtgaggacccatcgtgcctcacccatggagattactatgataatctcagtttagcatcccccaagtggggggacaaacccggggttagcccctccattggtctgtcagtgggctccggctggccttccagccctggcagcgacccccctctgcccaaaccatgcggcgaccaccccctcaaccataggcagctgagtctcagctcctctcgcagtagcgaggggtccttgggtggccagaattcaggaattggtggacgaagttcagagaaacccacagggctgtggtccactgctagctcacagagggtgtctcccgggttgccttctcccaacctggaaaatggagctccagctgtgggccctgtgcagcctcgtactccctctgtgtcagcccccctggccctcagttgtccgcgacagggcggtctaccccgctccaattccggcctgggaggcgaggtgagcggggtgatgtcgaaacctaatgtggatccccaaccatggtttcaggacggcccgaaaagctacctcagctcgtcggcaccaagtagcagcccagccgggctggacggaagtcaacaaggcgccgtgccggggttgggccctaagcctggctgtactgacctgggtacaggacctaagttgtccccgacttccctggtccatccggttatgagcacactaccagaactgtcctgtaaggaaggtccattgggctggagctctgacggctcactcggtagcgttctcctcgacagtccatcctcccctagagtgaggctcccctgtcaacccctagttcctggccctgagcttcgcccttcggccgcggaattgaaattggaagccctgactcaacgcctggagcgcgagatggacgctcatcccaaggccgactacttcggggcatgtgtcaagtgctccaagggcgtgtttggagctgggcaggcttgccaagctatggggaacctataccatgacacctgctttacctgcgccgcgtgttcccgcaagctgagaggtaaggcattctacttcgtcaatggaaaagtcttttgcgaggaagactttttgtacagtggcttccagcagagcgccgatcgatgtttcctctgtggtcacctgataatggatatgattttacaggccctgggaaagtcttaccatcctggctgtttccgttgcgttatctgtaatgaatgtttagatggagtgccctttactgtggactctgaaaataagatctattgcgtaagggattatcataaagtcctggcgcccaaatgtgcggcttgtggccttcccattctgcccccagaaggctcagatgaaaccattcgggtcgtgtcaatggaccgcgactaccacgttgaatgctatcattgcgaagattgcggcctggaactgaatgacgaggacggccacaggtgttaccctctcgaggatcacctgttttgccacagctgtcatgtaaagagactcgaaaagaggcctagctccacagccctacaccagcatcatttctag

SEQ ID NO: 122560 - DNA, 1221 bp, synthetic construct
  misc_feature 1..1221: note = Description of Artificial Sequence: Synthetic coding sequence
  source 1..1221: mol_type = other DNA
atggtgcactgtgccgggtgtaagcggcccatcctcgatcggttccttttaaacgttcttgacagggcgtggcacgtcaagtgtgtgcaatgttgtgagtgcaaatgtaacctgactgagaagtgtttctctagggagggcaagctctactgcaaaaatgatttttttaggtgcttcgggaccaaatgtgcaggctgcgctcaggggatcagtcccagcgatcttgtgcgccgggctcggtccaaggtctttcaccttaactgcttcacatgtatgatgtgtaacaagcaactgtcgacaggcgaggaactctacatcattgacgaaaacaaattcgtctgcaaggaggattacctgagcaacagctccgtggctaaggagaacagcctccactctgcaaccaccggaagcgacccctccctgagcccggatagccaggacccgtcccaggatgatgctaaggactccgagtccgctaatgtatctgacaaagaagcgggctcaaatgaaaatgacgatcagaatctaggtgctaagcggcgagggcctagaacgaccatcaaagctaaacagttagaaacacttaaggccgctttcgcagctacccccaagcctacaagacacattcgcgagcagctggcacaagagacgggtctcaacatgcgcgtgatccaagtttggtttcagaatcgtcgctcgaaggaaaggcggatgaagcagctgtcggctctgggagctaggcggcatgcttttttcagaagtcctcgacgaatgagaccccttgtcgacaggttagagccaggagagctgattcccaacgggcctttctcattttacggcgattatcagtccgagtattacgggcccggcgggaactacgacttcttccctcagggccctccaagcagtcaggcgcaaacccccgtggatttgccattcgtccctagcagtggaccctctggaactccccttggcggattggaacaccccttacctggccatcatccttcaagcgaggcccagcggtttacagacatcctggcccaccctccaggagacagtccatcacctgagccttccctgcctggacctctgcactcgatgtcagctgaggtgtttggccccagccctccgttctcttctctgtcagttaatggtggcgcttcttacggaaaccacctcagtcacccccccgagatgaatgaagctgccgtttggtag

SEQ ID NO: 122561 - DNA, 1221 bp, synthetic construct
  misc_feature 1..1221: note = Description of Artificial Sequence: Synthetic coding sequence
  source 1..1221: mol_type = other DNA
atgcttttccattctctgagcggccctgaggtccatggagtgatagatgaaatggataggcgtgccaaaagcgaagcaccagcaatcagcagcgctatcgatcgtggggacactgaaacgaccatgcccagcatttcttcagatagagcagcactttgtgctggctgcggaggtaaaattagtgataggtactacctcctggctgtggacaagcaatggcacatgcggtgtctgaagtgttgcgagtgcaaactgaatctggagagtgagttgacctgcttttccaaggacgggtccatttattgtaaagaggattattaccggaggttttctgtacaaagatgtgctcgatgccatctcgggatatcagcaagtgagatggttatgagggcccgcgatctggtgtaccacctcaattgtttcacatgtacgacatgcaataaaatgctgaccacaggagaccacttcggcatgaaggactctctggtttattgcaggttacacttcgaagctctcctccaaggagaataccctgcccactttaaccacgccgatgtcgctgccgccgcagccgccgccgcggcagcaaaaagtgccggactgggcgcagcaggggccaatccattggggctgccatattacaatggagtgggcacggttcagaaaggccggcccagaaaaaggaaatctccaggcccgggagccgaccttgctgcttacaacgctgccctcagttgtaacgaaaatgacgccgagcatctggaccgcgatcagccctatccatcatcgcagaaaacaaagcggatgagaacgagcttcaaacaccaccagctgaggacaatgaaatcctacttcgccataaatcataacccagacgccaaggatctaaaacagctcgcccagaagaccggcctaaccaagcgcgtgctgcaagtttggtttcagaacgcccgggcgaaattcagacgcaatctgctgcgtcaggaaaacacgggggtggataagagcactgacgcggccctccagaccggaactccatccgggcctgcatcagaactttcaaacgctagcctctcgccatcgtccactcctaccaccttgaccgacctgacctctcctacactcccgacagtgacctctgtactgacgagcgtgcctggaaacttggaagggcacgagccacacagccctagccagacaacactgacgaacctgttctag

SEQ ID NO: 122562 - DNA, 1194 bp, synthetic construct
  misc_feature 1..1194: note = Description of Artificial Sequence: Synthetic coding sequence
  source 1..1194: mol_type = other DNA
atggaagctaggggcgagctgggacctgcccgcgaatccgccgggggagatcttctcctggcgctgttagctcggcgggcagacttgcgacgggaaatacctttgtgcgctggctgcgaccagcatatactcgatcggttcattttgaaggcaaccgccacggggactgcaagtgtttctagcgcagcgacagccacccccctcgctgaaaggtgcttctctcggggagagtccgtgtactgcaaggatgacttctttaaacgattcggaaccaagtgcgccgcttgtcaactgggtatcccccccactcaggtggtgaggagggcacaggacttcgtgtatcacctacattgcttcgcttgcgtggtgtgcaagaggcagctagcaaccggagacgaattctacttgatggaggatagccgtcttgtttgcaaagcagactacgagaccgcgaaacaaagggaggcagaagccacggccaaaagacccagaactactataactgctaagcaattggaaaccctgaagtcagcctacaacacatccccgaagccagcccggcacgttagagaacaactttcatccgaaaccggactcgatatgagggttgtccaggtttggttccaaaaccgccgggccaaagagaaaaggttgaagaaagatgccggtcgacaacgatggggccagtactttcgcaacatgaaacggagcaggggtggcagcaaatctgacaaggactctgtgcaagagggccaggatagtgatgctgaagtatcctttcccgtctcactgccctggcgcaagtgggctcgcccgatggcctccacgggagcctggggccatccaggtttggggcccgcgctgggatcacccgggcaactcctgcctggggcctggagaccagggaggcctcgcgctgtccccagggccgcttccagacagccactgcgctgcccacctatcccaaggagaccagcggagccgccctggccccctttattgagcagcctcgtgtaccccgacactagcctaggtctggtaccaagtggggcacccggaggaccccccccaatgcgagttctcgccggaaatgggccgagctccgatttgtcaactggttcatctggagggtaccctgacttccctgcaagccccgctagttggcttgatgaagtggatcatgcacagttctag

SEQ ID NO: 122563 - DNA, 1209 bp, synthetic construct
  misc_feature 1..1209: note = Description of Artificial Sequence: Synthetic coding sequence
  source 1..1209: mol_type = other DNA
atggaggcacggggtgaactcggaccggctcgcgagtcagcaggaggcgacctgctcctggccctgctggccagacgggccgatctccgaagggaaattcctctctgcgctggctgcgaccagcatatcctggacaggttcattctcaaagcactagatcgccactggcattcaaaatgtctgaagtgtagcgactgccacaccccattagcagaacgctgtttctccagaggcgaatctgtctactgtaaagatgacttttttaaaaggttcggtactaaatgtgcggcgtgtcagttgggcatccctccaacacaggtcgtccggcgggctcaagacttcgtgtaccatctccactgcttcgcctgcgtagtatgcaagagacagctggcgactggcgacgagttttacctgatggaagatagccgtctggtgtgcaaagcagactacgagaccgccaaacagcgagaagccgaagcaactgctaaacgacctagaaccacaattacggctaagcagttagaaaccctgaagagcgcctataacacgtcgcccaagcccgcgcgacatgtgagagagcaactctcaagcgagactgggttagatatgagagtcgtgcaggtttggttccagaatagacgcgctaaggaaaaaagattgaagaaggacgccggtaggcagcgctggggccagtacttccgtaacatgaagagatcccgcggaggatctaagagcgataaggacagtgtccaggagggccaggattccgatgcagaagtaagctttccagacgagccaagcctggctgaaatggggccagccaatggcctctatggcagcctgggcgagcctacacaggctctgggaaggcccagtggagcgctggggaacttctcgctcgagcacggcggcctcgctgggccagaacagtacagagaactccgccctggcagtccatacggagtaccgccttcaccggcagccccgcagtctttgccaggcccgcagccgctgctatcatcactggtttacccagatacctcgttagggctggtgccgtccggcgctcccggtgggccacctcccatgcgagtgctggctgggaatgggccaagcagcgacctgtccacaggaagtagcggaggctaccctgactttccggcctcccccgcaagctggctcgatgaggtggaccatgcacagttctag

SEQ ID NO: 122564 - DNA, 1194 bp, synthetic construct
  misc_feature 1..1194: note = Description of Artificial Sequence: Synthetic coding sequence
  source 1..1194: mol_type = other DNA
atgctcctcgagacaggcctggaacgcgatcgggcccggccgggcgcagccgccgtgtgtaccctaggcggcactcgggagattccgctgtgcgccggatgcgatcaacatatactcgaccgcttcatactgaaggccctcgatcgccattggcacagcaagtgtctaaagtgttcggattgccacacccccctagctgaaagatgcttttctcggggcgaaagcgtgtactgtaaggacgatttcttcaagcggtttggcacaaaatgcgccgcatgccaattaggaatcccccctacacaagtagtgcgcagggctcaggatttcgtgtaccatctgcactgcttcgcctgtgtagtgtgcaaaaggcaactcgccaccggcgatgaattctaccttatggaggattctaggcttgtgtgtaaggccgactatgagaccgctaagcaaagagaagccgaggctacagcaaagcgtcctcgcactacgattaccgccaagcaacttgagaccctgaagagtgcctataacacctccccaaaacctgcacggcatgtgcgagaacagctgtcatctgagactggactagacatgcgtgtcgtgcaagtgtggttccagaatcggcgggcaaaagaaaagcgcttaaagaaggatgctggaaggcagcggtgggggcaatacttcagaaatatgaaaagatctagaggaggttctaagtccgataaagacagcgttcaggaggggcaggattcagatgcggaggtaagcttccccgatgagcctagcttggctgaaatggggcctgccaatggactgtacggttccttgggggaaccaacccaggcactggggaggccctctggagccctaggcaacttttctctcgagcatggggggctcgcaggaccggagcaataccgcgagctacggcctggaagtccttacggagtgcccccatctccagcagcccctcaatccctgcctggaccacagcccctgttgtcatccttggtttatccagacacgtctctcggattggtccctagtggggcccctggcggtccaccgcccatgagagttctggccgggaatgggccctcttctgacctctccaccgggagttcaggtgggtatccagacttccccgcttcgcccgcctcttggctggatgaggtggatcacgcacagttttag

SEQ ID NO: 122565 - DNA, 1173 bp, synthetic construct
  misc_feature 1..1173: note = Description of Artificial Sequence: Synthetic coding sequence
  source 1..1173: mol_type = other DNA
atgatgcagagtgcaaccgttcccgctgagggagctgttaaaggcttgcctgagatgctgggcgtacctatgcagcagatccctcagtgcgccggctgcaaccagcacatattggataaattcattttgaaagtgctggacaggcattggcatagttcatgcctgaagtgtgccgattgtcaaatgcagcttgccgatcgatgcttttccagggcaggcagtgtttactgtaaagaagacttttttaagagatttgggaccaaatgtaccgcctgtcagcaggggatcccccccacccaggtggtgcggaaggcgcaggatttcgtctaccatctacactgctttgcttgcataatttgtaatcgccagcttgctacaggcgatgaattctacctcatggaggacgggcggttggtgtgcaaagaggactacgagactgccaaacagaacgatgatagtgaggccggcgctaagcgccctaggactaccatcacagcaaagcagcttgaaactctgaagaatgcatataaaaattcacccaagccagctaggcatgtgcgtgaacagctgtcatccgagaccggcctggacatgagagttgttcaggtatggttccagaatcggagagccaaagaaaaaaggttgaaaaaggatgccgggcgtcatcgttggggccagttctataaatctgtgaagcgatcaaggggatctagcaaacaggaaaaggagagctctgccgaagattgcggtgtttctgatagcgaactgagcttccgcgaagatcaaattttgtccgaactgggacatacaaacaggatttatgggaacgttggagatgtcactggaggccaactaatgaacggcagtttttccatggatgggaccgggcagtcctatcaggacttacgggacggctcaccctacggaatcccccagtcaccctcttcaataagtagcctgccctcccatgccccgctactgaacgggcttgattacactgtagacagcaacttgggcattatcgctcacgccggccagggcgtatctcagactcttagggccatggccggcggccccacaagcgacatcagcacaggatcttctgtggggtatccggatttccccacaagccccggctcttggctggacgaaatggatcatccgccattctag

SEQ ID NO: 122566 - DNA, 1209 bp, synthetic construct
  misc_feature 1..1209: note = Description of Artificial Sequence: Synthetic coding sequence
  source 1..1209: mol_type = other DNA
atgatggtgcattgcgccggatgtgaacggcctattttggatagattcctcttgaatgtactggatcgcgcctggcacattaagtgtgtgcagtgttgtgagtgcaaaacgaacttaagtgagaagtgcttcagccgcgagggcaaactctactgcaaaaatgatttctttagacgatttggaaccaagtgtgctggctgtgcgcaaggcatttcgcccagtgacctcgtccggaaagcgcgctcgaaggtgttccacttgaattgcttcacttgcatggtgtgtaacaaacagttaagtactggcgaggaactatacgttatcgacgagaataagttcgtctgtaaggacgactacctgagcagctcttccctgaaggaaggctctctgaacagcgttagctcctgcactgacaggagcttgtctcctgacctgcaggacgctctgcaggatgaccctaaggagactgacaatagtacctcgagcgacaaagagaccgcgaacaatgagaacgaagaacagaactcggggacaaagcggagaggaccacgcacgaccatcaaagccaagcagctcgagacactgaaagccgctttcgcagctacccctaagcccacacggcatatccgtgagcagttggcccaggaaactgggctgaatatgagggtcattcaggtctggttccagaataggagaagcaaggagcgccgcatgaagcagctgagcgccctcggagccaggcggcatgccttcttccggtccccccgtcggatgagacccctcggcggtcggctcgatgaaagtgaaatgctgggctcaaccccttacacatactatggcgactatcaaggcgattattacgcccctgggtcaaattacgatttcttcgcccatggcccgcctagtcaagctcagagtccagccgactcctcgtttctggcggcgtcaggtcccggctcaacccctttgggagccctggaaccacctcttgctggcccacacgctgctgacaacccaagattcactgatatgatcagccacccagacacgcctagccccgaaccaggcctacctggcactttgcatcccatgcccggcgaggtcttctcaggaggcccttccccacccttccccatgagtggaacttctggctattccgggccgctctcccatcccaaccccgaactcaacgaggccgcagtgtggtag

SEQ ID NO: 122567 - DNA, 1071 bp, synthetic construct
  misc_feature 1..1071: note = Description of Artificial Sequence: Synthetic coding sequence
  source 1..1071: mol_type = other DNA
atgcagattctcagcagatgccaggggctgatgagcgaggagtgtggccggacaactgctttggcggcgggacgcaccaggaagggtgccggagaggaaggactggtgagccctgagggcgcaggcgacgaggactcctgctctagttctgctcccctgtctcctagcagtagtccgcgatcaatggcctctggatccggatgcccacctgggaaatgcgtctgcaatagttgcggattagaaatagtcgacaagtatttactgaaggtgaatgatctctgctggcacgtgcgatgcctctcctgcagtgtttgccgcacctccctcggcaggcacacgtcatgctacatcaaagataaggatatcttctgtaaactggactatttccgacggtacggcacccggtgttcaagatgtgggcggcatatccactctacggattgggtccgaagagccaaaggcaatgtgtatcatcttgcctgtttcgcctgcttctcctgtaaacgtcagctttcaactggtgaagaatttgccctggttgaggagaaggttctttgtcgagtgcattacgactgcatgctggataatctgaaaagagaagtggagaacgggaatgggattagcgtagaaggggcgttgttaacagaacaagacgtgaatcaccccaaacccgcgaagagagctcggacctcattcactgcagatcagttacaggtgatgcaagcacagtttgcccaggacaacaacccggatgcacagactctccagaaactcgccgagaggaccggtctctcaagaagggtcatccaggtgtggttccagaattgtagagcgcggcacaagaaacacgtcagccccaaccacagcagcagcactcctgttactgccgtccctccctccaggctcagccccccaatgctggaagaaatggcctactcagcttacgttccacaggacgggacaatgctaaccgctctgcatagctatatggatgctcatagccccaccactctcgggcttcagccactacttccacatagtatgacacaattaccgatatcgcatacttag

SEQ ID NO: 122568 - DNA, 1041 bp, synthetic construct
  misc_feature 1..1041: note = Description of Artificial Sequence: Synthetic coding sequence
  source 1..1041: mol_type = other DNA
atgtcagaagaatgtggccgaacaaccgcgctggccgccggtcgaactagaaagggtgcaggcgaggaagggttggtgtcacccgaaggggctggggacgaggactcctgcagctcctctgcacctttatccccaagctccagcccacgaagtatggcctctggaagcggctgccctcccggaaagtgtgtttgcaattcctgtggattagagatagtcgataagtacctactgaaagtcaacgatctgtgttggcacgtgagatgtttgagctgcagcgtatgccgcacttccctcgggagacacactagttgttacataaaggataaggacatcttttgcaagttagactacttccggcgatacggcactcgatgtagtcgctgcggccgccacattcacagcaccgactgggtgaggagggctaaagggaatgtgtaccacttggcctgcttcgcctgtttctcttgcaaacgtcagcttagcaccggcgaagaatttgctttggtcgaagagaaagtcttatgtagagtccactatgactgtatgctggacaacttgaagcgagaggtggagaatggaaacgggatctctgtggagggagccctgctcacagagcaggacgttaaccaccccaaacctgccaagcgagcccggacctcgtttacagcagaccaactccaggtaatgcaagcccaatttgcacaggataacaaccccgatgcccaaacactacagaaactggctgagagaacaggactgtccaggagggtaatacaggtgtggtttcagaactgcagagctaggcataaaaagcacgtgtcccctaatcattcctcatccaccccagtgacagccgttcccccatcccggttatccccccccatgttagaggagatggcatattcagcctatgtgccacaggacggcaccatgctgactgccctgcactcatatatggacgcccattctcccaccacactcggactccagccactgttaccacattccatgacgcagctaccaatttctcatacttag

SEQ ID NO: 122569 - DNA, 1194 bp, synthetic construct
  misc_feature 1..1194: note = Description of Artificial Sequence: Synthetic coding sequence
  source 1..1194: mol_type = other DNA
atggagattgtgggctgtcgagccgaagataacagttgtccttttcgcccacctgcaatgttgtttcacggaatctcgggtgggcatatccaaggcataatggaggaaatggagcggcgctctaagacagaggccagattggccaagggtgctcagctaaatggaagggacgccggaatgccccctctcagccctgagaaacccgccctgtgcgccggttgtggcggaaaaatctcggataggtactatctcctggccgtggataaacagtggcacttgagatgcttaaagtgttgtgagtgcaaactcgccctcgaatccgagctgacatgtttcgccaaggacggctcaatttattgcaaggaggattattaccggcggtttagtgtccagagatgcgcaaggtgtcatttgggcattagcgcctctgagatggtcatgcgagcaagggattcagtgtaccacctaagctgcttcacctgcagtacatgtaataaaacgttaactaccggggatcacttcggtatgaaggatagtctagtttattgccgcgcacacttcgaaactctgttacagggcgaatacccacctcagctcagttacacggaattagcggcaaagtcaggagggctggccttgccgtatttcaatgggaccggaaccgtccaaaaaggccgacctaggaagcgaaaatcaccggccctgggcgttgatattgtaaactacaactccggctgcaacgagaacgaagctgaccatttggacagggatcagcagccataccctccttcccagaagacaaaaaggatgcggacctcatttaagcatcaccaattacgcacaatgaaaagttattttgctatcaatcacaatccagacgctaaagatctgaagcagttggcacaaaaaacgggactaacaaaaagagtccttcaggtgtggttccagaacgctagggccaaattcaggagaaacctcctccggcaggagaatggtggcgtggacaaggcagacggcacgtctttaccagctcctccttccgccgatagcggggctcttaccccccctggtactgccactacacttactgatcttacgaatccaaccattactgtggtgacatccgtgacctctaacatggattcccatgagtctgggtcgccttctcaaaccactcttacgaacctgttttag

SEQ ID NO: 122570 - DNA, 1167 bp, synthetic construct
  misc_feature 1..1167: note = Description of Artificial Sequence: Synthetic coding sequence
  source 1..1167: mol_type = other DNA
atgctgaatggaactacccttgaggccgcaatgctgtttcacgggatcagtggaggccacatccagggcattatggaagagatggaacgacgatccaaaacggaggccaggcttgccaagggggcccagttgaacgggcgtgacgccggtatgcctcccctaagtcccgagaaaccagccctttgtgcagggtgtgggggcaaaatttcagacagatattacctgctggctgtagacaaacaatggcatctgaggtgcctgaagtgctgtgagtgcaagctcgccctggaatccgaactgacctgcttcgcaaaggacggaagtatctactgtaaggaagattattatcgtcggttcagtgttcaacggtgtgcccggtgtcacctgggtatatcagcctctgagatggttatgcgggcacgtgattccgtttatcatctgagctgcttcacgtgttccacttgtaataagaccctaacaacgggggaccacttcggtatgaaggactccctggtctactgccgtgcccattttgagacactcctgcagggagaataccctccacagctatcctataccgaactggcagctaagtcgggcggactggccctgccttacttcaatgggaccggcaccgtgcagaaaggacgacccaggaagcgcaaatccccggcactgggtgtagacatcgtgaactacaattcaggatgtaatgagaacgaggccgatcatctagatagagaccagcaaccttatccgccctcccagaaaaccaaacgaatgaggacttcgttcaaacatcatcagcttaggacgatgaagtcttactttgctattaatcataatccagatgcaaaagatctcaagcagcttgcccaaaagactggcctaaccaagagagtgctacaggtgtggtttcagaacgctcgggctaagtttcgaaggaacctgttaagacaggaaaatggaggcgtggataaagccgacggtactagtctgccagctccaccatctgcagactccggcgccttgacacctcccgggaccgcgacaaccctgaccgacctcactaacccgacaattaccgtcgtaacttccgtgactagtaacatggattctcacgaatctgggtctcccagccagaccactctgaccaatctgttttag

SEQ ID NO: 122571 - DNA, 1149 bp, synthetic construct
  misc_feature 1..1149: note = Description of Artificial Sequence: Synthetic coding sequence
  source 1..1149: mol_type = other DNA
atgctcgacggattgaagatggaggaaaacttccaatccgccatcgacacctctgccagtttcagctcactcctggggagggcagtgtcccccaaatcagtttgcgaaggctgtcagagagtgattctcgacagatttctgttgcggctgaacgattccttctggcacgagcagtgcgtgcagtgcgcttcatgtaaagagccgctcgaaacaacttgcttttatagagataagaagctgtactgcaagtacgactacgagaagttgttcgcagtcaaatgcggtgggtgcttcgaggcaattgcccctaatgagttcgtaatgcgggcacagaaaagcgtctaccacctgagctgtttttgctgttgcgtgtgtgagcgccagctccagaagggggatgagtttgtacttaaggagggccaattgctctgtaaaggtgactatgagaaagagcgggagctgctgagcctggtcagcccagccgccagtgactcgggcaaatccgatgacgaagagtcactgtgtaaatctgcccacggtgcaggcaagggcactgcagaagaaggaaaggatcacaaacgtcccaagcggcctaggacgatccttacaactcagcagagaagggcttttaaggcctcttttgaggtgtctagcaaaccctgcaggaaggtgagggagaccctggctgctgagacgggactctccgtgagagtggtacaggtgtggttccagaatcaacgtgctaaaatgaagaaattggcccgccggcagcagcaacagcaacaggatcaacagaatactcaacggctgagcagtgcgcagaccaacggcggtgggagcgcaggaatggagggaatcatgaatccatatacagcacttcccactccacagcagctgctggctatcgaacagtcagtgtattcctctgatcctttccgccagggtcttacaccgccacagatgcctggcgatcacatgcacccttatggagctgaaccgttgtttcacgatttggactctgacgatactagcttgtcaaatcttggagactgctttttggcgacctctgaagcagggcctctgcaatcgcgcgtgggaaatccaatcgaccatttgtacagtatgcagaacagctatttcacttcatag

SEQ ID NO: 122572 - DNA, 1149 bp, synthetic construct
  misc_feature 1..1149: note = Description of Artificial Sequence: Synthetic coding sequence
  source 1..1149: mol_type = other DNA
atgttggacggcttaaagatggaagagaatttccagtcggctatcgacacgtcggcgagctttagtagcctcctgggccgcgccgtgtcccccaagtcagtctgtgagggatgccagcgtgtgatccttgaccggttccttctgagactgaatgattcattctggcacgagcagtgcgtgcagtgtgcctcttgcaaggagcctctagaaacgacttgtttctatcgagataagaagctgtactgcaaatatgactatgagaaactctttgccgttaaatgcggtgggtgctttgaagcaatagccccaaacgagtttgtgatgcgagctcagaagtctgtgtatcacctgagctgtttttgctgttgtgtatgcgagaggcagctccagaaaggggacgagtttgtcctgaaagagggacagttgctgtgcaaaggggactacgagaaagagagagagctactgtcactggttagtcccgccgccagcgacagtggtaaatcagatgacgaggaaagcctgtgcaagtctgcgcacggcgccggaaagggcaccgcagaagagggcaaagaccacaaaagacctaaaaggccccgcactatattgaccacacaacaacgccgggcctttaaagcttcctttgaagtctcatcaaagccatgtcgcaaggtccgggagactctggccgccgagacaggcctctccgtgcgcgtcgtgcaggtgtggttccagaaccagcgggcaaagatgaaaaagcttgcgaggagacagcaacagcagcaacaggatcagcaaaatacccaaaggctatcaagcgcacaaaccaatggtgggggcagcgctgggatggaagggataatgaatccttatacagctcttccaacacctcagcagctcctcgcaatcgaacagtccgtgtattcttctgacccattcaggcagggcctgacgccaccccagatgcccggcgaccacatgcatccatatggcgcagagcctttattccacgacctcgattcggacgatacctctttaagtaatcttggagattgctttttagcaactagcgaagccgggccattgcagtccagagtgggcaatccaatagaccatctgtattccatgcaaaactcttactttacgtcctag

SEQ ID NO: 122573 - DNA, 1149 bp, synthetic construct
  misc_feature 1..1149: note = Description of Artificial Sequence: Synthetic coding sequence
  source 1..1149: mol_type = other DNA
atgttggacggtctcaaaatggaagaaaatttccagagcgcaatagatacctcagcttcctttagcagcctcctcggccgagccgttagccccaagtctgtgtgcgagggatgtcagcgagtaatcctggatcgctttttactgcggttgaacgattccttttggcatgaacagtgcgtacagtgcgcctcatgcaaggagcctttggagaccacatgcttttacagggataagaaattgtattgcaaatacgattatgagaagctcttcgccgtcaaatgtgggggatgctttgaggccatagctcccaacgagtttgttatgcgggcccagaagagcgtgtaccatctctcctgtttctgctgttgtgtctgcgagagacagctgcaaaagggcgacgaattcgtgctcaaggaaggtcagctcctgtgcaagggggactatgaaaaggaaagagaacttctatctctggtgagcccggcagcctctgattccggtaagtcagacgacgaagagtcattatgtaagtcagcccatggggccggaaagggcacagccgaagagggcaaggatcacaaaagacctaaacggccacgtacaattttaacaacacagcagcgtagagcattcaaggcttctttcgaggtttcctctaagccatgccggaaggtgagagagaccttggcggcagaaactggactttccgtccgcgtcgtccaggtctggtttcaaaaccaacgggctaagatgaagaagctggcccgccgtcagcagcaacagcagcaggaccagcagaacacacagagactttctagtgcccagactaatgggggtggcagcgccggaatggagggcattatgaacccctacacagccctgccaacaccccagcagttgttggcaatcgaacagtccgtatacagttccgacccgtttaggcagggtctgacacctccccagatgccgggtgaccacatgcacccatatggagctgaacccctgttccacgatttggattccgacgacaccagcctgtctaacctaggcgactgctttctagctacctcggaggctggacctctccagagtcgggttgggaaccccatcgatcacctttacagtatgcagaactcctatttcacgagctag

SEQ ID NO: 122574 - DNA, 1221 bp, synthetic construct
  misc_feature 1..1221: note = Description of Artificial Sequence: Synthetic coding sequence
  source 1..1221: mol_type = other DNA
atggacatcgccactgggccagagtccttggaacggtgctttccaagaggccagacagattgcgctaaaatgttggatggcatcaagatggaagaacatgccctgcgacctggccccgctacactcggggtgttgcttggcagcgattgtccacatccagcagtgtgcgaggggtgtcagagacccatatctgaccgctttcttatgcgcgtcaacgaatctagttggcacgaagaatgcctacagtgcgcggcatgccagcaagctctgacaacttcttgctacttccgcgatagaaaactttactgcaaacaggactaccagcaactgttcgcagccaagtgctccggctgcatggagaagatcgcccccacagagtttgtgatgcgggctctagagtgtgtttatcacctcggctgtttttgctgttgcgtctgtgagcgccagctgcggaaaggcgatgagtttgttctgaaggagggacaacttctgtgcaaaggtgattatgagaaagaaaaggatcttctttcgtcggtgtcccccgatgagagtgactctgtgaagtctgaggatgaagacggtgacatgaagcctgccaaagggcaaggatcccaatccaaggggagcggtgacgacggtaaagatcctaggaggcccaaaagacccaggaccatactgacgactcagcagaggcgcgcttttaaagcatccttcgaagtctcttcaaagccttgccggaaggtgcgtgaaactctagctgcagaaaccgggctgtctgtaagagtggttcaagtgtggttccaaaaccagagagccaagatgaaaaagctggcacggaggcaccaacagcagcaagaacaacaaaattcacagcggctgggtcagggcgaaccgggccctgggcagggattgggacaggaggtgctatcatcgcgaatggaaggtatgatggcttcgtatacaccattagctcctccccagcagcagatagttgccatggaacagtccccttacggctcttcagacccgtttcagcagggcttaacaccacctcagatgcctggcaacgattctatttttcacgatattgacagcgacacctccttgaccagcctgtccgactgctttctcggaagctccgatgtcggttctttgcaggcaagggtcggtaatcctattgacaggctgtatagtatgcagtcgtcctacttcgcctcatag

SEQ ID NO: 122575 - DNA, 1209 bp, synthetic construct
  misc_feature 1..1209: note = Description of Artificial Sequence: Synthetic coding sequence
  source 1..1209: mol_type = other DNA
atggatatcgcaacaggacccgaaagcctcgaaagatgcttcccaagaggccagaccgattgcgctaagatgctggacggcataaagatggaagagcatgccctgcgtcctggaccagcaacattaggcgttctgctgggcagcgactgtccccacccagcagtctgcgaaggctgtcagcggcccatctcagaccgctttctgatgagggtgaacgagtcaagctggcatgaagaatgtcttcaatgcgcggcctgccagcaggctctgaccacctcctgctatttcagagaccggaaactttactgcaagcaggattaccagcagctattcgcagccaagtgtagcggctgcatggagaaaatagctccaacagaattcgtcatgagagcactcgagtgcgtctatcacttgggatgtttctgttgctgtgtgtgtgagcgacagcttcgcaagggcgacgagttcgttctgaaggagggtcagctcctttgcaaaggcgactatgaaaaggagaaggatcttctgtccagtgtgtcccctgatgagagcgacagtgtaaagtccgaggatgaagacggcgatatgaaaccagcaaagggccagggaagccagtcaaaagggtctggagacgatggaaaggatccaagaaggcccaaaagaccaagaaccattctgactacccagcagaggcgcgcattcaaggctagtttcgaggttagcagcaagccttgccggaaagtgcgtgaaacgctggctgcagaaactggtctgtcagtccgggtagtccaggtgtggttccagaaccagcgggctaaaatgaagaaactagctcgacgccaccagcagcagcaggaacagcagaactcccagcggcttggacaggaggttctctcatcacgcatggagggaatgatggcaagttataccccgcttgctcctccgcagcagcaaatcgtcgcaatggaacagagtccttacggatcgtccgacccatttcaacaaggcctgacccccccccagatgcctggggaccacatgaatccgtatgggaacgactcaatctttcatgacattgattccgataccagtttaaccagcttatccgattgctttttgggaagctcagatgtcggctcactgcaggccagagtgggcaaccctatcgacaggctatacagcatgcagtcatcgtatttcgcgagctag

SEQ ID NO: 122576 - DNA, 1119 bp, synthetic construct
  misc_feature 1..1119: note = Description of Artificial Sequence: Synthetic coding sequence
  source 1..1119: mol_type = other DNA
atgctggacgggatcaaaatggaggagcatgcgttgcgaccagggcctgctactttaggggtgttgctagggagcgactgcccgcaccccgcagtctgcgagggctgtcagaggcctatctctgatcgattcctcatgagagtcaatgagtcttcctggcatgaggagtgccttcagtgcgccgcctgtcagcaggcgctcaccaccagctgttactttagggatcggaaactgtattgtaagcaggactaccagcagttattcgccgccaagtgtagcggctgtatggagaagatcgcgcctacagagtttgtcatgagggctctggaatgtgtgtatcacctgggctgtttctgctgttgcgtatgcgagagacaacttcgcaagggcgacgagttcgtacttaaagagggacagctactctgtaaaggagattacgagaaggagaaggatctactaagttccgtgtctcccgatgaatctgactcggtcaaatcggaggacgaagacggcgatatgaagcctgctaagggccaaggctctcagtccaaaggctccggtgatgacggcaaggacccgagacgacctaagcgcccacgaacgattcttacaactcagcagcgaagagccttcaaggcttcttttgaagtcagttcgaagccttgcaggaaggtccgggagaccctggccgccgagactgggctgtctgtgcgggtcgtccaggtgtggtttcagaaccagcgggcgaaaatgaagaaattagctagacgtcatcagcagcagcaagaacagcagaattctcagcgtctcggccaagaggtcctgtcctcacgcatggaaggaatgatggcctcttacacccctctcgcacccccccagcagcagatagtagcaatggagcagagcccatacggctcctccgatcctttccagcagggactcacacccccccagatgccaggcaatgactctatctttcatgatattgattcagacaccagccttacgtccctgtctgactgctttttggggtcttctgacgtgggtagcctgcaggccagggtaggcaaccccattgaccgtctttacagtatgcagtcctcttacttcgccagctag

SEQ ID NO: 122577 - DNA, 1188 bp, synthetic construct
  misc_feature 1..1188: note = Description of Artificial Sequence: Synthetic coding sequence
  source 1..1188: mol_type = other DNA
atggacatcgccaccggacctgagagtctggaaagatgtttcccacgtggacagaccgattgtgcgaaaatgctcgacggaattaaaatggaagagcatgctttgaggccaggacctgccaccttgggagttctgttaggcagtgactgtccacatccggcagtctgcgagggctgtcaaaggccaatctcagatcgcttcctgatgagggtcaacgagtcctcctggcacgaagagtgtttgcagtgtgctgcctgccagcaggctctgactactagctgctatttccgcgaccgcaaattatattgcaagcaggactaccagcagctgtttgcagccaagtgctccgggtgtatggaaaaaattgccccaaccgaatttgttatgagagcgctcgagtgtgtgtatcatctgggatgtttttgctgctgcgtttgtgagcgccaactccggaagggcgacgagtttgttctgaaagagggccagctgctctgcaaaggagactacgagaaggagaaggatctgttgtcctccgtcagccctgatgagtccgactctgttaagagcgaggatgaggatggggatatgaagccggcgaaggggcaggggtcccagtcgaagggttctggagacgacgggaaggatcctcgacgacctaaaagacctaggaccattttgacgacccagcagcgtcgagccttcaaagccagtttcgaggtttcctccaagccttgcagaaaggtgcgcgaaacactggcggccgagactggattgagcgtgcgagtggtgcaggtttggtttcaaaatcagagggctaagatgaaaaagctcgcaagaaggcaccaacagcagcaggagcaacagaacagtcagcgactcggacaggaagtattgtctagccgcatggaaggaatgatggcaagttacacccccctggcgcccccccaacaacaaattgtggcaatggaacagtcgccttacgggtcaagtgatccttttcaacagggtctgacccctccacagatgccaggcaatgacagtatatttcatgacatagattctgacacttcactaacttctctatcagactgtttcttaggttctagtgatgtgggaagtcttcaggccagagttgggaaccccatcgacagattgtactctatgcaatccagctactttgcatcctag

SEQ ID NO: 122578 - DNA, 318 bp, synthetic construct
  misc_feature 1..318: note = Description of Artificial Sequence: Synthetic coding sequence
  source 1..318: mol_type = other DNA
atgtctatctatttccctatccactgtcccgattatctcaggtcggccaaaatgaccgaggttatgatgaacacccaaccgatggaggagatcggactgagcccaaggaaagacggactctcctatcaaattttcccggatccatccgacttcgaccgatgctgcaagctcaaggaccggttgcctagtatcgtagtagagcctaccgagggggaagtggaaagcggagagcttcgctggcctccagaggaatttctcgtgcaggaggatgagcaggataattgtgaggaaactgcaaaagagaacaaagagcagtag

SEQ ID NO: 122579 - DNA, 264 bp, synthetic construct
  misc_feature 1..264: note = Description of Artificial Sequence: Synthetic coding sequence
  source 1..264: mol_type = other DNA
atggtgtcctctgtggtgggcttctatagtctgaggtttttcgggaacttcacgcctaagaaagatgataccacgatgaccaagatcatcgggaattgcgtttccattttggtcctatctagcgcacttcctgttatgtccagaactctggggttgcataaattacatctccctaacactagtagagactccgagactgcaagcgttatgacaagctctgctcgcgatacagggtttcatcacctgcaggcattaatgtgttag

SEQ ID NO: 122580 - DNA, 687 bp, synthetic construct
  misc_feature 1..687: note = Description of Artificial Sequence: Synthetic coding sequence
  source 1..687: mol_type = other DNA
atggaggggcaggatgaagtctccgcaagggagcagcacttccacagtcaggttcgtgagtctaccatttgtttcctgctcttcgcaatattgtatgtggtaagctattttatcatcactcgatacaaacggaagtcggacgagcaagaagatgaggacgcaatcgtcaacagaatatcactgttcctgtccactttcacactggctgtctccgctggtgctgtgctccttctgccgtttagtattatctctaatgaaattctgctctcgttcccccagaactattatattcagtggcttaacggctccctgatacacggtctgtggaacctcgcctctttgttctctaatttgtgcttgttcgttcttatgccattcgccttcttttttctcgagagcgaaggatttgctggcctgaagaagggaatcagagccaggatacttgaaaccctcgtcatgcttctgctcctcgccctgctgatcctgggaatcgtctgggtggcttcagcactgatcgacaacgatgcagccagcatggagtcactgtacgacctgtgggaattctacttaccttatctgtattcttgtataagcctcatgggttgccttctgctgcatttgcctaatacgagcagagacagcgaaacggctaagccgagtgtcaatgggcatcaaaaggccctgtag

SEQ ID NO: 122581 - DNA, 1473 bp, synthetic construct
  misc_feature 1..1473: note = Description of Artificial Sequence: Synthetic coding sequence
  source 1..1473: mol_type = other DNA
atggagggtcaagacgaggtgtccgctagggagcaacactttcacagtcaggttcgcgaaagcacaatatgcttcctgctgttcgccatcctctatgtggtgagttatttcatcataacacggtacaaacggaagtcggacgagcaggaagacgaagacgcgatcgttaatagaatctctttgtttctatcgacattcacactggcggtctccgcgggagccgtcttgctactccccttttccatcatctcgaacgagatcctgctcagcttcccccagaattactatatacaatggctcaacggcagccttattcacggtctctggaatctcgcatccttgttttcgaatctctgtctcttcgtcttgatgccctttgccttcttcttcctcgaatccgaggggttcgctgggctaaagaaaggcatacgtgcacgaattttggaaaccctggtgatgctgctcctcctagcgctgctgatcttgggcattgtgtgggtggcttcggcactgatagacaacgatgcggcttctatggagagtctctatgacctttgggagttttacctcccctacttgtacagctgcatatctctgatgggctgtcttctcctgctgctgtgcaccccagtgggtctaagccgcatgttcactgtgatgggccagctgctcgtgaagcccacaattctggaggatctggatgaacagatttatattatcaccctagaggaggaagccctccagagaaggctgaatgggctttcatctagcgtagagtacaatattatggagctcgaacaagaactcgaaaatgtcaaaacactgaaaaccaagcttgaaaggaggaaaaaggcatcggcttgggagcgtaacctcgtgtacccagccgtaatggtgctcctactgattgagaccagtataagtgtactccttgtagcctgcaacatactgtgtctgctcgtggacgagactgccatgccgaaaggtacccgggggccaggaatcgggaatgcctctctttccacgtttggcttcgtcggcgccgccctagagatcatcttgatcttttacctcatggtgagctcagttgtggggttttactccctgcgcttttttgggaattttacgccaaagaaagacgacacaaccatgacaaaaattatcgggaactgcgtctctatattggtcctctcttctgccctgcccgttatgagccgcactctggggatcacacgcttcgacctccttggggattttggccgatttaactggctgggaaatttctacatagtactctcttacaatctgttgttcgccattgtcactacactttgtctggtccgtaaattcacatccgccgtccgtgaggagttatttaaggccctaggactgcataagcttcatctgccaaacacttcccgcgacagcgaaaccgctaaacccagtgtgaatggtcaccagaaagccctgtag

SEQ ID NO: 122582 - DNA, 1596 bp, synthetic construct
  misc_feature 1..1596: note = Description of Artificial Sequence: Synthetic coding sequence
  source 1..1596: mol_type = other DNA
atggagggccaggatgaggtcagtgcacgcgagcagcacttccactctcaggttagggaatccactatctgcttcctgctgttcgccatcttgtatgtggtatcttatttcataattactcgctataaaagaaaatccgatgagcaggaggacgaggacgctattgttaataggatatctctgtttttgagcactttcacccttgccgtatctgccggggctgtgctcttacttccgttctctatcatttccaatgagatcctgctctcgttcccccagaattactacattcagtggttgaacggaagccttattcatggcctgtggaacctggcgtccctgttctctaacctatgtctgtttgtcctgatgccctttgccttttttttcttagagagcgagggattcgctggactcaaaaagggaatccgcgcccgcatccttgagaccctcgtaatgttactgctgcttgccctcctaattctggggatcgtctgggtggcctctgctctcatcgacaacgacgctgcgtcaatggagagcctgtacgacctgtgggaattttacttgccatatctgtacagctgcatttctttgatgggctgcttgttgttactcctgtgtacccccgtgggactgtctaggatgttcacagtgatgggacagctgctggtgaagccaaccatcctggaggacctcgacgagcagatctacattattacactggaagaggaagcactgcagcgacgtctgaacgtcgggatgctgtgtgccggcaatcccgaggtcgccaccggcaggcaggtccccgaagaacaagctggccagctccttctcggaaagtggatccaagaaggaggagacatgatagccaatcctagactgtccagttctgtcgaatacaacatcatggagctcgaacaggaactggaaaacgtaaagacactcaaaaccaagcttgaacgacgaaaaaaggccagcgcttgggagaggaatcttgtttatccagcagtgatggtcctccttttgattgaaacaagtataagcgtcttgctcgtggcctgcaatatattgtgcctgttggtggacgagactgctatgccgaaggggaccagaggacctgggatcggtaacgcctccctctccaccttcggcttcgtgggtgcagctctggaaataattctgattttttatttgatggtatcttctgtagtgggtttttattctcttcgctttttcgggaattttacacctaaaaaggacgacactacgatgactaagatcatcggcaactgcgtgagcattctggtacttagctccgctttaccagtgatgtccagaactttgggtattaccagatttgatctgctgggcgactttgggaggttcaattggttaggaaacttctatatagtgctgtcatataacctcctgttcgccatcgtcactaccctctgcctcgtgcgcaaattcacgtccgccgtgcgcgaggagctattcaaagcgctggggctgcacaagctgcatctgcccaatacatctcgcgatagtgagacagcgaagcccagcgtgaacggccaccagaaggccctgtag

SEQ ID NO: 122583 - DNA, 855 bp, synthetic construct
  misc_feature 1..855: note = Description of Artificial Sequence: Synthetic coding sequence
  source 1..855: mol_type = other DNA
atgctactgctgctcgcgctactgatcctggggatcgtttgggtggcctcggccttaatagacaacgacgcagcgagcatggagagcctgtatgatttgtgggagttctacttgccatatctgtattcctgtatcagcctgatgggctgtctgctgcttttgctctgcactccagttggcttgtcccgaatgtttactgttatgggtcaattgctggttaaaccaacgatcctcgaagatctggatgaacagatctatatcattacactggaggaagaggccctgcagcgacgcctcaacgggttaagctcgtctgtcgaatataatattatggagttagagcaggaactagagaacgtaaagaccctaaagacaaaactggaacgcaggaagaaggcctctgcctgggagagaaatctcgtgtatccagcagtgatggtgctgctgctcatcgagacatctatttccgtcttgctggttgcatgcaatattctgtgtctgcttgtggatgagaccgccatgcccaagggaactcgaggccctggcataggtaatgcctcgctttctactttcgggtttgtgggagctgctctggaaattattctgatcttctacctgatggtgtcttcagttgttggcttctatagtctgcgcttcttcggaaatttcacacctaaaaaggacgacacgaccatgaccaaaatcattggaaattgcgtaagcatcctggtgttgtccagtgcactacctgtaatgtctagaactctcggactgcataaactccacctaccaaatacttcaagggacagtgagacagctaagccatctgtaaacggtcaccaaaaagccctgtag

SEQ ID NO: 122584 - DNA, 1590 bp, synthetic construct
  misc_feature 1..1590: note = Description of Artificial Sequence: Synthetic coding sequence
  source 1..1590: mol_type = other DNA
ggccaggatgaggttagcgccagagagcagcacttccactctcaggtgagagagtctaccatctgcttcctgctcttcgctatactttacgttgttagttattttatcatcaccaggtacaaacgcaagagcgatgagcaggaggatgaggacgctattgtgaatagaattagtttattcctctctaccttcactttggccgtcagtgccggggccgtcttactgctgccatttagtataattagcaatgagattctgttatcattccctcagaactattacattcagtggctgaatgggtcactgattcacggcctttggaatctggctagcctcttctcgaatctgtgtcttttcgtgctaatgccattcgctttctttttcctcgagtctgaaggcttcgccggcctcaagaaaggcattagagcccggatattggaaactctggtgatgctgttacttctcgccctgctgattctgggaatcgtgtgggtggccagtgcacttattgataatgatgcagccagtatggaatctctatacgacctttgggagttttatctgccatatctgtatagctgtatctccctgatgggctgtctgttgctgctgctgtgcaccccagtgggcctgagtcgcatgtttaccgttatgggacaattgctggtcaaacctacaatccttgaagaccttgatgagcagatttatatcattactctcgaagaggaggcgcttcagaggcggctgaacgtcgggatgttgtgtgccgggaacccggaggtggctaccggccgccaggtccccgaggaacaagctggccagttactacttgggaagtggatccaggagggaggcgacatgatcgcaaaccccagactgtcaagcagtgtggagtacaacattatggagttagaacaagaacttgagaatgttaagacactgaagaccaagttagagcggagaaagaaagcatcagcatgggagagaaacttagtgtaccctgctgtgatggtgctgctactcatagaaacatcaatatccgtcttgctggtggcttgtaatattctttgtctgctcgtcgacgaaacagctatgcccaagggcactaggggtcccggcattggaaacgccagcctgagcacctttggtttcgtcggggctgcactggaaatcatcttgatcttttacctgatggtgtcgtccgtggtgggcttctattctctacgattttttggtaactttacccctaaaaaagacgatactactatgactaaaattatcggtaattgcgttagtatattggtcctttcttctgccttgccagttatgtcaaggaccctcgggatcacacggttcgacctgctgggcgacttcggtcgatttaattggctgggcaacttctacatagtcctttcctataatctgctctttgcaatcgtgactactctatgtctggtgcgtaagttcactagcgccgttcgggaggaactgtttaaggccctcgggttacataaactacacctgcctaacacaagccgagattctgagaccgctaaaccatccgtgaatgggcaccagaaggcactctag

SEQ ID NO: 122585 - DNA, 1248 bp, synthetic construct
  misc_feature 1..1248: note = Description of Artificial Sequence: Synthetic coding sequence
  source 1..1248: mol_type = other DNA
atgaaggaagatggccgggctgggcgcggtgttggggccggggctgctttaccacagccgtccgccggagtgcacgacgaacaggaagacgaggatgctatagtgaaccggatctctctctttttatcaacatttaccctcgcagtcagcgccggagctgtgctcctactgccattttcgataatttccaatgagatcctcctgagctttccccagaactactacatccaatggctcaacgggagcttgatccacggcctgtggaatttagcctcgttgttcagcaacctgtgcctgttcgtgctgatgcctttcgcattcttttttctagagtcagaagggtttgccggactcaagaaggggattagagcaaggattttggaaacacttgtcatgttactgctgctcgcactcctgattttgggaattgtctgggtggcaagcgctttaattgataacgatgccgctagcatggagtccttatatgatttatgggagttttacctcccctacctctattcttgtatctcactcatgggctgtttgctgctgttgctttgcactccggtgggcttgtcgcgcatgttcacggtgatgggtcagctactggttaagcccacaatcttagaggaccttgacgaacaaatctatatcataactctggaagaggaggccctgcaaagacgcctcaatggcctttcctcatcagtcgagtataacatcatggaactcgagcaggaactcgagaacgtaaagactctgaagactaagctggagaggaggaagaaagcctccgcctgggagcgcaatctggtttaccctgccgtgatggttctcctgcttattgagacatccatttcagtccttcttgtggcttgtaatattctttgcttgctagtggacgagacagccatgccaaaagggaccagaggccctggcattggaaatgcgagcctttcaacattcggatttgtcggcgccgccctcgagattatcctgattttttacctgatggtatccagtgtcgtgggattttatagtcttaggttctttggaaactttacccccaagaaagatgacacaactatgacaaagataatcggaaactgtgtgtccattctggtgctcagctctgcactccccgtgatgtcgcgaactctggggctgcacaagctccatcttcccaacacaagccgggacagtgaaaccgcgaagccctctgtcaacggccatcagaaggcactctag

SEQ ID NO: 122586 - DNA, 1470 bp, synthetic construct
  misc_feature 1..1470: note = Description of Artificial Sequence: Synthetic coding sequence
  source 1..1470: mol_type = other DNA
atggaggcaccagactatgaagtgctgtcagtccgggagcagcttttccacgagagaattagagaatgcatcatctcgaccctgctctttgccaccctctatatcctctgccatattttcttgactcgttttaaaaagcctgccgagttcaccacagtggatgacgaagacgccactgtcaataaaattgcgcttgaattatgtactttcactcttgctatagcactcggagccgtgctgctgcttccattttccatcatttctaacgaggtgctgctgtctctgcccagaaactattatatacagtggttgaatgggtcattgattcacggcctctggaaccttgttttcctgttttcgaatctgtctctgatcttcctgatgccgtttgcttacttttttactgagagcgagggtttcgccggtagccgcaagggggtgctcgggcgggtctatgaaacggttgtcatgcttatgctgctgacccttctcgtactgggaatggtttgggtagcgtccgccatagtcgataagaataaagcaaatcgagaaagtctttacgatttttgggagtactatctgccatatctatacagctgtatctccttcctgggcgtactcctcctacttgtctgtacccctcttggtcttgcccggatgtttagcgtgacggggaaattgctagtgaaacccaggcttctcgaagacctcgaagagcagctttactgttccgccttcgaagaggctgcactgaccagacgcatctgcaatccaacctcctgctggttgccgttggatatggaattattacataggcaagtcctagcacttcagactcagagagtgctgctcgagaagagacggaaggcatccgcctggcagcgaaacttaggataccccctggccatgttgtgtctcttagtgcttaccggcctatccgtccttatcgtcgcaatccatattctggagctgctgattgacgaggccgccatgccgaggggaatgcagggcacctcgcttggccaggtgtctttttctaaactcggcagcttcggcgccgtgattcaggtggtactgattttctatctcatggtctcctccgttgtgggcttttactcctctcccctattccgaagcttgcggccccgatggcacgacactgctatgacccagattattggtaattgcgtgtgtttgctcgtcctcagctccgctctacccgtattcagtaggacactcgggctaacccgttttgacctcctgggagatttcggtaggtttaattggctaggcaatttctacatcgttttcttgtacaatgcagcctttgccggattgacaacactttgccttgtgaaaaccttcacagccgctgttcgcgccgagttgataagggcctttggcctagaccggctgcccctccctgttagtggattcccacaagcatccagaaaaacacagcaccagtag

SEQ ID NO: 122587 - DNA, 1455 bp, synthetic construct
  misc_feature 1..1455: note = Description of Artificial Sequence: Synthetic coding sequence
  source 1..1455: mol_type = other DNA
atggtgaacgtgaaggccctgtgcgagccggaggtttcaaattgctggatgaatgttataaccggcactggctcggtgtcctcgcctcttctcgttctgcctcaacccggtccagagacgtcactcatgacaggcgagccggttgacgatgaggacgcaacagtcaataagattgcccttgagctgtgtacatttactctggctattgctttgggcgccgttttgctgctacctttctctataattagcaatgaggtgctgctatccttgccgcgaaactactatatccagtggctgaatggcagcttaattcatgggttgtggaacttggtgttcctcttcagcaacctgtccctaattttcctgatgccgttcgcctatttctttaccgaatctgaggggtttgcggggtcaaggaaaggggtcttagggcgggtttacgaaaccgtggtcatgttgatgttactgacactcctcgttcttggtatggtgtgggtcgcaagcgcgatcgtggataagaataaggcgaaccgggaatcactatacgacttctgggaatattatcttccttacctgtatagctgcatcagctttctaggcgtgctgcttctcttggtctgcacccccctggggttggccaggatgttcagcgtgaccggcaagctcttggttaagccccgtctgctggaggatctggaggagcagctgtactgtagcgctttcgaggaagctgcgctcactcggcgcatttgcaatccaacaagttgctggctacccctggatatggagttactgcacaggcaagtgctggcgctccagacacaacgcgtgttactagagaagcgtcgaaaggcgtctgcctggcagcggaatttggggtatcctctggcgatgttgtgcctcctggtgttaacgggtctcagcgtactgatcgtcgccatccatatcctggagctgttgattgatgaagctgcaatgcctcgcggcatgcaagggacatctctcggtcaagtgtcttttagcaagttgggctcttttggcgctgtcattcaggtcgtgctgatattttatctcatggtaagctcagtggttggtttctattccagcccactattccggtcactccgcccaaggtggcacgacacggctatgacgcagatcattggtaattgcgtgtgcctgctggtgctgtcgtccgccctccctgttttctctcgcactttgggccttacacgatttgacctgctgggtgacttcggtcgctttaattggttgggaaacttttacatcgtttttctctacaatgccgcattcgcaggcttaaccaccctttgcttggtgaagacgtttaccgcggctgtgcgtgctgagctgatccgcgccttcggcctggatcgattaccactaccagtgagcggctttccccaggcctctcgtaaaacccagcaccagtag

SEQ ID NO: 122588 - DNA, 1410 bp, synthetic construct
  misc_feature 1..1410: note = Description of Artificial Sequence: Synthetic coding sequence
  source 1..1410: mol_type = other DNA
atggaggctcctgactacgaagtcttatctgtgcgggaacagttatttcacgagcgaatacgagaatgtataataagcaccctgctgtttgctaccctgtacatcctgtgccacatctttcttacacgattcaagaagcccgctgaattcacaacggtcgatgacgaagacgccaccgttaacaagatcgccttggagctatgtactttcacgcttgccatcgcactgggtgcggttcttctgctgcccttttctataatatccaacgaggtgctactgtcattgccacgcaattattacattcaatggctgaatggctccctgatacacgggctatggaaccttgtctttttgtttagcaatttgtccctcatcttcttgatgccctttgcctatttttttaccgaaagtgaaggctttgctggcagtaggaagggggtgctcggaagagtatacgagaccgtcgtaatgcttatgttgctgacccttttggtcctcggcatggtttgggttgcctctgcaatagtggataagaacaaggcaaacagggaatccctctacgacttttgggagtattacctcccctacctgtattcctgtatctccttcctgggggtgctgctgctgcttgtgtgcaccccactaggactcgccagaatgttcagtgtgactgggaagctacttgtgaagccacgcttgctggaagacctggaagagcagttgtactgctccgcgtttgaggaagcggccctgaccagacgcatttgcaaccctacatcctgctggctgccgctggatatggagttgctgcacaggcaagtcttggccctccagacgcaaagagtgctgcttgaaaagcggaggaaagcttctgcttggcagaggaatttaggatatcctttagccatgttgtgtctacttgtgctgaccggactcagcgtgctgatagtggcaattcatatccttgagctcctgatcgacgaggctgccatgcctagagggatgcaagttgtactcatattctatctgatggtctctagcgtagtaggcttctacagcagccccctgtttagaagtctacgccctagatggcatgacaccgcaatgacccagatcataggcaactgtgtgtgcctgttggttctgtctagcgccctcccagtcttctcccggactctcggactgactcggttcgatctcttgggcgatttcggaagattcaactggttgggaaacttctatattgtgtttttgtacaacgcagccttcgcgggcctgaccaccctgtgtctggtgaaaacctttaccgctgctgtgagagctgagcttattcgggcattcgggctcgatcgattgccgttacccgtgagtgggtttccccaggccagtcgaaaaacccaacatcagtag

SEQ ID NO: 122589 - DNA, 384 bp, synthetic construct
  misc_feature 1..384: note = Description of Artificial Sequence: Synthetic coding sequence
  source 1..384: mol_type = other DNA
atggaggcacccgattatgaggtcctaagcgtgcgtgagcagctattccatgagcggattcgcgaatgtatcatcagtactctgttattcgccacactctatattctttgtcatatctttctgactagatttaagaagccagccgagtttacgacggtcgacgatgaagacgcaacggtaaacaaaatagcactggagctgtgtaccttcacactagcaatcgcgttaggagctgtcttgctgctacccttttccataattagcaatgaggtgcttctctccctacctcggaactactacatccagtggcttaatggctccctaattcatgggctttggaatctggtatttctgttctcaaacctgagtctgatcttcctctag

SEQ ID NO: 122590 - DNA, 1017 bp, synthetic construct
  misc_feature 1..1017: note = Description of Artificial Sequence: Synthetic coding sequence
  source 1..1017: mol_type = other DNA
atggttcgccgcgtgcagccggatcggaaacagcttcccctggtactcctgagattgctctgcctgctcccaaccggtctgccggttaggagcgtggatttcaacagggggacagacaatattactgtcaggcagggggacacggctattcttcgatgcgtcgtagaagataagaattcgaaagttgcctggctgaatcggtcaggaataattttcgcgggacacgataaatggtcccttgacccaagagtcgaattggagaaacggcacagcttagagtattcactgcgcattcagaaggtggatgtgtatgacgagggctcctatacatgttctgtccagactcaacatgagcccaaaacaagtcaagtctacctgattgtccaggtgcccccaaagattagcaacatctcctcagatgtcactgtaaatgaggggtcaaatgtgacactcgtttgcatggcgaatggccgccccgaaccagtcatcacgtggcggcatctgaccccaactggaagggagtttgaaggggaggaagagtacctggagatcctcggcatcacaagggagcagtccggaaaatatgaatgcaaggccgctaacgaggtgagttccgctgatgtcaagcaggttaaggttacagtcaattaccccccgaccatcaccgaatctaaaagcaacgaagcaacaacagggagacaagccagcttgaagtgcgaagcatccgctgtgcctgctcctgatttcgagtggtacagagacgacacacgcattaattccgcgaatggactggagatcaaatccacggaaggtcaatcctctctgactgtgacgaacgtcacggaggagcactacgggaactacacctgcgtcgccgcaaataaacttggagtgacgaatgcctctttggttctgtttaggcccggctctgtgcggggaataaacgggtcaatctcattagcagtccctctttggctgttagcagcctccctcctgtgtctactctccaaatgttag

SEQ ID NO: 122591 - DNA, 1077 bp, synthetic construct
  misc_feature 1..1077: note = Description of Artificial Sequence: Synthetic coding sequence
  source 1..1077: mol_type = other DNA
atgagaacctactggcttcattcggtgtgggtactgggatttttcctttcgcttttttcactgcagggacttccggtgcggtctgtggactttaacagagggacagataacattaccgttagacagggggacacagcaattctgcgctgcgtggtagaagacaagaactctaaggtggcatggctgaacaggtcagggattattttcgctggccacgacaagtggagtctggatcctcgcgtggaactcgaaaagcggcactccctagagtactccctacgcatccagaaggtggatgtgtacgatgaggggtcctacacgtgttccgtgcagacccagcacgagcccaaaacttcacaagtctacttgatcgtgcaggtcccacctaagatttcaaacatttcaagtgatgtgaccgtgaacgagggctccaatgtgactttggtgtgtatggccaacggcaggcccgaacctgtgattacatggagacacctgacacctactggccgagaattcgagggggaagaggaatatctggaaattctgggtatcactcgcgagcagagtggtaagtacgaatgcaaagccgctaacgaagtcagcagcgctgatgtcaaacaggtgaaggtgacagtcaactatccaccaacgatcaccgagagcaagagtaacgaagctacaactgggcggcaagcatcattgaagtgcgaggcatcggcagtgcctgcccctgactttgaatggtatagagacgatacaaggatcaacagcgccaacggactggagattaagagcacggagggtcagtcatctctcactgtgacgaacgtgacggaggaacattacggcaattatacttgcgtggctgcgaacaaactcggcgttaccaatgcatctctggttctgtttaaacgtgttctgcctactattcctcaccccatccaggaaataggtactaccgtccattttaaacagaagggtccgggcagcgtgcgtggtatcaacggaagcatcagccttgccgtaccattgtggctgcttgctgcatctttattatgcctcctctctaagtgctag

SEQ ID NO: 122592 - DNA, 753 bp, synthetic construct
  misc_feature 1..753: note = Description of Artificial Sequence: Synthetic coding sequence
  source 1..753: mol_type = other DNA
atggctgaaggcggtgccagcaagggagggggtgaagagccgggcaagctccctgaacctgctgaggaagagagtcaggtgttgagagggacaggacactgtaaatggtttaacgttaggatgggatttggatttatctccatgattaatagagagggcagtccccttgatatcccagttgacgtctttgtccaccagagtaaactgtttatggaaggtttcaggagccttaaggaaggcgagccggtggagttcaccttcaagaagtcaagcaaggggctagagtcaatccgggtgacggggcctgggggtagcccatgtttgggaagtgaaagacgcccaaaagggaagactctgcagaagaggaaaccaaaaggcgatcgttgttacaactgcgggggcctggaccaccatgcaaaagaatgttctcttccgcctcagccaaaaaagtgtcattactgccagtccatcatgcatatggtggctaattgtccccacaaaaacgtggctcagcctccggcgtcctctcaaggccggcaggaggccgagtctcagccttgcacatctaccttaccccgagaggtgggcggtgggcacggttgcacatccccaccgttcccccaagaagcgcgtgccgagatctcagaacgaagtggacggagccctcaggaggcttctagcaccaagagcagcatagcacccgaagagcagtctaaaaaagggccatctgtacagaaacgcaaaaagacctag

SEQ ID NO: 122593 - DNA, 2250 bp, synthetic construct
  misc_feature 1..2250: note = Description of Artificial Sequence: Synthetic coding sequence
  source 1..2250: mol_type = other DNA
atggaagtcgtgccggctgaggtcaactcactgctgcccgaggaaataatggatactgggataaccttagtggacgatgattctatagaagcagtgattgtttcatcgccaatcccaatggagacagagttggaggagatcgtgaacattaacagcacaggcgactctacagcgactccaatttctaccgagcccatcactgtctactcaaaccatactaaccaagttgctgttaacactactattacaaaagcagatagtaacacaaccgtaaaaccagcctttcccagtggattgcagaagttaggggcccagacaccggtcacaatctctgctaatcaaattatactcaacaaggtgagtcagacctctgatctcaagctcgggaatcagactctgaaaccggacggccaaaaactgattctgactacactcggaaaaagcggcagccccatcgtgctagcccttcctcattctcagctgccacaggctcagaaagtaacgacccaagcccagtctggggatgccaagctgcccccacagcagataaaagtcgtgaccatcggcggacgccctgaagtgaagcctgtgattggtgtctcagctctgactccaggttctcaattgattaacaccacaacacagccatctgtcctgcaaacacagcagctcaagacagttcagatcgccaaaaaacctagaacacccacatccgggcccgtcatcacaaagctgatttttgctaagcctatcaactccaaggcagtgacaggccaaaccacccaagtgagtcctccggttatagctggacgggttctgtctcagagcaccccgggaaccccctccaagactatcacaattagcgagtccggagtcattggctccaccttgaactcgactacccagactcccaacaagattgcgatatcaccactgaagagtccaaataaagcggtaaagtcaactgtacaaacaataactgtggggggcgtcagtactagccaatttaagaccatcattcccctggctacggctcctaatgttcagcagatccaggtgccagggtcaaaattccactatgtccggctcgtgactgcaacgtcagcaagttcatccacacagcctgtctctcagaacccatccacgaatacacagcctcttcagcaggcaaagcctgtcgtggttaatacgacacctgttaggatgtccgtgcctattgtgagcgctcaggcagtgaaacaggtagtgccaaaacctatcaacccaacctcacaaatcgtgaccacctcccagccccagcagcgcctcatcatgccagcgacccccctcccgcagattcaacccaacctcaccaacctgcctcctggaacagtgctcgccccggcccccggcacagggaacgtcggttacgccgtcctgccagctcagtacgtcacgcagcttcaacaaagttcctatgtgtccatcgctagtaatagcacttttaccggcactagcgggattcaaactcaggccaggctgccattcaacggaatcatccccagcgaatccgcatcgaggccaagaaagccctgtaactgcacaaagtccctctgtctgaaactgtactgcgattgctttgcaaatggggaattctgcaataactgtaactgtacaaattgctataacaaccttgaacacgagaatgagcgacaaaaggccatcaaggcctgcctggaccgtaaccccgaagcctttaaacccaagatcggcaaaggtaaggaaggagagtcagaccgcagacacagtaagggttgcaattgcaaaaggagtggctgccttaaaaactattgtgagtgctatgaagccaaaattatgtgttcatccatttgcaagtgcatagggtgcaagaattttgaagaaagtccggagagaaaaaccctgatgcatctggcagatgcagctgaagtgcgggttcagcagcagacagccgccaagaccaagctttcctctcaaatctctgacctgcttactaggccaacacctgcattgaactccggcggaggcaaactccctttcacatttgttactaaagaggtcgctgaggctacctgcaattgcctgctcgcccaggccgagcaggccgacaagaagggaaaaagcaaggctgcggccgaaagaatgatccttgaggaatttgggaggtgcttaatgtccgtgattaactctgccgggaaagccaagtctgacccctgtgctatgaattgttag

SEQ ID NO: 122594 - DNA, 732 bp, synthetic construct
  misc_feature 1..732: note = Description of Artificial Sequence: Synthetic coding sequence
  source 1..732: mol_type = other DNA
atggaagtggtgcctgccgaagtgaacagcttgttacctgaggaaataatggacaccgggatcacactcgtcgatgatgacagtattgaggctgtgatcgtgagtagtcccatccccatggaaacagaactggaggagatcgtgaacatcaactcaaccggggattcaactgctacccctatctccaccgagccaatcaccgtctattccaatcataccaatcaagtcgctgtgaataccaccataactaaagccgacagtaacaccacagtcaaaccggcattccccagtggccttcagaagctgggggcacaaacccctgttaccatcagcgccaatcagatcattctgaacaaagtatcccagacttctgacctgaaactcggcaatcagactttgaaacctgacggtcagaaactgatactgaccactctcggtaagtcgggcagccctatcgtgcttgcgcttccccatagtcagttaccgcaagcccagaaagtgaccacacaagcacaatcaggggatgccaagctgccacctcagcagatcaaggtagtcaccattgggggccgaccagaagtgaagcccgttattggagtttctgctcttactcccggatctcaattaatcaataccacgactcagccatcagttctccagacccagcagctgaaaaccgtgcaggtgggcttcttccactcacttctgccagagttgcaccagaggccctag

SEQ ID NO: 122595 - DNA, 1983 bp, synthetic construct
  misc_feature 1..1983: note = Description of Artificial Sequence: Synthetic coding sequence
  source 1..1983: mol_type = other DNA
atggaggtggttccggccgaggtaaatagccttctgcccgaagagatcatggacacgggtattaccttggtggatgatgacagcattgaagcggtgattgtgagcagccccatccctatggaaacggaactcgaggaaattgtgaacataaactccactggagactctaccgcaactccaataagtactgaacccattaccgtctactccaaccatacaaatcaggtggccgtcaatacaactatcaccaaagccgattctaatactaccgtcaaaccagccttcccaagcggccttcagaagttgggcgcccagactccagtgaccatctccgctaaccagattatcttgaataaagtaagtcaaacctccgatctcaaattaggcaatcaaaccctgaagcctgatggacagaaactgattctgacaaccttggggaagtctgggtcacccatcgtcctcgctttgccccattctcagttgccacaggcacagaaggtgacaacccaagcgcagtccggtgacgctaaattgcccccacagcagattaaagttgttacaatcggcggacgacccgaggttaagcccgtgattggcgtgagcgccctgaccccaggcagccagttaatcaacacaacgacacaaccctccgtattacagacacaacaactgaagactgtccaggcggtcaagagcacagttcaaaccattactgtgggtggagtgagcacgagccaatttaagactattattcccttagccactgccccaaacgtgcagcagatccaggtccccggcagtaagttccattacgtgagactggtcacagcaacctcagcctcttcctcaacccagcccgtctcacagaacccctcaaccaacacgcagccgctccagcaggccaagccggttgtagtgaacacgacccccgtgaggatgtccgttcctattgtgagcgcccaggctgtgaagcaggttgtcccaaaaccaattaatccaacctcgcaaattgtgactacatcccagcctcaacagcggctgatcatgcctgcaacccccctgccacagatccagcctaatctcacaaacctgccacccggcacagttctagccccggcacccggaaccggcaacgtaggctatgccgtgctccccgcccaatatgtgactcagctccagcagtccagctatgtgtccattgcctccaattcaacctttaccgggacaagcggtatccagacccaggccagactgcctttcaacggcatcattccttctgagtctgcttctcgcccgcgcaaaccctgcaactgtaccaaatccctctgcctgaagctttattgcgattgtttcgcaaacggcgagttttgtaataactgtaactgtaccaattgttacaataaccttgaacatgagaatgagcggcagaaagcaatcaaagcctgtttggacagaaatcccgaagcgttcaagcccaaaattggcaaggggaaggaaggggaaagcgataggagacacagcaagggatgtaactgcaaaagaagtggatgtttgaaaaactactgcgagtgttatgaagccaagatcatgtgttctagcatatgcaagtgcattggttgtaagaactttgaggagtcacccgagcggaagaccctgatgcatttagccgacgcggccgaggtcagagtgcagcagcaaacagctgcgaaaactaaactttctagccagattagcgacctgctgacacggccaacgccggcactcaattccggaggcggcaagctgccattcaccttcgtgacaaaagaggtcgcagaagccacgtgtaactgccttctggcccaggctgaacaggctgacaagaagggcaagtctaaagcggccgccgagaggatgatcctcgaagagttcggcagatgcctcatgtccgtcatcaatagtgcgggaaaggctaaaagcgatccatgtgccatgaactgctag

SEQ ID NO: 122596 - DNA, 1587 bp, synthetic construct
  misc_feature 1..1587: note = Description of Artificial Sequence: Synthetic coding sequence
  source 1..1587: mol_type = other DNA
atggaagtcgtcccagctgaaattgcgaaaaagccccggaccccaacttcaggtcctgtgatcaccaaactgatattcgccaaacccattaattccaaagctgtgaccggacaaaccactcaggtcagcccacccgtgatagctggccgagtgctaagtcagagcactccaggcactccaagtaagacaattacgatatcagagtcaggcgtcattggttcaacactcaacagcacgacccagactccgaataagattgctataagcccgctgaaatcaccaaataaagcggtcaagagtaccgtacaaaccataaccgtgggcggagtctcaacctctcagttcaagacgatcatccctctcgctaccgccccaaatgtccagcaaattcaagtgcccggcagcaaattccattatgtgcgcttggtaacagccacatctgccagcagttccacacagcccgtgtcccaaaacccaagcactaacacacaacctctgcagcaggccaaaccagtggtagtgaacacaacccctgtacgaatgagcgtgcctattgtctctgctcaggccgtgaagcaggtggtccctaagcccatcaacccaaccagccagatcgtcacaacttcacagccacagcagcggcttattatgcctgccacaccgctgccacaaattcagcctaacttgacaaatctccccccgggaaccgtgttagcccccgcccctggaactggaaatgtcgggtatgctgtgctgccagcacagtacgtcacacagcttcagcagagctcatacgtgtctattgcaagcaattcaacctttactgggacgagcgggattcaaacacaggcccggttacccttcaacggcatcattccaagcgagtccgccagcaggcctaggaagccctgtaactgtacaaagagcctatgcctcaaattatactgcgattgttttgccaatggcgaattctgtaacaactgcaactgtacaaactgttacaataacttagaacatgaaaacgagagacagaaagccataaaggcctgcctcgatagaaatccagaagcgttcaagcccaagatcggcaaggggaaagagggggagagcgacaggcgccattctaaaggatgcaactgcaaaaggtccgggtgcttaaagaactactgtgagtgctatgaagccaagattatgtgtagcagcatctgtaagtgcatcggctgtaaaaacttcgaagaaagccccgagaggaagactctgatgcatctggcagatgccgctgaagttagagtccagcagcaaactgctgcaaaaactaaactgtcttcacaaattagtgacctgctgactcgccccactcccgccctcaactcagggggcgggaagctgccatttacttttgtgacaaaggaagtggccgaagccacatgcaattgcttgctggcacaggctgagcaagcagataagaaaggtaaatctaaggccgcagctgagaggatgatactggaggaatttgggcggtgcctgatgtcagtgatcaacagcgcaggtaaagcgaaaagcgatccatgtgccatgaactgctag

SEQ ID NO: 122597 - DNA, 1587 bp, synthetic construct
  misc_feature 1..1587: note = Description of Artificial Sequence: Synthetic coding sequence
  source 1..1587: mol_type = other DNA
atggaggtggtccccgccgagatcgccaaaaaaccccggaccccaacttcaggaccagtgatcacgaagttgatcttcgcaaagcccatcaattctaaagctgtcaccggacagacaacacaggtctcaccacctgttattgccggaagggtcctgtcacagagcaccccgggtactccctctaagaccattaccatatcggaaagcggggtgatcgggtccacactgaattccactacgcagaccccaaacaagatcgccatctctcccctgaagtcgcccaacaaagccgtgaaaagcactgtacagactataacagtgggcggtgtgtctacctcgcagtttaaaaccattatccctttggcaaccgccccgaatgtacagcagatccaggtgcctggatcaaaatttcactacgtgcggctcgtgacggccaccagcgctagtagctccacgcagccagtttctcaaaaccccagtacaaatacgcagcccctccagcaggcaaaaccggtggtcgtcaatactacccctgttcgaatgtcagtgcccatagtgagtgcccaggcagttaaacaggttgttcctaagcctatcaacccgacatcccagatcgttactacaagtcagccacaacagagattgattatgcccgccacaccactaccccagattcagccaaatctgactaacttgccgcccggcactgttctagcccctgctcccggcaccggtaacgtgggttacgcagtactacctgcccagtacgttacccagctgcaacaatccagctatgtgagcatcgcttccaattccacattcactggaacaagtgggatacaaacacaagcccggttacctttcaacggtattataccttctgagagcgccagcagaccaaggaaaccatgtaactgtaccaaatccctctgtcttaagctctattgtgattgctttgccaacggcgaattctgcaacaattgtaactgtacaaactgttataataatctcgagcacgagaatgagaggcaaaaagccataaaagcgtgcctggatcgcaacccagaggcatttaaacctaaaatcggcaaagggaaggaaggcgaatcagatcggaggcattccaaggggtgtaattgcaagcgatcgggctgcttgaaaaattattgtgagtgttacgaagctaagatcatgtgctcctctatctgcaagtgcatcggatgtaaaaactttgaggagtcacctgagcgcaaaaccctcatgcacttagccgacgctgccgaggttagagtgcagcagcagaccgcagcaaaaaccaaactctcctcacaaatcagcgatctcctgacccgccccacgcccgcactgaattccggaggaggtaaacttccatttacatttgtgaccaaggaagtggccgaagctacctgcaattgtctcctggcccaggcagagcaggccgataaaaaggggaaaagtaaggccgctgcagagaggatgattctggaggagttcggtcggtgcttgatgtccgtgatcaactctgctggaaaagctaaatctgatccctgtgccatgaattgttag

SEQ ID NO: 122598 - DNA, 2250 bp, synthetic construct
  misc_feature 1..2250: note = Description of Artificial Sequence: Synthetic coding sequence
  source 1..2250: mol_type = other DNA
atggaggtggtacccgcggaggtgaattctcttttaccagaagagattatggataccggcatcactctggtcgatgacgacagtatcgaggccgtcattgtcagtagccccatccccatggagacagaacttgaggaaatcgtgaatattaattctaccggtgattccactgcgaccccgatatccaccgagcccatcactgtgtatagtaaccataccaatcaggtcgccgtaaataccactataacaaaagctgattccaacacaacggtgaagccagcgtttccatctggcctccaaaagctgggggcccagactcctgtaaccatctcagccaatcaaatcattttgaataaggtttcacaaacatcagaccttaagctgggcaaccaaactctgaagccagatggccagaagctaattctcaccactcttggtaaaagtggatcccctatagtactagcactaccacacagtcagcttcctcaggcccagaaagtcacaacccaagcgcagtctggggacgctaagctgcctccacagcagatcaaggtagttacaataggaggccgcccagaagtgaaacctgtgattggggtcagcgctttgacaccggggtcgcagctcatcaacacaaccacccagccctccgtgctacaaactcaacagctgaaaacagttcagattgccaagaagccccgcacgcctacaagcggcccggtaatcactaaactcatatttgctaagccgataaactctaaggcggtcactggacagacaacccaggtaagcccccctgtgatcgcaggtagagtcctctcccagtctacccctggaaccccaagtaagacaatcaccatcagtgaaagcggagtgattggctcgaccttaaattcaacgactcaaacgccaaacaagattgcaatctccccactcaagtctcctaacaaggctgttaagagtacagtacagacaattactgtaggaggggtgagtacatcgcagttcaagacaataataccacttgctacagcacctaatgtacagcagatccaagttccgggttcaaaatttcactatgttaggctggttacagccacctccgcaagctcctccacgcagcctgtgagccagaatccttccaccaacacacagccattgcagcaggcaaaaccagttgtggtcaacactacgccagttagaatgtctgtgcctatcgtgagcgcccaagccgttaagcaagtggtgcccaagccaattaaccctacaagccagatcgttaccaccagccaaccccagcaacggctgatcatgcctgcaactccactcccccagattcagcctaacctcactaacctgcccccggggactgtcctagcacccgcgcctggaactggcaacgttgggtatgccgtactccctgcccagtatgtgacgcagctacaacagtcttcctacgtgtctattgctagtaacagcacatttactggcacgtccggaatccagactcaggccagactgccctttaacggtatcatcccctcggaatccgcctctcgtcccaggaaaccctgcaactgcacgaaatctctgtgcttgaagctgtattgcgactgctttgcgaatggtgagttctgtaacaactgtaattgtacaaattgttataataatctggaacacgagaacgagcggcaaaaagccattaaggcctgtttagaccggaacccagaggctttcaagccgaagataggcaagggcaaagaaggagagtcagaccggaggcactcgaagggttgcaattgcaagcgatcggggtgtctgaaaaactactgcgagtgctatgaggcaaagatcatgtgtagttccatttgtaaatgcatcgggtgtaagaatttcgaggaatcacccgagagaaagaccttgatgcacctggccgatgccgcagaggtccgtgtgcaacagcagactgccgcaaaaaccaagctctcctctcaaatttccgacttactgacccgaccaacccccgctctgaattccggcggtggaaagctgccgtttacgtttgtcaccaaagaggtggcggaagcaacatgtaattgcttgttggcccaggcagagcaggctgacaagaaggggaaaagtaaggctgccgctgagcgaatgatcctggaagagtttggaagatgcctgatgtccgtgattaactccgcaggcaaggccaaaagcgacccttgtgcaatgaattgctag

SEQ ID NO: 122599 - DNA, 1587 bp, synthetic construct
  misc_feature 1..1587: note = Description of Artificial Sequence: Synthetic coding sequence
  source 1..1587: mol_type = other DNA
atggaggtggtcccagccgaaattgccaaaaagccaaggacccccacttccggccccgtcatcacaaaattaatcttcgcaaaacctatcaactccaaagccgtgactggacagaccacacaggttagcccaccagtgattgctggccgggtactgtcacagtctacacccggtactccctcaaaaaccattaccatctcagagtctggcgtcattggaagtaccttgaattcgaccacccagactcctaataagatcgctatttcccccctcaaatctcccaacaaagccgtgaaaagcactgtgcagacaatcactgtgggtggcgtgtcaacctcccagtttaagactattataccacttgccaccgcccccaatgttcagcaaatccaagttcctggcagcaagttccactatgttaggctggtgaccgccacaagcgccagctcctcaacacagccagtctctcagaacccatcaacaaacactcagcccctccagcaggccaagcccgtggttgttaacacaactccagtgcggatgtcggttcctatagtgagtgctcaagcggttaagcaggtggtccctaaacccataaaccccacaagtcagatcgtgaccacctctcagcctcagcagcgtctcatcatgccagcaacgcctctgccccagattcagcctaacctcaccaaccttcctccaggaacagtcttggctcccgcccccggaaccggtaatgtcggatatgctgtcctcccggcccagtacgttacacaactacagcagtcaagttatgttagcatagctagcaatagtactttcacagggacaagcggcatccagacacaagctcggctaccctttaatggtatcatccccagcgagagcgcatcccggccacggaagccctgtaactgtactaagagcctgtgtctgaagctgtattgcgactgcttcgctaacggagaattctgtaacaactgcaattgcactaactgttacaataatctagaacacgagaatgaacggcaaaaagcgatcaaagcatgtcttgatcggaatccagaagcgttcaaacccaagataggcaaaggcaaagaaggggagagtgataggaggcactctaaaggctgcaattgcaagcgttccggttgtttgaagaattactgtgagtgctacgaagccaaaatcatgtgttccagcatctgtaaatgtattgggtgcaaaaacttcgaagagagccctgagagaaagacgctcatgcaccttgccgatgccgctgaggtgagggtccaacaacagacagcggctaagactaaattgagctcgcagatctccgatctattaacccggcccactcccgccttgaacagcgggggaggtaaattgccattcacctttgtcacgaaagaggtcgcagaagcaacttgtaactgtctactggcccaggccgagcaggccgataagaagggcaagtccaaggcagccgccgagcgcatgatcctcgaagagttcggacgatgtttgatgagtgtgatcaattccgccggtaaggcaaaatcagacccttgcgccatgaactgctag

SEQ ID NO: 122600 - DNA, 2025 bp, synthetic construct
  misc_feature 1..2025: note = Description of Artificial Sequence: Synthetic coding sequence
  source 1..2025: mol_type = other DNA
atgtggcatgaagctcgcaaacatgaaaggaagttacgaggaatgatggtggactataagaagcgggctgaaagacggcgcgaatattacgaaaagattaaaaaggatccggcccaattccttcaagtgcacggtagagcatgtaaggtccacctggacagcgcggtggctttagcagccgaatctccagtcaacatgatgccttggcagggtgataccaataatatgatcgatcgcttcgacgtacgggctcacctggaccatattcccgactacactccccccttactcactacgattagtcctgagcaagaatctgacgaaaggaagtgcaattacgagaggtacaggggcctggtgcagaatgatttcgctggaatctctgaagagcagtgcctctaccagatttacattgacgaactgtacgggggcctgcagcgaccaagtgaagatgagaagaaaaagctcgctgaaaagaaggcatcaatcggctatacatacgaggattccacagtagccaaggttgagaaagcagccgagaagcctgaggaggaggagtcagccgccgaggaagaatccaacagcgatgaagacgaggtcattcccgacatcgacgtggaagtcgacgtagatgagctcaaccaggaacaggtagcagacctcaacaaacaagccaccacatacgggatggcagacggcgactttgtcagaatgttgcggaaagacaaggaggaggcagaagccatcaagcacgccaaagctctagaagaggagaaggcgatgtattccggcagaaggagcagaagacagcggcgggaattcagggagaaaaggctcagggggcggaagattagccctccatcttacgcgcgcagggattctcccacctacgatccgtacaagcgtagcccatcggaatcatcttctgaaagccgaagcagaagtaggtcacccactccaggacgcgaggagaaaattacattcattacatcctttggcgggagcgacgaggaggctgcagcggccgctgccgcagcagccgcctcaggtgtgaccacaggcaaacccccagctcccccgcagcctggaggacctgctccaggacggaacgcatctgctagacggcgctcatcctcctcctcttctagttcctcagcctccaggaccagcagcagtaggtcttcaagcaggtctagcagtagaagccgcagaggcggaggctattatagaagtggtagacacgcacggtcacgctctagatcttggtcccgcagccggtcacgcagtagacggtattctcgcagtcggtctagggggagacgacactctggagggggtagtcgggacggacacagatactcgcgctctcccgcccggcgcgggggctatggacccagaaggcgcagtagatcccgctcccacagcggcgatcgttaccgtcggggggggcgagggctacgccaccattccagttccagaagccggagctcctggtcccttagtcccagccggtctcgatccttaacgagatcccggagccatagcccttctccttctcagagtcgctcgaggtctaggagcaggagtcagtctccaagcccttcccccgctcgggagaaacttacaagacctgctgcatcccctgctgtcggcgagaaactaaagaagaccgaacccgccgctggcaaagagacgggggctgctaagccaaagttaactccacaggaaaaattaaagctgcgcatgcagaaggccctgaaccgccagtttaaagcggacaagaaagccgcccaggaaaaaatgatccagcaggagcacgagagacaggagcgcgaagacgagctgcgcgccatggctcggaagattaggatgaaagagcgcgagcggcgcgaaaaggaacgggaagaatgggagcggcagtacagtcgacagagccgatcacccagtccaaggtatagccgggaatactcatcctctaggaggagaagtagatcaagatctcggagtcctcattatagacactag

SEQ ID NO: 122601 - DNA, 594 bp, synthetic construct
  misc_feature 1..594: note = Description of Artificial Sequence: Synthetic coding sequence
  source 1..594: mol_type = other DNA
atggctgcattaggcgaacctgtgaggctcgaacgggacatttgccgcgccatcgagctgcttgagaaactccagaggagcggtgaggttcctccccagaagcttcaggcattacagcgagtccttcaaagcgagttttgcaacgccgtacgggaagtctatgagcatgtctatgagactgttgatatttcatccagtcctgaggtgcgtgccaacgccacagccaaggcaacagtggccgcgtttgcagcgtctgaagggcattcccacccccgggtggtggagcttccaaaaaccgaggaaggcctcggatttaacattatgggagggaaagaacagaattctccaatctacatctcacggatcatacctggcggcatcgctgataggcatgggggactgaagagaggtgatcagctcctgtctgtgaacggggtgtctgtcgaaggtgaacatcatgagaaagccgtcgagttgttaaaagccgctcaaggaaaagtcaagctggtggtcagatatactccgaaggtgctggaggagatggagtcacgtttcgagaaaatgagaagcgctaagagacggcagcaaacatag

SEQ ID NO: 122602 - DNA, 759 bp, synthetic construct
  misc_feature 1..759: note = Description of Artificial Sequence: Synthetic coding sequence
  source 1..759: mol_type = other DNA
atggaagaggccattctggttccttgtgttctcggtcttctgctgctgcccatactggcaatgctaatggctctttgtgttcattgccataggcttcctgggagctatgactcgacgtcctccgattctctctatccccgcgggatacaatttaagcgcccacatacagttgctccatggcccccggcttatccaccagtgacctcctatccacccttaagtcagccagacctcctgccaatcccacggtctccccagccccgcagagactcagatggcgcaaattccgtcgcctcttatgagaatgaaggagcctctgggatacggggtgcccaagctggttggggagtttgggggccctcgtggacccgattgacacctgttagcttgcctccggagccggcctgcgaagatgcagacgaagatgaagacgactaccacaatccaggatatttagtagttctgcctgattcaacaccagcaacaagtaccgctgccccttccgctcctgctctgtcaactcccggcattagagactccgcatttagcatggagtctatcgacgattatgtgaacgtcccagagtcgggagaatctgcagaagccagccttgatggaagccgggagtatgtcaatgtaagccaagagcttcatccgggagcagccaaaaccgagcccgccgcattaagttctcaggaggccgaggaagtcgaggaagagggcgctcccgactacgagaacctacaggagctgaactag

SEQ ID NO: 122603 - DNA, 789 bp, synthetic construct
  misc_feature 1..789: note = Description of Artificial Sequence: Synthetic coding sequence
  source 1..789: mol_type = other DNA
atggaggaggcaatcctcgttccttgtgtgcttggcctgctgttattgcctattcttgccatgctgatggcgttgtgcgtgcactgccataggctgcccggctcttatgactctacttccagtgattcgttgtacccgcgcggaatccagtttaagaggcctcacacggtggctccctggcctccagcttatcctcccgtgacatcttacccaccgctgagccagcccgacctgttacctattccaaggagcccgcagcctctggggggcagtcacagaacaccaagtagcaggcgggactctgacggggccaattctgtggcaagttatgagaacgagggggcttctggcatccggggtgcccaggctggttggggcgtgtggggtcctagttggacccggctgacgcctgtatcccttccacccgaaccagcctgcgaagacgcagacgaggacgaggacgattatcacaacccgggctacctagtggttctgccagatagcacaccagcaaccagtactgcagcccctagcgcgccagccctgagtaccccaggcatcagggatagcgccttctccatggagtccatcgacgactatgtcaacgtcccagagtcgggggagagtgccgaagcctcgttagatggaagccgagagtatgtcaacgtgtcccaagagctgcatccgggtgccgcgaagactgagcccgcagcgctcagcagtcaggaggctgaggaagtggaagaggagggtgcccctgattacgagaacctccaggaacttaactag

SEQ ID NO: 122604 - DNA, 702 bp, synthetic construct
  misc_feature 1..702: note = Description of Artificial Sequence: Synthetic coding sequence
  source 1..702: mol_type = other DNA
atggaagaagcaatcctggtaccttgcgttctgggactcttgcttctgcccatcttggccatgctgatggcattgtgcgtgcactgccatcgtcttcctggatcatacgacagcacgtcctccgatagtctgtatcctaggggaatccagttcaagcgaccccacactgtcgccccttggccaccagcatatcctccggtgactagctacccacccctttctcaaccagacctgctgcccatcccaaggtccccacagcccctgggaggaagccatagaaccccttccagccggagggactctgatggtgcaaattcagtggctagctacgaaaacgaggagccagcctgtgaagatgcagacgaagatgaggacgattatcataatccaggctacctcgtcgtcctccccgatagtaccccagccacttccactgccgcccctagtgcccccgcattaagcacaccagggatcagagactccgcgttctcaatggaaagcatagacgactatgtcaatgtgccagagagcggtgagtcggcagaagccagcctggacggatctagagagtacgtgaacgtgtcccaggaactgcaccctggagcagctaagacggagcctgccgcacttagctcacaggaggcggaagaggtggaggaggaaggagctcctgattacgagaatcttcaagagctgaattag

SEQ ID NO: 122605 - DNA, 810 bp, synthetic construct
  misc_feature 1..810: note = Description of Artificial Sequence: Synthetic coding sequence
  source 1..810: mol_type = other DNA
atggaagctaccgctgcgagctggcaggtggcagtacctgtactgggaggggcctcaaggcccctgggcccacggggcgctgcttcactgttgagggcccccttacagatggaagaggccatcctggtgccttgcgtcctcgggttgcttctactacccattttggcgatgctgatggccttgtgcgtacattgtcatcgcctccccgggtcatatgactccacgtcatccgattcattataccccagggggattcaattcaagagaccacacacagtcgccccttggcccccggcgtatcctcccgtcacctcataccccccactgagtcagccagacctcctgcccattccacgctcacctcagcccttagggggttctcacaggacaccaagcagcagaagggattctgatggggcaaattccgtggcctcttacgaaaatgaggaacccgcctgtgaagatgcggatgaagatgaggacgattaccataatccaggctatttagtggttctgcctgactctacacctgctacctccactgcggccccaagcgcacccgccctgtcaaccccgggtataagggattctgccttctctatggagagcatcgatgactacgtcaacgtgcctgaaagtggggagagcgccgaagcgagcctggatgggagccgggaatatgtgaacgtgtcccaggagctacatccgggcgccgcaaagacagagccggccgccctcagcagccaggaggctgaggaggttgaggaggaaggcgccccagattacgagaatttacaggaactcaattag

SEQ ID NO: 122606 - DNA, 699 bp, synthetic construct
  misc_feature 1..699: note = Description of Artificial Sequence: Synthetic coding sequence
  source 1..699: mol_type = other DNA
atggaggaagcgatactcgtaccctgtgtgctcggcctccttctgctgcctatcctcgccatgttgatggcactctgcgttcactgtcacaggttgcctggttcctatgatagtacttcctccgactcactctatccaagaggaattcagttcaaacggccgcacactgttgcgccctggcctcctgcctacccccctgttacttcctaccctccactgtctcagcctgatctgttgccaatcccaagccctcaaccgctgggtgggagccaccggacacccagcagcagacgagactcagacggagcgaactccgttgcctcctatgagaacgaagagcctgcctgcgaggacgccgacgaggacgaggatgactatcacaatcctggctacctagtcgtactgcctgattccacaccagctacttctactgccgccccctcagcacccgctctttctacaccaggtattcgcgacagtgcctttagcatggagtccatcgacgattatgttaatgtgcccgagagcggtgaaagtgctgaggcctccctggatggcagccgggagtatgtcaatgtgtcccaggagctgcaccctggcgccgcaaagacagagccagcagccctaagttcacaagaggctgaagaagtggaggaggagggagcccctgactatgaaaacctccaggaactcaattag

SEQ ID NO: 122607 - DNA, 732 bp, synthetic construct
  misc_feature 1..732: note = Description of Artificial Sequence: Synthetic coding sequence
  source 1..732: mol_type = other DNA
atgagctccgggacagaattactgtggcccggagctgctctgctggtactgctcggcgtggcagcctcactctgtgttaggtgctccagacctggcgcgaagagatccgaaaaaatataccaacagcggtccctgagggaagaccaacagtcctttacgggatcccgaacctactcactagtggggcaggcttggcccggacctctcgcagatatggccccaacacggaaggacaagctcctccagttctacccctcattagaggatcccgcttcctctcggtaccaaaatttcagcaaggggtctaggcatgggagcgaagaagcttacatcgacccaatcgccatggaatactacaactgggggcgatttagcaagcctcctgaagatgatgatgctaacagctacgaaaatgtgctgatatgtaagcaaaagacaacagagacaggcgctcagcaggaaggtatcggtggcctgtgcagaggggacctcagtctcagtctcgcactgaaaactggccccacatccggcctctgcccatctgctagtccggaggaagacgaggaaagcgaagattaccagaatagtgcgtcgatccatcagtggagggagagcagaaaagtcatgggccagcttcaaagggaggcctcacctggtcctgttggtagcccggatgaggaggacggagagcctgactatgtaaacggcgaagtggctgccaccgaggcctag

SEQ ID NO: 122608 - DNA, 732 bp, synthetic construct
  misc_feature 1..732: note = Description of Artificial Sequence: Synthetic coding sequence
  source 1..732: mol_type = other DNA
atgtcctccggaaccgagttgttgtggccaggtgctgctctgctggtgttgctgggcgtggctgcttccctttgcgtcaggtgctccagaccaggagccaagagatctgagaaaatttaccagcagaggtcactgcgggaggatcagcagagctttacaggaagccgtacttacagcttggtggggcaggcatggccaggcccgcttgcagacatggcgcctacaaggaaagataagctgttgcagttctacccgtctctagaggacccagcttcctcgagataccagaacttttccaaagggtcccggcatggctcagaagaggcgtatatcgatcctattgcaatggaatactataattgggggcgatttagcaagcccccggaagacgacgacgcgaactcttacgagaatgtgctgatttgtaaacaaaagacaacagaaaccggcgcacagcaagaaggaatcggcggtctctgccgaggtgacctgagtttgtctttggctttgaagactggccctaccagcggcttatgccccagcgcttcaccggaggaggacgaagaatctgaagactaccagaattctgcctcaatccaccagtggagggagtcaagaaaggtgatgggacagctgcagcgcgaggcttctcctggacccgtggggtcccccgacgaggaagacggggagcccgattacgttaatggcgaggtcgccgccacggaagcatag

SEQ ID NO: 122609 - DNA, 195 bp, synthetic construct
  misc_feature 1..195: note = Description of Artificial Sequence: Synthetic coding sequence
  source 1..195: mol_type = other DNA
atgtccagcgggaccgaactgctgtggccgggtgccgcgttgctcgtgctgctgggcgtcgctgcatccctttgcgtgagatgctctagaccgggtgctaagagatccgagaaaatataccagcagaggagtttgagagaggatcaacaaagcttcacgggctctcggacatactccctggtagggcaggcttag

SEQ ID NO: 122610 - DNA, 732 bp, synthetic construct
  misc_feature 1..732: note = Description of Artificial Sequence: Synthetic coding sequence
  source 1..732: mol_type = other DNA
atgagctcagggactgagctcttgtggcccggagcggccctcttggtgcttctgggtgtggccgcaagcctctgcgttaggtgttctcggccaggtgccaagaggagtgaaaaaatctatcagcaaagatcactgcgagaggaccagcagagcttcaccgggtctagaacctattctctagtgggccaggcctggcctggacctctcgccgacatggcgcctaccaggaaggataaactcctgcagttttacccgagtctggaggatcccgccagttctagatatcagaatttcagcaagggaagtaggcatggtagcgaggaagcctatatagacccaatcgctatggaatactataattggggcagattcagtaagccccctgaagatgacgatgcaaactcctatgaaaatgtcctgatctgcaagcagaagaccaccgaaacaggggctcaacaggaaggcatcggtgggctttgtagaggtgatcttagcttgagcctcgctctgaaaactgggcccaccagtggcctttgtccatccgcctcgcccgaagaagacgaggagtccgaggattaccagaactctgcaagcatccatcagtggcgggagtctcggaaggtcatgggccagctccagcgagaggcctctcccggccccgtgggcagccccgacgaagaggatggggagccagattatgttaatggagaagtggcagctactgaggcgtag

SEQ ID NO: 122611 - DNA, 732 bp, synthetic construct
  misc_feature 1..732: note = Description of Artificial Sequence: Synthetic coding sequence
  source 1..732: mol_type = other DNA
atgtcatccggtactgagctcctctggcctggggcggcacttctcgtcctgctgggggtcgctgcttccctgtgtgtccgctgttcgagacccggtgccaagcgcagtgaaaaaatctaccagcaacggagcctgcgagaggaccaacaaagtttcacaggaagtcgcacctattctcttgtggggcaagcttggccaggccccttagccgacatggctcctactaggaaagacaagcttctccagttttatccgtccctcgaggaccccgccagtagcaggtaccaaaacttctccaaaggctccagacatgggtccgaggaggcgtacatagatccaatcgccatggagtactacaattggggtcggttctcgaagcctcctgaggacgacgacgccaacagctatgagaacgtgctcatatgcaaacaaaagactacagagacaggcgcccagcaagaaggcattggcggcctgtgtcgcggggatctctcattatctctcgcccttaagaccggccccaccagtggcctatgccctagcgcgtcccccgaggaagacgaggagtctgaggactatcagaattctgctagtattcaccagtggagggagagccgaaaagttatgggccaactccagagggaggcgtcacctgggcccgtcggtagtccggacgaagaggacggagagcctgattatgtgaatggtgaggtcgccgccactgaggcctag

SEQ ID NO: 122612 - DNA, 177 bp, synthetic construct
  misc_feature 1..177: note = Description of Artificial Sequence: Synthetic coding sequence
  source 1..177: mol_type = other DNA
atgtcctcgggcactgagctgctttggcccggggcagccttgctggtgctgcttggcgtggcagccagcttgtgtgtccgttgttcaaggcctggcgccaaaagaagtgagaagatttaccagcaaaggtcacttcgcgaagaccagcaaagttttaccggaagtagaacatactag

SEQ ID NO: 122613 - DNA, 303 bp, synthetic construct
  misc_feature 1..303: note = Description of Artificial Sequence: Synthetic coding sequence
  source 1..303: mol_type = other DNA
atgtcctccggaacagaattgctttggccgggggccgctctgctggtactgctgggcgtcgctgccagtctttgcgtgaggtgtagcagacctggcgctaagaggagcgagaaaatctaccagcagcgctccttgcgggaagaccagcagagcttcaccggttctagaacatattccctggtgggccaggcatggcccggacccctggccgacatggctcccacaagaaaggataagctcttgcaattctacccctctctggaggacccagcttcttcacgataccaaaacttctccaaatag

SEQ ID NO: 122614 - DNA, 1704 bp, synthetic construct
  misc_feature 1..1704: note = Description of Artificial Sequence: Synthetic coding sequence
  source 1..1704: mol_type = other DNA
atgaggccagatagtccaaccatggccgcgcctgcggagtcccttagaagacgcaagactggctactccgacccagagccagaaagtcctcctgctccgggtcgcgggccagcaggttcccccgcccacctgcatactgggaccttttggctcacccggattgtgttacttaaagccctggctttcgtatatttcgttgccttcttggtggcctttcaccaaaacaaacagctaattggcgatagaggcctgctgccttgtagggtttttctgaaaaattttcagcaatacttccaggacagaacaagctgggaagtgttctcctacatgcccactattctctggctgatggattggtcagatatgaattccaatctcgatctgttagctctgcttggcctggggatctccagcttcgtgctgattaccggatgcgccaacatgctgctcatggccgctctgtggggactgtacatgtccttggtcaatgttggccacgtttggtacagcttcggctgggagagccaactcctcgagaccgggtttcttggcatatttctttgccccctatggactctgtcccgactaccgcagcacaccccaacctctcgcatcgtgttgtgggggttcaggtggctgatattccggattatgttgggcgccgggttaatcaaaatcaggggcgacaggtgctggcgcgatctgacctgcatggacttccactatgaaacacagcccatgcccaaccccgttgcctattacttgcaccattccccctggtggttccatagattcgaaaccctctcaaatcatttcatcgaactgttggtcccttttttcttgttcctgggacgcagagcatgtattatccacggtgtcttgcagatcctttttcaagccgtgttgatagtgtccggaaacctttcttttctgaactggcttacaatggtgccgagtctcgcgtgcttcgacgatgcgactcttggattcctcttccctagcggtcccgggtcactcaaggaccgagtgctgcagatgcagagggacatccgaggcgctcgcccagagcccaggttcggcagcgtcgtaagaagggccgccaacgtcagcctcggcgtgctcttggcttggctgagcgtgccggtcgttctgaaccttctgtccagccgccaagtgatgaacactcattttaattctctgcatatcgttaacacttatggcgcttttggcagcataactaaggaacgcgccgaggtcattctacaggggacagctagcagcaatgcctctgcccccgacgccatgtgggaagactatgagttcaaatgcaagcctggagacccttccagaagaccctgcctgatcagtccctatcactataggctggattggctgatgtggttcgccgcatttcagacttacgaacataacgactggatcatccacctcgccggcaagcttctggctagcgacgcagaagctctctctcttctggcgcacaacccatttgccggaagaccacccccccggtgggtcaggggcgagcattacagatataaattttctagaccagggggcaggcacgccgccgagggtaaatggtgggtcaggaaaaggattggtgcctactttccaccattatctctggaggaacttagaccatattttagggaccgggggtggccattacccgggccgctctag

SEQ ID NO: 122615 - DNA, 1704 bp, synthetic construct
  misc_feature 1..1704: note = Description of Artificial Sequence: Synthetic coding sequence
  source 1..1704: mol_type = other DNA
atgcggccagattcaccgacaatggcagctcccgccgaatccttgcgccgccgaaaaactggctattctgatcctgagcctgagagtccgccagcacccggccgtggtcctgctgggtccccagcacatctccacactggaaccttttggctgacaaggattgttcttctcaaggccctcgcttttgtctattttgttgctttcctggtggctttccaccagaacaaacagttgatcggagatagaggtttactgccatgtagggtgtttctcaaaaactttcagcagtattttcaggataggacatcgtgggaagtatttagttacatgcccacaattttatggctcatggactggagcgatatgaattccaaccttgatttgctcgccttgttggggcttggaattagcagctttgttctgattaccggctgtgccaacatgctgctcatggccgctctctggggcctgtacatgtccctggtgaacgttggtcacgtatggtactcctttcgatgggagagccaacttctcgaaacgggttttctcggcatcttcctgtgtcccctgtggaccctgtccagactcccccagcatacccctactagccgtattgtattgtggggctttcgctggcttattttccggatcatgctgggcgctggcctgatcaaaattaggggagaccgatgttggcgcgacctcacatgtatggatttccattatgagactcagcctatgcccaacccagtcgcttactatctgcaccattctccctggtggttccatcgttttgaaactttgagcaaccattttatcgagcttctagtgcccttcttccttttcctgggacgtcgcgcctgcattattcatggagtcctgcagatccttttccaggccgtccttattgtctccggcaatctctcttttctgaattggctgactatggtgccgagcctcgcatgcttcgacgatgccacccttgggttcctgttccctagcggtcccggcagtctaaaagatagggttctgcagatgcagcgggatatcaggggggcacgacctgagccgcgattcgggtcggtcgtgaggcgtgccgcaaacgtctctcttggcgttcttctggcctggttgagcgttccagtggttctcaacctgctatctagcaggcaagtcatgaatacccattttaattctttacacattgtgaacacatacggagcctttggaagcatcaccaaggagcgcgccgaggtaatcttgcagggtacagcatcatctaatgcctccgcgcccgatgcaatgtgggaagattacgagttcaagtgcaagccaggtgatccttctcggcgaccatgtctgatttcaccttatcactaccgccttgattggctgatgtggttcgctgccttccaaacttatgagcataatgattggattattcacctggctggcaagcttttagcatctgacgccgaggctctctccctgttggcccataacccctttgcaggccgtccgcccccacggtgggtcaggggtgaacactatcgctacaagttttctcggccagggggccgccatgccgctgaaggaaagtggtgggtccgcaaaagaatcggcgcctattttcccccacttagcctggaagaactgcggccatattttagggacagagggtggccgctacctggaccactctag

SEQ ID NO: 122616 - DNA, 558 bp, synthetic construct
  misc_feature 1..558: note = Description of Artificial Sequence: Synthetic coding sequence
  source 1..558: mol_type = other DNA
atgagaccggactctcccaccatggctgccccagccgaatctctgcgaagaaggaagacagggtacagcgaccctgagcctgagtcccccccagcacccggtaggggccctgcagggtcacctgcccacttacacacgggtactttctggctgaccaggattgtgctactgaaggctctggcattcgtttattttgtagcttttctcgtcgccttccaccagaacaaacaacttattggtgatcgcggtctgcttccatgtcgggtgtttctcaaaaacttccagcaatattttcaggatcgcacctcttgggaggtcttcagctacatgccaactattctgtggctcatggattggagcgatatgaatagcaacctggacctgctggctctgttgggactcggaatctccagttttgtgcttatcaccgggtgtgctaacatgttgttgatggcggcactgtggggcttgtatatgagtttggtgaacgttgggcacgtgtggtgtccaagcctggctagtgctatatccctcccgagcatgcacgggggccagtag

SEQ ID NO: 122617 - DNA, 501 bp, synthetic construct
  misc_feature 1..501: note = Description of Artificial Sequence: Synthetic coding sequence
  source 1..501: mol_type = other DNA
atggcagcacccgcagagagtctacgcagaaggaagaccgggtactcagacccagagccagagtcgcctccggccccaggccgaggccctgcgggtagccccgcccacctacacaccggcactttttggctcacaaggatcgtgctcctcaaggctcttgcctttgtatactttgtggcttttctcgtcgcctttcaccagaataaacagctgattggagacagagggctgttgccatgtcgggtgtttctgaagaattttcaacagtattttcaggatcggacatcatgggaagtgttctcctacatgcctacaattttgtggctcatggactggtccgacatgaattccaatctggacctgttagctctgctcgggctcggcatcagtagcttcgtcctaataacagggtgtgcaaatatgttgctgatggcagcactgtggggcttgtacatgtctttggtgaatgtaggtcacgtctggtatagctttggcaagtag

SEQ ID NO: 122618 - DNA, 1053 bp, synthetic construct
  misc_feature 1..1053: note = Description of Artificial Sequence: Synthetic coding sequence
  source 1..1053: mol_type = other DNA
atgagaggcgctgggttaatcaagatcagaggcgacagatgttggagagacctgacttgtatggacttccactacgaaacccagccaatgcccaacccagtggcatattatcttcatcatagcccatggtggtttcaccgcttcgaaaccttgagcaatcactttatagaattactcgtgccatttttcttatttctcgggcggagggcctgtataatccacggtgtgctgcagattttattccaggccgtccttatcgtgtccggcaatctgagcttccttaactggttgacgatggtaccctctttagcatgttttgacgacgcaactctgggcttcctgttcccaagtggaccaggcagcttgaaagaccgcgtgcttcaaatgcaacgggacatacgaggggccagacctgaaccaagatttggctccgtggtgaggagggctgctaacgtgtcgctgggtgtacttcttgcttggctgtccgtgccagttgtactaaatctgttgtcctcccggcaggtgatgaacactcatttcaattctctacacatcgtgaatacctacggagcttttggcagtattactaaagagcgagctgaggttattctgcagggcacagcctcatctaatgcctccgcacctgacgccatgtgggaagactatgaattcaaatgcaaacccggggaccctagccgcagaccttgtctcattagcccatatcactatcgtctggactggctaatgtggtttgccgcatttcagacctatgagcacaacgactggattatacatctggccggaaaacttctggcatctgatgctgaggcactgagcttacttgcacacaacccgttcgccgggagaccaccgcctcgctgggtccgtggagagcattaccgatacaagtttagtaggcccggcggccgccacgctgccgagggcaagtggtgggtgcgcaagcgaattggcgcctatttccccccactatcacttgaggagttacgaccctattttagggatcgaggatggccactgcccggcccattgtag

SEQ ID NO: 122619 - DNA, 993 bp, synthetic construct
  misc_feature 1..993: note = Description of Artificial Sequence: Synthetic coding sequence
  source 1..993: mol_type = other DNA
atggacttccactacgaaacccagcccatgccgaacccagtggcatactatttgcaccactctccatggtggtttcatcgttttgaaaccctgtcaaaccactttatcgagctcctggttccattcttccttttcctcggaaggagggcctgtattatacatggcgtgctgcagatcttgtttcaggcagtgcttatcgtcagtggcaacctgtcatttcttaactggcttacaatggtccctagcctggcttgcttcgatgatgcaacgttgggctttctgttcccttcaggcccagggtcattaaaagaccgggtgcttcagatgcagcgggacattcggggcgcacgcccagagccacgattcggttcagtggtaaggcgggccgccaacgtatctttaggtgtcttgttggcctggttgagtgtccccgtggtactgaaccttctttcaagccgtcaggtgatgaacacacatttcaactctttacacatcgtcaacacatacggggcttttggatccatcactaaagagagagccgaggtgatcttgcagggaaccgcgtccagtaatgcaagcgcacccgatgctatgtgggaggattacgagttcaagtgcaaacccggcgatccctccaggagaccttgcttaatttcaccgtaccattacaggcttgattggctgatgtggtttgcagctttccagacttatgagcacaacgactggatcatccatcttgctgggaagctgctcgcatccgatgcggaagcgttatctctgcttgctcataacccgtttgctgggcgtcctccaccccggtgggtgcgaggtgaacactaccgctataaattctctagacctggcgggcgccacgccgctgaaggcaagtggtgggtccggaaacggatcggagcttacttcccgccactctccctagaggaattacgcccttactttagggaccgcggctggcctctgcctggcccgctctag

SEQ ID NO: 122620 - DNA, 792 bp, synthetic construct
  misc_feature 1..792: note = Description of Artificial Sequence: Synthetic coding sequence
  source 1..792: mol_type = other DNA
atgcctaatcccgtcgcatattatctacatcatagcccctggtggttccaccgattcgaaactctgtcaaaccactttattgagctgctggtgcctttttttctgttcctgggacgccgggcatgtataatccatggcgtgctgcaaatactgttccaggccgtcttgattgtgtctgggaacctgtcttttctgaattggttgaccatggtcccttctttggcttgttttgacgatgcgactcttggcttcctgtttcctagcggtccaggttctctcaaagatcgcgtcctccagatgcaaagggacatacggggcgcgcgacctgaaccccgctttggttcggtggtgaggcgcgctgccaatgtgtccttgggtgtgctgcttgcgtggcttagcgttcccgttgttctcaacctgctctctagtcggcaggtgatgaatactcacttcaatagcttgcacatcgtgaatacttacggcgccttcggctctatcacaaaggaacgggcagaggtgatcttgcagggaaccgcaagctctaatgcgtctgctcccgatgccatgtgggaggattacgagtttaagtgcaaaccaggggatccttcccgacggccatgtttaatctccccgtatcattaccgcctggattggctgatgtggtttgccgctttccaaacctatgagcacaacgattggataatccacctggctgggaaactactggcatcagatgctgaggctctaagtctcctggcccacaacccatttgctgggaggccacctccatag

SEQ ID NO: 122621 - DNA, 1503 bp, synthetic construct
  misc_feature 1..1503: note = Description of Artificial Sequence: Synthetic coding sequence
  source 1..1503: mol_type = other DNA
atgagcaactcggtgccattgctttgcttttggtccctctgttattgttttgctgccggctcccccgtcccattcggacctgagggacggttggaggataagctccataaacctaaagctacccagacagaagtgaaacctagcgttcgttttaatttgcggacctccaaagacccggaacacgagggttgctacctctcagtggggcacagccagccactcgaagactgtagttttaatatgactgctaagacattcttcatcattcatggttggaccatgagcgggatcttcgaaaactggcttcataagctggttagcgcacttcatacgcgggaaaaggacgcgaacgtggtggtcgtcgactggttaccacttgcgcatcagctctacaccgacgctgtcaacaatacaagagtggtgggccatagcatcgctcggatgctggattggctccaggagaaggacgatttctcactcggtaacgtccacctgatcggttattcactgggcgctcatgtggccggttacgcagggaacttcgtaaaggggaccgttgggcgcattacgggacttgatccagccggaccaatgttcgagggggccgatatacataagaggttaagccctgatgatgcagacttcgttgacgtattgcacacctacacccggagtttcggattaagcataggaatccagatgcctgtggggcatatcgacatttacccgaacggtggagacttccagcccggttgtggacttaacgacgtcctcggcagcattgcctacggtaccatcaccgaggtcgtaaaatgtgaacacgagagagcagtgcatctgttcgtagatagtttggtgaatcaagataagcctagttttgcgttccagtgcaccgattcaaacaggttcaagaaagggatatgtctgagttgtaggaaaaatcgctgcaactccattggctacaatgctaagaagatgcgcaacaagaggaacagcaagatgtatctgaagactagagctggtatgccatttcgtgtgtaccactatcagatgaaaatccacgtgttcagctacaaaaacatgggtgagattgagcccacattctatgtgacactgtacgggacgaacgccgatagtcagacactgccactggagattgtcgagcgcattgagcagaacgctacaaatacctttctcgtgtacactgaggaagacctcggggatctcctgaaaattcagctgacatgggaaggcgcgtcccagtcatggtataacctgtggaaggagtttcgatcctacctctcgcagccacgaaaccccggtcgtgagcttaatatacgccgcattcgcgttaaatctggggagacccagcgaaaactcaccttttgcaccgaagaccccgagaacacctccatctctcccggaagggaattgtggttccgcaagtgcagggatggatggcgaatgaagaacgaaacctcacctacagtggagctgccttag

SEQ ID NO: 122622 - DNA, 1281 bp, synthetic construct
  misc_feature 1..1281: note = Description of Artificial Sequence: Synthetic coding sequence
  source 1..1281: mol_type = other DNA
atgtcaaactcagtccccctcctctgtttctggagtttgtgttactgtttcgcagccggcagccctgtcccattcggccccgagggaaggctcgaagacaagctccacaagcccaaagccacccaaaccgaggtgaagcctagcgtaagattcaacctgagaacgtcaaaagaccccgagcacgagggatgctatttgtccgttggtcacagccagccactggaagactgttcttttaacatgacagcgaaaactttttttatcatccacggatggacaatgtctggcatatttgagaactggctccacaagctggtatcagcattacatactagggagaaagatgcaaatgtcgtcgtcgtcgattggctgcccctggcacatcaattgtataccgacgccgtgaacaacacgagagtcgtggggcactctattgccagaatgctggactggttgcaggagaaagacgacttcagcctgggtaatgtgcacctcataggatattcacttggtgcccatgtcgccggttacgccggtaatttcgtgaagggaacagtgggccgaatcacagcaattaccgaggtggtgaagtgcgagcatgaaagagccgtccatctcttcgtagactccttggtgaaccaagacaaaccttccttcgcttttcagtgtactgattcaaatcgttttaagaagggcatctgtctgtcttgcagaaagaacagatgcaattcaattggatacaacgccaagaagatgaggaataagcggaactctaaaatgtacctaaagactagggcaggcatgcctttccgtgtttatcactatcagatgaaaatccatgtcttctcatataagaacatgggcgagatagagccaactttctacgtgaccctctacggaaccaatgcagatagccaaactttgcctctggaaattgtcgagcgaattgagcagaacgccacaaacacttttctcgtctacacagaggaagaccttggtgatctgctcaaaattcagctgacctgggagggagcttcccaatcgtggtacaacctgtggaaagagtttcggtcttatcttagccaaccccgcaatccaggcagggagctgaatatccgccgcattcgcgttaaatccggcgaaacccaacggaagttgacgttttgtaccgaggatcctgaaaatacgtccatatctcctggtagggagttgtggttccgtaagtgtcgagacggctggcgcatgaagaacgagacctctccaactgttgagctcccttag

SEQ ID NO: 122623 - DNA, 1101 bp, synthetic construct
  misc_feature 1..1101: note = Description of Artificial Sequence: Synthetic coding sequence
  source 1..1101: mol_type = other DNA
atgaacatttcacagatcatatcttactgggggtatcctgacgaagagtacgatatagtgacagaagatggatatattctggggctgtaccggatcccttattggcgcactgataacaataaaaatctcgcccagcgggtggtcgtatacctccagcacgggctcctgacttccgcctcctcgtggattagtaatctccccaataactctctgggctttatcttagcggacgcaggatacgatgtgtggatgggcaacagtcgcggcaatacctggagccgcaaacacctgtacctggaaacctcctcgaaagagttttgggcctttagcttcgatgaaatggccaagtatgatctgccagcttcaatcgactttaccgtcaagcaaacgaggcaagaagaaattttctacgtcggacattctcaaggtacaacgatcggtttcatcacatttagtaccatcagtaagatcgccgagcgtatcaagatcttcttcgcgctagccccagtgttctctacaaaatacctgaagtccccccttattaggatgacatacaaatggaagagcatcgttatggcgttctctggaaataaagactttttacccaagacctctttcaagaaatttatcggttctaagctgtgtcctttgcagattttcgacaaaatttgtctgaatattctctttatgatgtttggatacgatcctaagaatctgaatatgagccgtctcgacgtctatttctcccataatcccgcagggacctccgtgcaaaatatgctccactggtctcagctgcttaactctacacatctcaaggcttatgactggggatcaccagatctaaacctggttcactacaaccaaaccacctctcccctctacaacatgacaaacatgaacgtcgcaaccgcaatctggaacggcaaatctgatcttcttgccgaccctgaagacgtgaatatactccacagtgagattacgaaccacatctattataagacaatctcctactataatcacatcgactctctgtttggattagatgtctatgaccaggtttaccatgaaatcattgatatcatccaggacaatctctag

SEQ ID NO: 122624 - DNA, 1200 bp, synthetic construct
  misc_feature 1..1200: note = Description of Artificial Sequence: Synthetic coding sequence
  source 1..1200: mol_type = other DNA
atgtggcaattgctggcagcggcctgttggatgttactgctggggtctatgtatggctatgataaaaaaggaaataacgccaaccccgaagccaacatgaatattagccagatcattagctactggggctacccatatgaggagtacgacgtgaccacaaaggacgggtacatcctcggtatctaccggatccctcacggccgggggtgtcctggacgcactgcaccaaagccggcagtctacctccagcacgggctcattgcctctgccagtaattggatttgtaaccttccaaataactctctggccttcctgctggccgacagcggctacgacgtttggctcgggaactcgagaggaaatacttggagcaggaagcacctcaaactctcaccaaaatcccccgagtattgggcattcagcctagatgagatggccaaatatgatcttcccgccacaattaactttataatcgaaaaaactgggcagaagagattgtactacgtcggtcattcacagggaactactattgcctttatagctttttccactaatcctgagctggccaagaagatcaagatcttctttgccttggccccggtcgtcacggtgaaatatacccagagccccatgaaaaagctgacaaccctttcaagacgagtggtaaaagttttgttcggggataaaatgtttcaccctcatactctcttcgaccaatttatcgcaacaaaagtgtgcaatcgtaagctgttccggcgtatttgcagcaattttctcttcaccctgagcggattcgacccacagaatttgaacatgtctcgcctcgacgtgtatctgagccataatccagctggcacaagtgttcagaatatgctccactgggcccaggctgtcaattctggccagctccaggcctttgactggggcaacagcgatcagaatatgatgcatttccatcagctgacacctcccctctacaacattacgaagatggaggtccctaccgcaatctggaatggaggccaggatatcgtcgccgaccccaaggacgttgagaacctcctcccccagatcgccaatctgatctactacaaactcattcctcattacaatcatgtcgatttttatctcggggaggacgcacctcaggaaatctaccaggacctgatcatcctgatggaggagtatctgcagaactag

SEQ ID NO: 122625 - DNA, 1272 bp, synthetic construct
  misc_feature 1..1272: note = Description of Artificial Sequence: Synthetic coding sequence
  source 1..1272: mol_type = other DNA
atgctggagactttaagcaggcagtggatagtttcccatcgaatggaaatgtggctgttgattctggtggcctatatgttccaacggaatgtcaatagcgtacacatgcccaccaaagccgtcgatcccgaggcctttatgaacattagtgaaattatacagcaccaagggtacccgtgtgaagagtacgaggtggctaccgaagacggttacatactgagcgtcaacagaatccccaggggcctggtccagcccaaaaaaaccggatcccgcccagtggtgctgctgcagcacggacttgtggggggggcatcgaattggatcagcaacctgcccaacaacagtttgggcttcatactggccgacgcaggcttcgacgtttggatgggaaatagtcgtggtaacgcttggagtcggaagcataaaacactgagtatcgaccaagatgaattctgggcattctcttacgacgagatggctcggttcgacctgccagccgtgatcaactttatcttgcaaaaaaccgggcaggaaaagatctactatgtggggtattcgcaagggacaacaatgggctttatcgcgtttagtacaatgccggagctagctcagaagatcaagatgtacttcgctctggctcccatcgctacagtcaaacacgcgaagagtcctggcacaaagtttctacttctgcctgatatgatgattaagggcttattcggaaaaaaagagtttctgtaccagacacgctttctccgacagctggtcatttatctgtgcgggcaggtcatcctggatcagatttgttcgaacatcatgttgctgctcgggggctttaacaccaataatatgaacatgagccgggcaagcgtttatgccgcccatactcttgcagggaccagcgtccagaacattctgcattggtcccaagctgtgaattctggcgaactgcgcgctttcgactgggggtctgaaaccaagaatctggaaaagtgcaaccagcctaccccggttcgttatcgcgtgagggacatgaccgttccgacagctatgtggacaggtggacaggactggctaagtaaccccgaggacgtaaaaatgctgttaagcgaagtgacaaatctgatttaccacaagaatattcctgagtgggctcacgtggattttatatgggggcttgatgctccccacaggatgtacaatgaaattatccacctgatgcagcaagaggaaacgaacctgagtcagggcaggtgcgaggctgtcctgtag

SEQ ID NO: 122626 - DNA, 1152 bp, synthetic construct
  misc_feature 1..1152: note = Description of Artificial Sequence: Synthetic coding sequence
  source 1..1152: mol_type = other DNA
atgacccgaccgctggaccgcaagcagtctgagatcatccagcaccagggatacccttgcgaggagtacgaggtcgcaacagaagatggatacattcttagtgttaaccggatccccaggggtcttgtccagccaaagaagaccggctcccgccctgtggtgctgctacagcacggtctagtcggaggcgcgagtaactggatttcaaacctaccaaataactcgctcggttttattctggctgatgcaggcttcgatgtgtggatgggcaatagccgtggcaacgcctggtcaagaaagcacaagacactctccatcgaccaggatgaattttgggcctttagttacgatgagatggctcgattcgatttacccgctgtgatcaattttatattgcagaagacaggtcaagagaagatctactacgttgggtacagccagggtacgactatgggcttcatcgccttctccaccatgcctgaattagcacagaagattaagatgtatttcgcgctggcccccatagctaccgtaaaacatgcgaagtccccaggcaccaaattcctcctgcttccagatatgatgattaaagggttatttggaaaaaaggaatttctataccagacccgatttctgaggcagctggtgatttacctgtgcggccaggttattctggaccagatatgttccaacattatgctgctgctcggcggctttaacaccaacaatatgaatatgtctagagccagtgtttacgcggcccacacccttgctgggaccagtgttcaaaatatcctgcattggagccaggccgtcaatagtggcgagttacgagcctttgattggggctccgagaccaaaaatcttgaaaagtgcaatcagccgacccccgtgagataccgcgtgcgagacatgaccgtcccaacagcaatgtggacaggcggccaggactggctgagtaaccccgaggatgttaaaatgcttcttagcgaggtcacaaacctgatatatcataaaaacattcccgaatgggcccacgtggattttatatggggcttagacgctcctcaccggatgtacaatgaaatcattcatcttatgcagcaggaggagacaaacctcagccagggacgctgcgaggccgtcctttag

SEQ ID NO: 122627 - DNA, 1197 bp, synthetic construct
  misc_feature 1..1197: note = Description of Artificial Sequence: Synthetic coding sequence
  source 1..1197: mol_type = other DNA
atgatgtggcttctgctcacaactacctgtctgatttgcgggaccctcaatgcagggggcttccttgacctggagaacgaggtgaatcctgaggtgtggatgaatacctccgagattataatctacaacggctatccctcggaagagtacgaggtaacaacggaggacgggtatatcctgcttgtaaacagaataccatatggtagaacccatgccagatcgaccggacctagaccagttgtgtatatgcagcacgcactctttgccgacaacgcttattggctggagaactacgccaacgggagcttgggttttctgttggcagatgctggctacgatgtctggatggggaactcccgcgggaatacctggtctcggcggcacaagacccttagtgagaccgatgagaaattttgggcctttagcttcgacgaaatggccaagtatgaccttcctggtgttattgactttatcgtgaataagaccggccaggaaaagctctactttatcggacatagtttgggaacgacgattgggtttgtagcctttagtacgatgccagaactggcccagcgcatcaagatgaactttgccctgggtcctaccattagctttaagtatcccacgggtattttcaccaggttcttcttgctgcccaatagcataatcaaagccgtcttcgggacgaaagggtttttcctggaggacaaaaaaacaaaaatagcaagcacaaagatttgtaacaacaagattctgtggctgatttgtagcgagttcatgagtctgtgggctggatctaacaagaaaaatatgaatcagtccaggatggacgtttatatgtctcatgcaccaaccggatcaagtgtccacaacattcttcatatcaagcagctataccactcagatgagttccgggcctatgattggggaaatgatgcagataacatgaaacattacaaccagagccatccacctatctacgacctgacagcaatgaaggtgcccacagctatctgggccggcgggcacgacgtgttggttacacctcaggacgtcgcacggattctgcctcagattaagtcccttcattacttcaagcttctccccgactggaatcacttcgattttgtgtggggcctcgatgctccccaaaggatgtacagcgagattatcgctctaatgaaggcttattcctag

SEQ ID NO: 122628 - DNA, 1500 bp, synthetic construct
  misc_feature 1..1500: note = Description of Artificial Sequence: Synthetic coding sequence
  source 1..1500: mol_type = other DNA
atggatactagtccactgtgctttagtattctgttggtcttgtgtattttcatccagtcaagtgccctcggacagagtctgaagccagaaccttttggacgcagggcccaggctgtcgagacaaacaaaacactgcatgagatgaagacaaggttcctgctgttcggggaaacaaaccaggggtgccagatccgtatcaaccacccagatacacttcaggagtgcgggttcaatagtagccttcctctggtaatgatcattcacggctggagtgttgatggggtgcttgagaattggatttggcaaatggtggccgccctgaagtctcagcctgctcagcccgtgaatgtgggccttgtcgattggatcacccttgctcatgatcactataccatcgctgtgaggaatacccgcctggtaggtaaagaggtagccgctctgctgaggtggctggaggaaagcgtccagctgagcaggtcacatgttcatctcataggctactctttgggagcccatgtctctggcttcgcaggcagctcaatcgggggcacacacaagatcgggcgcattaccggactggacgctgccggtcccctgttcgaaggctccgcccctagtaatcgcctctcgccagacgacgcaaattttgttgatgctatccacaccttcaccagggagcatatgggactctcagtgggaataaagcagcctatcggtcactacgacttttatcccaacggaggttcattccagccaggttgccacttcctggagctttaccggcatattgcccaacacggcttcaatgctatcacacaaactatcaagtgtagtcacgagagatccgtgcacttgtttattgacagtctcctgcatgctggaacccagagcatggcatacccatgtggcgacatgaacagtttttcacagggtctatgcctgtcctgtaagaaggggcgatgcaatacactggggtaccatgtcagacaagagcccagaagcaaatcaaaacgtctcttcttggtaactcgtgctcaatcacccttcaaggtctaccactaccaatttaagatacagtttatcaaccagacagagacccctatccagacaacctttacaatgtcattgctcggaacaaaggaaaagatgcaaaagattcccattacactaggcaagggcattgcctctaacaagacctacagctttttaattacactggatgtggacatcggagagctgatcatgatcaagtttaagtgggaaaattccgctgtgtgggcgaatgtctgggatacagtgcaaacaataatcccttggagcacaggtcctcgacactcaggactcgttctgaagacaatccgtgtaaaagctggcgagacccagcagcgtatgactttctgtagcgagaataccgatgacctgcttctcaggcctacccaagagaagattttcgtgaaatgcgagataaaatccaaaaccagcaagagaaaaatccgatag

SEQ ID NO: 122629 - DNA, 1500 bp, synthetic construct
  misc_feature 1..1500: note = Description of Artificial Sequence: Synthetic coding sequence
  source 1..1500: mol_type = other DNA
atggatacaagccccctatgcttctcaatcctgttagttctgtgtattttcattcagagctctgcccttggccaatctctaaaaccagagccattcggtcgtagagctcaggccgtcgaaacgaataagactctccatgaaatgaagactcgatttctgctctttggggagaccaatcaaggctgccaaatcaggattaaccacccagatacacttcaggaatgcgggttcaattctagtttgcccctggttatgatcattcatggctggagtgtggatggcgtgctggaaaactggatatggcagatggttgctgcccttaagtcccagcccgcccagcccgtcaatgtaggtctggtcgactggattacgctcgctcatgatcactatacaatagcagtgagaaatacccggctcgtaggcaaggaggtagcggcactgctccgctggctggaggaatctgtgcagttatctagaagtcatgtccatctaataggatactctttaggggcacacgtgagtggctttgccggctccagtatcggtggaacccacaagatcggcaggatcactgggctagatgctgcgggtcctcttttcgagggctccgcacccagcaatcgtctgtcccccgatgatgcaaatttcgtggacgctattcatactttcactcgcgagcacatgggactgagcgtcgggatcaagcagcccattggccactatgatttttacccgaacggaggttctttccagcctggatgtcacttcttggagctgtaccggcacattgctcaacatgggtttaatgccattactcagaccattaagtgctcacatgagcggtcagtgcatctgttcatcgactcactgctccacgctggtactcagtccatggcctacccatgcggcgacatgaactctttcagccagggtttatgcttatcttgtaagaaaggtcgatgcaatactctgggctatcacgtgaggcaggagccacgttcaaagtcaaaacgcttgttcctggtgacccgtgcacagtccccattcaaggtgtatcattatcagtttaaaattcagtttatcaatcaaacagaaacgcccatccagacaacattcacgatgtcactgctgggaaccaaagagaagatgcagaagattccgattacactgggcaaggggattgcatctaataaaacatattcctttctgattaccctggacgtggacatcggggagctcattatgataaagttcaaatgggaaaatagcgcagtgtgggcgaatgtgtgggataccgtgcaaaccattattccatggtctacaggacctcgtcactccggcctggtactgaagaccattagggtcaaggcaggagagacacagcagcgcatgaccttctgctccgagaacaccgacgacttgctgctgcgccccacccaggagaagatttttgtgaagtgtgaaattaaaagtaagacttcgaaaagaaaaatccgctag

SEQ ID NO: 122630 - DNA, 3231 bp, synthetic construct
  misc_feature 1..3231: note = Description of Artificial Sequence: Synthetic coding sequence
  source 1..3231: mol_type = other DNA
atggaaccagggagcaaaagtgtttcacgttctgactggcaaccagagcctcaccagcggccgatcacacccctggagcctggtcccgagaagactcccattgcacagccagaatctaagaccttgcagggctctaacactcagcagaagcctgcttctaatcaaaggccccttacccagcaggaaacacccgctcagcacgacgcagaatcccaaaaagagcctagggctcagcagaagagtgcgtcccaggaagagttcctggccccccagaagcccgcgcctcagcagtcaccctacattcagcgggtacttttaacgcaacaagaagccgcaagtcagcaaggccccgggctcgggaaagagagcataactcaacaggagcccgcactacgacagcggcatgtcgcccagcctggacccgggcctggggagcccccccctgctcaacaagaagccgagagcacaccagccgctcaggccaagcctggggctaaacgcgagccaagtgcacctacagaatcaacatcccaggagacccccgagcaatcagacaaacagaccactcctgtgcagggagcaaagtcaaaacagggctccctgacagaacttggctttttaaccaaactccaggagcttagcatccagcggagcgcactggagtggaaggcactttccgagtgggtcaccgatagcgagtctgaatctgatgtggggagcagtagcgatacagactccccagccactatggggggaatggtcgctcaaggcgtgaagctggggttcaaaggcaaaagtggctataaagtcatgagtggttactcaggaacatctccccatgagaagaccagcgcccgaaatcaccgacattaccaagacactgccagcagattgatccacaatatggatttacgaaccatgactcagagcctggtgacactggcggaggacaatatcgccttcttcagtagtcaaggcccaggggaaacagctcagcgtttgtccggcgtgttcgccggcgttcgcgaacaagcgcttgggctggagccagctctgggcaggctactcggggtggcccacctgtttgacctggatccagagacccccgctaacggctaccgcagcctcgtgcacacagctagatgttgcctggctcacctgctccacaagagccgatacgttgctagcaaccggagatccatcttttttaggacttcacataacttggccgagctggaagcctacctcgctgcacttacacagctccgggctttggtgtattatgcccaacgcctgttagttacaaatcggcctggcgtgctgttctttgaaggcgatgaaggtttgacggccgactttctgcgcgaatacgtgacactgcacaaaggatgcttttatgggcgctgtcttgggttccaatttactcccgcaattcggcctttcttgcagactataagtataggtcttgtcagttttggcgagcattacaagagaaatgagacaggcctgtccgttgccgcttccagcctgtttacttctggaaggttcgccatcgatccagagttgcgcggagccgaattcgagcgcataacacaaaatctcgacgtacacttttggaaagcattctggaacattactgagatggaggtgttgtcgtcccttgcaaacatggcctccgctaccgtccgagtgtctagactcttatctcttccaccggaggcattcgagatgcctctcacagctgacccaaccctcaccgtcacgatctccccacctctggctcacactgggccaggcccagtgctcgtccggttaattagttatgatttgagggaaggacaggactccgaagaactgagcagcctcattaagtctaatggccaaaggtccctggagctgtggccccgtccacaacaggcccccagatctagaagcctgattgtccattttcatggaggtggatttgttgcccaaacttctcgaagccacgagccataccttaaatcctgggcccaagaactcggagctccgatcatctctatcgattactccttggcgccggaggcacctttcccacgggcactcgaagagtgttttttcgcctattgttgggctattaagcactgcgctcttctcggttccacaggcgagcggatctgcctcgccggcgatagcgccggcggcaacctctgtttcactgtggcattgagggcggccgcatatggcgttagggtccccgatggaatcatggccgcctaccccgcaaccatgctgcagccagcagcttcaccgtcacgattactctccctaatggacccacttctccccctatctgttctgagtaagtgtgtgtcagcctacgccggagccaaaaccgaggaccactcaaacagcgaccagaaggcacttggcatgatgggactcgttcggagggacactgccctcctgctccgcgacttcagacttggagcaagtagttggttgaatagttttctggaactgtctggtcgtaagtcccagaagatgtctgagcctatcgctgaacccatgaggcgcagcgtgtcagaggcagcgttagcccagcctcagggcccattggggaccgacagtctgaaaaaccttaccttacgagacctgagcctgcgaggcaacagcgagacgagtagtgatacccccgagatgagtctgagtgccgaaaccttgtccccctccacacccagcgatgtaaatttccttctccctcccgaggatgccggcgaggaggccgaggctaaaaatgagttgagccccatggaccgcggactcggcgtgcgcgcagcttttccagaaggttttcacccaagacgttcaagccagggggccactcagatgcccctttactccagcccgatcgtgaagaaccctttcatgtccccgctcctggcaccagactcaatgctgaagagtctccccccggtgcatatagttgcttgtgcgttggaccccatgttagatgactcagtcatgctcgcaagacggctgcgcaacctcgggcagcccgtgaccttgcgagtggtggaagacctgccccacggtttccttactctcgctgcgttatgccgggaaacacgtcaggcagctgagctctgtgttgagaggattagactggtcttaacaccgcctgctggcgcagggccttccggtgaaacaggggcagcaggtgtcgatggagggtgtggaggacgccactag

SEQ ID NO: 122631 - DNA, 1356 bp, synthetic construct
  misc_feature 1..1356: note = Description of Artificial Sequence: Synthetic coding sequence
  source 1..1356: mol_type = other DNA
atgctgcgcttctacctcttcatatccctgctgtgcctgagccggtccgatgccgaggagacttgtccctctttcacacgcctctcttttcacagcgccgtggtggggaccggactcaatgtgaggttaatgctgtacactcggaagaacctcacttgtgcgcagacaatcaatagcagtgcatttgggaatctcaatgtgacgaagaagaccacgtttattgtgcacgggtttagaccaacaggctctcctcccgtctggatggatgatctagtgaaaggtctactctcagtcgaggatatgaatgtcgtggttgtcgactggaatagaggggctaccacactcatctatacgcatgccagcagcaagactcgaaaggtggccatggttctcaaggagttcattgatcaaatgcttgcagagggagcctctctggacgacatctacatgattggtgtgagtctgggggcccatatttcaggctttgtgggagaaatgtacgatggttggctaggcagaataaccggacttgaccctgcaggacctctcttcaatgggaaaccacatcaggacagactggacccctctgacgcccagttcgtggacgtcattcattccgacacagacgctctgggatacaaggagccgcttggcaacatcgacttttaccccaatggaggcctggaccagcccggctgtcccaagaccatcctgggcggattccagtacttcaagtgtgaccatcagcggtccgtttatctatatctgagctcactgagagagtcttgtactatcaccgcttatccctgcgactcctaccaggactacagaaacggcaagtgcgttagctgcggcactagccagaaggagtcatgtccccttttgggctactacgccgacaattggaaagatcacctgcggggcaaggatcccccgatgactaaagcgttctttgacaccgctgaagaatctcccttctgcatgtaccattacttcgtggacatcattacgtggaacaagaatgttcgaaggggcgatataacaataaagctcagggacaaggcgggtaataccacggagtcaaaaattaaccatgaacctacaaccttccagaaataccatcaagtgagtctgttggctcgctttaaccaggatctggataaggttgcagccatctccttgatgtttagcacagggtccttgatcggaccacgctacaagcttcgaatcttgaggatgaagctacggagcctagcccaccctgaaaggccccagctctgtcggtatgatttagtcctaatggagaacgtggaaactgttttccagcccatcctctgccctgagctccagctctag

SEQ ID NO: 122632 - DNA, 1446 bp, synthetic construct
  misc_feature 1..1446: note = Description of Artificial Sequence: Synthetic coding sequence
  source 1..1446: mol_type = other DNA
atgcttctgaagtgtttgcacaataatttatgccagaagtattcagcacacgcctttcaattctccccgagaaacgtgctgtggctgctggtggtatgccttcgcagcgataacaagagaccttgtctagaattctcacagttatccgtgaaggattccttccgcgatctattcattcccaggattgagactattctgatgatgtacacaaggaataacctgaattgcgcggagcccctctttgaacagaacaatagcctaaacgtcaatttcaacacgcagaaaaagaccgtctggttaatacacggataccgtccagtgggctctattcccctgtggctgcagaacttcgttaggattctgctcaacgaagaagacatgaacgtcatcgtcgtggattggtcacgaggcgcgaccacttttatctacaaccgggctgtgaaaaacacccgaaaggtggccgttagtttgagcgtacacattaaaaacttgctaaaacacggcgcctccctggacaattttcacttcatcggtgtttcattgggggcccatatttccggctttgtagggaagatattccatggccagcttggacggatcaccggcttggaccctgccggaccccgattctcaaggaaacctccttactcccgactggactatacagacgctaaatttgtagacgtgatacattcggacagcaacggactcggaattcaagagccattagggcacatagatttctatcccaacggagggaacaagcagcccggctgtccaaagagcattttttcaggaattcagttcatcaaatgcaaccaccaaagggctgtgcacctctttatggcctccttagagaccaactgcaactttatctcctttccatgccggtcttacaaggactataagactagcctctgcgttgactgcgactgttttaaagaaaagtcgtgtccccgattggggtaccaggcaaagctgttcaaaggggtgctgaaagaacggatggaagggcggcccctgaggaccaccgtcttcctggacacatcagggacgtaccctttctgcacgtattatttcgttctctcgattatagtgccagacaaaacaatgatggatggctcttttagcttcaaactgttgaatcagctggggatgatcgaggaacctagactctacgaaaagaacaagcccttctacaaacttcaagaagtaaaaatcctcgcccaattctacaatgactttgtcaatataagttctatcgggctgacttatttccaatcttccaatttgcagtgtagcacgtgtacctataagattcaaagactgatgcttaagtctttgacttatcccgaacgacccccgctgtgcagatataatatcgtgttgaaagaccgggaagaagtcttccttaatcccaatacctgcactccaaaaaatacatag

SEQ ID NO: 122633 - DNA, 471 bp, synthetic construct
  misc_feature 1..471: note = Description of Artificial Sequence: Synthetic coding sequence
  source 1..471: mol_type = other DNA
atgaacgtgatcgttgtggattggagtcggggagccaccacattcatctataaccgtgcggttaagaacactagaaaagtcgccgtcagtctttccgttcacatcaagaatcttttgaaacacggcgcctccctggacaacttccacttcatcggggtcagtctgggagcccatataagcgggttcgttggtaaaatctttcatgggcaacttggtagaataactggtctggacccggcaggcccacgattctcccgaaaaccaccctattcccgactcgattacacagatgccaagtttgtggacgtcatccacagcgacagtaacggaattcagtttataaagtgcaatcaccagagagccgtacacctcttcatggcctcactcgaaacaaactgcaatttcattagctttccgtgtcgttcgtataaagactacaaaacttctctgtgcgtagactgcgactgttag

SEQ ID NO: 122634 - DNA, 426 bp, synthetic construct
  misc_feature 1..426: note = Description of Artificial Sequence: Synthetic coding sequence
  source 1..426: mol_type = other DNA
tagtacaaccgcgcggttaagaacacgcggaaggtagctgtgtccctctccgtgcatattaaaaacctgctgaagcacggcgcttcactcgataactttcatttcatcggcgtctccttgggggcccacattagtggcttcgtcgggaagattttccatggccagctcgggagaatcacaggactggatcccgcaggacctcgcttttcccgcaagcccccatactccagattggattacactgatgcaaagttcgtggatgttatccatagcgatagcaacgggatacagttcatcaaatgtaaccaccagcgagccgtacacctttttatggccagcctggaaaccaactgcaattttatttcattcccttgcagatcatacaaggactataagacatctctgtgcgtggactgtgattgttag

SEQ ID NO: 122635 - DNA, 1383 bp, synthetic construct
  misc_feature 1..1383: note = Description of Artificial Sequence: Synthetic coding sequence
  source 1..1383: mol_type = other DNA
atgcgcgtgtacatcttcctgtgcctgatgtgttgggtgcgctctgataataaaagaccgtgcttagagttcagccagttgtcagtgaaagattcctttagggacctcttcatcccgagaatcgaaaccatactgatgatgtatactcggaacaatcttaattgcgccgaaccccttttcgagcaaaataattctcttaacgtgaactttaacactcagaaaaaaacggtctggctgatccatggatacaggcccgttgggtcaattcccctctggttacagaatttcgtaaggatcctacttaacgaggaggacatgaatgtcatcgtggtggactggagtagaggggcaaccacattcatttacaacagggccgtgaagaacacgaggaaggtagccgtctccttgtccgtccacattaaaaatcttctgaaacacggtgcctcgttggataacttccacttcattggggtctccttgggcgcacacatttcggggttcgttggcaagatcttccatggccagctgggccgaatcacgggtctggaccctgctgggcctcgcttctctcgcaaacccccgtattcgagactagactatacggatgccaaatttgttgacgtcatccactccgattctaatgggctgggcatccaggagcccctgggtcacatcgacttctacccaaacggtggaaacaaacagcccggatgccctaagtcgattttttcaggcatccagtttattaagtgtaaccaccagagggctgtgcacttattcatggcctccttggaaacgaactgtaacttcatcagcttcccgtgccgctcatacaaggattataagacctccctctgtgtcgactgcgactgcttcaaagagaaatcttgcccacggctgggttaccaagcgaaactgtttaagggcgtcctgaaggagagaatggaaggtagaccattgcgcacaacagtttttttggatacctcaggcacctaccctttttgcacctactatttcgtcctttctataatcgtacctgacaagacaatgatggatggctcgttcagcttcaaactgctgaaccagttaggcatgatcgaggaacctaggttatacgaaaaaaataagcccttttataagctgcaggaggtgaagatactcgctcaattctataatgattttgtaaacattagctctattggtctcacatacttccagtccagcaaccttcagtgcagcacatgtacctacaaaatccaaagactaatgctgaagagcctcacctacccagagaggcctcccctttgtcgatacaatatcgtgctgaaggatagagaagaggtttttctgaatcctaatacttgcactccgaagaatacttag

SEQ ID NO: 122636 - DNA, 2673 bp, synthetic construct
  misc_feature 1..2673: note = Description of Artificial Sequence: Synthetic coding sequence
  source 1..2673: mol_type = other DNA
atgaactacgtgggacaactggcaggtcaggtttttgtgaccgtcaaggaactgtataagggattgaaccccgcgaccctctccgggtgtattgatatcatagtaattaggcagccgaacggtaacctgcagtgttcaccattccatgtgagattcggaaagatgggggtgctccgctcccgggaaaaggtggttgacattgagattaacggcgagagcgtggacctgcatatgaagttgggcgacaacggggaagcattcttcgtacaggaaaccgacaacgaccaggaggtgatccctatgcacctggcgacctccccaatcctgtcagaaggagctagccggatggagtgccagctaaaacggggaagtgtggatcggatgcggggcctcgatcctagtactccagctcaagtaatagccccgtctgaaaccccgtcctcatccagcgtcgtaaagaaaagacgaaagagaagaaggaagtctcaattggactctcttaaacgagacgacaacatgaacacctcagaggatgaggatatgtttccaatcgaaatgagcagcgacgaagcaatggaattgctggagagctcccgtaccctgccaaatgatatccccccctttcaggacgacatccctgaagagaacctgagcttggccgtgatctacccccaatcagccagctatcctaacagcgatcgagagtggtctccaactccaagcccaagtggttcacgcccatcaacgcccaagtccgattccgaactggtatcaaaaagcaccgagagaacaggccagaaaaatcccgagatgctgtggctctggggcgagttaccccaagcggccaaatctagtagtcctcataaaatgaaagagagctcaccactgtcctccaggaagatctgtgataaatcacacttccaagctattcactccgagagtagcgatacattctcagatcagtcaccaactttggtcgggggcgccttgttagaccagaataagccccagacagaaatgcagtttgttaatgaagaagacctggaaaccttgggcgccgctgccccattgctgccaatgattgaggagctgaaacccccttcggccagtgtggtgcagacagccaataagaccgatagtccctccagaaaaagggacaagaggtctcggcatttaggggctgatggtgtgtatttagacgaccttacagacatggaccctgaagtggctgcgctctatttcccgaagaatggcgacccttccggtctggccaaacacgcctctgataatggtgcccgtagcgccaatcagtctccccagtcggtcggctcttcaggggtggactctggcgtggagagcacttcggacgggcttagagatctgccctccatcgcaatctcattgtgcggagggcttagtgaccatcgcgaaataaccaaagacgccttcctggagcaggcagtgtcctatcagcaatttgtggataaccctgcaataattgacgacccaaaccttgtggtaaaaattgggtcaaagtactataactggactacagctgcccccctgcttctcgctatgcaggcattccaaaaaccattgcccaaagctaccgtggagagtattatgagagataaaatgcctaagaagggagggagatggtggttctcttggcgcggtagaaacaccacaatcaaggaagagtctaagcccgagcaatgtctggcaggtaaagcccatagcactggcgagcagccaccacaactgtctctagccactcgggtcaaacatgagtctagtagtagtgatgaggagagggctgcagccaagccaagtaacgccggccatctgcctctcctgcctaacgtatcctataaaaagacccttcgcctgacgagcgagcagctgaagtctctcaagttgaagaacggaccgaatgacgtggtctttagcgtgacaacccagtatcaaggaacatgccggtgtgagggcaccatctacctttggaactgggacgacaaggttattattagcgacatcgacggaactattacacgaagtgatactctcggccacattttgcctaccctggggaaagactggacacaccagggcatcgcaaagctttatcacaaagtgtcgcagaacggctataaattcctttattgttctgctagggcaattggaatggcagatatgacacggggatatctgcactgggtcaacgaaagaggtaccgtgctcccgcagggtcctctgctgttgtcaccaagttcattattttcagctttacaccgggaagtgatcgagaagaaacccgaaaaatttaaagttcagtgcctcacagatatcaagaacctgttcttccctaataccgaacccttttatgcagcatttgggaaccggcccgcagacgtttacagctacaaacaggtgggtgtgtcactcaacagaatttttacggtcaatcctaaaggcgagctggtgcaagaacacgccaagactaatatttcttcttacgtgagactctgcgaggtggtggaccatgtgtttcccctgctcaaaagatcccactcgagtgacttcccatgcagcgacacattcagcaatttcacattttggagagagcccctgccaccttttgagaatcaagacattcattccgcatccgcctag

SEQ ID NO: 122637 - DNA, 1863 bp, synthetic construct
  misc_feature 1..1863: note = Description of Artificial Sequence: Synthetic coding sequence
  source 1..1863: mol_type = other DNA
atgctctggctgtggggcgaactaccccaggccgctaagtcctccagcccccataaaatgaaagaaagttctcccctgtcgtctcgtaaaatctgcgacaagagccacttccaagcgatacatagtgaatcttccgacacttttagcgatcagtcccccactcttgtcggcggagctcttttggatcagaataagccacaaaccgagatgcagtttgtgaacgaagaagacctggagactctcggcgctgctgccccgctgctgcccatgatagaggaattaaaacccccctcagctagcgttgttcagacagccaataaaaccgatagcccatctcgcaagcgcgacaaacgatcccgccacctgggagccgatggcgtatacctggatgatctcaccgatatggacccagaggtcgcagcactctactttcccaaaaacggggatccatccggcctcgctaagcacgcttccgacaacggggcgcggagcgcaaaccagtctccccaaagcgtggggagcagtggtgtggattcgggggtagagtcgacaagtgatggacttcgcgatttgcccagcatagctatcagcttatgtggcggcctgtccgaccatcgagagattacaaaagatgctttcctcgagcaggccgtgtcataccagcagttcgttgataaccctgcaattatcgacgaccccaaccttgtcgtaaagatcggatcgaagtactataattggactacagctgccccccttctgctggccatgcaggcctttcagaaaccattgcccaaagcaaccgtggaatccatcatgcgcgataagatgccaaagaagggcgggcggtggtggttcagttggcgcgggcggaacacgaccataaaggaggaaagcaagcctgagcagtgcctggccggcaaagctcacagcacaggagaacagccaccacagctgtctctggcaaccagagtcaaacacgagagctcgtctagcgatgaagagagagctgctgctaaaccctccaatgccgggcacctgcccttactccccaacgtatcctataagaaaacattacggctgacctctgagcagctaaagtccttgaaactgaagaacggccccaatgacgtggtctttagcgtgacgacccagtatcagggaacctgtcgttgcgagggcactatatacctgtggaactgggatgacaaggtgattatctctgatatcgatggcaccatcacacgaagtgatacactggggcacatattgcccaccttagggaaagattggacacaccagggcatcgctaaattgtatcacaaagtcagtcaaaacggctataagttcttatactgcagcgcgcgcgcaatcggaatggcagatatgacccggggttacctgcactgggttaacgaacgaggaactgtgctcccacagggcccacttctgctgtccccctcatctctgttctccgcgctgcatagggaagttatcgagaaaaaaccagaaaagttcaaggtccagtgtctaacagacatcaagaaccttttcttcccaaatacagaacctttttacgcagccttcggaaaccgcccagcagacgtctacagctacaagcaagtaggcgttagcctcaaccggatctttaccgttaatcccaagggcgagctggtacaagagcacgccaaaacaaacattagtagctacgttcggctgtgtgaggtcgttgatcacgtgttccctttacttaagcggagccatagctccgatttcccatgttccgataccttctcgaattttactttttggcgggagcccctgccaccttttgagaaccaggatatacactccgcctcagcctag

SEQ ID NO: 122638 - DNA, 2799 bp, synthetic construct
  misc_feature 1..2799: note = Description of Artificial Sequence: Synthetic coding sequence
  source 1..2799: mol_type = other DNA
atgtctagggtgcagactatgaactacgttggacaactggctggccaagtctttgtgactgtcaaggagttatataaggggctgaaccccgcgaccctgagtgggtgtatcgacatcatcgttatacgacagccaaacggcaacttgcagtgctcacctttccatgttcgattcggcaagatgggagtcctacggagccgcgagaaagtcgttgatatagaaatcaatggagaaagtgtcgatttgcatatgaaactgggagataacggcgaagccttttttgtgcaggagacagacaatgaccaggaggttataccaatgcacctcgctacaagtccaatccttagcgagggcgccagtcggatggaatgccagctgaaacgagggtcggtcgatcgaatgcgcggcctggatccgtctacacccgcacaagtgattgccccttcggaaacaccatccagttcttccgtcgttaagaaacgccggaaacgccggaggaagtcccagctggactccctgaagagggacgataatatgaacaccagtgaagatgaagatatgtttcccattgagatgtcctcagatgaggccatggaactactggagtcgagccgcacgctgcctaatgacatcccgccgtttcaggatgatatacccgaggagaatctatcactagccgtgatttacccacagagcgcaagctaccctaattccgacagagagtggagccccactccttcttccctagtggactgtaaacgtactgccccacacctggccgttgcggcggagggcggcctgtcctcttcatgccctccccaatcatcactgttccacccatcagaatcacctagcggcagtcgtccttccactccaaagtcagacagtgaactggtcagcaagtcgactgagcgtaccggacagaaaaatccagagatgctgtggttgtggggtgaactaccccaagccgccaagagttcatccccacataagatgaaagagagttctccactgtcatctaggaagatatgcgataagtctcatttccaagccattcattccgaaagctcggataccttctctgaccaatctcctaccctcgtgggtggagctctgttagatcagaataagccccagacagaaatgcaatttgtcaacgaagaggatctggaaactttgggtgctgctgcacccctcttgccaatgatcgaggaactgaagccccctagcgctagcgtcgtgcagacagcgaacaaaaccgatagcccttcccggaaacgagacaaaaggtcaagacacctgggggctgacggcgtataccttgacgacttaactgacatggacccagaagtggctgccctctactttccaaagaatggagatcctagtggcctggctaaacacgctagcgacaacggcgcgcgaagcgccaatcagtccccccaatctgtcggttccagcggtgtcgacagtggcgtagaaagtacaagtgacgggctgcgcgatctgccgtctatcgccatttctctctgcggcggactgagcgaccaccgcgaaattacgaaggatgcgtttctcgaacaggccgtgtcataccaacaatttgtcgacaatcctgcaataattgacgatcctaatctcgtggttaagattggtagcaagtactataactggaccacagcggcccctctgctgttggccatgcaagcctttcagaagcccctgcccaaggccactgtggagtcaataatgagggacaaaatgcctaagaaagggggaaggtggtggttctcctggagagggagaaacaccacaatcaaagaggagtccaagcccgaacagtgtctcgcaggcaaggcacactcaactggcgaacagcccccccaactcagtctggccactcgtgtgaagcacgagtccagttcaagtgacgaggaaagagccgctgctaaaccttcaaacgccgggcacctccccttacttccgaacgtgtcctacaagaaaactctgcggcttacgtctgaacagctcaagtccttgaagctgaaaaacgggcccaatgacgtcgtttttagcgtgactacacagtaccagggaacatgcagatgcgaaggaactatttacctctggaattgggacgacaaggttatcatttcagacatcgatggcacaatcactcgtagcgacaccctaggccacattctgcccacattaggcaaggactggactcaccagggaatagctaagctgtaccacaaagtgtctcaaaatgggtacaaattcctgtattgctctgcgagggctatcggtatggccgatatgaccagaggatacctgcattgggtcaacgaacgggggacagtgctgccccagggtcctctgctcctgagtcctagcagtctgttcagcgctctgcacagagaagtgattgagaagaagcctgaaaagtttaaagtccaatgcctcactgatattaaaaacttattctttccgaacacggagcccttttacgctgcattcggcaataggcccgctgacgtctatagttacaaacaggtgggggtctccttgaacaggattttcacggtcaatcccaaaggggagcttgtccaagaacatgccaaaactaacatctcttcttacgtcaggctctgtgaggtagtggaccatgtgtttcctctgctgaaacgttcgcactcttcagattttccctgctcggacaccttttcgaacttcacattctggcgggaacctctgcctccttttgaaaatcaagatatccactcggcatccgcctag

SEQ ID NO: 122639 - DNA, 1176 bp, synthetic construct
  misc_feature 1..1176: note = Description of Artificial Sequence: Synthetic coding sequence
  source 1..1176: mol_type = other DNA
atgcaggccttccagaaacctttaccgaaaagctcctgtttgagctacttacatgtgatactcgacgccatcaggttttgcttctccaagattttcaacgcgcagatcgcaaccgtcgagagcataatgagagacaaaatgccgaaaaagggcggccgatggtggtttagttggcgtggcaggaataccaccatcaaggaagaatctaagcctgaacagtgtctggctggcaaggctcattctactggagaacaacctccccagcttagcctggccaccagagtcaagcatgaatcatcatcttcagacgaagaaagagcagcagccaagccctctaacgcagggcacctgcctctgctgcccaatgtgagctacaaaaaaaccttaagactgaccagtgaacagctaaagtctctaaagctgaaaaatggccctaacgacgtggttttcagcgtgaccacccaatatcagggaacctgtaggtgcgaagggaccatatatctttggaattgggacgacaaggtcattataagtgacatcgatggcactattacgcgaagcgatacgctgggtcatattctgcctactttgggaaaggactggacccaccaggggatagcgaaattgtaccacaaagttagtcagaacgggtacaagttcctgtactgctctgccagagcaattggtatggcagacatgacacggggatatctgcactgggtaaacgagcggggcaccgtattgccccagggacctcttttactgagtccctccagtttgttctccgctcttcatcgagaggtcatcgaaaagaagcccgagaagttcaaggtccagtgcctgaccgacatcaagaacctgttctttccgaataccgagccattctacgctgccttcggcaacaggcccgcggatgtttactcatacaaacaggtgggcgttagtttgaataggattttcacagtcaaccccaagggtgaactggtccaggagcacgccaagacaaatatctcttcatacgtccggctttgcgaagtggtggaccacgtgtttcctttgctcaaaagatctcactcctcggacttcccatgtagcgataccttctccaacttcacattttggcgggagccacttccgcccttcgagaaccaggacattcactctgcctcggcatag

SEQ ID NO: 122640 - DNA, 87 bp, synthetic construct
  misc_feature 1..87: note = Description of Artificial Sequence: Synthetic coding sequence
  source 1..87: mol_type = other DNA
atgaactatgtggggcagctggccggccaagtgtttgtcaccgtcaaggagctatacaaaggcttgaacccggcaactctatcatag

SEQ ID NO: 122641 - DNA, 2691 bp, synthetic construct
  misc_feature 1..2691: note = Description of Artificial Sequence: Synthetic coding sequence
  source 1..2691: mol_type = other DNA
atgtcgagagtccagacaatgaattacgtcgggcagctggctggtcaggtttttgtgacagttaaagagctgtacaagggcctgaatcctgctactctctccggatgcattgatatcatcgtgattaggcagccaaatggcaaccttcaatgttctccattccatgtccggttcgggaaaatgggtgttctgcggtcacgcgaaaaggttgtcgacatcgagattaatggagaaagcgtcgatctgcatatgaaattaggggacaacggagaagcgttctttgtgcaagagacagataatgaccaagaggttattcctatgcatctggcgacaagccccatcctgtcagagggggcatctaggatggagtgtcagttgaagcgcgggtcagtggaccggatgaggggtctggacccttctactcccgcacaggtgatcgcgcccagtgagactccttccagcagctccgtcgtgaaaaagcgaaggaaacggagaagaaaaagtcagctcgattccctgaagcgcgacgataacatgaataccagcgaggacgaggatatgtttcctattgagatgagttcagacgaggcaatggaactgctggaaagttcccgcacgcttcctaatgacattccacccttccaggatgacataccagaagagaacctgagtttggcagttatttaccctcagtccgcctcttacccaaattctgatcgggagtggtcccccacaccgtcccccagcggtagccgacccagcactcccaaaagcgactcagaactggtgagtaagtctaccgagcgcacaggccagaagaaccccgaaatgctgtggctgtggggggagttaccccaggctgccaagtccagtagcccacataagatgaaggaatcttcacctctctctagcagaaagatatgcgacaaatctcattttcaggcgatacattctgaatcctcagacacttttagtgaccagtctcccactctggtgggtggagcgttgctagatcagaataaaccccagactgaaatgcaattcgttaacgaggaagacctggagactttgggggcagctgccccccttttgcctatgatcgaagagctgaaacctccaagcgcgagtgtcgtgcagacggctaataaaacagactccccctctcgcaagagggataagagatccaggcatctgggggccgatggagtgtaccttgatgacctgactgatatggacccagaggtcgctgcactgtattttcccaaaaacggggatccctctggactggctaaacatgcttccgataacggcgccagatcggccaatcagagcccgcaatccgtaggcagctcaggcgtggactccggcgttgaatcaaccagtgacggactgcgggaccttccttctatagcaattagcctctgcgggggcttgtcggatcacagagaaatcactaaagatgcattcttagaacaagccgtttcctaccagcagttcgtggacaacccggcgattattgacgaccccaaccttgtggtcaagatcggctccaagtactacaactggacaaccgcagcccccctgctgctggcaatgcaggcctttcagaagcctttgcccaaggccaccgtggagtccatcatgagagataagatgcccaagaaggggggcagatggtggtttagctggcggggacgcaacaccacaataaaggaagagtctaaaccggagcagtgcctcgcaggcaaagcccacagcaccggggaacagccaccacagcttagccttgccaccagggtcaagcacgagagtagctcctccgacgaggaaagagcggcggcaaaaccatcaaatgcaggacacttaccattattgccaaacgtgtcctacaagaaaacactacgcctgacttctgagcagcttaaaagcctgaagttgaaaaacggacccaacgacgtggtctttagcgtcacaacgcagtaccaaggaacctgccgatgcgagggaacaatctatttgtggaattgggacgacaaagtgatcatttctgacatcgatggaacaattaccaggtctgacaccctgggccacatcctgcctacattagggaaagattggactcatcagggcattgctaagctttatcataaagtgtcacaaaacggatataagtttctatactgtagtgcacgagcaattggcatggccgacatgacccgcggatatttgcactgggttaacgagaggggcaccgttctcccccaaggcccgcttttactctctccttcatcgttgttttcagctttacatagggaagttatcgagaagaaacctgagaagtttaaagtccaatgccttaccgacatcaaaaacctcttctttcccaatacagaacccttctacgctgcattcggcaacaggcccgcagacgtgtacagctacaagcaggttggagtttctctaaacagaatctttaccgtaaatccaaagggtgagctcgtgcaggaacacgcaaaaaccaatattagctcttacgttcgcctgtgtgaggtggtggatcatgtgttccctcttctgaaacggtctcattccagtgatttcccttgttcagatactttttcaaactttactttctggagagagccactgcctccattcgaaaatcaggacatccacagtgcctccgcttag

SEQ ID NO: 122642 - DNA, 291 bp, synthetic construct
  misc_feature 1..291: note = Description of Artificial Sequence: Synthetic coding sequence
  source 1..291: mol_type = other DNA
atgaattacgtagggcagctcgccgggcaggtgtttgtgaccgtcaaagagctttataaaggccttaaccccgccaccctgagcgggtgcatcgatatcatcgtaattaggcaacctaatggaaacctacaatgttccccattccatgtgaggttcggaaagatgggagtacttcgttcacgagagaaggtcgttgacattgagattaatggagaatctgttgacctccacatgaagttgggcgacaacggagaagccttcttcgtccaagaaactgacaacgatcagtag

SEQ ID NO: 122643 - DNA, 2928 bp, synthetic construct
  misc_feature 1..2928: note = Description of Artificial Sequence: Synthetic coding sequence
  source 1..2928: mol_type = other DNA
atgggagaacaggatggtattcgttcttcatcatgggagaccagccaggggaagtcctctccagactctgcctggtcttggattcccataatgcgggatcccggttggatacgcaacgtctggtcatcaaatattaacgtgcagacaatgaactatgtcggacagctggctggacaagtctttgtgacggtaaaagagctatacaagggcctgaatcccgcaacactgagtggatgcatcgatatcatcgtcattaggcaacccaacggcaatcttcagtgctcgcctttccacgtcaggtttggcaagatgggagtcctccgtagcagggagaaagtggttgatattgaaattaatggcgagagtgtggacttacacatgaaactaggtgacaacggagaagccttcttcgtgcaggaaaccgataacgatcaagaggtaatcccaatgcacttggctacaagccccatcttgagtgagggagcctccagaatggagtgccagttaaagcgcggttcagtcgaccgaatgcggggattggatccttccaccccagcccaggtcattgctccgagcgaaactccttctagctccagcgttgtgaagaagcggcggaagaggaggagaaagagccagctcgactcattaaaacgcgacgataacatgaacacaagtgaggacgaagacatgttcccaatcgagatgtctagtgacgaagccatggaactgctggaaagcagcaggactctgcccaatgatattccaccattccaggacgacatccccgaggagaacctttctctagcagtcatttatccacagagcgcatcgtatcccaacagcgaccgcgagtggtcccccactccatcgtctctggtggactgcaagagaactgctccccatttggctgttgccgctgaaggaggtctgtctagctcatgtcccccccagagttcccttttccacccatcggagagcccctccggatctaggccttccactccaaaaagcgatagcgagctggtatctaaaagtacggagagaactgggcagaagaatcctgagatgctctggctttggggcgaactgcctcaggcggcgaagtcgagctccccccacaagatgaaggaaagcagccctctgtcctctagaaagatttgtgataaatctcactttcaggccattcacagtgagagttccgataccttctcagaccagtcccccacgcttgttgggggggctctcctggatcaaaataagccacagactgaaatgcagttcgtaaacgaagaggatctcgagacattgggtgcggcagcccccctcttacccatgatcgaagagctcaagcctcctagtgcgagcgtagtgcaaaccgctaacaagaccgattcgccttcccgcaaaagggataagcggtcccgacatctgggggcagatggggtctatttggacgatctcaccgacatggaccccgaggttgccgctctgtattttccaaagaacggcgacccttccggtttagcaaagcatgcctctgacaacggtgctaggagcgcaaaccagagccctcagtctgtgggtagtagtggcgtggactcaggagttgagtctacatcagatggacttagagaccttccctccattgctatttcgctttgtgggggactttctgaccacagagagattactaaagacgcattcctcgagcaagcagtgagctatcagcaattcgtggacaatcctgccatcattgatgatcctaatctcgtcgttaagattgggagcaagtactacaactggacgactgccgcgcccctgctgctggcaatgcaggcctttcagaagcctctcccaaaggccacagtggagtcaatcatgagggacaagatgccgaaaaagggaggccgttggtggttttcctggagaggaaggaatactactattaaggaagagagtaagcccgaacaatgcttggccggcaaggcccacagtaccggtgagcaacccccacagttatcccttgctactcgagttaagcacgagtcaagcagctcggacgaagagcgggcagccgcaaagccatcgaatgccggccatctgccacttctccccaacgtgagttacaaaaagactcttaggcttacttcagagcaactcaagtccctcaagcttaaaaacgggcccaatgacgtggtgttttccgtcacaacccagtatcagggaacgtgtcggtgtgaggggacaatctacctttggaattgggacgacaaagtgattatctcagatattgacggcactatcacgagatctgatactctcggccacatcctaccgaccctgggcaaggactggacacaccaaggaatcgcaaagttgtaccataaagtgagtcagaatgggtacaaattcctctactgttcagccagagctataggcatggcggatatgactcggggctacctgcactgggtgaatgaacgcggtactgttctgccacaaggtcccctgctgttgagtcccagttctcttttctcagcacttcacagagaggtgatcgagaaaaaacccgaaaagttcaaagtacagtgcctgactgacattaaaaacctattcttcccgaacacggagcctttttatgcagcctttggaaaccgacccgccgatgtatactcttataagcaggtgggcgtcagcctcaataggatcttcaccgtcaaccccaaaggcgagctggtccaagagcacgcaaaaacaaatattagctcctatgttagattgtgtgaggtcgtggatcacgtgttccctctgttgaaacgctcccactcttctgactttccgtgttccgatactttttccaactttaccttttggagagagccgctgccccccttcgaaaaccaggatattcacagtgcctccgcgtag

SEQ ID NO: 122644 - DNA, 1380 bp, synthetic construct
  misc_feature 1..1380: note = Description of Artificial Sequence: Synthetic coding sequence
  source 1..1380: mol_type = other DNA
atgtcgagggtgcagaccatgaactacgtcggacagctggcaggtcaggtgttcgttacggtgaaagaactgtacaaaggtcttaatccagccactttgtcaggttgcattgacatcattgtcattcgccagcccaacggcaacctgcagtgctctccgtttcacgtgcgtttcggcaagatgggggtgctgcggtccagggaaaaagtagtcgacatcgagattaacggggagagcgtggatctgcacatgaagctgggcgataatggcgaggctttctttgtccaagaaaccgacaacgatcaagaggtgattcccatgcacttggcaaccagtccaatcttgtctgaaggtgcgagtcgtatggagtgccagctcaagagaggctcagtggatcgtatgagaggcctggaccctagtacacctgcccaggtgattgccccctctgaaacccccagcagcagctccgttgtgaaaaagaggcgtaagaggaggaggaaaagccagttggactccctaaaaagagatgacaatatgaatacgtcggaagacgaggatatgtttccaatcgagatgagctcagatgaggccatggagttgctggagagctcgcgtacactgccaaacgacattccaccttttcaagatgatatccccgaagagaacctcagtctggccgttatttacccccagtccgcgagctaccccaactctgaccgagaatggtcccccacgccctctagcctggtggactgtaagcggacagcaccccacttggcagtggctgctgagggcggcctgtccagttcttgtcctccccaatctagccttttccacccttcagagtcgcctagcggcagccggccaagtacccccaaatcagactccgaattagtgagcaagtcgacggagcgaacagggcagaagaatccggagatgttatggctgtggggcgagctcccacaggcagcaaaaagctcctcaccacacaaaatgaaagagagtagccccctgagcagtcgcaagatctgtgataaaagccatttccaagccatacactcggagagtagcgatacgttctctgatcaatccccgactctcgtggggggcgccttactagaccagaataaaccccagacagaaatgcagttcgtcaacgaagaggatctcgagaccctgggtgccgccgccccattattaccaatgatcgaggaattgaaacccccaagtgcaagcgtggtccagactgccaacaaaacagactcaccaagcaggaagcgggacaagcgaagccggcacctgggggcagatggggtgtaccttgacgacctgaccgacatggacccggaggtggccgcactgtacttcccaaaaaagtag

SEQ ID NO: 122645 - DNA, 2691 bp, synthetic construct
  misc_feature 1..2691: note = Description of Artificial Sequence: Synthetic coding sequence
  source 1..2691: mol_type = other DNA
atgaactacgtcggccagctcgcaggacaagtcatcgtgaccgtgaaggagctctacaagggcatcaatcaggctactttaagtggctgcatcgatgtaatcgtagttcagcagcaagacggctcctaccaatgttcaccctttcatgtccgcttcggtaaattaggggtactgcggagtaaagaaaaagtgatagacatagagatcaatgggtccgcagtcgatttacatatgaaactcggtgacaacggggaagcctttttcgtggaggaaaccgaagaggagtacgaaaagctcccggcttacctcgcaaccagccctattcccaccgaagaccaattttttaaagacatagatacaccactcgtgaaatccgggggcgacgagactccctctcagagttccgacatctcccacgtcctggagaccgaaaccatcttcaccccgagttccgtgaagaaaaagaagagacgccgtaaaaagtacaagcaagactcaaagaaagaagaacaggctgccagcgccgccgcggaggacacttgtgatgtgggggtcagttcagatgacgacaagggcgcacaggccgccaggggctcttctaatgctagtttaaaggaagaggagtgcaaggaaccgcttctttttcattctggggaccactacccattgtcagacggagattggtcccccttagagaccacttaccctcaaacagcctgtcctaagagcgatagcgaattggaagtgaagcctgctgaatcactattgcggtccgagtcacatatggaatggacctggggcggtttcccggagtccactaaagtttctaagcgggagagaagcgaccaccacccccgaaccgcgacaatcaccccaagcgagaatactcactttcgcgtcattccatccgaagataatcttatctctgaggtggaaaaggatgcctctatggaagacacagtctgcacaatcgtcaaacccaagccacgggcattgggcacccagatgagtgaccccacatccgtcgccgagctccttgaaccaccgctggaatctacccagatttcttcaatgctcgatgccgatcatctccccaacgctgctttggcagaagccccctccgaatccaaaccagcagccaaagtcgactcaccgagcaaaaaaaagggggtccacaagaggtcacagcaccaaggaccggacgatatctatctcgacgacctcaagggcctggagcctgaagtcgccgcgctgtattttcctaaatccgagagtgagcccggaagtaggcaatggcccgagtccgacactttgtccgggtcacagtctccccagagtgtgggaagcgctgctgccgattccggcaccgaatgtttatccgattccgccatggatctgcccgatgttacactgagcctttgcggtggactgtccgaaaacggggagataagcaaagaaaagttcatggaacatatcataacttatcacgagtttgccgagaatcctgggcttattgacaatcctaatctcgttatccgaatatacaaccggtattataactgggctcttgccgctcccatgatcctgagtcttcaggttttccagaagtctcttccaaaggctacagttgagtcttgggttaaggacaaaatgcctaagaagtccggccgctggtggttttggaggaagcgggagtccatgaccaaacagctgcccgaatcaaaagaaggcaagtccgaggccccccctgcaagtgacctgccgtctagttccaaggagcccgccggagcccgccccgctgagaacgattcctcgagtgatgagggcagtcaagagctggaggagagtatcacggtcgaccctatccccaccgagcctctgtcgcacggctccactacctcctacaagaagagcctgagactgtccagtgaccagatcgcaaagttaaaacttcatgatgggcctaatgacgtggttttctctataactacccagtaccagggcacctgtcggtgtgccggcaccatttatctctggaattggaacgacaagattattatctctgacatagacgggacaatcactaaatctgacgcactgggtcagatcctcccccagctcggcaaagactggactcaccagggcatcgctaagttgtatcatagcatcaatgaaaatggctacaagttcttatactgctctgcccgggcaatcggaatggcagatatgaccagggggtatctccattgggtgaacgataaaggaactattttgccccggggtccgctgatgttgagcccctctagcctgttcagtgccttccaccgcgaagtcatcgagaagaaacccgagaaattcaagatcgagtgtctcaacgacatcaagaatctcttcgcaccaagcaaacagccattctacgccgctttcggtaatagacccaacgatgtctacgcttatacccaggtgggggttccagattgtcggatctttacggttaaccccaagggagagcttatccaggagagaaccaaaggcaacaagtcaagctaccatagattgagcgaactggtggagcacgtctttccactgttaagtaaggaacagaacagcgccttcccatgccccgagttttcaagcttttgctattggagggatcctatccctgaagtggaccttgatgaccttagttag

SEQ ID NO: 122646 - DNA, 702 bp, synthetic construct
  misc_feature 1..702: note = Description of Artificial Sequence: Synthetic coding sequence
  source 1..702: mol_type = other DNA
atgaactatgtgggccagctggcaggacaggttatcgtgaccgtcaaggaactctataagggcattaatcaggctacactatccggctgtatcgatgtcatcgtggtgcagcagcaagacgggtcataccagtgcagccctttccatgtccgcttcggtaagcttggggtgctgcggtctaaagagaaggtgattgacatcgagataaacgggagtgctgtggaccttcacatgaagctcggggataacggggaagccttcttcgtcgaggaaacggaagaggagtatgaaaaacttccagcgtatttagcaacctcaccaatcccgacggaggaccaatttttcaaggatatcgatacgccgttagtcaaaagcgggggcgacgaaacgccctcccaatcatccgacatctcccacgtgttagaaaccgaaactatttttacccccagcagtgtgaaaaaaaaaaaacggcgcaggaagaagtataaacaggattccaaaaaagaggagcaggccgcttctgcggctgccgaggacacatgcgacgtgggtgttagcagcgatgacgataagggcgcgcaggcggctcgtggctcaagcaatgcctccctgaaggaggaagaatgcaaggagcccctgctattccacagcggggatcattatccattatcagatggcgattggtcccccctggagacctag

SEQ ID NO: 122647 - DNA, 2556 bp, synthetic construct
  misc_feature 1..2556: note = Description of Artificial Sequence: Synthetic coding sequence
  source 1..2556: mol_type = other DNA
atgaactacgtgggccagcttgctgaaaccgttttcggtactgtgaaagagctgtaccgtgggctaaatccggcaaccctgagtgggggcatcgacgtgctggtggtgaagcaggtggacggatcatttaggtgctcacctttccatgtcaggttcggcaagcttggagtgttgaggtcccgggagaaggtcgttgatattgaacttaacggagaacctgtggatttacacatgaagctgggagactccggtgaagcattctttgtccaggaactggagagtgatgatgagcatgtcccgccagggctgtgcacatcgccaatcccctgggggggattgtcgggctttccttcggattcccagctaggcactgccagtgagccggaaggcctggtgatggcaggcactgccagtactggcagaaggaagcgcaggcgccgccgaaagcctaaacagaaagaagatgccgttgccactgattccagcccggaggagttagaggccggcgcagaaagcgaattgtctctgcctgagaagcttcgcccagaacctcctggagttcagttggaggagaagtcctccctgcagcctaaggacatatacccttactctgacggtgagtggccccctcaggcctccctgagcgccggcgagctgaccagcccaaaaagcgattccgagctcgaagtgagaacccctgaaccctcgccactcagggccgagtcgcatatgcagtgggcctggggaagattgcctaaggtcgcgagggccgagcgccctgaatctagcgtggttctggaaggccgggcgggggccacatctccccccagagggggccctagcaccccttccacgagcgtagccgggggagtcgacccgttggggctgccaatccagcagacagaggcaggcgctgatttgcagccggatactgaggacccaactctggtgggcccacctctacacacccccgagaccgaggaaagcaaaacgcagtccagtggagatatggggctgccaccagcaagcaagagctggagttgggccactctggaggtccctgtccctaccggtcagcccgaaagagtgtcacgtggaaaaggctcccctaagagatcgcagcatcttgggccaagtgacatttaccttgacgatttaccaagtctggatagcgagaatgccgccctttacttcccccagagtgactctgggctgggcgccaggcggtggtcagagccctctagccagaagagtctgagagatcccaatcctgaacacgagccagagcccacattagataccgtggacaccattgccctgagtctgtgtggcggactggccgacagcagagatatttctttagaaaaatttaaccagcattccgtcagttatcaggacctgactaaaaatcctggactgctagatgatcctaacctggtcgttaagatcaacggaaaacactataattgggctgtggccgcacctatgatcttgagtctgcaagcattccagaaaaatctacctaagtcgacaatggataaactcgagagagagaagatgccacggaaaggcggacgctggtggttttcttggaggcgtagggacttcctggcagaggagaggtctgcccagaaagagaaaacagctgctaaagaacagcagggggagaagacagaggtattgtcttcagacgacgacgcacctgactcccccgtgattctggagattccctctttgcctccctcaacaccaccgtcaactccaacctacaaaaaatccctgcgtttgagctccgatcagattcgccggctgaatcttcaagagggagcaaatgacgtggtgttctctgtgactacccaataccaaggaacgtgtcgatgcaaggccactatttatctgtggaagtgggatgataaggtcgtgatcagcgacatcgacggaacaattactaaaagcgacgccctcggacacatcttaccccagctgggaaaggactggacccaccagggaataaccagcctctatcacaagatccagttaaacggatacaaattcctttactgttccgcccgcgccatcggcatggcggacttgacgaagggctacctgcaatgggtgtcagagggagggtgtagcctacccaaggggcccatcctcctctctccctcttcccttttttccgcactgcaccgagaagtgatcgaaaagaaaccagaagtgttcaaggtggcctgcctgtccgatatccagcagctgttcttacctcacggccagcctttctacgccgcttttggcaatagacctaacgacgtgtttgcctacaggcaagtcggcctgcccgaatcaaggatttttaccgtcaatccgcggggcgagctaattcaggagctgattaagaaccacaaaagtacatatgagaggcttggcgaagtggtagaactgctctttccacctgtggcaaggggcccttccaccgacctggctaatccagagtacagcaatttttgttactggagggagccgctgcctgctgtggatctcgatacgctcgattag

SEQ ID NO: 122648 - DNA, 1242 bp, synthetic construct
  misc_feature 1..1242: note = Description of Artificial Sequence: Synthetic coding sequence
  source 1..1242: mol_type = other DNA
atgggcctgccaccagctagcaaatcttggagctgggctacactagaagttcctgtgcctactgggcagcccgaaagagtgtcaagaggcaaaggaagcccaaagaggtctcagcatctcggccccagtgacatctatctggatgatcttccttctttggactctgaaaatgccgccctgtatttccctcaatcggactctggcctgggcgccaggaggtggtccgaaccctccagtcagaagagtctgcgggaccccaaccccgagcacgaacccgagcccactctggatacagtggatactatagctctgtcactatgtggcgggctggcggacagcagagacataagcctggagaagttcaaccagcacagcgtgagttatcaggatttgaccaaaaaccccggccttctggatgaccctaatcttgtggttaagattaacggtaagcattacaactgggcggtcgctgccccaatgattctcagcctccaggctttccaaaagaatctacctaagcggtctgcacagaaggaaaagacggcagctaaggaacaacagggggagaagacggaggtcttgtcctctgatgatgacgccccagactccccagttattctggagattccctccttgcctccatccacccctccgagtaccccaacatataagaaaagtctgagactgtcatctgaccagatccggcgtctgaatctccaggagggagcgaacgatgtagtatttagtgttaccacccagtatcagggtacctgtagatgcaaggcaaccatctatctgtggaaatgggacgacaaggtggttatctcagacattgacggaacaattaccaaaagtgatgcccttgggcatattttgccccagttgggaaaagattggacccaccagggcattacctcactctaccacaaaatccagttgaatgggtataaattcctctattgttctgctcgcgccataggcatggcggatctgactaagggatacctccagtgggttagcgaaggtggctgttctctaccaaagggcccaattctgctgtcgcctagttccctcttcagtgcgctgcaccgggaagtaattgagaaaaagccagaagtgtttaaggtcgcttgcctgtccgacatccagcaactgttcttgccccatggtcagccattttatgccgcattcggaaatcggcctaacgatgtgttcgcctaccggcaggtggggcttccttag

SEQ ID NO: 122649 - DNA, 813 bp, synthetic construct
  misc_feature 1..813: note = Description of Artificial Sequence: Synthetic coding sequence
  source 1..813: mol_type = other DNA
taagtcaagataaacggtaaacattacaactgggccgtggctgctcccatgatcctgtctctgcaggctttccagaagaacctgcccaaacgcagcgcgcagaaagaaaaaacggccgccaaagaacagcagggggaaaaaactgaagtcctttcatccgacgatgacgctccggatagccccgtaattctcgaaataccatctctacctcccagtacacctccaagtactccgacatataaaaaatcattaagattgagcagtgatcaaattagaagactgaatctccaagaaggcgccaatgacgtggtattcagcgtcaccacgcagtatcaggggacttgccgctgtaaggcgacgatctacctctggaagtgggatgacaaggtggtaatatccgatatcgatggaacaatcacgaagtctgatgctctgggacatattctcccacagcttggaaaggactggacccatcagggaataacttcactataccacaaaattcagctgaacggctacaagttcctgtattgctccgcccgcgccatcggcatggcagaccttacgaaggggtacctgcaatgggtgtctgaagggggatgcagtctgccaaaaggtcccatattactatctccatcatccctcttctccgccctgcaccgggaggttatcgagaaaaagcctgaggtgttcaaagttgcgtgtctgagcgatattcagcagctattcttaccccacggtcaacctttctacgccgctttcggcaacagaccgaatgacgttttcgcgtatcgccaggtcggcctgccatag

SEQ ID NO: 122650 - DNA, 531 bp, synthetic construct
  misc_feature 1..531: note = Description of Artificial Sequence: Synthetic coding sequence
  source 1..531: mol_type = other DNA
atgaagcccctgctgttggccgtgtctctcgggttaatagctgctctccaagcacaccatcttcttgctagtgacgaagaaatccaggatgtaagcggtacctggtacttgaaagcaatgacagtggacagagaattcccggaaatgaatctcgagagtgtcacccccatgacactgaccaccctcgagggaggcaacttggaagctaaagtcaccatgttgattagcgggagatgtcaggaggtaaaagccgtgctagaaaaaacagatgagccgggaaagtacaccgctgacggaggtaagcatgtggcttacatcatccggagccacgtgaaggatcattatatcttttactgcgaaggtgagctgcatggaaagcccgtaagaggtgttaagttggtgggacgagatcctaaaaacaatttagaggccctcgaagactttgaaaaagccgcgggcgccaggggacttagtacagagtcgatactcattccccgacagtccgagacctgtagccccgggtccgattag

SEQ ID NO: 122651 - DNA, 531 bp, synthetic construct
  misc_feature 1..531: note = Description of Artificial Sequence: Synthetic coding sequence
  source 1..531: mol_type = other DNA
atgaaaccactcttgctagccgttagtcttggcttaatcgcggctctgcaggcccatcatctgctggcctccgacgaggagattcaggacgtgtctggcacatggtacttaaaggcgatgactgtggaccgcgagttcccagaaatgaatcttgagagcgtgactcccatgacattaacaactctggagggcggaaatctggaagcaaaagtgacaatgctgatatccggccgctgccaagaggtcaaagccgttctggaaaagacagacgagccggggaaatacaccgcggacggtgggaaacatgtagcttatattatcaggtcacacgtgaaggaccactatatcttttattgcgaaggggaactgcatggaaagcctgtgcgaggagttaagcttgtcggcagagaccccaagaacaatctggaagccctcgaggatttcgagaaagcagctggtgctcgtggtttaagtaccgagtcgatcctgattcctaggcaaagtgaaacgtgttctccaggatccgattag

SEQ ID NO: 122652 - DNA, 564 bp, synthetic construct
  misc_feature 1..564: note = Description of Artificial Sequence: Synthetic coding sequence
  source 1..564: mol_type = other DNA
atgcgtcagggattgctagtcctggccctagttctcgttctggttctcgtgctcgccgctggttctcaggtccaggagtggtacccacgggagagtcatgcactgaattggaataagttctccggcttttggtacatcctggctacagccaccgacgcacagggctttctgcctgcccgtgataagagaaaactgggggcatccgtcgtgaaggtgaacaaagtgggccagctgcgtgtcttgcttgctttccgtcggggccagggctgcggccgcgcccagccgaggcacccgggcacctcagggcacctgtgggcgtcgttgagcgtgaagggtgttaaggctttccacgtgctttctacagactattcttatggattagtgtatctgagattgggaagagccacacagaactacaagaaccttctcctttttcaccgccagaatgtgagctcattccaatcactcaaggagttcatggatgcgtgtgatatactcggattgagcaaggctgctgtgattttgcccaaggatgcctctcgtactcacacaatccttccctag

SEQ ID NO: 122653 - DNA, 603 bp, synthetic construct
  misc_feature 1..603: note = Description of Artificial Sequence: Synthetic coding sequence
  source 1..603: mol_type = other DNA
atgagacagggacttttggtcctggccctggtgttggtcctggtgttggtgttagccgcagggtcgcaagtgcaggagtggtacccgcgggaatcgcatgctctgaactggaacaagttttcaggattctggtacatcttggcaacagcgactgacgcccaggggttccttcccgctcgcgacaagagaaaactgggcgccagtgtcgtgaaagtgaataaggtgggtcagctccgggtgctgctcgcattccgaaggctgaaaggctgccagagccaggaggtgatcctgcgcaaagatggcaagaaacccgtattcgggaacgcctgcgcatatgccgctgggcctagagaaggacaggagggagttaaaggagtcaaagcattccacgtgttgtctactgactacagctatggacttgtctatctgcgattaggacgcgcaacacagaactacaagaatttactcctcttccacagacagaacgtttcctccttccaaagcttaaaagaatttatggatgcctgtgacattctgggcctttctaaggctgcagtcatcctgcccaaggacgctagtcgcactcacacaattttgccctag

SEQ ID NO: 122654 - DNA, 273 bp, synthetic construct
  misc_feature 1..273: note = Description of Artificial Sequence: Synthetic coding sequence
  source 1..273: mol_type = other DNA
accttcgaattgtcagacgatgggcgctttgaggtctggaatgcaatgacgcgcgggcaacactgcgatacatggtcttatgtgttaatcccagctgcgcaacccggccagtttaccgtcgaccacggcgtggatacacgggctggctggcctagctctggctcggcttgctgggcaggcgctgggtgttgcctgcccggccggtggacgagttccagcgcctgggcagaattacgggctagccgcatgacaaccagttcatctcaaatgtag

SEQ ID NO: 122655 - DNA, 579 bp, synthetic construct
  misc_feature 1..579: note = Description of Artificial Sequence: Synthetic coding sequence
  source 1..579: mol_type = other DNA
atgagactactgtgcggcctgtggttgtggcttagtctgttgaaagtcttacaagctcagaccccaacccccctccctctcccacccccgatgcagagttttcaagggaatcaatttcagggcgagtggtttgtgctcggtttagcggggaactcattccgacctgaacacagggcactgttaaacgcattcactgcgactttcgagctctccgatgacggtcgctttgaggtatggaatgccatgaccagggggcaacattgtgacacatggtcttacgtcttgattcccgctgcccagccagggcagttcaccgtagatcatggggttgagcccggggcagaccgggaagaaaccagggtggtggacagcgactacacccagttcgccctgatgcttagccgcaggcacaccagccgtctggccgtactccggattagcttgcttggacggtcttggctgctgcctccaggtactctggaccagttcatctgcttggggcgcgcccagggactgtcagatgacaacatagtctttcccgacgttacagggtggtcacctcaggcatcagtctgttag

SEQ ID NO: 122656 - DNA, 597 bp, synthetic construct
  misc_feature 1..597: note = Description of Artificial Sequence: Synthetic coding sequence
  source 1..597: mol_type = other DNA
atgccattaggtctcctctggctagggttagccctcctaggcgcactgcatgctcaggcacaagattctacatcggatctgattccagcccccccactatctaaggttcctctccaacagaattttcaggataaccaattccagggaaagtggtatgttgtagggctggccgggaacgccatcctgcgggaagacaaggaccctcaaaaaatgtatgccaccatctacgagctcaaagaggacaaatcctacaacgtcacgagcgtattgtttagaaaaaagaagtgtgactactggatccggacgttcgtaccaggttgtcagcctggtgagtttaccctgggaaacattaagtcctatccagggctgacaagttacctggttcgggtggtgagcacaaactacaatcaacacgccatggtattctttaagaaagtcagtcagaatcgagagtacttcaaaattacactctacggaagaaccaaggaactgaccagtgagctgaaggaaaattttatccgtttttctaagtctcttggtcttccagaaaaccacattgtgtttcctgtcccaattgaccagtgcatagatgggtag

SEQ ID NO: 122657 - DNA, 603 bp, synthetic construct
  misc_feature 1..603: note = Description of Artificial Sequence: Synthetic coding sequence
  source 1..603: mol_type = other DNA
atgccactcggactcctgtggctggggctcgccctgctgggagctcttcacgcccaggcacaggactcgactagtgatctgatacctgctccaccactgtctaaggtccctctgcagcagaatttccaagacaaccagttccaaggaaagtggtatgtggtcggactggccggtaacgcaattctgcgtgaggacaaggacccacagaagatgtacgccaccatctatgaactgaaggaggataagtcctacaatgttacatccgtccttttccgggagaaggctcagaagtgcgactactggattcggaccttcgtccctggatgtcagccaggcgagtttactcttgggaacataaagagctatcccggcctcaccagctacctggtgagagttgtgtcaacaaattacaatcaacacgctatggtatttttcaaaaaagtttcacagaaccgggagtacttcaagataaccctgtatggtaggactaaagaattgacaagtgaactgaaagagaatttcattaggttttccaagtcccttggcctgccagagaaccatattgtcttccctgtccccattgaccagtgcattgacggttag

SEQ ID NO: 122658 - DNA, 603 bp, synthetic construct
  misc_feature 1..603: note = Description of Artificial Sequence: Synthetic coding sequence
  source 1..603: mol_type = other DNA
atgccattaggactgctgtggcttgggctggcccttctcggtgcccttcacgctcaggcacaagattccacttcagacctgattcccgccccccctctcagcaaagtgccgctgcagcagaactttcaggacaaccaattccagggaaagtggtacgtagttggattagctggtaatgctattctgagagaggataaagaccctcagaagatgtacgcaacaatctatgaactgaaggaggataagtcgtacaatgtgaccagcgtcctgttccgtcagtggaaaaaaaaatgcgattactggatccgcacttttgtccctgggtgccagcccggcgaatttacgctcggaaacatcaaatcctaccccgggttgacatcttatctagtcagggtggtaagtaccaattacaaccagcatgctatggtctttttcaagaaagtcagccagaatcgggaatatttcaagattactctatatggtcggacaaaagagttgacgtccgaactgaaggaaaacttcattagattctccaagtctttgggcctgccagagaatcatattgtctttccagtcccaattgaccagtgcatcgatggttag

SEQ ID NO: 122659 - DNA, 597 bp, synthetic construct
  misc_feature 1..597: note = Description of Artificial Sequence: Synthetic coding sequence
  source 1..597: mol_type = other DNA
atgcctttagggctcctgtggctgggccttgccctgctgggtgctctgcacgcccaagcacaggactccacatctgatttgatcccggcacctcccctgtcaaaagtgcccctgcagcagaatttccaggacaaccagtttcaaggtaagtggtacgtcgtcggccttgccggcaacgctatcctccgcgaggataaggacccccagaagatgtatgcaactatatatgagctgaaggaagacaagtcttacaacgtgacctccgtgttattccggaagaaaaaatgtgactattggattagaacattcgtgcccggatgtcagccaggagaattcactctggggaatatcaagtcgtatccagggttaacaagctacctggtaagggttgtgtccaccaattataaccagcacgccatggtgttctttaagaaagtatcacaaaatcgagaatatttcaagattactttgtatggcagaaccaaggaactcactagcgagctcaaggagaatttcatccggttttccaagtcgctagggctccccgagaaccacatcgtctttcctgtgcccatcgaccagtgtattgacggttag

SEQ ID NO: 122660 - DNA, 597 bp, synthetic construct
  misc_feature 1..597: note = Description of Artificial Sequence: Synthetic coding sequence
  source 1..597: mol_type = other DNA
atgcctctggggcttctgtggcttggcctagccttgcttggcgctctgcacgcccaagcgcaagatagcacttccgacctgatcccagctccacccctgtccaaagttccactacagcagaattttcaggataaccagtttcagggtaaatggtatgtcgtggggcttgccggaaacgctattctgagggaggacaaggatcctcagaagatgtatgccaccatctatgagctgaaagaagataaatcgtataacgtgacatccgtgctgtttcggaagaaaaagtgcgattactggattcgtacatttgtgcccggctgccagcccggagagtttacacttggcaacataaaatcgtatcccggcttgacgagttacctcgtgagggtggtgtcgaccaactacaaccagcacgccatggtctttttcaagaaggtgagtcagaatagggagtacttcaagattacactgtacggtcgtaccaaagagctcacttctgagttgaaggagaactttatccggttttccaagagcttgggattgccggaaaaccacatcgtgttcccagtccccatcgggaacgggcaaagtgggtag

SEQ ID NO: 122661 - DNA, 492 bp, synthetic construct
  misc_feature 1..492: note = Description of Artificial Sequence: Synthetic coding sequence
  source 1..492: mol_type = other DNA
atgggtgggctgcttcttgcggcatttctcgctctggttagcgttcctcgggctcaggctgtgtggctgggtcgattggaccctgaacagctgctagggccctggtacgtcctagccgtggccagtcgggaaaaaggatttgctatggaaaaagatatgaaaaatgtcgtcggggtggtggtgaccctgacccccgaaaacaacttgcgcactctgtcatcgcagcacggactgggaggctgcgatcagagtgtgatggatcttatcaagcgcaacagtggatgggtgttcgagaaccctagcatcggtgtgctggagttatgggttctagcgactaactttcgagattacgccatcattttcacccagctggagttcggcgatgagccatttaacaccgttgagctctatagcctcaccgaaactgcatctcaagaagccatgggactgttcacgaagtggtcaaggtccttgggtttcctgtcacaatag

SEQ ID NO: 122662 - DNA, 459 bp, synthetic construct
  misc_feature 1..459: note = Description of Artificial Sequence: Synthetic coding sequence
  source 1..459: mol_type = other DNA
atggaagaattagacaggcagaaaatcggggggttctggcgcgaagttggcgtggctagtgaccagagccttgttttaaccgccccgaagagagtagaaggcctcttcctgactctcagcgggtcaaatctgacggtgaaggtggcttacaattctagcggctcctgcgagattgagaaaattgtagggagcgaaatagatagcaccgggaaatttgcgttcccagggcaccgcgaaatacatgtgctggatactgattatgagggttatgcaatcctccgcgtgagcctcatgtggagagggcgcaacttcagagttctcaagtacttcaccagatccctcgaggacaaggaccggctggggttttggaagttcagggaacttacggctgacacaggcctgtatttggccgcacgccctggccgctgtgcagagctactgaaagaggagctaatttag

SEQ ID NO: 122663 - DNA, 531 bp, synthetic construct
  misc_feature 1..531: note = Description of Artificial Sequence: Synthetic coding sequence
  source 1..531: mol_type = other DNA
atggccctgctcttactcagtctcggcctatccctcattgccgctcaggaatttgacccccatacggtaatgcagagaaactacaatgtggcacgggtcagcggggtctggtactccatattcatggcctctgatgatcttaacaggatcaaagaaaatggggatctgcgagtattcgtccgcaatattgagcacctgaagaacggctccttgatcttcgattttgagtacatggtgcaaggggaatgcgtggccgtggtggtagtgtgtgagaagacagagaagaacggtgagtacagtataaactacgaaggccagaacaccgtcgccgtgagcgagaccgactacagattatttatcactttccacctccagaatttccggaacggcaccgaaacacatactctggctttgtacgagacctgcgagaagtacgggctcgggtcgcagaatatcattgacctgacaaacaaggacccctgttattctaaacattaccgctctcccccacgaccgcccatgcggtggtag

SEQ ID NO: 122664 - DNA, 1119 bp, synthetic construct
  misc_feature 1..1119: note = Description of Artificial Sequence: Synthetic coding sequence
  source 1..1119: mol_type = other DNA
atgtccctacggtgcggggacgccgcccggacactaggcccccgggtcttcgggcgttacttctgtagtcccgtccggcctctttcctcccttcccgacaagaagaaggaactgctccagaatggccccgaccttcaggatttcgtctcaggagatttggccgatcgtagcacctgggacgagtataaaggcaacctgaaaagacagaaaggagagagactgcgactccccccttggctcaaaactgagataccgatgggtaagaactacaataagctaaagaacaccttgcggaaccttaatttgcatactgtgtgtgaggaggcccgatgcccaaatattggggagtgctggggaggaggagaatatgctacagctactgccacaattatgctgatgggagacacctgcacgcggggctgcaggttctgttccgtaaaaactgcaagaaaccctccaccacttgacgcaagcgagccctacaatacagcgaaagcaattgccgagtggggactcgattacgtggtgcttacttcagtggaccgggacgacatgccagatgggggtgctgaacacatcgcaaagacagtaagctatcttaaagaaagaaaccccaaaatcctagtagagtgcctcactcccgacttcagaggagacctgaaagctatagagaaggtcgctctctctgggctggatgtctacgctcacaatgtggaaaccgtgccagagcttcaatcaaaagtcagggatcctagggccaacttcgaccaaagtcttcgcgttctgaagcacgctaaaaaagtccagcccgatgtgattagcaaaactagcatcatgctcggccttggggagaacgatgagcaagtttacgcaacaatgaaggcattaagagaggcagatgtggactgtctgacattgggccaatatatgcagcctactcgaagacatctgaaggtcgaagagtatattacccctgaaaaattcaagtattgggaaaaagtcggaaatgagcttgggtttcattacacggcaagcggaccattggtcagaagctcatacaaagcaggcgagtttttcttgaaaaacctcgtggccaaacgaaagaccaaagacttatag

SEQ ID NO: 122665 - DNA, 969 bp, synthetic construct
  misc_feature 1..969: note = Description of Artificial Sequence: Synthetic coding sequence
  source 1..969: mol_type = other DNA
atgagcctgaggtgtggcgatgccgcccggaccttaggacctagggtgtttggcaggtacttctgttcaccagtaaggccgctgtccagtctgcccgacaagaagaaggagctgctgcagaacggcccagatctccaggatttcgtgtctggagatttagctgacagatccacctgggatgagtataagggcaacttgaaacggcagaaaggggagcgtctgcggttgccaccgtggctcaaaactgagatcccaatggggaaaaattataacaaactgaaaaacacactgcggaacctgaacctgcatacggtctgcgaggaggcccgatgcccaaacatcggggaatgttggggtggcggagaatatgccaccgcgacggcaacgatcatgttaatgggtgatacatgtacccgtggatgccggttctgctccgtgaaaacagcacggaaccccccccctttggacgccagtgaaccttacaatacagccaaagctattgccgaatggggcttggattacgtcgtgctgacaagtgtggatcgcgacgatatgccagatggcggcgctgagcacatagccaaaacagtctcttaccttaaggagcggaatcccaaaattttggtcgagtgtctcactccggactttcggggagatctgaaagctatcgagaaagtagccctgtctggtctggatgtttacgcacacaatgtcgagactgtccctgagctgcagagcaaggttcgagaccccagagcaaacttcgatcagtccctgagggtgctgaagcacgctaaaaaggttcagcctgacgtaatcagcaaaacctctatcatgctcggcctgggcgagaacgatgaacaggtctacgcgaccatgaaggctttgagggaggctgacgtggattgtctcactctcggtcaatacatgcagcccacccgcaggcacctgaaggtgaacttctcctag

SEQ ID NO: 122666 - DNA, 603 bp, synthetic construct
  misc_feature 1..603: note = Description of Artificial Sequence: Synthetic coding sequence
  source 1..603: mol_type = other DNA
atggcttccagtctcacatgcaccggagtcatctgggccctattaagcttcctgtgcgctgccacctcctgcgtgggctttttcatgccatactggctctggggctctcagctaggaaagccggtaagttttgggacgttccggaggtgcagctatccggtgcacgatgaaagccggcagatgatggtcatggtggaggaatgtggaaggtacgcaagtttccaaggaattccaagcgccgaatggaggatctgtaccatcgtgactggattgggttgtggccttctgttgctggtggcacttactgcactgatgggttgctgtgtctctgaccttatctcccgtaccgtggggcgcgtcgccggtggaatccagtttctagggggtctgttaataggagctgggtgtgccttgtaccctctcggctgggattcagaagaagtgcgccagacttgcggctatacatcagggcagttcgatttgggcaaatgtgaaatagggtgggcctattactgtactggagccggggctacagcggctatgcttctgtgtacctggctggcttgtttctcaggcaaaaagcaaaagcattacccctactag

SEQ ID NO: 122667 - DNA, 663 bp, synthetic construct
  misc_feature 1..663: note = Description of Artificial Sequence: Synthetic coding sequence
  source 1..663: mol_type = other DNA
atgaggtcgagcctcactatggtgggcaccctctgggccttcttaagcctggttactgccgttacatcatctacaagttatttcctgccgtattggttgtttggcagccaaatggggaaacccgtttcattctctacctttagacggtgcaactacccagttcgtggggaaggtcacagtctgattatggtcgaggaatgcgggcgctacgcatccttcaatgccatcccctccttagcctggcaaatgtgtactgtagttacgggggccggttgcgccctactcctacttgttgctctcgccgcagtattggggtgttgtatggaggagcttatttcccggatgatgggtagatgtatgggcgctgcccagtttgtcggtggtctgctcatctctagtgggtgtgctctgtatcctctaggctggaactcacctgagattatgcaaacctgtgggaacgtgagtaaccagttccagttgggtacttgtcggctaggctgggcttattactgtgccgggggcggcgccgccgcagctatgctgatttgcacctggttaagctgtttcgcgggtaggaacccaaagcctgtaatcttggtggaaagtataatgcgcaacaccaactcatacgcaatggaattggatcattgcctgaaaccctag

SEQ ID NO: 122668 - DNA, 564 bp, synthetic construct
  misc_feature 1..564: note = Description of Artificial Sequence: Synthetic coding sequence
  source 1..564: mol_type = other DNA
atgcggtcctctttaaccatggtcgggacactgtgggctttcctgagtttggttacagcggttaccagcagtacatcctacttcttgccctattggctctttgggtcccagatgggcaaacccgtgtcattcagcacctttagacggtgtaactatccagtgcggggggaggggcactccctgatcatggttgaagaatgcggcagatacgcaagcttcaacgctattccttccctagcctggcagatgtgtaccgtcgtcacaggcgctgggtgcgctttgctgcttctcgttgctcttgctgctgtccttggatgctgtatggaggaacttatcagtagaatgatgggcaggtgcatgggagctgctcaattcgtgggcggaacctgtcgattgggatgggcgtattattgcgcaggaggaggcgccgccgctgccatgctcatatgcacgtggttgtcttgcttcgccggtcgaaatccaaaacctgtgattctagtcgagagcattatgcggaatacaaatagttacgccatggagctggaccactgtcttaaaccttag

SEQ ID NO: 122669 - DNA, 687 bp, synthetic construct
  misc_feature 1..687: note = Description of Artificial Sequence: Synthetic coding sequence
  source 1..687: mol_type = other DNA
atgtgccatgtcattgtaacatgcagatcgatgctttggaccctcttgtcaatcgtggtagcctttgccgaattgattgcttttatgtcagcagactggctaattggcaaagccaggtcccgcggcggcgtggagcccgctgggccgggaggtggctcaccagagccttaccaccccacactgggcatctacgcgaggtgtatccgcaatcctggtgtgcagcattttcaacgtgacaccctgtgcggcccctatgcagagagtttcggagagatagcttctggtttctggcaggcaaccgccatatttctggccgtgggcatcttcattctgtgcatggtcgccttggtgagcgtgttcacaatgtgcgttcagagtatcatgaagaaatccatctttaatgtctgcggtttgttgcaaggaattgccggtttatttctgattcttggccttattttatatccggccggctgggggtgccagaaggccatcgactactgcgggcattacgcaagtgcctataaacctggcgactgctccctcggctgggcattttatactgctattgggggcaccgtgctgacgtttatctgcgctgtgttctctgcccaggccgagatcgcgaccagcagcgacaaggtgcaagaggagattgaagagggtaaaaatctcatctgcctgctgtag

SEQ ID NO: 122670 - DNA, 687 bp, synthetic construct
  misc_feature 1..687: note = Description of Artificial Sequence: Synthetic coding sequence
  source 1..687: mol_type = other DNA
atgtgccacgtgattgtcacatgtagatctatgctttggaccctgctgtccatagtggtcgcttttgcggagcttattgcattcatgtctgccgattggttgattggcaaagccagatcacgagggggggtggaacccgcaggccccggtggtggttctccagagccctaccatcctaccctggggatttatgcccgttgtattcgaaacccaggcgtacaacacttccagagggataccctgtgtggtccttatgcagaatccttcggagagatcgcttccgggttctggcaggccaccgcgatatttttggccgtcgggatatttattctttgcatggtcgccctggtgagtgtcttcaccatgtgtgttcagagcataatgaaaaaaagtatctttaacgtatgcggtttgcttcagggcatagctgggttgtttttaatcctgggactgatcctgtacccagctggctggggctgccagaaggcgatcgattactgtggccactacgcgagcgcatacaagccaggagattgcagtctggggtgggcgttttatacggctataggcggcacggtgctgacgtttatatgtgcagtcttcagcgcccaggccgagatagcaacgagttctgacaaagtccaggaggaaatcgaggagggtaagaatttgatctgcctcttgtag

SEQ ID NO: 122671 - DNA, 669 bp, synthetic construct
  misc_feature 1..669: note = Description of Artificial Sequence: Synthetic coding sequence
  source 1..669: mol_type = other DNA
atgctacccgcacaagaagccgcaaaactctatcacaccaactatgtaaggaactcccgggctatcggcgttctgtgggcaatcttcacaatttgtttcgccatcgtcaacgtagtgtgtttcatccaaccttactggatcggagacggagtggataccccacaggcggggtactttgggttatttcattactgtatcggaaacggcttctccagggagctcacttgcagggggtccttcaccgattttagcacactgccaagcggggcttttaaggccgccagttttttcattggccttagcatgatgctcattatcgcttgtataatatgcttcactttattctttttctgtaatacggcaacggtctacaagatctgcgcatggatgcagcttacatccgcagcgtgccttgtgctcgggtgcatgatcttccctgacgggtgggattccgacgaggtcaaacgcatgtgcggcgaaaaaacagacaagtataccctgggggcctgctctgtgagatgggcttatatcctggctatcatagggatcctggatgccttgatactgtccttccttgccttcgtgctgggtaacagacaggactccctcatggcggaggagctcaaggccgagaacaaagtactgctttctcagtacagcctagaatag

SEQ ID NO: 122672 - DNA, 711 bp, synthetic construct
  misc_feature 1..711: note = Description of Artificial Sequence: Synthetic coding sequence
  source 1..711: mol_type = other DNA
atgccaggagccgccgccgctgctgctgctgccgcagcagcaatgctccccgcacaggaggccgcaaagctctaccacaccaactatgttcggaacagccgcgctatcggagtactatgggcaatcttcaccatatgtttcgctatcgtcaacgtcgtgtgcttcatccaaccgtattggatcggagacggcgtggatactccccaagcgggatactttggcctgtttcactactgcataggcaatggcttttctagagagctcacctgccggggttcctttacagacttttcaacgctgcctagtggtgcttttaaggccgccagctttttcatcggactttctatgatgctgataatagcatgcatcatatgttttacactgttcttcttttgtaataccgcaaccgtttacaagatttgtgcctggatgcagcttacctctggggattgcctggtgttgtttgacttgcattttccagacgggtgggatagcgatgaggtgaagcgcatgtgcggtgagaagactgataagtacaccctgggggcttgctccgtgagatgggcctacatcctcgccataataggaattttagacgccttgatcctgtcttttctggccttcgtgctgggcaaccggcaagacagcctgatggcggaagagctgaaggccgaaaacaaagttctactatcccagtacagtctcgagtag

SEQ ID NO: 122673 - DNA, 699 bp, synthetic construct
  misc_feature 1..699: note = Description of Artificial Sequence: Synthetic coding sequence
  source 1..699: mol_type = other DNA
atgccaggtgcagcagccgctgccgcagccgctgctgcagccatgcttcccgcacaggaagccgcaaaactctaccacacgaattacgtcaggaactcgagagcgattggcgttctgtgggccatctttaccatctgtttcgccatcgttaacgtggtgtgtttcatccagccttattggatcggagatggtgttgataccccccaggccggttactttggtctctttcattactgtatcggaaacggattttctagggagctgacttgtcgaggcagctttaccgatttcagtacactccccagtggggccttcaaagccgcttctttcttcatcggcttatctatgatgctgataatcgcctgtattatttgcttcactctgttcttcttctgtaacaccgctactgtatataaaatttgtgcctggatgcagctgacttcaggcgactgtcttgtcctgtttgacctccattttcctgatggttgggatagtgatgaagtcaagcggatgtgtggagagaaaacagacaagtataccttaggagcttgttcggtgaggtgggcgtacattttggccatcatcggcatcctggatgccttaatcttaagttttttggctttcgtcctgggtaatcgccaggacagcctgatggcagaagaacttaaggctgaaaacaaggacgacgggaacgcctag

SEQ ID NO: 122674 - DNA, 660 bp, synthetic construct
  misc_feature 1..660: note = Description of Artificial Sequence: Synthetic coding sequence
  source 1..660: mol_type = other DNA
atggtgaaactcctgccagcacaggaggccgctaaaatctatcatacaaactatgtcagaaatagtcgtgccgtgggcgtgatgtggggcacactgacgatctgttttagcgttctggtgatggcgctttttattcagccatactggatcggtgatagtgtgaatacacctcaggccgggtactttggcctcttttcatactgcgtgggtaatgtcctgtctagcgaactgatttgcaaagggggccccctggatttcagctctattccctcgcgggccttcaagacagctatgtttttcgtggccctagggatgttccttatcataggaagcatcatttgcttttcactgttctttatatgcaacaccgctacagtgtacaagatttgcgcgtggatgcagctagcagcggccactggactgatgatcggttgcctggtgtatccagacggatgggatagttctgaggtaaggaggatgtgcggcgaacaaacgggaaaatatacacttggccactgcaccatccggtgggcttttatgcttgctatcttgagcatcggcgacgcgcttattctttcattcttggcctttgtccttggataccgccaggataagctgctgccagacgactataaagccgatgggaccgaagaagtctag

SEQ ID NO: 122675 - DNA, 660 bp, synthetic construct
  misc_feature 1..660: note = Description of Artificial Sequence: Synthetic coding sequence
  source 1..660: mol_type = other DNA
atggtgaaactgctccccgctcaggaagcggccaaaatctatcacactaattacgtcaggaactcgcgggctgtgggcgtgatgtggggcaccctgacaatatgttttagtgtgctggtcatggccttgttcatacagccttattggataggggattctgtgaataccccccaagccgggtattttggactcttcagctattgcgtcggaaatgttttatcctccgaactgatctgcaagggcggaccgctcgacttcagctcaatcccaagtagggcctttaagacagccatgtttttcgtggccttggggatgtttctgatcataggctcaataatatgcttctccctgtttttcatctgcaacaccgccacagtgtataagatttgcgcctggatgcagctggccgcagctactggcctgatgatcggatgcctggtgtacccagacgggtgggactccagtgaagtgagaagaatgtgtggagaacagacaggcaaatacacattggggcactgtaccatcaggtgggcctttatgctcgcaatcttgtcaatcggagacgccctgattttgtcctttctggcttttgtgctcggatataggcaggacaaactacttcccgacgattacaaggccgacggcactgaagaagtgtag

SEQ ID NO: 122676 - DNA, 675 bp, synthetic construct
  misc_feature 1..675: note = Description of Artificial Sequence: Synthetic coding sequence
  source 1..675: mol_type = other DNA
atgagtgtgtttggaaaacttttcggcgccggcggagggaaggctggcaaaggtggacctacccctcaggaagccatccaacggctgagggataccgaggaaatgctgagcaagaaacaagagttcttggagaagaaaatagagcaggagctgactgcagcaaagaaacacgggaccaagaataagcgggccgcgctgcaagccttaaagaggaagaaaaggtacgagaagcagttggcccagattgacgggacgctgagcactattgagtttcaacgagaagccctggaaaacgctaacacaaatacggaggtactcaagaacatgggttacgccgccaaagccatgaaagcagcacacgataacatggacatcgacaaagtggatgagctgatgcaggacattgccgaccaacaggagcttgcagaagagatttcaacggccatttctaagccggtgggtttcggagaggagttcgacgaagatgagcttatggcagagttagaggagctcgaacaggaagagctggataagaacctcttagaaatcagtggaccggaaaccgtgcctctgcccaacgtgccgtctatagcgttgccaagcaaaccggccaagaagaaagaggaagaggatgacgacatgaaagaattggaaaactgggccggaagtatgtag

SEQ ID NO: 122677 - DNA, 1434 bp, synthetic construct
  misc_feature 1..1434: note = Description of Artificial Sequence: Synthetic coding sequence
  source 1..1434: mol_type = other DNA
atgggcgccttggcccgcgcactgccaagtatattgctcgcattgctacttacttccacccctgaggctttaggtgctaatcccggtctcgttgcgcgcattacagataaggggttacagtacgcagcacaggaggggctgctggccctccaatccgaattgctgcgcattacactccctgactttaccggtgatctgaggatcccacatgtcgggagagggcggtacgaatttcactcactgaacatccattcttgcgagctgctgcacagcgcactgaggcctgtgccaggccaagggctgagcctgtccatcagcgattcgtccattcgggtgcagggcagatggaaggttcgcaagtcatttttcaagctgcagggatcattcgatgtcagtgtaaagggaatttcaatttctgtcaatctcctccttggcagtgaatcaagcggccgccccaccgttaccgctagtagctgttcatccgacattgccgacgttgaagtggacatgtccggcgacctgggatggctgcttaacttgttccataaccagatcgagtcaaaattccagaaggttttggagtcacggatctgtgaaatgatccagaagagcgtgtcgtccgatcttcagccatatcttcagaccttaccagtgaccactgaaatagacagctttgcggacatcgattatagtctggtggaggcacctcgtgccactgcccaaatgctagaggttatgttcaaaggggagatctttcatagaaaccatagaagcccggtgactctactggcggctgtcatgagtctgcctgaagagcacaataagatggtctactttgctatttctgactacgttttcaataccgccagcttagtgtaccatgaagagggatacttaaatttttcaataaccgacgatatgatcccacccgactctaacatacggcttacaaccaagtccttccgaccatttgtgcccaggctggcccggctctatcctaatatgaacctggagctgcagggctccgtgccctcagccccccttctcaactttagtccaggaaatttgagcgtcgatccttatatggagattgatgctttcgtgttactcccatcaagttctaaggagcccgtcttccgcctgtcggtagccacaaatgtgagcgctaccttgaccttcaacacaagcaagataactggatttttaaagcccggcaaggttaaagtcgagttgaaggaatcaaaggtggggctttttaacgcagaactcctggaggcgctgctgaactactatatcctaaataccttctatcccaaatttaatgacaagctcgccgagggctttccactgcccctgctaaagagagtccagttgtacgatctgggcctccagatccacaaagacttcccttcgcgtagggatcaccccccttag

SEQ ID NO: 122678 - DNA, 486 bp, synthetic construct
  misc_feature 1..486: note = Description of Artificial Sequence: Synthetic coding sequence
  source 1..486: mol_type = other DNA
atgagcgtccccgggccttaccaggccgctactgggccctcatctgcgcctagtgctccaccctcatacgaagaaacggtggccgtaaactcctactacccgacaccaccagctccaatgcccggaccaaccaccggcctcgttacaggcccagatgggaagggcatgaatcccccctcctattacactcaacccgctccaatccctaataacaacccaattacagtgcagactgtatatgtgcaacaccccattacctttttggatcgccctattcaaatgtgctgtccttcctgcaataagatgatcgtgtcccaattaagctacaacgccggtgctctgacgtggctctcttgtggttctctttgcctgttagggtgtatcgcaggatgttgttttatcccgttttgtgtggatgccctccaggatgtcgaccactattgtccaaattgtagagccctgcttgggacctacaaacgcttgtag

SEQ ID NO: 122679 - DNA, 687 bp, synthetic construct
  misc_feature 1..687: note = Description of Artificial Sequence: Synthetic coding sequence
  source 1..687: mol_type = other DNA
atgtcggttccgggaccgtaccaggcggctacagggcccagctctgccccatccgctcctcctagctatgaagagacagtagctgttaactcctactacccaactccacctgccccgatgcccgggcccacaaccggtcttgtaaccgggccagatggaaaaggcatgaaccctccttcttattatacgcagcctgcccctattcccaacaacaaccccatcactgtgcagacggtctacgtgcaacacccaataacattcctcgatagaccaatccagatgtgctgcccttcctgcaacaaaatgatcgtgtcccagctctcctacaatgcaggagctctgacgtggttatcctgcggtagcctttgcttactcggagtgcattccggactcctgttgcacccgctgcttcgcgggtgcccagcagggaggggtccattactttctcaactgcagagcagcccgggtcatctgcaggcttttgtcggactatcccagacctggagagagcccggggccgccgggagtccctttcatctcagttctagttttacacctggagggggctctgctcttgtggtgagtccactacagggggcccacctacacgtgtttttctggggcgagtacgtggcaaagctgacgaacctgcagacccccgagattgccgcgtggagtcgtgcctag

SEQ ID NO: 122680 - DNA, 459 bp, synthetic construct
  misc_feature 1..459: note = Description of Artificial Sequence: Synthetic coding sequence
  source 1..459: mol_type = other DNA
atgtctgtaccaggaccctatcaggccgctaccggcccctcgtcagccccctcagctcctccgtcctacgaagaaacagtggctgtgaactcttactatcccacgccgcctgctcctatgccagggccaactaccgggctcgttaccggccctgatggcaaaggcatgaaccctccttcatattacacccagcctgccccaatccctaacaacaacccaatcacggtccagacggtgtatgttcagcatcccattacattcttggatcggccaattcagatgtgttgcccctcctgcaacaagatgattgttagccagttatcctataacgctggggccttgacttggctgtcctgtggcagcctgtgcctgttagggcaggaatgcagcgggaccatcgtggcactgcgctccttcgacctgctgggctcttgcaacccccctagttcagcctcgtag

SEQ ID NO: 122681 - DNA, 486 bp, synthetic construct
  misc_feature 1..486: note = Description of Artificial Sequence: Synthetic coding sequence
  source 1..486: mol_type = other DNA
atgtctgtccccggaccataccaagccgcaaccggccctagctccgcgccatcagcccctccctcttacgaggaaaccgtagctgtgaactcttattacccaactccacccgccccgatgcccggccccacaaccggcctcgtgacaggcccagatgggaaaggcatgaatccgccttcgtactatacccagcccgcacccatccctaataacaatcccataaccgtccagactgtttacgtacagcaccccatcacctttctcgataggccgatacagatgtgctgtccaagttgcaacaaaatgatagtttcccagctgtcttataacgcaggggccctcacgtggctgagctgtggctctctctgcttgctcggctgcatcgcaggctgctgcttcataccgttttgcgtggacgcccttcaggatgtggaccattactgcccaaattgtagagcgcttctgggcacatataaaaggctctag

SEQ ID NO: 122682 - DNA, 6123 bp, synthetic construct
  misc_feature 1..6123: note = Description of Artificial Sequence: Synthetic coding sequence
  source 1..6123: mol_type = other DNA
atggaacacaaagaagtggtgctgctcctgctgctgttcctgaaaagtgcggcaccagagcagagccatgtggtacaagattgttaccatggcgacggacagagttacaggggaacctattccacaacagtcaccggccggacctgccaagcatggtcttctatgacccctcatcagcataatcgcactacagagaactatccaaatgctggcctgattatgaattactgtcgcaatcccgacgcggttgcagctccttactgttatacaagagatccaggtgtacggtgggaatactgcaatttgacgcagtgctctgacgccgagggaactgctgttgccccccctactgtgactcctgtgccctccttggaggctccctcggagcaggctcccactgagcaacggcccggagtccaggagtgttaccacggaaatggtcagtcctatcgcggaacctactccacgacagttactgggagaacttgccaagcatggagtagcatgaccccgcacagccattcaagaactcccgagtactacccaaacgccggactcatcatgaattactgccgaaacccagatgcggtcgccgccccatactgctatactagggatcctggggtgcggtgggaatactgcaacctcacacagtgcagtgatgcagagggtacagcagttgctccaccaactgtgaccccggtgccatcattggaggccccaagtgaacaagcccctacagaacagcggcccggagttcaggaatgttaccacggcaacgggcaatcttatagaggcacctattctaccaccgtcacaggcagaacgtgccaggcctggtcatccatgaccccccattcccattcgagaacaccagaatattatcctaatgccggactgataatgaactactgtcggaatccagacgcagttgccgccccatactgctacacccgtgatccaggcgtgaggtgggagtactgcaacttgacacagtgctctgacgctgaagggacggcagtggctccaccaaccgtgacccctgtgccctcattagaggccccttccgaacaggctccaaccgagcagagaccaggggtccaggaatgctaccacggcaacgggcaatcttacaggggcacgtactccacaactgtgaccggccgaacctgtcaggcctggtcttccatgactccccactcccactccagaactccagaatattatcctaacgctggccttattatgaactactgtaggaaccccgatgcggtggctgcgccctactgttacacccgagatccaggcgtgaggtgggaatattgcaacttgacacagtgcagcgatgctgagggaaccgccgtggcacctccaaccgtgacaccagtgccatctttggaagcaccatcagagcaggcccccaccgagcagaggcctggtgtgcaggagtgttatcacgggaacggacaatcttaccgagggacatattcaaccaccgttacagggcgcacatgtcaggcctggtcctccatgacaccacactcccactctcggacccctgagtattaccctaacgcaggcctgatcatgaattattgtcgcaaccccgatgccgtcgcagccccctactgctatacccgggatccaggagtccgatgggaatactgcaatctaacgcagtgcagcgacgctgagggcactgccgtggctccccctactgtgactcccgtcccaagcctcgaagctccgtccgagcaagccccaacggagcaaaggcctggggtgcaggaatgctaccatggcaatggccaatcgtataggggcacgtattccactaccgtaacgggcagaacttgtcaagcatggagttctatgacaccacatagccatagcaggacccccgagtattaccctaacgccggcctgataatgaactattgcaggaaccccgatgccgtagctgcgccttactgctacacaagagaccccggggtccgatgggaatactgcaatctaacccagtgttccgatgcggagggcacggcagttgctccacccaccgtaactcctgtaccaagcctggaggcccccagtgagcaggctcccacggagcagcgcccgggtgtgcaggagtgttaccatggaaatggccaatcctaccggggaacgtacagcacaacggtgactggcaggacctgccaggcttggtcgagcatgacgccacacagtcatagcagaaccccagagtattatcctaatgcaggactgattatgaactattgtcgcaatcctgacgcggttgcggccccctactgctatacacgggaccccggggtgcgctgggaatactgtaatctgacccagtgcagtgatgccgagggcaccgcagtggccccacccacagtgactccggtgcccagcctcgaagccccatccgagcaggcccctactgaacaacgtccgggagtgcaggaatgctatcacggcaatggacagtcctaccgcgggacatattctaccacggtgaccggacgaacatgccaggcgtggagttccatgacaccccacagtcatagtcggacgcccgagtactacccaaacgcagggctcatcatgaactattgcagaaatccagatccggtggccgcaccctattgttacactcgcgatccttcagtgaggtgggagtactgtaacctgacccagtgttccgatgccgaggggactgcagtggcccctccgacaataactccgattccaagtttggaggccccctctgaacaggccccaaccgagcagagacccggggtacaggagtgttaccatggaaatggccagagctaccaaggaacttattttataaccgtgacaggaagaacatgtcaggcatggtctagcatgacgccccactctcatagccgtacaccagcttattatcctaacgccgggttgatcaaaaactactgtcgaaaccccgatcctgtggctgcaccgtggtgctacaccacagatccatctgtccgctgggagtactgtaacctcacaaggtgcagcgatgcggagtggaccgcttttgtgccacccaatgtgattctggcacccagcctggaggccttctttgaacaggccttaacggaggagacgcctggggtacaggactgctactatcactacggtcagtcctatcgcggaacgtattccaccaccgtcaccggtcgcacatgccaggcctggagcagcatgacacctcatcagcactcaagaacaccggaaaactatccaaacgccgggctgacccggaactattgcaggaaccctgacgccgaaattcgcccttggtgttacaccatggacccatcagtccgctgggagtactgtaacttaactcaatgtctagtcaccgagagttcggtgttagctacgttaacggtcgtgccagacccttccactgaggcctctagtgaggaggcaccgaccgaacagtcccccggcgtgcaggactgctaccacggtgatggacagtcttacagggggtccttctcaacaacagtgaccgggcgcacatgtcagagttggagcagtatgacgccccactggcaccaaaggactactgaatactatcctaacggcgggctaacacggaattactgccgtaatcccgacgccgaaatttcaccctggtgctacaccatggaccccaatgtaagatgggagtattgcaatctgactcaatgccccgtgacggagagctctgttctggccactagcacggcagtctctgagcaggctccgaccgaacagtcccctaccgtacaggattgctatcatggagatggccagagttaccgcggatccttttccacaactgtgaccgggcggacttgtcaatcatggtcctctatgacacctcattggcatcagcgtacaaccgagtactacccaaacggtggtctgactaggaactattgcagaaatcctgacgccgaaatcaggccgtggtgctatacgatggaccctagcgtacggtgggaatactgtaatcttactcagtgtccagtcatggaatcaaccctgttgacaactcccactgttgtgcctgtgccttccacagagctgcctagcgaagaagcccccacggaaaattccacaggagtccaagattgttatcggggggacggacagagctatcgagggaccctgtccaccactatcaccggacgcacctgccagtcatggtcatccatgacaccccattggcacagaagaatcccgctgtattaccctaatgcaggcctcaccaggaattattgtcgcaatcctgatgcggagatcagaccatggtgctacaccatggatccaagcgtgcggtgggagtattgcaacctcacccgatgccctgtcacagagagtagtgtgttaaccacacccaccgtggccccagtaccttctaccgaagcacctagcgaacaggctccccccgaaaagagccctgtggttcaagattgctatcatggagacggaaggtcctaccggggcatctcatccacgaccgtaacaggacggacctgtcaatcatggagcagcatgatccctcactggcaccagagaacacctgagaactaccctaacgcgggcctcacagaaaactattgtagaaatcctgactcaggcaaacaaccatggtgctacaccacagacccatgtgtgcgctgggagtactgcaatctgacccaatgctctgaaacggaatccggggttctggagacaccaaccgtggtaccggtgccttctatggaagctcatagcgaggctgccccaactgaacagacgcccgtcgttagacagtgctaccacggtaatggacaatcttacagagggacattctccacaacagtgacagggaggacctgtcaaagctggtctagcatgaccccccaccgtcatcagaggaccccagagaactatcctaacgacggcctgaccatgaactactgccggaatcctgatgcagataccgggccttggtgcttcacaatggatccatccattcgatgggagtattgtaatctaaccagatgttccgacacagaagggaccgtcgtcgctccacctacagtgatacaggtcccctccctggggcctccatcagagcaggactgcatgtttggaaacggtaaaggttatagagggaagaaggccactactgtcaccggcaccccctgccaggaatgggccgctcaggagccccacagacatagtacattcataccaggcaccaataagtgggcagggctcgaaaaaaattactgcaggaatcctgacggagatatcaacggcccctggtgctacaccatgaatcctcgcaagcttttcgactactgtgacatacccttgtgcgccagttcaagctttgactgcggtaagccccaggttgaaccaaagaagtgtcctggatccatcgtgggtggatgcgtcgcacacccacactcctggccttggcaagtatccttgcgtaccaggtttggcaaacatttctgcggtggaactctgatcagcccagaatgggtgctgaccgccgcccattgtctgaaaaagtcctcccggccgtctagttacaaagtgatactcggggctcatcaggaggtgaatctagagtctcacgtacaggagatcgaggtgtcacgccttttcctggaaccaacccaggcagacatcgccttgctgaagctgagccggcccgcagtgataacagataaggttatgcccgcttgcctcccaagcccagattacatggtgaccgcccggaccgaatgctacataactggctggggtgagactcagggtacgtttggtacagggttgctcaaagaggcacagctgcttgtgattgagaatgaggtctgcaatcactataaatacatctgcgcagagcatcttgcccgtggcactgattcctgccagggggactctggggggcccttggtatgtttcgaaaaagacaaatatatcctgcagggggtgaccagttgggggttagggtgtgctaggccgaacaaaccgggcgtttatgccagggtatcccggtttgtcacctggattgaaggcatgatgaggaacaactag

SEQ ID NO: 122683 - DNA, 6123 bp, synthetic construct
  misc_feature 1..6123: note = Description of Artificial Sequence: Synthetic coding sequence
  source 1..6123: mol_type = other DNA
atggagcacaaggaagttgtgctgctcctgctactgttcctgaagtcggcagcgccagaacaatctcacgtggtccaggactgctatcatggggatgggcagtcatatagaggcacttactctacaacagtgacaggtcggacttgccaggcctggagttccatgacgcctcaccagcacaaccgcacaaccgaaaactaccctaacgcaggcctgattatgaattactgccggaatcccgatgctgtcgccgctccttattgctacaccagggatcctggggtgagatgggaatattgcaacctaactcagtgcagcgacgcggaaggtactgccgtcgccccccccaccgtgacacccgtcccatcactagaagccccatctgaacaggccccaacagagcagaggcctggcgtccaggagtgttatcacggcaacggacagagctatcggggaacttactccacaaccgtcactgggaggacctgccaggcatggtcttcaatgactccgcactctcactctcgcacccctgagtactaccctaacgccggccttattatgaattattgcagaaatcccgacgctgttgccgcaccctattgctacacacgggatccgggcgtcaggtgggagtattgcaatctaacacaatgctcggacgctgagggcactgcggtagcccctcccacagtcacacccgtgccctccctcgaggcaccttcagagcaggcccccaccgaacagaggccaggcgtgcaggagtgttaccatggtaacggtcagagctataggggaacctacagcaccaccgtaacagggaggacctgtcaggcatggagtagcatgaccccacattcacactcccgcacccctgaatactacccgaacgctgggcttatcatgaactactgtcggaatccagacgccgtggcagctccatattgttacacccgagaccccggggtacgttgggagtattgtaatctcacccagtgctccgacgctgagggaaccgccgtggctccacccacggtcacccccgttccctctctcgaggctccctcggagcaagcccccaccgagcaaagacccggcgtccaggagtgttaccatggcaatggtcagtcctataggggcacatattctacgactgtgacagggcgtacatgccaggcctggtccagtatgacaccccacagccattcgagaacaccggagtactaccccaacgcagggctcatcatgaattattgcaggaaccctgacgccgtcgccgctccctattgttacaccagagatcccggcgtccgctgggagtactgcaacttgactcagtgttccgacgcggagggcacagctgtcgccccccccacggtgaccccggtcccatccttggaggcaccctcggaacaggctccaaccgaacagagacccggagtgcaggagtgttaccacggaaatggacagagttacaggggaacctattccacaaccgtgaccgggcgaacttgccaggcttggagctctatgacgcctcactctcactcacgcactcctgagtattaccccaatgcgggtctgattatgaactattgcaggaaccccgatgctgtggccgcaccatactgctatacgagggatcctggggtgaggtgggagtactgtaacctcacccagtgctctgatgctgaagggacagcagtggctccaccaaccgtaacacccgtaccctctcttgaggctccctcagaacaggctcctactgaacagagacccggcgtccaggagtgttaccacggaaacggccagagctaccgggggacctatagcaccaccgtgaccggccgcacctgtcaggcatggtcatcaatgaccccacacagtcattccaggacaccggagtactatccgaatgctggcctgataatgaattactgtaggaacccagacgcagtcgcggctccatactgttataccagagatccgggcgtgcgatgggaatactgtaacttgactcaatgctctgatgccgaaggtaccgctgtggccccccccactgtgactccggtgccatccctggaagccccatcagaacaggcccctaccgagcaaaggccaggagtacaggagtgctatcacggcaatgggcagtcctacagaggaacctactccaccactgtcaccgggagaacctgtcaagcctggtcatctatgactccgcatagtcatagccgtacacctgaatattatcccaatgctggcctgatcatgaattattgtcgaaatccagatgctgtggcagctccgtattgctacacgagggaccccggagttcggtgggaatactgcaacctgactcagtgctccgacgctgaaggtaccgccgtggctccacctaccgtgactcctgtgccttcactggaagctccttcagaacaggcccccactgagcaacggccgggagtgcaggaatgttaccatggcaacggtcagtcataccgcggtacctacagtaccaccgtgacaggtcgcacatgtcaggcctggtctagtatgaccccccacagccactctagaacaccagagtactaccccaacgcaggcttgattatgaattattgtagaaaccccgatccagtagctgcaccttactgttacactcgcgatccgtccgttcgttgggaatactgtaatcttacccagtgttctgatgcagagggaaccgccgtggcacccccaaccattactcccatacccagtctcgaagcaccttccgagcaggctccaaccgaacagcgaccgggcgtacaggagtgctatcatggtaatggccagtcctaccagggaacttactttatcacagtcaccgggagaacttgccaggcttggtcaagtatgacccctcattcacactctcgaactcccgcctattaccccaatgcaggactgatcaaaaattattgccgcaaccccgacccggttgccgcgccatggtgttacacaacagaccccagcgtgagatgggagtattgcaacctgaccaggtgctccgacgcggagtggaccgcattcgtcccgcctaatgttattctcgcaccaagcctggaggcctttttcgagcaagcccttactgaggagactccaggagtccaggactgttactaccattatgggcagagttatcgtgggacatattctacaaccgtgacggggcgaacatgtcaggcatggtctagtatgactcctcatcagcactccagaactccagagaactaccccaatgcagggttgactcgaaactattgcagaaatcccgacgcagaaattcggccttggtgttataccatggatccaagtgtaaggtgggaatactgcaatctgacccagtgcctggtgaccgagagcagcgtgctggctaccctcacggtggtgcctgaccctagcactgaagcctctagtgaggaggcacccaccgaacagtctccaggtgtccaagactgctatcatggggacggtcaaagctaccgaggttccttcagcaccaccgtaacggggaggacctgtcagtcttggtctagtatgacacctcactggcaccaacgaacaacggagtattatccaaacggtggcctcactaggaattactgtagaaaccccgacgctgagatttcaccttggtgttacaccatggaccccaatgtccgctgggaatactgtaatcttactcagtgtccagtgactgagtcgtcagtgctggctacctctactgcggttagcgagcaagctcctacagagcagagcccaactgtgcaggactgctaccatggtgacggccagagctaccgaggtagcttttcgacaactgttaccgggcggacctgccaatcttggagcagcatgacacctcactggcatcagagaacaacagagtactatccaaatggcggattaaccagaaattactgccggaatccggatgctgagatccggccatggtgctatactatggatcccagtgtgaggtgggaatattgtaatctcacccaatgtcccgttatggagagtaccctgcttaccacaccaacagttgtacccgttccaagcacagaattaccttccgaagaggcccctaccgaaaatagtactggcgtacaagactgttatcgaggagatggccagagttatcgggggaccttgagcaccaccatcaccggacgcacatgccaatcatggtcatctatgaccccacattggcatcgacgcattcccttgtactaccccaatgccggactcacaaggaattactgtaggaatcctgatgctgagattaggccttggtgctacaccatggacccaagcgtgcgctgggagtattgtaacctaacgcgctgccccgtaacagaatcatcagtgctgactaccccaacagtagcccctgtaccctcgaccgaagctcctagcgaacaggcgccacccgaaaaaagccctgtagtacaggactgctaccacggagacgggagatcataccgggggatttcctctacaacggtgactggcagaacctgtcagtcttggtcgagcatgatcccccactggcatcagcggaccccagaaaactatcccaacgccgggctgaccgaaaactactgtcgcaaccctgactccggcaagcagccttggtgctataccaccgacccatgcgtccgctgggagtattgtaatctgacccagtgcagcgaaaccgaaagcggcgtgttggagaccccaaccgtggtacccgttccctccatggaagctcactcggaggctgctccaacggaacagacacctgtggtgagacaatgttatcatggcaacggccaatcttacagggggaccttttccacgacagtgacagggagaacatgccaatcctggtcatccatgacaccccatagacaccagaggacccccgaaaactacccaaacgatggtctgacaatgaattactgtaggaacccggatgccgacactggcccatggtgctttactatggacccaagcattcggtgggaatactgcaatcttactaggtgttctgataccgagggcacagtggttgcgccccctacggtgatccaagtgcccagtcttggacctccgtcagagcaggattgcatgtttggcaatgggaaaggttaccgtgggaaaaaggccaccaccgtgactggaaccccttgtcaggaatgggctgcgcaggagccccacagacattctacgtttattccgggcaccaacaaatgggccggtctggagaaaaattattgtcggaatcctgatggtgacatcaacggtccctggtgctacacaatgaaccctcggaaattgtttgactactgtgacattcccttgtgcgcaagttcgagtttcgactgcggtaaaccgcaggttgagcccaagaaatgtccaggtagtatcgtgggtggctgcgttgctcatccacatagctggccctggcaggtgtccctgaggacgcgctttggcaaacacttctgtgggggtactctaatcagccctgagtgggttctgacagccgcacattgtttaaagaagtcctcacgcccaagcagctacaaggtcatactgggagcccatcaagaggtgaatctggagtcccacgtgcaggagattgaggtgtcccgcctgttcctggaacctacccaggcagacattgccttgttaaaacttagccgccctgccgtgatcacggacaaggtgatgcctgcctgtttaccctcacccgattacatggttacagcgcggacggagtgttacattactgggtggggtgagactcaaggcacatttggcactggcttgctgaaagaggcccaactgctcgtaattgagaacgaggtgtgtaatcactacaaatacatttgcgcagagcatttggccaggggcaccgacagttgccaaggagacagtggcgggccgttagtttgcttcgaaaaagacaagtatatattgcagggcgtgacttcatgggggcttggctgtgctcggcccaataagccaggggtgtacgccagggtgagtcgattcgttacatggatcgaaggcatgatgcggaataactag

SEQ ID NO: 122684 - DNA, 4602 bp, synthetic construct
  misc_feature 1..4602: note = Description of Artificial Sequence: Synthetic coding sequence
  source 1..4602: mol_type = other DNA
atgatgcagctgacactgaacaccctctttccagtggtgtctacccccgccattacctacattgtcaccgtgtttaccggggatgtgcgtggcgctgggaccaagtcaaaaatatacctggtgatgtacggagctcgagggaataagaacagcgggaagatattcctggagggtggcgttttcgaccgggggcgcactgacatcttccacattgaactcgctgtgcttctcagcccgctgtcaagagtgagtgtgggacatggcaacgtgggcgttaacagaggctggttttgtgagaaggtggtcatactgtgcccgttcacgggtattcagcagacctttccttgttccaactggctagacgaaaagaaagccgatggtttaatcgaaagacagctttacgaaatggtctcgctgaggaagaagagactcaagaaattcccctggtctttgtgggtctggactactgatctcaaaaaagctgggacgaacagtcccatcttcatccagatatatggtcaaaaagggcgtaccgatgagatcttactcaatcctaataataagtggtttaagcccggtataattgaaaaattccgtatcgaattaccagacttgggacgattttataagattagagtctggcacgacaaaagatcttccgggagtggctggcacctggaacggatgaccctgatgaacaccctcaacaaagacaagtacaatttcaactgtaaccgctggctcgacgctaacgaggatgataatgaaatagtgcgagagatgacagctgagggcccgacagtgaggcgtattatgggtatggcccggtatcatgtcactgtgtgtaccggggagctggaaggtgccggaactgatgcgaatgtctatctctgtctgttcggagacgtcggagatactggcgagaggctcctgtataactgtcgcaacaatactgacttatttgagaaaggcaatgcggacgaatttaccatcgaaagtgtgaccatgcgaaatgtgaggagggtgagaatcagacacgacggaaaaggctcagggagcggctggtatctagatcgtgtgctcgtgcgtgaggagggacaaccagagtctgacaatgtggaatttccctgcctgcgctggctagataaggacaaggatgacgggcagttagtcagggagcttctgccatctgacagtagcgcgacccttaaaaactttcgataccatatctccctgaaaaccggggatgtgtccggcgcatcaactgactcgcgcgtttatataaagttgtacggtgataagtcagacacaataaagcaagtgctgcttgtttcagacaacaacctgaaggattattttgagagagggcgagtggatgagttcacactagagacactgaacatcggcaacatcaacaggctcgtgataggacacgattcgaccggaatgcatgctagctggtttctggggtcagttcagattagagttcctcgccaaggcaaacaatacacatttcccgctaaccggtggcttgacaagaaccaggcagacggccggctggaggtcgagctgtacccttcggaagtggtagaaatacaaaaattggtacattatgaagtcgaaatttggacgggcgatgtgggaggtgcaggtacttccgcgcgcgtttacatgcaaatttatggagagaaggggaaaaccgaggtgttattcctgtctagccgctcaaaggttttcgagagggcctccaaagacactttccaactcgaggcagcagatgttggggaagtgtacaaactccggctcgggcacactggtgaaggatttgggcctagttggttcgttgacacggtgtggctgcgtcacctcgtggtgcgcgaagttgatctcactcccgaagaggaggcccggaagaaaaaggagaaagacaaactcaggcagctgctcaagaaggagcggctgaaggctaagctgcagcgcaagaaaaaaaagaggaagggctccgatgaagaagatgaaggcgaggaagaggagagttcgagttcagaggaatcttctagtgaggaggaggaaatggaagaggaagaggaagaggaagaattcggccctggtatgcaggaggtgatcgagcagcacaaatttgaagcccacaggtggctggccaggggcaaagaggacaacgagttggtggtggagttggtgcctgccggaaaaccaggccccgaacgcaatacttatgaggttcaggtagtgaccggtaatgtgcctaaagctgggaccgacgcaaatgtgtacctgaccatttacggggaggaatacggagacactggcgaaagacctctgaaaaaatccgataaatctaacaaatttgaacagggacagacagacaccttcacgatttatgcaattgatcttggcgcattgacgaagatccgtattcgccacgataacaccggcaaccgggccggttggttcctggatagaatcgacattaccgatatgaacaacgagatcacatactacttcccctgccagcgttggctcgccgtggaagaggatgacgggcagctgtcccgcgagttactccccgtggacgagtcctacgtactgccccagagcgaggagggacggggcggcggcgataataaccccttagataatctcgccttggagcaaaaggataaatcaactacgttctcagtgactatcaagaccggcgtgaaaaagaacgcaggtaccgatgcaaatgtgttcatcactctcttcgggacccaggacgataccggtatgacactgttgaagtcttcaaagacaaactccgataagttcgagcgagatagtatcgagattttcaccgtggaaaccttggacctgggggacctctggaaggtcaggctgggccatgataacacaggaaaggcacctggatggtttgtagattgggtagaagtagacgctcctagcttggggaagtgtatgacattcccttgcggccggtggctcgccaagaatgaagatgacgggtcaattattcgtgatctgtttcatgcggagctgcaaacaagattgtatacaccattcgtgccctacgagattaccctgtacacaagcgacgtattcgccgctggaaccgacgccaacatcttcatcataatttacgggtgtgacgcagtgtgtacccagcagaaatacctgtgcaccaacaagcgggagcaaaaacagttcttcgaacggaaatcagcgtctaggttcatcgtcgagcttgaagacgtgggcgagatcattgaaaaaatccgcatcggacacaacaatactggcatgaaccctggctggcactgcagccacgtggatatccgtcgcctattacccgacaaggacggtgccgaaaccctcacatttccctgcgacaggtggttggctacatcagaggatgataagaagacaatcagggagctggtcccttacgatatctttaccgagaaatacatgaaggacggctccctcagacaggtttacaaagaagtggaggagcctctggacatcgtcttgtattcagtccagatattcacaggcaatatcccgggtgccgggactgacgccaaggtgtatatcactatctatggggacctgggcgatacaggcgagaggtatctcggaaagagcgaaaaccgcaccaacaaatttgaaagaggcaccgctgatactttcattatcgaggcggccgacctgggggtgatttacaagatcaagctgcgccacgacaacagtaaatggtgcgccgattggtacgttgaaaaggttgaaatctggaacgacacgaacgaggatgaatttttgttcttatgcggcaggtggcttagtctgaagaaggaggacggccgactggaaaggcttttctatgaaaaagagtacaccggcgacaggtccagtaactgttcttcacctgctgatttctgggagatcgccctcagttcgaagatggccgatgtggacatcagcacagtcaccgggcccatggcagactacgtgcaggagggccccataattccctactatgtatccgttaccacaggaaaacataaagacgctgccaccgattccagggcatttatctttctgatcggtgaggatgacgaacgctctaagaggatctggctggactacccaaggggcaagcgtggattcagccggggaagcgtcgaggaattctatgtggccggcctggatgtcgggattattaagaaaatcgaggtcttatatgagatgacggtgtggacaggagatgtcgtgggcggcggcactgactccaacatcttcatgactttgtacggtatcaatgggagcaccgaggaaatgcagctcgacaagaagaaggcgcgattcgaacgtgagcaaaatgatactttcatcatggagattctcgacatagcaccttttaccaaaatgcggattagaattgacggacttggttccagacccgagtggtttcttgagcgcgtgaaatgcctggatcctcattctagctttcagcctccaccaactccaagtcccgggtccagcggactcagcatggaccttgtaaaagcacagatgagcctgtag

SEQ ID NO: 122685 - DNA, 5844 bp, synthetic construct
  misc_feature 1..5844: note = Description of Artificial Sequence: Synthetic coding sequence
  source 1..5844: mol_type = other DNA
atgatgcagctcaccctgaataccctgtttcccgtggtctcaacacctgcaataacgtacatcgtgacagtatttaccggcgatgtcaggggagccggcaccaagtcgaaaatctacttggtgatgtacggagcacgaggaaacaagaattccgggaagatcttcctagagggcggcgtcttcgacagaggccggaccgacatcttccacatagaactcgcagtactgctgagcccactctcgagagtttcagttggacacggcaacgttggggtcaataggggttggttctgtgaaaaggtagtcattctttgcccttttacagggattcagcagacgtttccctgcagtaactggctggatgaaaagaaggcggacggtctgatcgagcgtcagctgtatgagatggtgtcattacgcaagaagagattaaagaaattcccgtggtccctatgggtgtggacaactgatctgaagaaagctggaaccaactctccgatcttcatccagatctatggtcaaaaaggaagaacagacgaaatcctgctaaaccctaataataagtggtttaaaccaggaatcattgaaaagttcagaattgagttgcctgacttgggccgattctataagatccgcgtctggcacgacaaacgctcgagtggttccggctggcacctcgaaaggatgacgctcatgaatacactaaataaagacaagtacaactttaattgcaaccgctggcttgatgccaatgaagacgataacgaaattgttcgcgagatgaccgccgaggggcccaccgtccgacgcatcatggggatggccaggtatcacgtaaccgtctgtactggcgaattagaaggcgctggtactgacgccaacgtttatttatgcctttttggcgatgtcggagatacaggtgaacgtctgctttacaactgcagaaacaataccgacctgtttgagaaaggaaatgcggatgaattcaccatcgaaagcgtcaccatgcggaacgtgagacgcgttcgcatcagacacgatgggaagggtagtggaagcggctggtacttagacagggtcctggtgcgggaggaagggcagcccgaatccgataatgtcgaattcccatgcttacgctggcttgataaggataaagacgatggccagcttgtcagagagctcctgccgtctgattcatctgcgactctaaagaattttaggtatcacatctctctgaagaccggcgacgtgtcaggggcctctaccgattcgcgagtatatatcaaactgtacggagacaagagtgacaccatcaaacaggtcctcctggtctctgacaataacctcaaagattacttcgaacgggggcgcgttgacgagttcaccctagagaccctcaacattggaaatatcaatcgcctcgtaataggccatgactccacgggtatgcatgcttcgtggtttctcgggtcagtgcagatcagagtcccgcgccaaggcaaacagtatacgttcccagctaataggtggcttgacaagaaccaggctgatggaagacttgaggtcgaactgtatcctagtgaggtggtagagatacaaaagctagtgcactacgaagtggagatttggacaggagacgtggggggagccgggacctcggccagagtttatatgcagatatacggtgaaaagggcaaaacggaggtgctgttcctgtcctctcgatcaaaggtttttgagagagcgtccaaggatacctttcaactagaggccgccgatgtcggcgaggtatacaagctgcggctcggacacacaggggagggcttcggccctagttggtttgtggacaccgtctggttaaggcatctggttgtgcgtgaggtggacctaacacccgaggaggaggcccgaaaaaaaaaagaaaaggacaaactccggcaattactcaagaaggagagactgaaggcaaagctccagagaaagaaaaagaagagaaaggggtccgatgaggaggacgagggcgaggaggaagaatcctctagcagtgaggaatcttcctctgaggaggaggagatggaggaagaagaggaggaagaagagttcgggcccggcatgcaggaggttattgaacagcataaatttgaggcccacagatggctagcgagaggtaaggaagataacgaactggtggtggaactcgtccctgccggcaagcccgggcccgaaagaaacacatacgaagtacaggtggtcacaggaaatgtcccgaaagcaggcactgatgccaatgtatatctgacaatctatggtgaggagtacggcgatacgggtgaaagaccccttaaaaagtccgataaatctaacaaatttgaacagggtcagacagacacattcacaatatatgctatagacttgggcgcactgacgaagatacggatacgccacgacaacactggcaatcgcgcaggttggtttctagatcgcatagacataacagatatgaataatgagattacatactattttccatgtcaacggtggctggccgtggaggaagatgacggacaactctccagagagttattgccagtggacgagtcttatgtgctgccccagagcgaggaaggccggggtggcggggacaacaaccccctggataatctggccttagagcaaaaggataagtcaaccacattttctgtaaccattaagaccggggtgaaaaaaaacgccggcactgatgcaaacgtgttcatcactctttttggcactcaagacgacaccggtatgaccctgctaaagagcagtaaaacgaactctgacaaattcgaacgcgactccatcgaaatcttcaccgtggagactcttgatctgggagatctatggaaagtccgcctgggtcacgacaataccggaaaagctcctggatggttcgttgattgggtggaggtggacgctccctccctgggaaagtgcatgacttttccatgtggacgatggttggccaagaacgaggacgatggtagtatcattcgggatctcttccacgcagagctacaaacgcggctatatacccccttcgttccctacgagatcactctgtacaccagcgatgtctttgctgctgggacagatgctaatatcttcattattatttacggctgcgacgcagtgtgcacacagcagaaatacctttgcacaaataagcgtgagcaaaaacaatttttcgagcggaagagcgcttccaggtttatagtggagttggaagatgtgggcgagatcattgagaagattcggatcggccacaacaacactgggatgaaccccggatggcattgctcccatgtcgacatccggagactcctgcccgataaggacggggctgaaaccttgacattcccatgtgataggtggctggctacgtcagaggacgataagaaaactatccgcgaactggtgccttacgacatttttacagagaaatatatgaaagacggatcactccgccaggtctacaaagaggtcgaggaacccttagacatcgtgctgtactctgtgcagatatttacaggcaacataccaggagcaggaactgatgcaaaggtgtacattacaatctacggggatctaggagacacaggcgaaaggtacctgggaaagtctgagaatcgcacgaacaagttcgaacgtggtactgcggataccttcattatagaagcggcggacctcggagtcatctacaagataaagcttcggcatgataattctaagtggtgcgccgattggtacgtcgaaaaggtggaaatttggaatgacacaaatgaagatgagttcctgtttctatgtgggagatggctctccttgaaaaaagaggacgggcgcctcgaacgactcttttacgagaaagaatacactggggataggtcctcaaactgctccagccctgcagatttctgggaaatagcactttcctcaaaaatggccgacgtggacatatccacagtgaccggtcccatggccgattacgttcaagaaggccccattatcccttattacgtctctgttaccaccggtaagcacaaagacgctgccacggatagtagagcattcatcttcttgataggcgaggatgatgaaagaagcaagcggatctggttagactacccgaggggaaagcggggcttctctagaggatccgtcgaggaattctacgttgcggggcttgatgtcgggatcattaagaagatcgagcttggccacgacggcgcatccccagagagctgttggctcgtcgaggagctgtgcttagccgtaccaacccagggaacaaagtacatgttgaattgtaactgttggctggccaaggatcgcggagacgggatcacgagtcgagtgttcgacctgttggacgccatggtcgtgaatattggggtgaaggtgttatacgaaatgaccgtgtggaccggcgatgtggtgggaggtggcacagattccaatatcttcatgacgctttatggcatcaacggcagcactgaagagatgcaactagataagaagaaggccagattcgaaagagagcagaacgacaccttcatcatggaaattctggacattgcccctttcacaaagatgagaatccgtattgacggactgggctcaagacctgagtggttcctcgagaggatattgctgaaaaatatgaacacaggcgacttaacaatgttctattatggagactggctcagccaaaggaaaggaaagaaaacactggtctgtgagatgtgcgcagtgattgacgaagaggaaatgatggaatggacctcatacactgttgctgtgaagactagcgacatcctaggcgccgggaccgacgcaaacgtctttattataattttcggcgagaatggcgacagtggtaccctggcgctcaagcaaagcgccaactggaacaagtttgagcggaataatacggataccttcaatttccctgacatgcttagtctggggcacctgtgcaagctcagggtctggcacgacaacaagggtatttttcctggttggcacctctcatacgtagacgtgaaagacaattcccgcgatgagacctttcacttccagtgcgactgctggctgagtaaatccgagggcgatggtcagacagtccgggatttcgcctgtgccaacaataagatttgcgacgaactggaggagactacctacgaaattgtaatcgaaacagggaacggcggggaaaccagagagaacgtatggttgatattggaaggaagaaaaaatagaagcaaggagttcttgatggaaaactcttcccgccagcgcgccttcagaaaggggaccaccgatacttttgaattcgatagtatctacctgggagacattgccagcttgtgtgttggccacctcgccagagaggaccgatttattcccaaacgcgagctcgcctggcacgtcaagacaattactattactgagatggaatacggcaacgtgtatttcttcaattgtgattgcctgattcccttgaaacgaaaacgcaaatattttaaagtgttcgaggtgaccaaaacgacagagtcattcgcctccaaggtacagtcattggtcccggttaaatacgaagtgatagtcactactgggtatgaacccggcgcaggcaccgacgccaacgtgtttgttaccatttttggtgctaatggcgacacgggtaagagagagcttaagcagaagatgcggaatctatttgagaggggttctactgatcggtttttccttgagacactggagttggttgttacccgcctgggcctggccgccgagtgtggatag

SEQ ID NO: 122686 - DNA, 3435 bp, synthetic construct
  misc_feature 1..3435: note = Description of Artificial Sequence: Synthetic coding sequence
  source 1..3435: mol_type = other DNA
atgttgcgacacctgaccgacaccttcacgatttacgctatagatctgggcgccctgaccaagatacgtattagacacgataataccggtaatagagccggctggtttctcgacagaatcgatattaccgatatgaataacgagataacctattactttccctgtcaaagatggctagctgtggaggaagatgatggtcagcttagcagggagctgttacctgtcgacgagagttatgttctgccacaatcggaggagggacgcggcggcggggataataacccactggataaccttgccctggagcaaaaagacaagagcaccactttttctgtgactatcaaaaccggcgttaagaaaaatgctggcacggacgctaacgtgtttatcacactgttcggcacccaggacgatacgggtatgaccctgctcaagtctagtaagactaattcagacaagttcgagcgagattccatagagatcttcactgtagagaccctggacctaggagacctgtggaaggtgaggctgggacacgataacacaggaaaggcaccggggtggttcgtggattgggtagaagtcgatgccccctccctcggaaaatgtatgacctttccgtgtgggaggtggctcgcaaaaaatgaagatgacggatccattataagggatctctttcacgccgagctgcagacccgtctctatacaccctttgtaccttatgaaatcaccctgtatacctctgacgttttcgccgctggcactgacgccaacatcttcattatcatctacgggtgtgacgccgtgtgcactcaacaaaaatatctgtgtaccaataagagagaacaaaagcagttcttcgagaggaagtccgccagccgattcattgttgagctggaagacgtgggcgaaattatcgaaaaaattcggattggtcacaacaacactggtatgaatccaggatggcactgcagccatgttgatatccgacggttgctccccgacaaagacggggccgaaactctaactttcccctgcgatagatggcttgcgaccagcgaagacgacaaaaagactattcgggagctggtgccctatgatatttttactgaaaagtatatgaaagatggctctttgcgccaggtgtacaaagaggtcgaggagcctctggacatcgttctctattcggtacaaatcttcacaggcaacattccaggggctgggacagatgcgaaggtgtacattactatttatggggacctcggagatacgggcgagagatatcttgggaaatccgaaaaccggaccaacaaatttgagagggggacggctgacacatttattatcgaggctgcagatctgggggtgatctacaagatcaaacttagacatgataattcaaagtggtgcgcagattggtatgtcgaaaaggtggagatttggaacgataccaatgaggatgagttcctgttcctctgtggaaggtggttgagcttgaagaaggaagatggccgactggaaaggctcttttatgagaaggagtacactggggacagaagctctaactgctccagcccagcggatttctgggaaattgccctgtcttctaagatggccgatgtggatatctccaccgtgacaggccccatggcagattacgtacaagaaggccccataataccttattatgtgtctgttactaccggcaaacataaggacgccgccactgactccagagccttcattttcctcatcggggaggacgacgagcggagcaagaggatttggctggattacccgaggggaaaaagaggattcagtagaggaagcgtggaggaattttatgttgccggcctcgatgtcggcattattaaaaaaatagaagtgttgtatgagatgacagtgtggacaggcgacgtggttggcggcgggacagatagcaatatctttatgacactttatggaattaatggcagcactgaggagatgcagctggacaaaaagaaggcacggttcgaacgcgagcagaatgatacattcatcatggagatattggatattgcccccttcactaagatgcgaatacggatcgatggacttggctcacgccccgaatggtttttggagagaatactcctgaagaatatgaacactggtgatcttacaatgttctactatggagattggctgtctcagcgcaagggtaagaaaaccctggtgtgcgaaatgtgcgccgtgatcgatgaggaggaaatgatggagtggacttcttacaccgtggctgtaaagacaagcgacattttgggcgcaggtactgatgcaaatgtgttcatcatcatattcggtgagaacggcgatagtggaactctagccctgaaacaaagcgctaactggaataaatttgaaaggaacaacacagacacatttaactttcccgatatgctttcactcgggcatctgtgtaaattgcgggtgtggcacgacaacaaaggtatctttcccggctggcatctgtcctacgtagatgtgaaggataacagtcgagacgagactttccactttcagtgcgattgctggttatctaagtccgagggagatggccagacagtcagagacttcgcctgcgccaacaacaagatctgcgacgagctagaggaaactacatacgagattgtgattgaaactggaaatggaggcgagactcgcgagaatgtgtggctgatcttggagggacggaaaaacaggtccaaggaattcttaatggagaatagtagcaggcaacgagcgtttcggaagggaactactgacacattcgaatttgactccatctacctgggcgatatagcatccttgtgtgtggggcatcttgctcgggaagaccggttcatcccaaagcgggagttagcttggcacgtaaagaccattactattacagaaatggagtatggaaatgtatactttttcaactgcgactgtttgattcccctgaagaggaagaggaaatattttaaggtgttcgaggtaacaaaaactacggagagttttgcaagcaaggtccagagtttagtgccggttaaatatgaggtcatagtcaccacaggctacgagccaggggctggcactgacgcaaacgtcttcgttacaatatttggagctaatggcgacactggcaagagagagttaaaacaaaaaatgcgtaacctgttcgagaggggcagtactgatcggttttttctggaaacccttgaacttggagagctaagaaaagtgcggctcgagcacgactcctccggatactgttctgggtggctcgttgaaaaggtggaagtgacaaacacctctactggggttgccactatctttaactgtggcaggtggctggataagaagaggggcgacggcctgacctggcgcgatctcttcccaagtgtctag

SEQ ID NO: 122687 - DNA, 921 bp, synthetic construct
  misc_feature 1..921: note = Description of Artificial Sequence: Synthetic coding sequence
  source 1..921: mol_type = other DNA
atgaggttgggcactaattgtgaacatcctcagctgccactggcagcgcccagcggctattattttccatgtcaaaggtggctggcggtggaagaagatgatggtcagctctccagggagctgctgcctgtggacgagtcctatgtcttaccccaatctgaagaggggagaggcggcggagacaacaatccccttgataaccttgccctcgaacaaaaagacaagtctacaacgttttccgtgacaatcaagaccggggtgaagaaaaacgcagggaccgacgccaacgtgttcattaccctgttcggaacacaggatgacacgggcatgacgctgctgaaatcttccaaaaccaactcagacaagtttgaaagagactccatcgaaatttttacggtggagaccctggacctgggcgatctgtggaaggtgcggttgggacatgacaacacaggaaaagccccgggctggtttgttgactgggttgaggtcgatgccccctctctgggtaagtgtatgacgttcccttgcggccgctggctcgctaagaatgaagacgatgggtccattattcgagatctcttccatgccgagctgcagacacgactatatacaccttttgtgccctacgaaatcaccttatatacttccgacgtgttcgcagccggcacagacgctaatattttcatcattatttacggctgtgatgctgtatgcacgcagcagaaatacctttgtaccaataaaagagagcagaaacaattttttgaaagaaagtcagccagccgtttcattgtggagctcgaggatgtgggggagataatcgaaaagatccgcatcggtcacaacaacactgggatgaacccagggtggcactgcagccacgttgatatacgacgcttgctgccagataaggattag

SEQ ID NO: 122688 - DNA, 6636 bp, synthetic construct
  misc_feature 1..6636: note = Description of Artificial Sequence: Synthetic coding sequence
  source 1..6636: mol_type = other DNA
atgatgccgcagaaaaaacggaggaggaaaaaggacatagacttcttggctttgtatgaggccgaactgctcaactacgcttcagaagacgacgaaggcgagctcgagcacgagtattacaaagccagggtttacgaggtggtcacggctaccggcgatgtcaggggcgcaggtacggacgcgaacgtattcattacactcttcggcgaaaacgggctgtcccccaagctgcagctgacttccaagtcaaaatcagcatttgagaaagggaatgtggatgtgtttcgggtgcgtactaataatgttggattgatatataaggtgcggatcgaacatgataacaccggattaaatgccagctggtaccttgaccacgtcattgttactgatatgaaaagaccccatctgagatattactttaattgcaataattggctcagtaaggtcgaaggagacagacagtggtgccgggatcttcttgccagtttcaacccgatggacatgcctaggggcaataagtacgaggtgaaggtttacacaggagacgtaatcggcgccggcacagatgcggacgtgttcatcaacatctttggggagtacggggatactggtgaacgaaggttggagaatgaaaaagacaactttgagaagggagcggaggatcgctttatccttgacgcaccggacctgggacagctgatgaagatcaacgtgggacacaacaacaaaggtgggtcagccggctggtttctctcacaaatcgtgatcgaagacattggcaataagcggaagtacgattttccactgaatcgatggctagcgctggacgaggacgatgggaagatacaaagagacattcttgtgggtggggctgagactaccgcgataacatacatagttacggtgttcaccggtgacgtgcgcggagctggcaccaagtcaaaaatatacctggttatgtatggggccaggggcaacaagaatagcggcaaaatcttcctcgagggcggggtgttcgatcgaggacgtacggacatctttcacattgagttagcagttcttctgtctcccctgagtagagttagcgttggccacggtaacgttggggtcaacaggggttggttttgcgagaaggtggtgatcctctgccccttcacagggatacagcaaacctttccttgttctaattggttagacgaaaaaaaggccgacgggctgatcgagcggcaactgtatgagatggtatcactaaggaagaaacgactgaagaagtttccttggtcattatgggtctggactacagacctgaagaaggccggaacgaacagtcccatcttcattcagatctacggacagaagggacggacagacgagattttattaaacccaaacaataagtggttcaagcctggaatcatcgagaaattccgcattgagctgcctgacttaggaaggttttataagatcagagtatggcatgataagagaagctctgggagcggctggcacctggagcggatgactctgatgaacacacttaataaagataagtacaacttcaactgtaatcggtggctcgacgcgaacgaagacgacaatgagattgtgcgggagatgacagccgagggacccactgttcggcgcattatgggcatggccagataccatgtaacagtttgcacaggggagctcgaaggagcaggcactgacgccaatgtgtacctctgcctcttcggcgacgtcggcgacactggagagcggctgctgtacaactgtcggaacaacaccgacctgttcgagaagggtaatgctgacgagtttaccatcgagtccgtgaccatgcggaatgtgcggcgggtccgcatcagacatgacgggaaagggtcgggatcaggctggtatttagatagagtgttggttagggaggagggacagcccgaatccgacaatgtagaattcccatgcctgcgctggctggataaggacaaggacgacgggcagttggtgagggaattgctcccaagtgattcgagtgccaccctgaaaaatttccggtaccatataagcttgaagacaggtgacgtatcaggcgcaagcacagactccagggtctacatcaagctgtatggagataaatccgatacaattaagcaggtgctccttgtcagtgacaacaatcttaaggattatttcgaacgtggccgagttgatgaatttacccttgaaactcttaatatcggcaatatcaacaggctggtcattggccacgatagtacgggcatgcacgcttcctggtttctcggttcggttcagatacgtgttccacggcaggggaaacagtatacatttcccgccaatagatggcttgacaaaaatcaggccgatgggagattggaggtagagctctatccttccgaagtggtggaaatccaaaaactggtccattatgaagtggagatctggaccggcgatgttgggggggcaggcacttccgccagagtatacatgcagatctacggggaaaaaggcaagacagaagtgctatttctcagtagtcgctctaaggtcttcgagagggcctccaaggacacttttcaactggaggccgcggatgtgggcgaggtgtataagctccgactcgggcacacgggcgagggttttggtccgtcttggttcgtggacaccgtctggctgagacacctggtggtccgggaagtggaccttacccctgaagaggaggctcgtaagaagaaagaaaaggacaaactgcgtcagctccttaaaaaggagcggttgaaggcaaaattgcaacggaagaaaaagaagagaaaaggatcagacgaggaggacgagggcgaagaggaagaatcctccagctcggaagagagctctagcgaggaggaggagatggaagaggaggaggaggaagaggaatttggtccggggatgcaagaggtcattgagcaacacaaattcgaggctcacaggtggcttgcccgggggaaagaggataacgagctagtcgtggagcttgtgcctgccgggaaacccgggccagagcgtaatacatacgaggtgcaggtggtaacaggcaatgtaccaaaggctggtaccgacgctaacgtgtacttgaccatatacggcgaggagtacggcgatactggcgagcgtcctctgaagaagagtgacaagtctaataagtttgaacaggggcagactgataccttcaccatctatgcaatagatttgggcgcgctgactaaaatccggattcgccacgataatacagggaaccgggccggatggttcctggaccggatcgacattacggacatgaataacgagatcacctactatttcccctgccaaaggtggctcgctgtagaagaggatgatgggcagctctctcgggaactcctacctgtcgatgagtcatatgtgctacctcagagcgaggaaggtcgtgggggcggagataataatccactggataacctcgcccttgaacagaaagacaaaagcacaaccttttcagtcacaataaaaaccggggtgaagaaaaatgcggggaccgacgcaaacgtctttatcaccctgttcggcacccaggatgacactggcatgactttgcttaagtcttcaaagactaactcggataagtttgagcgggattctatcgaaatttttaccgttgagaccttggatctaggtgatctctggaaagtccgtctggggcatgataacaccggcaaagctccgggctggtttgtggactgggtggaagtagacgctccaagtcttggcaagtgcatgactttcccgtgcgggcggtggttagcgaagaacgaggatgatggatcaatcattcgcgatctgttccacgccgagttacagaccagactgtacactcctttcgtgccctacgagattaccctttacaccagcgatgtgttcgccgcaggaactgatgccaacatatttattattatctatggatgtgacgctgtatgtacccaacagaaatatctatgtacgaataaaagggaacagaagcaattcttcgagcgaaagagtgccagcagatttattgtcgaacttgaggacgtcggggagattatcgagaaaattcggattgggcacaacaatacgggaatgaaccctggatggcactgttcgcacgtcgatatcagacggcttctccctgacaaagacggcgccgaaaccctgactttcccctgtgaccgatggctggccacaagcgaggatgacaagaaaaccatcagggagctggtaccgtacgatatttttaccgagaaatatatgaaagatgggtccctgaggcaggtgtataaagaagtggaggaacccctcgatatcgtgctgtactcagtgcagatctttactgggaacatcccgggggcaggcacagatgctaaggtttatattactatctatggggacctcggagatacgggagaacgttacttaggtaagagtgagaaccgaacaaataaattcgaacgtggcaccgcggataccttcatcattgaggccgccgacctgggggtgatttacaaaatcaagctcagacacgataattcaaagtggtgcgctgattggtacgtggagaaggtagagatctggaatgacactaacgaagatgagttcttattcctttgcggccggtggctgtccctgaagaaagaggatggccggctggagcgcctattttatgaaaaggaatacactggcgacaggtcttctaactgctcaagccccgcagatttctgggagatcgctctcagctctaaaatggcagatgtggatatttccacagtaacgggacccatggctgattatgtgcaggagggacccataatcccatactatgtttcggtgactaccggaaagcataaagacgccgccaccgattcccgggcattcattttcctgattggcgaggatgacgaaaggtcgaaaaggatttggttggattacccgcgtggcaaaaggggattttcgcggggatccgttgaggagttctacgtggctggtctcgatgtggggataatcaaaaaaatcgaagttctgtatgaaatgaccgtgtggacaggggatgtcgtgggtggaggcaccgatagtaacatctttatgaccttgtatggcattaacgggtccaccgaagagatgcagcttgacaagaagaaggcacggtttgagagggaacagaacgatacattcatcatggaaattctagacatagccccctttacgaaaatgcgaatccgcatcgacgggctgggctccaggcctgaatggttcctggaacgcattctgctgaaaaacatgaatacgggggacttgactatgttctattacggcgattggttatcccagcgaaagggaaaaaaaacattagtgtgtgaaatgtgcgccgtgatagatgaagaagagatgatggagtggacctcctacaccgtggccgtcaaaacctctgatattctgggagcgggcaccgatgccaatgtctttattattatcttcggtgagaatggtgacagcggaactttagcgctgaagcagagcgctaattggaataaattcgagaggaacaacacagatacattcaactttcctgatatgttgtcccttggacatctgtgtaagctgcgcgtttggcacgataataaggggatcttccccgggtggcatctctcctacgtggatgtgaaggacaattcccgggatgaaactttccacttccaatgtgactgttggctgagcaagagcgaaggcgacggacagacagtcagagacttcgcgtgtgctaataataagatctgcgacgagctggaggagacaacatacgagatcgtgatcgagaccgggaacgggggcgagacccgagaaaacgtttggttaattctagagggccggaagaaccggtcaaaagaattcctgatggaaaacagcagccgccagagggcctttcggaagggcaccacagacacctttgaattcgactccatttacttgggtgacattgcatctctgtgtgttggccacttagctagggaagataggttcattcctaaacgcgaactggcctggcatgtgaaaaccatcaccattacagagatggagtacggcaacgtctacttcttcaattgtgattgcctgatccccttgaaaaggaaaagaaaatacttcaaagtattcgaagtgacgaaaacaaccgaatccttcgcctccaaggtccaatccctggttcctgtcaaatacgaagtgattgtcaccaccggctacgaaccaggcgctggaaccgacgcaaacgtcttcgtgaccattttcggcgcaaatggagataccggtaagcgtgaactgaagcagaagatgagaaacttattcgagaggggatccaccgatagattctttctggaaaccctggaattaggcgagctgcggaaagtccggctggaacacgactcatccggttactgttcgggctggttagtagagaaggttgaagttacaaataccagtactggagtggctacaatttttaactgcggaaggtggctggataagaagaggggcgatggcttgacatggagagacctgttcccgtccgtctag

SEQ ID NO: 122689 - DNA, 3345 bp, synthetic construct
  misc_feature 1..3345: note = Description of Artificial Sequence: Synthetic coding sequence
  source 1..3345: mol_type = other DNA
atgaacaacgaaatcacctattacttcccatgccagcggtggcttgccgtcgaggaagacgatgggcagttgagtagggaactcctccctgtcgacgaaagctacgtactccctcagtctgaagagggacgaggaggtggtgacaacaatcctctggacaacctggcacttgagcagaaggataagtccaccactttttccgtgaccatcaaaaccggagtaaagaagaacgctggaacagatgccaacgtgtttatcacacttttcgggactcaggatgataccggaatgacactgttgaagtcctcaaagaccaacagcgacaagttcgagcgcgatagtattgagatttttacggtcgaaacactagacttgggcgacctgtggaaggtcagactggggcacgataacaccggcaaagcccccgggtggtttgtagactgggtagaagtcgacgctccatccttgggcaagtgcatgacatttccatgcggacgctggctggctaaaaatgaggacgatgggtccatcatcagagacctgtttcacgcagaattacagactagattatacacacccttcgtgccttacgaaatcacactctatacgtcggatgtctttgccgcaggcacagacgccaatattttcattattatctacggttgtgatgccgtatgtacccagcagaagtatctttgcacaaacaagcgagagcagaaacagttctttgaacggaaatccgccagtcggtttatagtagaactggaggacgtcggggagattatcgagaagatccgaatcggacacaacaataccggcatgaatcccggatggcactgttctcatgttgacattagaaggctccttcccgacaaagacggtgcggagaccttgacattcccctgcgatcgttggctggccacgagtgaggatgacaaaaaaactatacgagaactggtcccctatgacatctttacagagaagtatatgaaagatggatccctaaggcaggtatacaaagaggtcgaggaacccctcgacatcgtcctttacagcgttcagatttttacaggaaacatacccggcgctgggactgatgccaaggtttacatcacaatatatggggatctgggagacacaggcgaaagatatttggggaaaagtgaaaaccgaaccaataagtttgagagaggcacagccgacacattcataattgaggccgctgatctgggagtaatatataaaattaagttacggcatgataactcaaaatggtgcgcggactggtacgttgaaaaagtggagatatggaacgataccaacgaagatgagtttctatttctttgtggcagatggctgtcgctaaagaaggaggatggccgcctggaaaggctcttttacgagaaggaatatacaggcgaccgctccagcaactgttcatcacccgccgatttctgggaaatcgccctctccagcaaaatggcggacgtggacatcagtaccgtgactggccccatggctgattacgtgcaagaaggaccaatcattccctattacgtctccgtgaccacgggaaaacacaaggacgccgcaacagattctagggcctttatctttttgatcggagaggatgacgaacgttccaaaaggatctggctggactatccacgcggaaagagggggttcagccgaggctctgttgaggagttttatgtggccggtcttgatgtgggcatcatcaaaaagatcgaattaggccatgacggcgcatctccggaatcgtgttggcttgtggaggagctgtgcctggctgtgccaacacagggcactaagtacatgctcaactgtaactgctggttagctaaagaccggggtgatggcattacctcacgagtgtttgatctgctagacgccatggtagtcaacatcggagtcaaggtgctgtatgaaatgacggtgtggaccggcgatgtcgtcggtggtgggaccgattcaaatattttcatgacattatacggcataaacggtagtacggaggaaatgcagctcgataaaaaaaaggcaagatttgaacgcgaacagaacgacaccttcataatggagatcctggatatcgctccttttaccaagatgagaattagaatagacggcctcggaagccggcccgagtggttcctggagagaatcctccttaagaacatgaatacaggagatctaacaatgttttactatggagattggctgtctcagaggaagggaaagaagaccttggtatgcgagatgtgtgccgtcatcgacgaggaagaaatgatggaatggacctcttataccgtggccgtcaaaaccagcgacatactcggtgccggcacagatgccaatgtcttcattattattttcggcgagaatggggattcagggactctagccctgaagcagtccgctaattggaataaatttgaacgcaataatacagacactttcaattttccggatatgttgtctctcggacatctctgtaagttgagagtgtggcatgataacaagggcatttttcccggatggcacctttcatatgtcgacgtcaaagacaacagccgtgacgagacgttccattttcagtgcgactgctggctctccaagtcagaaggcgacggccaaaccgtgagggacttcgcttgtgcgaacaacaagatatgtgatgagctggaggaaaccacatacgagatcgtgatcgagactgggaatggcggggagacgagagaaaatgtgtggttaatactagaaggtcgcaagaaccgctcaaaagagtttttaatggagaatagctcgcgccagagagccttccgtaaggggacgacagatacctttgaatttgattctatctaccttggggacatcgcgtcactctgtgttggccacctcgccagggaagaccgatttatacccaagagagaactggcttggcacgttaagaccattacaataaccgagatggagtatggaaacgtgtacttttttaattgtgactgtcttattccccttaagcgcaaaaggaagtacttcaaggtgtttgaagtgactaaaacaacagagagtttcgcaagtaaggtgcagagcttagtgccggtgaaatatgaggtaattgtgaccacaggctacgaaccaggagccggaacagatgctaacgtgttcgtcacgatttttggtgctaatggagacaccgggaaacgtgaactgaaacagaagatgcgcaacttgtttgaacggggtagtaccgatcgcttctttctggaaacgctcgaattggtagttacccggcttggactcgctgctgagtgcggctag

SEQ ID NO: 122690 - DNA, 1539 bp, synthetic construct
  misc_feature 1..1539: note = Description of Artificial Sequence: Synthetic coding sequence
  source 1..1539: mol_type = other DNA
atgacggtgtggacaggtgacgtggtgggggggggtactgacagtaatatatttatgactttgtacggtattaacggctctactgaggaaatgcaactagataaaaagaaggcgagattcgagcgggaacagaatgacaccttcatcatggaaatcctggacattgcaccattcacaaaaatgcggatccgcatcgacggactgggctctcggccagaatggtttctggagcgtatactcctgaagaacatgaatactggtgatctgaccatgttctattatggtgactggctgtctcagcgaaaaggcaaaaaaacccttgtgtgcgagatgtgcgccgtaatcgatgaagaagagatgatggagtggacctcctataccgtcgccgttaaaacctcggatatactcggggctggcaccgatgcaaacgtcttcatcattatttttggtgaaaacggagatagtggaaccctagcacttaaacagtccgcaaattggaacaagttcgaacgaaataacactgatactttcaactttcctgacatgttatcattgggtcacctctgcaagcttagggtgtggcatgacaataaaggcatcttccccgggtggcacctatcttacgtcgacgtgaaggataacagccgcgacgagacctttcacttccagtgtgattgctggctttctaagagcgagggggatggccagactgtcagagacttcgcctgcgcaaacaataaaatctgcgacgagctggaagagactacctatgagatagtgatcgaaacgggaaacggaggcgagacgagggagaacgtttggcttatcctggaagggcgcaagaaccgatcaaaggagtttctaatggagaatagttcaagacaacgcgccttccgaaagggcaccaccgatacattcgaatttgattctatataccttggagacatcgctagcctgtgcgtgggccacttagcacgggaggaccgcttcattccaaaacgggaactcgcttggcacgtgaagacaataacaattaccgagatggagtacgggaacgtgtatttttttaattgcgattgcctcattcccctaaagcggaaacgcaagtattttaaggtgttcgaggtaacaaaaaccacagagtcttttgccagtaaggtgcagtctttagtgcctgtaaaatatgaagtcatcgtgacaactggatacgagcccggggcagggaccgacgcgaatgtgtttgtgaccatttttggggctaacggtgacacaggaaaacgcgaattgaagcagaagatgaggaacttgtttgaacggggctccactgataggttttttctcgagaccctggaactgggagagttgagaaaggtgaggctcgaacacgactcgtcaggctactgttctgggtggctcgtggagaaagtggaggtgaccaatacgagtaccggagtggccaccatcttcaattgcggacgctggctcgacaaaaagaggggcgacgggcttacatggcgcgatctgttccccagtgtgtag

SEQ ID NO: 122691 - DNA, 1374 bp, synthetic construct
  misc_feature 1..1374: note = Description of Artificial Sequence: Synthetic coding sequence
  source 1..1374: mol_type = other DNA
atgacagtgtggacaggagacgtggtgggaggcggcaccgactccaatatcttcatgacattgtatgggatcaatggatccacagaagaaatgcaactcgataaaaaaaaagccaggttcgaaagagaacagaacgatacttttattatggagattctcgatatagccccattcaccaaaatgcggatcagaattgacggccttggcagtaggccagagtggttcctcgagagaatcttgttgaagaacatgaacacaggggacctgactatgttctactacggcgactggctcagtcaaaggaaggggaagaaaacgcttgtctgcgaaatgtgcgctgttattgacgaggaagaaatgatggaatggacaagttacaccgtggccgtgaaaacttccgatatactaggagcagggactgacgccaatgttttcattatcatttttggagagaatggcgattcgggtacgctggccttgaaacagagcgctaattggaataagttcgaacggaacaataccgacaccttcaacttccctgacatgctgtctctaggccacctttgcaagctacgtgtttggcatgataacaagggcatttttccaggatggcacctcagctatgtcgatgtgaaggacaactccagggatgagaccttccacttccagtgtgactgctggttgtccaagagcgagggggatggccagaccgtccgtgattttgcctgtgccaataacaaaatctgcgacgagcttgaagaaacaacctatgagatcgtcatcgagaccgggaacggaggagagacccgggaaaatgtgtggctgatcctggaaggcaggaagaataggtccaaggagttcctgatggaaaactctagcagacaacgagctttcagaaagggtacaaccgatacctttgagttcgactccatctacctcggcgacatcgcgtctctttgcgtcgggcacctagcccgggaggatcgcttcatccccaagagggagttggcttggcatgtgaagaccatcacaattacagagatggagtatgggaacgtttatttcttcaactgcgactgtttgattcccctgaaaagaaaaaggaagtacttcaaggtcttcgaggtgactaagactaccgaaagttttgccagcaaagtacagtcccttgttccagtcaaatatgaagtaattgtgactaccggctacgaaccaggcgctgggacagatgcaaacgtatttgtgacgatcttcggggccaacggggacacaggcaagagagagctcaagcaaaaaatgcggaacctcttcgaacgcggcagcaccgatcggttcttcctggaaaccttagaactgggcgagctgagaaaatag

SEQ ID NO: 122692 - DNA, 1122 bp, synthetic construct
  misc_feature 1..1122: note = Description of Artificial Sequence: Synthetic coding sequence
  source 1..1122: mol_type = other DNA
atgctcatcccgttctccatgaagaattgcttccagctgctgtgcaactgtcaagtcccagccgctggatttaagaagaccgtcaaaaatggcctgatcctgcagtcaatatctaacgacgtgtatcagaatctggccgtggaggactggatacacgatcacatgaacctcgagggaaaaccaatcctctttttttggcagaatagccctagcgtcgtcattggcagacaccaaaacccctggcaggagtgcaacttgaacttaatgagggaggaagggataaagctggcacgaaggcgatccggcggcggcaccgtttatcacgacatgggcaacattaacttgacattctttactactaaaaagaagtacgaccgcatggaaaaccttaagcttattgtgcgtgccctgaatgccgtgcagcctcaactagacgtgcaagctacaaaaaggtttgacctcttgctcgacgggcagttcaaaatatctggcactgcctctaaaatagggcggacaacggcttatcatcactgtaccctgctctgctctaccgacggcacattcctatctagtctcttaaaatccccctatcagggaatccgttcaaacgccacagcaagcatcccgtctctggtaaagaacctgctggaaaaggacccaaccctgacctgtgaggtgcttatgaatgcagtcgctaccgagtacgccgcctatcatcaaatcgataatcacatacatctaataaatcctacagacgaaaccctgtttccagggattaactccaaggctaaagaattacagacctgggaatggatctatggcaaaacaccaaagtttagcatcaatactagtttccacgtcctgtacgagcagagccacctggagattaaagtattcattgacataaaaaatggcagaattgagatctgtaatatcgaagcaccggaccactggttgcctcttgagatccgcgacaaactaaacagctcactaattggctccaagttctgcccgaccgagactaccatgttgaccaacatcttactcagaacttgtcctcaggatcataagcttaattccaaatggaacatcctttgcgagaagattaaaggaatcatgtag

SEQ ID NO: 122693 - DNA, 1122 bp, synthetic construct
  misc_feature 1..1122: note = Description of Artificial Sequence: Synthetic coding sequence
  source 1..1122: mol_type = other DNA
atgctgattcccttcagcatgaaaaattgttttcagctgttgtgcaattgccaagtccctgccgccggatttaagaaaaccgttaagaatggcttgatcttgcaatctatctccaatgacgtgtaccaaaaccttgcggtggaggactggatccatgatcatatgaaccttgaggggaagcccatactcttcttctggcagaacagtccaagcgtggtaattggaaggcaccagaacccctggcaggagtgtaacctgaatttgatgagagaggagggcatcaaattggctagacggcggagtggaggaggtaccgtgtaccacgatatgggtaacatcaatctgacattctttaccactaagaaaaaatacgacagaatggagaaccttaagttaattgtacgcgccctgaatgctgtgcagccacagttggatgtgcaagcaaccaagcggtttgacctgctattggacggccagttcaaaataagcggcactgcatctaagattggacgaacaaccgcataccaccattgtacactgctttgctccacagacggcacattcctgtcttcgctgctgaagtccccgtaccagggcattaggtctaatgcaacggcctccatcccaagcctcgtgaaaaacctactcgaaaaagatccaacgttgacatgtgaagttctgatgaatgccgttgccactgagtatgccgcctaccaccaaatcgataaccatattcatttgatcaatcccactgacgagacactgttccctggcattaatagtaaggcgaaagagctccagacctgggaatggatctacggtaaaacaccaaagttttcaattaatacaagtttccacgtgttgtatgaacaatctcacctggaaattaaggtgttcatcgatattaagaatggtaggattgagatatgtaacatagaagcacctgaccactggctacctcttgagataagagacaagcttaatagcagtttaatcggcagtaagttttgtcctacagaaaccacaatgctcaccaacatcttacttcgcacatgcccccaggaccacaagctgaactccaaatggaatatactttgtgaaaagatcaagggcatcatgtag

SEQ ID NO: 122694 - DNA, 1122 bp, synthetic construct
  misc_feature 1..1122: note = Description of Artificial Sequence: Synthetic coding sequence
  source 1..1122: mol_type = other DNA
atgcttattcccttttccatgaaaaactgttttcagctcttatgtaactgccaggtcccagcagcagggttcaagaaaactgtgaagaacgggctcattctccaatccatatcaaacgacgtatatcaaaatctggcagttgaggactggatccacgaccacatgaacttagagggcaagcccatattgttcttttggcaaaactctccatccgtggttatagggaggcatcagaatccctggcaggagtgtaatctgaatctgatgcgggaagagggcatcaaactggcacgccgacgcagtggcggtggtactgtttatcacgatatgggcaacatcaatctcactttcttcacaactaagaaaaagtacgaccggatggagaatctcaaactcatagttagagccttaaacgcagtgcagccccagttggacgtgcaggccacaaaacggttcgatcttctgctggacggacagtttaaaatttccggtaccgctagcaaaatcggcaggactacagcctatcatcattgtactctcctttgctcaactgacggcacctttcttagcagcttgctgaagagtccatatcaggggattaggtcaaacgccacagctagtataccctctctcgtgaagaacctcctagaaaaggatccgactctcacctgcgaggtgctgatgaacgccgttgccacagagtacgcagcataccatcagatcgataaccatatccacctcattaaccccacggatgagacactcttccccggcatcaactccaaagcgaaggagctccagacttgggagtggatctacgggaagacccccaagttttctatcaacacatcattccatgtgctctatgagcagtcgcacctggagattaaagtttttattgacattaagaatgggcgcattgaaatatgcaacatcgaagcccccgaccattggctgccactcgagattagagataagctgaattcttcactgattggttccaaattctgtcccacagagactaccatgcttacaaatatcttgttacggacttgccctcaggaccataagctgaactcaaagtggaacattttatgtgagaaaattaaaggcattatgtag

SEQ ID NO: 122695 - DNA, 1122 bp, synthetic construct
  misc_feature 1..1122: note = Description of Artificial Sequence: Synthetic coding sequence
  source 1..1122: mol_type = other DNA
atgctcattcccttttctatgaaaaactgtttccaattactttgcaattgtcaggttcccgccgctggttttaaaaaaaccgtgaagaatggattgattctgcaatctatatccaatgacgtatatcagaatttggctgtggaggattggattcatgatcacatgaacctagaagggaaaccaatcctcttcttctggcagaactcgccttccgtcgtgattggcagacaccagaacccctggcaagagtgtaacttgaacctgatgagagaggaaggaattaagcttgcaaggcggaggagcggcgggggcacagtttatcatgatatgggaaatattaacttgacattttttaccacgaaaaaaaagtacgaccggatggaaaatctcaaactcatcgtgagagcgcttaatgcagttcagccccagttggatgtgcaggccacaaagaggtttgatctgctcctggacggccaatttaagatctctgggactgccagtaaaatcggaagaaccacagcttaccaccattgcactttgctctgctccaccgatgggacctttctcagtagcctcctcaagagtccatatcaaggcatcaggtccaatgctaccgcctcaattccctctctggtcaagaacttgcttgaaaaggatccgacactcacatgcgaggtcttgatgaatgccgtggccactgagtacgccgcctaccatcagatcgataatcacatacatctgatcaatccaaccgacgagactctctttccaggtataaatagcaaggctaaggaactacagacctgggagtggatctatggcaaaactcctaagttttccattaacacttccttccatgtcctctatgaacagtctcacctggagatcaaggtcttcattgacatcaaaaatggacggatcgaaatctgtaacatagaagcccctgatcactggttgcctctcgaaatcagagataaactgaacagcagcctgatcgggtccaagttttgtccgaccgaaacaactatgctgacgaatatccttctccgcacctgcccccaagaccacaagttgaatagcaagtggaatattctttgtgagaagatcaagggtatcatgtag

SEQ ID NO: 122696 - DNA, 1122 bp, synthetic construct
  misc_feature 1..1122: note = Description of Artificial Sequence: Synthetic coding sequence
  source 1..1122: mol_type = other DNA
atgctaattccgtttagcatgaagaattgctttcagctgctctgcaattgccaggtgccagccgcaggctttaagaagacagtcaaaaatggtctgattctccagagcattagtaatgatgtctaccaaaacctcgccgtggaagattggatccacgaccacatgaatctcgagggtaagccgatcttattcttttggcagaatagcccaagcgtggtcattggacggcatcagaatccatggcaggagtgtaacctgaatctgatgagggaagagggtatcaagctggcccgccgacgtagcggaggaggtaccgtgtaccacgacatgggtaatattaatctgacatttttcactaccaagaaaaagtacgatcgcatggagaatctgaagctcattgtgcgcgcactgaatgctgtccaaccccaactggacgttcaggccactaaacggttcgatctgcttcttgatggccaatttaaaataagcggcacagcatccaagatcggtaggaccaccgcttatcatcactgtaccttgctgtgttctaccgacggcacattcttgtccagtctcctgaagagcccttaccaaggaatcaggtctaatgctacggccagcattccatctctggtcaagaacttgctcgagaaagatcccacgttgacatgcgaggtgctaatgaatgctgtggccacagaatatgccgcctaccatcaaatcgacaaccacatacatctgatcaatccaacagatgaaaccttatttcccggcattaatagtaaagcgaaagagcttcagacttgggagtggatttacggaaagacacctaagttttcaatcaatacctctttccacgtgctgtacgaacaatctcatctggaaatcaaggtgtttattgatatcaagaatggtagaattgaaatatgcaatatagaggcacctgaccattggctgccactggaaatcagagataagttgaactctagcttgattggctcaaaattttgccccactgagacgaccatgctgaccaatattctgttaaggacctgtccccaggatcataagctgaattctaagtggaacatcttatgcgagaaaataaagggaataatgtag

SEQ ID NO: 122697 - DNA, 321 bp, synthetic construct
  misc_feature 1..321: note = Description of Artificial Sequence: Synthetic coding sequence
  source 1..321: mol_type = other DNA
atgctgatccccttctcaatgaagaactgtttccagctgctatgcaactgccaggtgcccgctgccggattcaaaaaaaccgtgaagaatgggctgattctgcagtctatctccaatgatgtctaccagaatctggcagttgaagattggatccacgatcatatgaacctcgaaggaaaacccattttgtttttctggcagaatagcccctccgttgtcattggacggcaccagaacccatggcaggaatgtaacctgaacttaatgcgggaggaggggattaagctcgccaggcgaaggagcggcggggggaccgtgtag

SEQ ID NO: 122698 - DNA, 756 bp, synthetic construct
  misc_feature 1..756: note = Description of Artificial Sequence: Synthetic coding sequence
  source 1..756: mol_type = other DNA
atgctcattccattctcaatgaagaactgtttccagttactatgcaactgtcaagtgcctgcagcgggcttcaagaaaaccgtgaagaatggcctaattctgcagagcataagcaatgacgtctaccagaatttggcagtcgaagattggatccatgatcacatgaatctcgagggcaagcccatcctgtttttttggcagaacagtccttcagttgtgattggcaggcatcagaacccatggcaggaatgtaatctgaaccttatgagagaagaggggatcaagctggctagaagacggagcggaggcggcactgtgtaccatgacatgggaaatataaacctcaccttctttacaaccaaaaagaagtacgatcgcatggagaacctgaaactgatcgtgcgcgctctgaatgccgtacaaccccagctggatgtgcaggcaacaaagcgtttcgacctgctcttagatgggcagttcaagatctctgggactgcctctaaaattggacgcaccactgcataccaccactgcacactcttgtgtagtactgacggtacatttctgagtagcctcttaaaatccccatatcagggaattaggtccaacgctacggcaagtatacccagcttggtgaagaatctgttagagaaggaccccacactgacctgtgaggttttgatgaacgcagtcgccactgagtatgcagcatatcatcaaatcgacaaccatatccacctcatcaatcccacttag

SEQ ID NO: 122699 - DNA, 120 bp, synthetic construct
  misc_feature 1..120: note = Description of Artificial Sequence: Synthetic coding sequence
  source 1..120: mol_type = other DNA
atgctgattccattttccatgaagaactgctttcaactgttgtgtaactgccaggtcccagccgctggttttaaaaagactgttaagaatggcttgattcttcaatccatcagcaattag

SEQ ID NO: 122700 - DNA, 408 bp, synthetic construct
  misc_feature 1..408: note = Description of Artificial Sequence: Synthetic coding sequence
  source 1..408: mol_type = other DNA
atgctcattcccttttctatgaagaattgcttccagctgctgtgcaattgtcaggttccagctgccggtttcaaaaaaactgtgaaaaacgggctgatactgcagagtatctcaaatgacgtctatcaaaatcttgcggtcgaagattggattcatgaccacatgaatctggaaggcaagcccatcctgttcttttggcagaatagcccctcggtggttatcggaagacaccagaacccctggcaagagtgcaatctaaacctcatgagagaggaaggcattaagctcgcacgcaggagatccggcggcggaaccgtttatcacgacatgggcaacatcaacctcacattttttaccaccaagaagaagtacgatcggatggagaatctgaaactgattgtgagatag

SEQ ID NO: 122701 - DNA, 5301 bp, synthetic construct
  misc_feature 1..5301: note = Description of Artificial Sequence: Synthetic coding sequence
  source 1..5301: mol_type = other DNA
atgggcggaaagaataaacagagaacaaaaggaaacctcagaccaagcaattccggcagagcggccgagttgctggcgaaggaacagggcaccgttccaggattcatcggcttcgggacatcccagtctgatctcggctatgtgccggctatccagggagctgaggagatcgactccttggtggacagtgattttagaatggtgctgcgcaaactcagtaagaaggacgtcaccacaaagctgaaggctatgcaggagttcggaaccatgtgtaccgagagggatactgagacagtcaagggggtgttaccctactggcctagaatattttgtaaaatttcgctggaccatgacaggcgggtgagagaggccacacagcaggcctttgagaagctgatccttaaagtgaaaaaacaattagcgccatacttgaagtcactgatgggctattggctgatggcccagtgcgacacttacacaccagcagccttcgcagcgaaggacgctttcgaggctgctttccctccttccaagcagcccgaggctatcgccttctgtaaagacgaaatcacatctgtactgcaagatcatctgatcaaagaaacaccagataccctgtccgatccccagacagtgccagaagaagagcgggaggcaaaattctacagggtggtgacctgctccttgctcgccttgaaaaggctgctgtgcctcctgccagacaacgaactcgactcattagaggagaagtttaaatctctgctgtcccagaacaagttctggaagtacggcaagcattccgtgccgcaaatcagaagcgcatacttcgagctggtgtcggcgctctgtcagaggatcccgcagttgatgaaggaagaagcgagtaaggtctcaccatcagttctgctgtccattgacgattcagatcctatcgtctgccctgccctgtgggaagccgttctctatactttgaccaccattgaagattgctggttgcatgtgaacgccaagaagagtgtgtttcccaagctgagtacggtaattagagaggggggacgcgggctcgctacggtgatatatccatatttgctgccctttatttctaagttgccccagtccattactaacccaaagctagatttctttaaaaatttcctgactagcctggtggctgggctctccacggagagaaccaagacatctagccttgaaagtagtgcagtgattagcgcgttttttgaatgcctgcgattcattatgcagcagaacttaggagaggaagagatcgagcagatgttggtcaatgaccaactcattccttttatcgacgccgttctgaaggaccctggactacagcacggacagctgtttaatcatttagcagaaaccctgtcatcgtgggaagccaaagccgatactgagaaggacgagaagacagcccataatctggagaatgtgctgatccatttttgggaacgactatccgaaatatgtgtggcaaagatctccgaaccagaggcagacgtcgagtcagtcctgggagtgtcgaacttgctccaggtcctacagaagcctaagagctcccttaagagctccaagaagaagaatggcaaggtcaggtttgctgacgagattcttgaaagcaacaaggagaatgaaaagtgcgtgtcctctgagggcgaaaagattgaggggtgggaactgaccactgaaccaagtctaacccataattccagtggacttttgagccccctgaggaaaaaaccgcttgaggatctagtctgcaagctggccgacatcagcatcaattacgtaaatgaacgcaagtcagaacagcaccttcgctttctctcaaccctgctggacagcttttcctcatcccgagtgttcaaaatgctgcttggtgacgaaaaacagtcgatagtccaggccaagccccttgaaattgcaaaactggttcagaaaaacccagctgttcaatttctttaccagaagcttattggatggctgaatgaggatcagcgtaaggacttcggattcctcgtggatatcctttactccgctctccggtgttgcgacaatgatatggagcgaaagaaggtcctcgacgacctcactaaggtggacctcaaatggaactctctgctgaagattatcgaaaaagcctgcccgtctagtgataagcatgcactcgtgactccctggctgaaaggtgacattctaggcgagaaactggtcaatttggctgactgtctgtgcaatgaggaccttgagtcacgggtttcatctgagtctcatttctccgagaggtggactttactttcgctggtgttgtcgcaacatgtcaagaatgattatctgataggtgacgtttatgtggagaggataattgtgaggctgcacgaaacgctgttcaaaaccaagaaattatctgaggctgagtcgtccgattcctcagtgtccttcatctgtgacgtggcatacaactattttagttctgccaaaggctgtctgttgatgccatctagcgaggacctgcttcttacgctcttccaattatgtgcccaaagtaaggagaaaacccatcttcccgatttcctcatctgtaagctcaaaaacacatggctgagtggggtcaatctgctcgttcatcagacggactccagttataaggagtccaccttccttcatctttcggccctctggctgaaaaatcaggttcaggcaagcagcttggatataaatagcttacaggtgctgctaagtgctgttgacgatctgcttaatacccttttggaaagcgaggattcttatctcatgggagtgtacattggtagcgtcatgccgaatgactctgaatgggagaaaatgcgccagtcacttccaatgcagtggctgcatagacctcttctggagggccgactgagcctcaactacgaatgtttcaagaccgattttaaagagcaggacataaaaactctgcccagccacttgtgcacaagtgcgctgctttcaaagatggtcctgatcgcattaagaaaagagaccgtcctggagaacaacgagcttgaaaaaatcatcgccgagctactatactccctgcagtggtgcgaggagcttgacaatcccccgatctttctgataggattttgcgagatacttcaaaaaatgaacatcacatatgataacctaagagtgctgggcaacaccagcggactgctccagctgctgttcaacagaagcagagaacatggaacactgtggtcgcttattatcgcaaagcttatcctgtctcgttcaatatcatccgacgaggtaaagcctcactacaaacgaaaagagtccttttttcccctgaccgagggaaaccttcacaccattcagtccctgtgtcccttcctcagtaaggaagagaagaaggagttttctgcccaatgcattcctgcactcctcgggtggacaaagaaggacctgtgttccactaacggtggctttggccacttagcaattttcaactcatgccttcagacaaaatcaatcgacgatggtgagctgctgcacggaatcctgaagattattatcagttggaagaaggagcacgaggacatattcttgttctcctgtaatttgtccgaagcatcaccagaggtgctgggtgtgaacatcgaaatcatccggtttctgtcactgtttctgaaatattgctcatccccactggctgagtccgaatgggatttcatcatgtgttcaatgttggcctggttagagactaccagcgagaaccaagctctttactccattcccctggtgcagctgttcgcctgcgtgtcctgcgatctggcctgtgacttgtccgctttttttgatagtacgacgctagataccattggaaacctacctgtgaatctcatttcagaatggaaggagtttttttcacagggcatccattcgcttctgctgccaatactggtgacagtgactggagagaacaaggatgtttctgaaacttccttccagaacgccatgctcaaacctatgtgtgaaactctcacctacatctccaaagaacaactcctttcacacaagctccctgctcggctcgttgccgatcagaagaccaatctgccggaatacttacagacactgctcaacactcttgcccctcttcttctgtttcgtgcacgccctgtgcagatcgccgtgtaccacatgctgtacaagctgatgcccgaactgccccaatacgatcaggataatctgaagtcatacggcgatgaggaggaggaaccggccctctcacctccagctgcccttatgagtctgctctccattcaggaagaccttctcgagaatgtcttaggttgcatacctgtcggccaaatcgtgaccattaagcctctgtcggaagacttctgctacgtgcttggatatctcctaacttggaaactgatccttacattctttaaagctgctagctctcagttgagggcattgtactccatgtatctgaggaagaccaagtccctcaacaaactgctgtatcacctcttccgattgatgcctgaaaaccctacgtacgccgagacagccgtcgaggtaccgaacaaggaccctaaaacatttttcacagaggaattgcagttgtctattagggagactaccatgctaccttatcatattcctcacctggcctgctccgtatatcatatgaccttgaaagatcttcccgcgatggttagattgtggtggaattcttcagagaagagagtcttcaacattgtcgacagattcacctcgaaatatgtgagcagtgtcctgtccttccaggagattagtagtgtgcagacctccacccagctgtttaatggaatgactgtgaaagctcgcgcaaccacccgcgaggtgatggccacctacactatagaggatattgtgatagagctcattatccaattaccatccaactacccgctgggaagcatcatcgtggagtcagggaagagagttggtgtggcagtgcagcagtggaggaactggatgttgcaactgtcaacatacctgacccaccaaaatggatccatcatggagggtctggctctttggaagaacaacgtagataaaagatttgagggcgtagaagattgtatgatttgcttcagcgtgatccacggctttaattacagcctacccaaaaaggcctgtaggacatgtaaaaagaaattccattctgcttgtctatataaatggtttactagttccaacaaatcgacatgccctctgtgcagagaaacttttttttag

SEQ ID NO: 122702 - DNA, 1443 bp, synthetic construct
  misc_feature 1..1443: note = Description of Artificial Sequence: Synthetic coding sequence
  source 1..1443: mol_type = other DNA
atgggaggtaagaacaagcagcgtactaaaggaaatttgcggcctagtaattccggtagggcagctgagttgctggctaaggaacaggggaccgtgcctggtttcatcggatttggcacctcacagtcagacctggggtacgtacctgccattcaaggagccgaggaaatcgattccctggttgactctgacttccgcatggtactacgcaagctttctaagaaggacgtgacaacgaaactgaaggcaaatgctatgcaggagtttgggaccatgtgcaccgaacgggacacagaaactgtcaaaggcgtgctgccctattggccccggatattttgcaaaatcagccttgatcacgatagaagagtgcgggaggccacccagcaggcattcgagaagctgatccttaaagtcaagaagcaactggctccatacttgaaatccctgatgggatactggctgatggcgcagtgcgatacctacacgcctgctgccttcgcagctaaggatgctttcgaggcagcttttcccccttcaaaacagcccgaggcaatcgctttctgcaaagatgaaatcacgagcgtgttgcaagaccacctgattaaagaaacgcctgataccctttcagacccgcagactgtgcccgaagaggagcgtgaggccaaattctacagagtggtcacctgtagtttgctagccctcaagaggctgctgtgtttgttaccagataatgagttagatagtctcgaggaaaagttcaaatcactattatcgcagaataagttttggaaatatggaaagcattccgtgccgcagatcaggtccgcatattttgagcttgtctctgccctgtgccaacgaatcccccagctgatgaaggaggaagcgtccaaagtgagtccaagtgtcctcctcagtatagacgacagcgatccaatagtctgtcctgccctgtgggaagccgttctctatactctgacgaccatcgaagactgctggcttcacgttaacgctaaaaaatctgtctttcctaaactctcaacggtgattagggagggcggaaggggcttggccacggtgatatatccctacctgctgcctttcatctcgaagctgccccagagcatcacaaaccctaagctggatttttttaagaattttctgacctcgttggtagccgggctgagtaccgaaaggactaaaacatcctctctggagtccagcgcagttattagcgccttctttgaatgtcttagattcattatgcagcagaacctgggcgaagaagaaattgagcagatgttagtgaatgaccagttgatcccatttattgacgcggtgctgaaggatcccggcctgcagcacgggcaactgtttaatcacttggcagagacactttcgtcttgggaggcaaaagcagataccgaaaaggatgagaaatag

SEQ ID NO: 122703 - DNA, 5439 bp, synthetic construct
  misc_feature 1..5439: note = Description of Artificial Sequence: Synthetic coding sequence
  source 1..5439: mol_type = other DNA
atggaccgcgtaggaggtgggaaaggtccgggtggatcctattatcgagtatcatctagcgccgcgagaagtcgtaaattatgtcctggccgagtaaaccgaggtctgtccgcccagtccaccgccgccactgctaccatgggcggaaagaataaacagcggacaaaaggcaacctcagaccttccaactctggcagagccgcagagctgctggcaaaggagcagggcaccgttcccggatttataggatttgggacttcccaaagtgatctgggttatgtgccagcgattcagggcgctgaggagatcgacagtctggtggacagcgacttccggatggtgctgcgcaagctcagcaagaaggacgtgaccacgaagctgaaggcaatgcaggaatttggcacgatgtgcacagaaagggacactgagactgtaaaaggtgtgctgccctattggccccggatattctgtaagatctctctggaccacgacaggcgagtcagagaagcaacccagcaggcattcgaaaagctcatactcaaagttaaaaagcaactagcgccttacctcaaatcattaatgggatactggctcatggcccagtgtgatacttacacacccgccgcctttgcagcgaaggacgcctttgaggccgcattccctcctagcaagcagccagaagcgatcgcattttgtaaagatgagatcacctcggtgctccaggaccatctgattaaggaaactcccgatacgctcagcgacccccagaccgtgcctgaagaggagagggaggcgaagttttaccgcgtagtgacctgtagcttattagccctgaaacgattactttgcctattgcctgataatgagctcgactccctggaagaaaaattcaagagtctgttgtcccagaacaagttctggaaatatggaaagcattccgtaccccagatcagatctgcatattttgagctcgtttccgcattgtgtcagcgcatcccacaattaatgaaggaagaggctagtaaagtgagtccctccgtgctcctgtcaatagacgattcagacccgatagtgtgtccagccttgtgggaggcggtcttgtatactttgacaactatcgaagattgctggctgcacgtgaatgccaagaaaagtgtctttcccaaactcagcaccgtgattcgagagggtggaagaggcctcgcaactgttatctacccctacttgctgcctttcatctctaaacttccacagtccatcacaaacccaaagctggatttctttaagaatttcctcactagccttgtggcaggattgtccacggagcgcaccaagacgtcatcgctcgaatcaagcgctgtgatctctgccttcttcgagtgcctccggtttattatgcagcaaaacttgggcgaagaggaaatagaacaaatgctagtgaatgatcaactgatcccatttattgacgcagtgctgaaggacccaggacttcagcatgggcagctgttcaaccacctggctgagacactttcaagctgggaagctaaagctgacactgaaaaggacgagaaaaccgctcacaaccttgaaaatgtccttatacacttttgggagagacttagcgaaatttgtgtggcaaaaatttcagagcctgaggccgacgttgagagcgtgctgggcgtgagtaacctgctgcaagtgctccagaagcctaaaagctctctgaagtctagcaagaagaaaaatggaaaggtgcgattcgcagacgagattttggaatccaacaaggagaacgagaaatgcgtaagctctgaaggggagaagattgagggatgggaattgacgacggagccttccctaactcataactcatccgggttgctgtctcctttgcgtaagaaaccactggaagatctggtttgtaagctggcggacatctccattaattatgttaacgagagaaaatccgagcagcatttacggttcttaagcactctgctcgactcttttagctccagccgcgtgttcaaaatgctcctgggcgacgagaagcagtcaatcgtgcaggctaagcctctggagatcgccaagctggtccagaagaatcctgccgtccagtttttgtatcagaagctgatcggctggctcaacgaggaccaaagaaaagattttgggtttcttgtggacatcctttatagcgcactgcgctgctgcgataacgatatggaacgcaagaaggtgctggacgaccttactaaggtggatttgaaatggaactcattgttaaaaatcatcgagaaggcctgcccttcctcagacaaacacgcactagtcactccatggttaaaaggagatattctgggtgagaaattggtgaacctggcagattgcctgtgcaacgaggatctggagagccgcgtcagctcggagagtcacttctcggagcggtggacactcctcagtctagttctctcccaacatgtgaagaatgactatttgattggtgatgtgtatgtcgagcggattatagttagactgcatgagaccttgtttaagacaaaaaagctgtccgaggccgaaagctccgatagtagcgtcagcttcatttgcgatgtggcctataactacttcagcagcgcaaaggggtgtctgctgatgccaagtagtgaggacctgctgctcactctgtttcagctctgtgcgcagagtaaggaaaagacccacctgccagattttttgatctgcaaactcaaaaacacatggctcagcggcgtgaacctgctcgtccaccaaacagacagcagttataaggagagtacttttttgcatctgtctgccctatggcttaaaaatcaggtccaagccagttcactggatatcaattcattacaggtcctacttagcgcagtagacgatcttttaaacaccctgctcgagtctgaggactcatatctgatgggggtctacatcggctctgtcatgcccaacgacagtgagtgggaaaaaatgcggcagtcccttccaatgcagtggctgcatcgcccactcctggagggccggctcagcctcaattatgaatgttttaagaccgactttaaggaacaggacatcaagaccctgcccagccatctgtgcacttcggccctgttgagcaagatggtcctgatcgctctgcgcaaagagacagtcctcgaaaacaacgagctggagaaaatcatagcagaactgttgtactccctgcagtggtgtgaagagttagacaatcccccaatatttctgataggtttctgtgagatcctgcagaaaatgaacattacctacgataacttaagggtgttgggaaacaccagcgggttgttgcaactgctgtttaatcgaagccgtgaacatggtacattgtggtccttgatcatcgcgaaacttatcttatccagaagtatttccagcgatgaggtgaaaccacactataagcgaaaagaatctttttttccactaaccgaaggcaacttgcatacgatacaatcactgtgccctttccttagcaaggaggaaaaaaaggaattctctgcccagtgcatacccgccctcctaggttggacaaagaaggatttgtgtagcacaaatggtgggttcggacatctcgctatcttcaacagctgtctgcaaacaaaaagtatcgatgatggagagctgttacatggtattttaaaaataataatttcctggaagaaagaacacgaagatattttcttattctcctgcaatctcagtgaggcgagtccagaggtccttggtgtcaatattgagatcatccgcttcctctcgctctttctgaagtactgctcatcacctctggccgagtctgagtgggatttcatcatgtgcagtatgcttgcttggcttgagaccacctctgaaaatcaagctctctacagtatccccttagtacaattatttgcctgtgtttcatgcgatctggcctgtgacctcagcgccttttttgacagtacgactctcgatacgataggtaaccttcccgtgaacctgatcagtgaatggaaggagtttttctcacaagggatccattcattgttgctccctatcctcgtcactgtcaccggggagaacaaggacgtttccgaaacaagctttcagaatgcaatgctgaagcctatgtgtgaaactctcacgtatattagcaaggagcagctgctatcacacaagctgccggctcgactggtggctgaccagaagactaacttgcccgaatatcttcagacactccttaacactctggccccactgctccttttccgcgctcgcccagtacagatcgctgtataccacatgctctacaaattgatgccagaattgccccaatacgaccaggacaacctaaagagctacggtgatgaggaagaggaaccggcgctgagtcctcccgctgctcttatgtcactgttgagtatccaggaggacctgctggaaaacgtcttaggctgcataccagtgggtcaaatcgtgactatcaagcctctgagcgaggatttctgctacgtgttggggtacctgctgacctggaaacttatacttacattcttcaaggcggccagttcccagctccgggcactctacagcatgtacctacggaagacaaaaagtctgaataaactgctctatcacctctttaggttaatgccggaaaatccaacctacgcagagaccgccgtggaggtgccaaacaaggaccccaagacatttttcaccgaggagttgcagttatccatccgggaaacaaccatgctgccttatcatatccctcacctggcctgcagcgtgtatcatatgacacttaaagacctcccagccatggtgagactgtggtggaattcttccgaaaagcgggtgttcaatattgtggatcgtttcacctctaagtacgtgagcagcgtgctatcctttcaagagataagttctgtgcagactagcacgcagttgttcaacggcatgacagtgaaagcacgagctacaacacgcgaggtcatggcaacatacacgatcgaggatatcgtgattgaactaattatccagctgccctcaaattaccctctggggtctatcatcgtcgagagtggcaaacgagtaggggtagccgttcagcagtggcgcaactggatgctacagctgtccacatacctgacacaccagaatgggtccataatggagggcctggccctgtggaagaacaacgtcgacaagaggttcgagggcgtggaagactgcatgatatgtttttccgtgattcacggcttcaattattccttacctaaaaaggcctgtagaacatgcaaaaaaaagtttcatagtgcctgcttatacaagtggttcacaagttccaacaagtccacctgtcccctgtgtcgcgagactttcttctag

SEQ ID NO: 122704 - DNA, 1404 bp, synthetic construct
  misc_feature 1..1404: note = Description of Artificial Sequence: Synthetic coding sequence
  source 1..1404: mol_type = other DNA
atgaaaaatcaaaatggaaccttcaaagactgggcgaatgccaacgtgtcccgccagattgaggatactgtcctatatggatattataccctctactctgtgatcctgttctgcgtgtttttctggattccatttgtgtatttctactacgaggaaaaggacgacgacgacacatccaaatgcactcaaataaaaaccgctcttaaatacactctagggtttgtagtgatatgtgccctgctgctgctcgtaggcgcatttgtgccattgaacgtgcctaataacaagaattccaccgaatgggagaaggtgaagagcctgttcgaagaactaggatccagccacggcttggccgcgctatccttctcaatttcttctcttaccctgattggaatgctggccgcgatcacctatacagcttacggtatgtctgcgctaccactgaatctgatcaaaggtacgcggtctgcagcatacgagcgactggaaaatacggaggacatagaagaagtggagcagcacattcagacgattaagtccaaaagtaaagacggacgcccgctccccgccagagacaagagagcccttaagcagttcgaagaacggctgcgcacgcttaaaaagcgcgaaagacacctggagtttattgaaaacagctggtggaccaaattttgtggggcactaaggcctcttaagatcgtgtgggggatcttcttcattctggttgccctcctgtttgttatcagcctctttctgtccaaccttgacaaagccctccactctgcaggaatcgatagcggcttcattattttcggtgccaatctttccaatccattaaacatgctccttccgctcctgcaaactgtgttcccactggactatattctgattacaatcatcattatgtatttcatattcacttccatggccggaataagaaacataggaatttggttcttctggatacgactttataagattcgaagagggcgaaccaggcctcaggcccttttatttctatgcatgatactgcttctgatcgttctgcacacatcctacatgatctattctcttgccccccagtacgtaatgtacgggtcacagaactatctcatcgaaaccaatattacgtcagacaaccataaggggaactccacgcttagcgtcccgaaaagatgtgacgcggatgctcccgaagatcagtgtacggttacaaggacttacctgtttctgcacaaattctggtttttcagcgccgcatactacttcgggaattgggctttcctgggggttttcctcataggccttattgtgtcttgttgtaaggggaaaaagtcagtaattgaaggggtggacgaggattcagatattagtgacgacgagccttctgtttattctgcttag

SEQ ID NO: 122705 - DNA, 1623 bp, synthetic construct
  misc_feature 1..1623: note = Description of Artificial Sequence: Synthetic coding sequence
  source 1..1623: mol_type = other DNA
atggctacaagcggagcagccagtgctgaactcgtgatcggctggtgcatcttcggcctgctgctcttggcgatacttgctttctgttggatttatgttaggaaataccagagtcggagagaaagcgaggtcgtgtccacaattaccgcaatcttttcgttggccatcgctcttattacatccgccttgctgcctgtggacattttcctggtgtcttatatgaagaatcagaacggtacgttcaaggattgggcaaatgccaacgtgtcacgacagatcgaggacactgttttgtacggctactacaccctctacagcgttattttgttttgcgtgttcttctggatcccatttgtttacttctattacgaagagaaagatgacgacgacactagcaaatgcacgcaaatcaagaccgcactcaaatacaccctggggttcgtagttatctgcgccctgttattactggtaggagcctttgtcccccttaatgtgcccaataataagaattctaccgaatgggaaaaagtgaagagtctttttgaggagttgggcagttcccacgggctcgccgccctctccttttcaatttcatcattaactttgattggaatgctggccgctatcacttatacagcttacggaatgagcgctttaccactcaacctgatcaagggcacccgaagtgcagcctatgaaaggctcgaaaataccgaggatatagaggaagtagagcaacacattcagacaatcaagtccaagagtaaagacggccgccctttgcctgcccgcgacaaacgggccctgaagcagttcgaagaacggctaaggaccttgaaaaagcgcgaaagacacctggagttcattgagaattcttggtggacaaagttctgtggagccttgcggccgttgaaaatcgtttggggtatcttttttatcctggtggccctgctcttcgttattagtctcttcctgtccaatttggataaggcactgcactccgccgggatcgattctggattcattattttcggcgccaatctcagcaacccattaaatatgttgctgccactcctacaaaccgttttccccctcgattacatactcatcaccattataatcatgtatttcatcttcacatcaatggcaggtattcgcaacatagggatctggttcttctggatacgcttgtacaaaatacgacgagggagaaccaggccccaagccctgctcttcctgtgcatgatcctgctcctaatcgtcctccacacttcttacatgatttactctctggccccacagtacgtcatgtatggcagccagaactatctgatagagaccaacatcacctcggacaaccacaaaggtaactcaaccttgagcgtgcccaaacggtgtgacgccgacgccccagaagaccagtgcacagtgacacggacgtacttgttcctacacaagttttggttcttctcggctgcttattattttggtaattgggcttttctgggagtgtttttgatcggtttgattgtctcttgttgtaaaggaaagaaaagtgtcattgaaggagtggacgaagatagtgatatctctgacgatgaaccctcagtttactccgcgtag

SEQ ID NO: 122706 - DNA, 939 bp, synthetic construct
  misc_feature 1..939: note = Description of Artificial Sequence: Synthetic coding sequence
  source 1..939: mol_type = other DNA
atgtcatatcaaaaaaaacagcctaccccccagccacctgtggattgcgttaaaacctctggaggggggggtgggggcggtgggtccggggggggcggctgtggatttttcggcgggggtgggtcagggggcggtagctcaggcagcggttgcgggtatagcggcggggggggctacagcggcggagggtgcggagggggcagtagcggcggcggcgggggaggcgggatcggtggctgcggagggggcagtggtggcagtgtgaagtactctggggggggcggatcaagtggcggcggctccggatgtttttcctcggggggtggaggatccggctgcttctcaagcgggggaggtgggtccagcggtggaggcagtggatgtttcagcagtggtgggggcggttcctccggaggcggcagcggttgcttcagctcaggaggcggcggtttttccgggcaggcagtgcagtgccagtcctacgggggcgtgtcttccggcggcagtagcgggggcggctctggatgttttagctctggaggaggcgggggctccgtgtgcgggtactcaggaggagggtcagggtgcggagggggatcctcgggcggcagcggctccgggtatgtgtcctcacagcaggtgacacagacatcatgcgcgccgcagccaagctatgggggcggttcgtccggggggggaggctctggtggctccgggtgcttcagcagtggcggcggcggggggtcatccggatgtggcggaggaagcagcggcatcggcagtggctgcataatctccggcggcggtagtgtctgcggcgggggatcttccgggggagggggggggggctcaagtgtaggcggcagtggctccggcaaaggcgtgcccatctgccaccagactcagcagaaacaggcccctacttggccaagcaagtag

SEQ ID NO: 122707 - DNA, 1002 bp, synthetic construct
  misc_feature 1..1002: note = Description of Artificial Sequence: Synthetic coding sequence
  source 1..1002: mol_type = other DNA
atgtcttaccaaaaaaaacagccgactccacaacctcccgtagattgcgtaaaaaccagcgggggcggaggggggggaggaggctcgggagggggcgggtgcggctttttcggggggggtggctccggagggggttccagtggaagtggttgcggctattcaggcggggggggatactccgggggaggctgtggaggaggcagcagcggcgggggcggaggcggcggcattggaggttgtgggggaggctccggtggcagcgtgaaatattcagggggaggaggtagcagcggcgggggcagtggttgttttagcagcggaggcggagggagcggctgcttttctagcggtgggggcgggagcagcgggggagggagtggatgtttttcctctggcggaggcgggtcctccgggggcggcagtgggtgcttctcgagtggcggaggcggttttagtggtcaagccgtgcagtgtcagagttacgggggggtgagtagtggtgggagcagcggcggtggcagtggatgtttctcctcaggaggtggtggagggtctgtgtgcggatactccgggggcgggagtggttgcggtggaggctcttctgggggcagcggctctgggtatgtctcatctcagcaggtgactcagacatcatgtgctcctcaaccatcttacggcggtggggtgcggcggagaagacagcgcaggaagcgcctgttgctgcaaaggcgtgggcgccgcgagctgagactgagaagacgccttcttcgcgattggcaaagactccaccatcagtggcgcggtctacgcttaaggagatggtttctgtggcggaggcggcgcagattgctgcgcgggtggctgcgtgagtggcaaggtcgcccagatttgcctccagatcccgccgaagcgggtgcctacctggcagttcagattgatcctcctggatatcacggaggtgagggcgtgggtggtgtcttccagggacacaggtgggcatag

SEQ ID NO: 122708 - DNA, 927 bp, synthetic construct
  misc_feature 1..927: note = Description of Artificial Sequence: Synthetic coding sequence
  source 1..927: mol_type = other DNA
atggacgcccttaaaagcgcaggtcgagcgcttatcaggagcccatcattggccaaacagtcatggggcgggggcggccgacataggaagctcccagagaactggacagatactagggaaaccctgttggagggaatgctcttttcacttaaatacctggggatgaccttggtcgaacagcctaagggtgaggagctgtccgctgctgcaataaaaaggattgtggcgaccgccaaagccagcgggaagaagctccaaaaggttaccctaaaagtttccccacgggggatcatactgaccgataatctgacaaaccaactcatcgaaaatgtatcaatataccggatatcatactgtactgctgataagatgcatgacaaagtgttcgcttacatcgcccaaagccagcataatcagagcctcgaatgtcatgctttcctgtgcaccaagagaaagatggcacaggccgtcaccctgactgtggcacaggccttcaaggtcgcctttgagttctggcaggtgtccaaggaggagaaagagaaacgggataaggccagtcaggaaggtggcgacgtgctaggagcccgacaggactgtactccttcgctgaaaagcctcgtcgctactggcaaccttttagatttagaagaaacagctaaggcaccactctccactgtgtctgccaacacgaccaacatggacgaagtacctagaccacaggccttaagcggttcctcagtggtctgggaactagatgatggactggatgaagcattctctcggttggctcagagtcgcaccaacccccaagtgttggacacaggcctgactgcgcaggacatgcactacgcccagtgcctgtcgcccgttgactgggataaacctgactcttccgggacagagcaggacgacctcttctcgttttag

SEQ ID NO: 122709 - DNA, 810 bp, synthetic construct
  misc_feature 1..810: note = Description of Artificial Sequence: Synthetic coding sequence
  source 1..810: mol_type = other DNA
atgtctagcgaccacctcaataacagtacgctaaaagaggcacagtttaaggacctgttcctgaagaaggctgagctcgagtttgcacaaataataatcatcgttgtagtcgtcacagtgatggtcgtagtcatagtttgcttactcaaccattataaagtaagtacgcggtcgttcatcaacaggcctaaccagtctcgccggagggaggacgggctgccccaggagggatgcctttggccatccgattccgccgcaccacggcttggagcttcggaaatcatgcatgcacctcgatccagggacaggttcaccgcaccatcattcatccagagagaccggttctctagatttcagccaacctatccatacgtacagcatgagattgatctgccacccaccatctccctctcagatggcgaggagccccccccttaccaagggccgtgcacattgcagctgcgtgatccggaacaacagatggagctgaatcgggagtccgtgcgtgccccacctaacaggaccatctttgactccgatttaattgacatcgccatgtactccggaggtccttgtcctccgagtagcaactccggtataagcgcttcaacctgtagctccaacggcagaatggaggggcctccacccacatattctgaagtcatggggcaccaccctggagcatcttttctgcatcaccaaagatctaatgcgcaccgaggttccaggctgcagttccaacagaacaacgccgaaagcacgattgtgccaattaaaggcaaggaccgtaagcccggaaatctagtgtag

SEQ ID NO: 122710 - DNA, 13635 bp, synthetic construct
  misc_feature 1..13635: note = Description of Artificial Sequence: Synthetic coding sequence
  source 1..13635: mol_type = other DNA
atgcttaccccacccctgctgctactacttccattgctgtctgctctggtcgctgccgctatcgatgcccccaaaacctgttcccctaagcagtttgcttgccgggaccagatcacctgtatcagcaaaggctggagatgcgacggagagagggactgtccagatggatccgacgaggcgccggaaatatgcccacagagtaaggcccaaaggtgtcagcctaatgagcataattgcttggggactgaactgtgcgtgcccatgtctagactgtgtaacggggtgcaggattgtatggacggcagtgatgaaggtccccattgtcgcgagctccagggaaattgctctcggctgggctgtcaacaccattgcgttcctacccttgacggccccacctgctactgtaattcttcctttcagctgcaggcagacggaaagacctgtaaagatttcgacgagtgtagtgtttatggtacatgctcccagctttgcacaaacaccgatggctcctttatctgtggatgcgtcgaggggtaccttctgcagccagataaccggtcatgtaaagctaaaaacgagcccgtggatagacctccagttcttctgatcgcaaactcccagaatatactagctacctacctcagcggggcccaggtctcaactatcacccctacttcaacccggcagaccacggcaatggatttttcatacgccaacgaaactgtgtgctgggtccacgtgggcgacagcgcagcccagacccagctcaagtgtgctaggatgccgggcctgaagggattcgttgacgagcatactatcaacatctctctcagcctgcaccacgtagaacagatggcgatagattggctgaccggaaatttctattttgtggacgacatagacgatcggatatttgtctgcaatcggaatggtgacacctgcgtgactctgcttgacctcgagttgtacaatcccaaagggatcgcgcttgatcccgctatgggcaaggtgttctttacagactacgggcagatccccaaagtcgaaaggtgcgatatggacggccagaaccgaacaaaactcgtcgactcgaagattgtgtttcctcacggcattacattggacttggtaagtagactggtgtactgggctgatgcctacctagattacatcgaggtggtcgattacgagggcaagggccgccagaccatcatccaggggatcctcatagaacacctgtacgggctcactgtctttgagaattatttatacgctaccaatagcgataatgccaatgcccaacagaaaacatccgtaatccgggtgaaccggtttaacagcactgagtatcaagtggtgacccgggtggataaaggcggtgctctacacatctatcaccagagacgtcaaccaagggtgcgttcgcacgcttgtgagaatgatcagtatggcaagccggggggatgctcagatatctgtctgctcgcaaactcccacaaggcacggacgtgtcggtgccgatccgggttcagcctcggaagtgacggaaaaagctgtaagaaacccgagcacgaacttttcctggtgtacggtaagggcagacccgggattatcagaggcatggacatgggtgctaaagtgcctgacgaacacatgattccaattgaaaacctcatgaatcctcgtgcactggacttccatgcggagacagggtttatatactttgcagacaccacttcttatcttattggcaggcagaaaattgacggcacagaacgggaaacaatccttaaggatgggattcacaatgtagaaggagtggcagtcgactggatgggcgataatctttactggaccgacgatggcccgaaaaagaccatctcagtggcccgactggagaaggccgcacagactaggaagaccctaatcgagggaaagatgacgcacccgagagcaatcgtggtggatccactcaacggatggatgtattggacagactgggaggaggatcccaaggactctcgacgcgggcgcttagagcgagcctggatggatggcagccatcgagacattttcgttacaagcaagacggtgctgtggccaaatggcctgagcttagacatccctgctggaaggctatattgggtggatgccttctatgacaggattgagaccatactgcttaacggaacagatcgaaaaatagtgtacgaaggaccagagcttaatcacgcctttggactttgccaccacggcaactatttattctggaccgaatacagaagtgggtcagtctatagattggagcgcggggtcgggggggcccccccaacagtgacactcttgcggtctgaacgccccccgatttttgagatcagaatgtatgacgcacaacagcaacaggttggcaccaataaatgtagagtgaacaacggtgggtgtagcagcctgtgcctggccactccaggctcacgccagtgtgcctgtgccgaggaccaggtactagacgcagacggagtcacatgtctcgccaatccttcttacgtgccgccgccacagtgccagcctggcgagttcgcctgtgccaacagcagatgtatccaagaaagatggaaatgcgatggcgataacgactgtttagacaattctgatgaagccccagcattgtgccatcagcatacatgcccatccgacagattcaagtgcgagaacaaccgctgcattcccaatcggtggctgtgtgatggagacaatgactgcggcaacagcgaagacgagagtaacgctacttgtagcgcgcgaacatgtccccccaaccagttttcctgtgcttcgggtcggtgtatccctatcagctggacatgcgatcttgacgatgattgcggggaccgctccgatgaatcagcctcctgtgcctatcctacatgctttcctctcacgcagttcacttgtaacaacgggagatgtataaacattaactggagatgtgataacgacaatgactgcggagacaactccgacgaggctggctgctcgcacagttgcagctccacgcagtttaaatgcaactccggcaggtgcatcccagagcattggacctgtgatggcgacaacgactgtggcgactacagcgatgagacacacgccaattgcaccaatcaggcaaccagaccaccaggggggtgtcacaccgatgaattccagtgtcggctagatggcctatgcattccgctcaggtggcgatgcgatggggatacagattgtatggattcttcagatgagaaatcgtgtgagggagtcacgcacgtctgcgatccttccgttaaattcggctgcaaggacagcgcgcgatgtatcagcaaagcatgggtttgtgatggtgacaacgactgtgaagacaattctgatgaggaaaattgtgagagtctggcgtgccgcccaccaagccatccctgtgccaataacacaagcgtgtgcttgcctccagataagctttgtgacggaaatgatgactgtggcgacgggtccgacgagggtgagctctgcgaccagtgttctctgaacaacgggggatgtagccataactgtagcgtagcccccggcgaaggcatcgtttgttcatgtcctctcggcatggagcttggccccgataatcacacgtgccaaatccagtcatattgcgctaaacacctcaagtgttcacaaaaatgcgaccagaataagttttcagtgaagtgtagctgctacgagggatgggtgctggaacccgatggcgagagctgcagatccctcgatccctttaagccctttattatatttagtaatcgacacgagatccggcgcatcgacctccataaaggagactacagcgttcttgtcccagggttacgcaacacaatagccctggattttcatctaagtcagagtgctctttattggactgacgtggtcgaagataagatctatcgaggcaaactgttggataatggcgccctcactagcttcgaggtggttatccagtatggccttgctaccccagagggactggctgtggattggattgccggtaacatttactgggtggaaagtaaccttgaccagatagaggtggcaaagctggatgggaccctgaggaccacgctcctagccggggacatcgaacacccaagagccatagctctcgaccccagggatggaatcttgttttggactgactgggacgcatcgctgcctcgaatcgaagctgcgagcatgtccggagccggaagacgtaccgtccaccgcgaaaccggatctggtggatggcctaacggactgactgtggattatctggagaaaaggatcctgtggattgatgcgcggagcgatgctatttattcagcccggtacgacggctccggacacatggaggtgctgcggggacacgagtttctttcgcaccctttcgccgtaaccctgtacggcggcgaggtctattggacagattggcgcaccaatacgcttgccaaggcaaataaatggaccggccacaatgtgacagtggtacaacgcacaaacacccagccgtttgacctccaggtgtatcacccatcaaggcaaccgatggcgcctaacccatgcgaagccaacggcggacagggaccatgcagccacctgtgtttgatcaactacaatagaaccgtgagctgtgcttgcccccacctcatgaaactgcataaggataataccacatgctatgaattcaagaagttcctgctctacgccagacaaatggagattcgcggcgtggatctagatgccccttactataattacatcatttccttcaccgttcccgatatagacaacgtgaccgtgctggactacgacgctagagaacagagagtgtactggagcgatgtgagaacgcaggcaatcaagagggcctttatcaacggaaccggggtcgaaacagtcgtctcagccgacctgcccaatgcacacggcctggctgttgactgggtgagtaggaatctgttctggacatcttacgacaccaacaagaagcagataaacgtggcaagacttgatggatcattcaagaatgcagtggtccagggcttagagcagccccatggcttagttgttcatccgctaaggggcaagctttattggaccgacggagacaatatttcaatggccaatatggacggatccaacaggacattgctctttagcggccagaaaggtcccgtaggattggctattgactttcctgaaagcaaactatattggattagctccgggaatcacacaatcaacagatgtaatctcgatgggtcagggctggaggtgatagatgccatgcgatcacagttaggcaaggcgactgctctggcaataatgggggataagctgtggtgggctgaccaggtgtctgaaaagatgggaacatgttccaaagccgacggctcaggttctgtagtgttaagaaactctaccacattagtcatgcatatgaaagtgtacgatgagagtatccagctggaccataaaggaacaaatccttgctccgtgaacaacggagattgttctcaactatgcctgcctacctcagagactacaaggagctgcatgtgtacagcgggctatagcttaaggtccggtcaacaggcctgcgaaggtgtgggttcctttttgctgtactccgttcacgaaggtattagaggcatacctctggaccccaacgataagtccgatgccttggtgccagtaagtggaaccagtctcgccgtgggaatcgatttccatgccgaaaacgacactatctattgggtcgatatgggcctttccacaattagtagggccaagagggaccaaacctggagggaagacgtggtcaccaacggaatcggaagggttgagggtattgccgtggattggatagctgggaacatctactggacagaccagggattcgacgtcattgaggttgccagactgaacgggagtttccgctacgtagtcatcagccaggggctcgacaaaccccgtgcaattacggtacaccctgagaaaggctacctcttttggaccgaatggggccagtaccccagaatcgagcgatcgcggttggacggaaccgagagagtggtgcttgtgaatgtgagcattagttggcctaatggaataagcgtggattatcaggacggtaagctctactggtgtgatgcacgaacggacaagatagagcggatcgatctcgagaccggagagaatagagaggtcgtcctgtctagcaataacatggatatgttctcagtgagtgtctttgaagactttatctattggagcgacagaacccacgcgaacggaagcatcaaacgtggaagcaaagacaacgcgacagacagcgtccccttgaggactgggattggagttcagctaaaagatattaaagtgttcaaccgggaccggcagaaaggaacaaatgtctgcgccgtggctaatggggggtgtcaacagctctgtctgtaccgcgggcgtggacagagagcctgcgcttgcgcacacggaatgctggcagaagatggagcatcttgtagggagtacgccggatatttgttatatagcgaacgcactatcctcaaaagtatccatttgtccgacgagcggaacctaaacgcccccgtgcagcctttcgaggatcccgaacacatgaagaacgtgatcgccctagcttttgactatcgggcaggtactagcccaggcaccccaaatagaatattcttttctgatatccattttgggaatatacagcagattaatgacgacggcagccggcggataaccatcgtggagaatgtgggcagcgttgagggcctggcatatcaccgcggttgggataccctttactggacttcctacacaacctccactatcacccgccacactgtggaccagacaagacccggagccttcgagcgcgaaacagttatcactatgtcaggagatgatcaccctagagcttttgtgctggatgaatgccagaacctgatgttttggaccaactggaatgaacagcaccctagtatcatgagggccgccctctccggcgctaacgtcctcaccctgattgagaaagatatccgcacaccaaatggccttgccattgatcaccgggcagagaagctgtatttctccgacgccactttggacaagatcgaaaggtgcgagtacgatggctcccataggtacgtcatcttaaagagcgaacccgtacatcctttcggcctagcagtgtatggcgaacatatcttctggaccgattgggtacggcgcgccgtgcagcgggctaataagcatgtgggaagcaatatgaaattactgagggtcgacatcccccagcagcctatggggataatcgcggtcgcgaacgataccaactcatgtgagctgagtccgtgcagaatcaataacggcggctgtcaggacctatgcctgctcactcaccaaggtcacgtgaactgcagctgtcgggggggacgaattctccaggatgatttaacttgcagagccgtgaactccagctgtcgcgcacaggacgaatttgaatgcgcgaatggagaatgtatcaatttctcgcttacctgtgatggagttccacattgcaaggataaaagtgacgagaagccgtcatattgcaattcccggagatgcaagaaaacttttcggcagtgttctaatggccggtgtgtgtctaatatgttatggtgcaacggcgccgacgactgcggagatggatccgatgaaattccgtgtaacaaaacggcatgtggggtgggggagttccgttgccgggatggcacatgcattggtaacagttcccgctgtaaccaattcgttgactgcgaggatgcctctgacgagatgaattgttccgccaccgattgcagtagttactttcggctaggcgtcaagggcgtgctcttccagccgtgcgaacgcacttccctgtgttacgccccatcctgggtgtgtgacggagctaacgactgcggtgattacagcgatgagcgagattgtcccggggttaagcggccccggtgcccccttaattactttgcttgcccttcaggcaggtgcatccccatgagctggacctgcgataaagaggacgattgtgagcacggcgaggatgaaacccactgcaataagttttgctctgaagcgcagtttgagtgtcaaaaccaccgctgcatctccaaacagtggttatgcgatggaagcgatgactgcggagatggtagtgacgaagcagcccactgtgagggcaagacttgtgggccatcaagttttagctgtcctggcacccacgtttgtgtgccagaacgctggctttgcgatggcgacaaggactgtgcagacggggcggatgaaagtattgccgcagggtgtttatacaactccacatgcgacgaccgagagtttatgtgccagaatcgccagtgtattcctaagcattttgtttgcgaccatgatagagactgtgcagatggatctgacgagtcgcccgagtgtgagtaccctacctgtggtccttcagaattccggtgtgccaacggacgatgtctttcatcccggcaatgggagtgcgacggcgagaatgactgccatgaccagtctgacgaagccccgaagaacccgcattgcactagccaggaacataagtgcaatgcgtcaagccagttcctatgttcatctgggcgctgcgtcgccgaggccctcctctgcaacggacaggacgattgcggagacagctccgatgagagaggctgtcacatcaatgagtgtctgtcccgtaaactgtccggctgttctcaggactgtgaggacttgaaaatcggtttcaagtgccgatgtagaccaggctttcggttgaaagatgacggtaggacatgtgcagatgtagatgagtgttccacaaccttcccttgctcccagcgatgtatcaacacccacgggtcttacaagtgtctgtgcgtggaaggctacgcccccaggggaggggaccctcactcctgcaaggctgtgactgacgaagagccttttctcatattcgctaatcgctactaccttcgaaagttgaacctggacggatccaactacacgttgctgaaacaaggcctgaacaatgcagtcgctctcgattttgactaccgcgaacagatgatctattggacggatgtcacaacccagggcagcatgattcggcgaatgcacctaaatggcagcaacgtgcaagtcttacatagaacagggctaagtaatccagacggtctggctgtagactgggtggggggcaacctctattggtgcgataagggaagagatacgatcgaggtcagcaaactgaatggggcatatagaaccgtcctggttagttccggcctgagagagccacgcgccctcgtcgtcgatgtccagaatgggtacttgtactggactgattggggcgatcactccctaattggccggatcggcatggacggcagttcaaggtcggtcatcgtggataccaagatcacatggcccaacggactgactctcgattacgtgactgagcgcatctactgggccgatgccagggaagactacatcgaattcgcctccctggatggcagtaatcggcatgtggtactgtcccaagacatcccccatatcttcgccctgactctgttcgaggattacgtatattggactgattgggaaacgaaatccataaatcgagcacacaaaaccactggaacgaataaaacccttctgataagtacactgcaccgccccatggatctgcacgttttccatgcgctcagacagccagacgtcccaaatcacccttgcaaagtgaacaatggcggatgttccaacctttgtcttttatctcctggcggaggccataaatgcgcgtgtcctactaatttctacctggggtcagatggccgcacttgtgtcagtaattgtactgccagccagttcgtctgtaagaacgataagtgcatacccttctggtggaagtgtgatactgaggatgactgtggagatcactccgatgaacctccagactgcccagagttcaagtgtcgtcccggtcagtttcagtgcagcacaggaatatgcaccaatcctgccttcatctgtgatggagataatgattgtcaagacaattccgatgaagccaactgcgacatacacgtgtgcctgccctcccagtttaagtgcaccaacacgaacaggtgcattcccggtattttccgttgtaatgggcaggacaattgtggtgacggagaggacgagcgggattgcccagaggtaacatgtgccccaaatcagtttcagtgttccataaccaaacggtgtattccgagggtctgggtgtgtgaccgggataacgactgtgtggacgggagtgacgaaccagctaattgcacgcaaatgacgtgcggggtagacgaatttaggtgtaaagactcaggcagatgtattcccgccaggtggaagtgtgatggagaggacgattgcggagatggctccgatgagcctaaagaagaatgtgacgagaggacctgtgaaccctaccagttccgctgtaaaaacaaccggtgtgtgccagggaggtggcaatgtgactacgacaatgattgcggcgacaactctgacgaagagtcctgtacgcccaggccatgctctgagtccgagtttagctgtgcaaatgggcgatgtatcgcaggccggtggaaatgtgacggagatcatgactgtgccgacgggtccgacgagaaggattgcaccccaagatgcgacatggatcaattccaatgtaagtcaggtcactgcatccccctcaggtggagatgcgacgctgatgccgattgtatggatggttctgatgaggaagcctgtggaacaggtgtgcggacctgtcccctcgacgaattccagtgcaacaatacactgtgtaagccgttggcatggaagtgcgatggcgaggatgactgcggagacaatagcgatgagaaccctgaagaatgcgcgcggttcgtttgcccccctaaccggccctttcgatgcaaaaatgaccgggtttgtttgtggatagggcggcagtgtgatggtaccgacaactgcggtgatggcactgacgaagaagattgtgagcctcccacagcccatactactcattgtaaggacaagaaggagtttctgtgcagaaatcagcggtgtctgagctcatctctgagatgcaatatgttcgacgactgcggagatggatcagatgaggaggactgttccattgatcctaaactcactagctgtgcgactaacgcgagcatctgtggcgatgaggctcggtgcgtgagaaccgagaaagcggcgtattgtgcatgtagatcagggtttcacactgtccctgggcagcccgggtgtcaggacattaatgaatgcctgcgattcggaacctgctcacagctctgtaacaatacaaaggggggacacctgtgcagctgtgctcgcaactttatgaaaactcataacacgtgtaaggctgaaggctctgagtaccaggtcctgtatatcgctgatgataacgaaattagatccttgttcccagggcacccacactctgcctacgaacaagccttccagggagatgaatcagttcgcatcgatgctatggatgtgcacgtcaaggcaggccgtgtgtactggacaaattggcataccggaacgattagttatcggtcgttacctcccgccgccccacccaccaccagtaacaggcaccgtagacagattgatcgcggcgtaactcatctaaacatcagcgggttgaagatgcctagaggcatcgctatcgactgggtggccggaaacgtatactggacagatagcggacgggatgtcattgaggttgcacaaatgaagggtgagaacaggaagaccctgatctctgggatgatcgacgagccacacgcgatcgtagtcgacccactgagagggaccatgtattggtctgattggggcaatcacccaaaaatagagactgctgccatggacggcacacttagagaaacacttgtgcaggacaacatccagtggcccactggtctggcagtggactaccataatgaacgcctgtactgggctgatgcaaagctatccgtcataggtagtattcgcttaaacggaactgaccccattgtggcagcggactctaagcgtgggctaagccatccattcagcatcgacgtgttcgaagattatatttatggcgttacctatatcaataaccgggtattcaaaatacataagttcggacatagtccactggtgaacttaaccggggggctcagtcatgcatccgacgtggtgctttaccatcaacacaagcagcctgaggtgaccaacccatgtgatcgtaagaagtgcgaatggctgtgcctgttgagcccttcaggacccgtgtgtacttgccctaacggaaagcggctggacaatgggacctgcgtgcccgtgccctccccaacccctccgcctgacgctcctaggcccggaacatgtaacctccagtgtttcaatggcggttcctgtttcctgaatgcgaggcggcagcctaaatgtaggtgtcagccccgctatactggcgataagtgcgaattggatcagtgttgggaacactgccggaatgggggtacctgcgcagcttcaccgtccgggatgccaacgtgtcggtgtcctaccggattcaccggacctaagtgtacgcagcaggtctgtgccggctactgcgctaataatagcacttgcactgtgaatcaggggaaccagccacagtgtcgttgtctccctggattcttgggcgacaggtgccagtatcgccagtgttccggatactgtgaaaactttggaacttgccagatggcagccgatgggtcacgacagtgccgctgcactgcttatttcgaaggctctcgatgcgaggtcaacaagtgtagcagatgcttggagggggcatgtgtggtgaacaaacagagcggcgatgtgacgtgtaactgcacagacggccgcgttgcacccagttgtttgacttgtgtcggccattgctccaatggaggcagttgtaccatgaacagcaaaatgatgcccgaatgccagtgcccccctcacatgacagggccgagatgtgaggagcacgtcttttcccaacaacagccgggccacatcgcatccatccttattcctctgttattgctactgctgctcgttttggtggccggcgtcgtattctggtacaagcgcagggtgcagggagccaagggatttcagcatcagcgcatgactaatggggccatgaacgttgagatcggaaacccaacatacaagatgtatgaaggaggtgagccggatgacgtgggtggacttctggatgctgacttcgccctggaccctgataaacctactaatttcacgaacccagtgtatgccactctctatatgggggggcatggctcacgccattcgctggccagcactgacgagaagagagaactgctcggcaggggacctgaggacgaaattggcgatcccctggcatag

SEQ ID NO: 122711 - DNA, 2142 bp, synthetic construct
  misc_feature 1..2142: note = Description of Artificial Sequence: Synthetic coding sequence
  source 1..2142: mol_type = other DNA
atgctcttagctactttgctgctactccttctgggaggcgctctggctcaccctgatcgaatcatattccccaatcacgcgtgcgaggaccccccagctgtgctcctggaggtgcaaggcactttgcaaaggcccttagtccgtgactctcgcacttcacctgcgaattgtacctggctgattctggggtcaaaagaacagactgtgactatccggttccaaaaactgcatttggcctgcgggtcagaacgacttactctgagaagccctctgcaaccccttatttctctgtgcgaggctcctccaagccctctgcagttgcccggcggaaacgtgacaataacgtactcctacgctggcgcaagagctcccatgggtcagggctttttactcagctactcccaagattggctcatgtgtctgcaggaagagttccagtgcctgaatcacaggtgcgtttctgcggtacaacggtgcgacggcgttgatgcctgcggagacggatcagatgaggctggttgcagcagtgaccctttccccgggctgactccccgccccgtgccgtctctcccttgcaacgtgaccctggaagacttctatggagtcttcagcagcccaggatatactcacctggcctcggtcagtcatcctcagtcctgccactggctcctggatccgcatgacggtcgtcgcctcgctgtccgttttacagccttagacctaggcttcggagatgcggtgcatgtgtatgatggccccgggccccccgaaagcagccgactgcttcggagcctgacccacttctcgaacgggaaggctgttactgtcgagactctatctggacaggctgtggtgtcttaccacaccgtggcttggagcaatggaaggggctttaatgccacctatcatgtgaggggatattgcctgccttgggaccggccctgtgggctaggcagcggtttaggagccggtgagggcctgggtgaaagatgttactcagaggcccagcgctgtgacggctcgtgggactgcgcagacggtacggatgaggaggattgccccgggtgtcccccgggccactttccatgtggagccgccggcacatcaggcgccacagcctgctatcttcccgccgaccggtgtaattaccagaccttttgtgctgacggcgcagacgaaagaagatgccgccattgtcaaccaggaaattttcgatgtagggacgaaaaatgcgtgtacgagacatgggtctgcgatggccagccggattgtgccgatggctctgacgaatgggattgctcttatgtcctgccaagaaaagtaattaccgccgcagtgattggatcactcgtctgtggactcctgctggtcattgctctcggttgtacgtgcaagctgtacgccatccggacccaggagtattcaattttcgcaccactctcaagaatggaggcagaaatcgttcagcaacaagcacctccatcctacgggcaactgattgcccaaggcgccatcccgcctgtggaggattttcctaccgagaatcccaatgataacagcgtgctgggaaacctcagatcactcctgcagattctccgccaggatatgacacctggtggaggacccggcgcccgacggaggcagaggggccggttgatgagacggctggtacgtcgcctgaggagatggggtcttctgcctcggactaatactcccgcgagggcttcagaggcaaggtcacaagttacaccatctgccgccccactggaagccctggacggaggcacaggaccagcgcgcgaaggaggcgcagtgggcggacaagacggagagcaggccccccccctccctatcaaggccccgctgccaagcgcatcaacttctccagccccgaccacggttccagaggcccctgggccactcccctctcttcctctggaacccagcctgttaagtggtgtggtgcaggcattgagagggcggttgcttccctctctgggtccacctggccccactcgcagcccacccggcccccacaccgctgtgcttgccctggaggacgaggatgacgtgctgctcgtacccctggctgagccgggagtgtgggtggctgaggctgaagatgaaccgttgctcacttag

SEQ ID NO: 122712 - DNA, 1671 bp, synthetic construct
  misc_feature 1..1671: note = Description of Artificial Sequence: Synthetic coding sequence
  source 1..1671: mol_type = other DNA
atgctactcgctacactgttgctgcttctcctcgggggagctttggctcaccccgatcggatcattttccctaatcatgcttgtgaagacccccccgcggtcctcctcgaggtccaaggtaccctgcaacgacctctggtcagagactcccggacctcacctgccaactgcacatggctgatcctgggatctaaggagcagaccgttacaatccgcttccagaagcttcacctggcctgcgggtccgaacggctcaccctgcgttcgcctctgcagcctctgatcagcctgtgcgaagcgccaccttcccccttgcagctcccgggcgggaacgtcacaatcacatacagttacgcaggggccagggccccgatgggtcagggttttctgctgagctacagccaagactggctgatgtgcctgcaggaggagttccagtgtctaaaccaccggtgcgtgtcagccgtccagagatgcgacggggttgacgcatgtggagacggaagcgatgaggcagggtgctcttctgaccccttccctgggctgacacccaggccagttcccagccttccgtgtaatgtgacccttgaggacttctatggcgtgttttccagcccaggatacacacatcttgctagcgttagtcatccccaatcctgccattggctgttggatccccatgatgggcgcaggctggcagtacggttcacagccctggatctgggcttcggtgacgctgtgcacgtgtacgatggccctgggccccctgagtcgagccgcctgctacggtcactcacccacttctccaatggaaaggccgttacggtggagacacttagcgggcaggccgttgtgtcgtaccacactgtggcctggtccaacggtcgggggttcaacgccacctatcatgttcgggggtactgtcttccgtgggatcgcccgtgtggcttgggttcaggacttggggccggggagggacttggagagaggtgttattccgaggctcagcgatgtgacgggtcctgggattgcgctgatgggacagatgaagaggattgccctggctgtccaccaggtcactttccttgcggagcggccgggacctccggagccaccgcctgttatctgccagccgatcggtgtaactaccagaccttctgcgcggacggggccgatgaacgaagatgtagacactgtcagcctgggaactttaggtgccgcgacgaaaaatgtgtctatgaaacctgggtctgtgacggacagcccgattgtgctgacgggtccgacgagtgggactgctcatatgtcctcccacggaaggtgattaccgccgcagtgatcggatcgctggtttgcggcctgttgcttgtcatcgcactgggttgtacttgcaaactgtacgccatacgaacacaggagtacagtatctttgcgcccctcagtaggatggaggctgaaatagtccaacagcaggccccaccatcgtatggtcaacttatcgcccagggcgctattccaccagtcgaagacttccctacagagaaccctaatgataacagcgtgctgggcaatctgagatcactgcttcagattcttcgacaggacatgacaccaggcggaggacctggcgcacggcgcaggcagcgcgggcgcctaatgcgaagattgtag

SEQ ID NO: 122713 - DNA, 13968 bp, synthetic construct
  misc_feature 1..13968: note = Description of Artificial Sequence: Synthetic coding sequence
  source 1..13968: mol_type = other DNA
atggacagggggccagctgctgtcgcctgcacccttctgctggcactggtggcctgcctggcacccgccagcggtcaggagtgcgactccgcccattttcggtgtggcagcggacactgtattccagcagactggaggtgtgatggtacaaaggactgttcggacgatgccgacgagatcgggtgtgctgtggtaacatgccagcagggctacttcaaatgccagtcagaggggcagtgtatccctaacagctgggtttgtgatcaggaccaggactgcgacgacggttctgacgagcgccaggactgttctcagtctacctgttcctctcatcaaattacatgctcaaacgggcaatgcattccatccgaatacaggtgcgaccacgtcagagactgtccagatggggcagacgaaaacgattgccagtacccaacgtgcgaacagctcacctgcgacaacggagcttgttataacaccagccagaaatgtgattggaaggtggactgcagggactcatctgacgagatcaattgcacggagatttgcctacataatgaattttcttgtggaaacggcgagtgcatcccaagagcgtatgtgtgtgaccacgataacgattgtcaggacgggtcggacgaacatgcttgtaattaccctacttgtgggggatatcagtttacctgtccttccggcaggtgcatatatcaaaactgggtctgtgacggagaggatgattgcaaagataatggagacgaggatggctgtgagagcggaccacatgacgtgcacaagtgtagtcctcgggaatggagctgtcccgagtccggccgctgtatctccatttataaagtttgcgatggaattctcgactgtcctggtagggaggacgaaaacaacacttccaccgggaagtattgtagtatgacgctgtgttccgccttaaactgtcagtaccaatgtcacgaaacaccatatggcggggcctgtttctgccctccaggttatattattaaccataacgatagtagaacatgtgttgagtttgatgattgtcagatatgggggatctgtgatcagaagtgcgaaagcagaccagggcgacacctatgtcattgcgaggaaggatacattctggagcgggggcagtactgcaaagctaacgactcttttggagaagcctccattatctttagcaatggcagggacttgctgatcggtgacatccacggccgctcctttagaatactcgtggaatcacagaaccgcggggtagcagtgggggttgcctttcactaccacctgcagcgagttttttggaccgatacagtgcagaacaaggtgtttagcgttgacattaatggcctcaacatccaagaagtgttgaacgtctctgtggaaacaccagagaaccttgcggtggattgggttaacaataagatctacttggtcgagaccaaggtcaatcgaattgatatggtgaatttggacggaagctatagagttacactgataacagaaaatctgggtcaccctaggggaatagctgttgacccaaccgtcggctatctcttcttcagtgactgggagtcgctttcaggggaacccaaattagagcgtgccttcatggatggcagtaatagaaaggacctcgtgaaaaccaaactgggctggccggccggggtgaccttggacatgatatccaagagggtttactgggtcgactcacggttcgactacattgagaccgtcacttatgacggaatccagaggaaaactgtagtgcatgggggcagtctgatcccccatccctttggcgtgtctctgttcgagggccaagtgttctttaccgactggaccaaaatggcagttctgaaagcaaacaagtttaccgagacaaacccgcaggtctattatcaggctagcttgcggccctatggggtgaccgtgtatcattcactccgacagccgtatgccacaaacccatgtaaggataataacggcggctgtgagcaggtgtgtgtcctcagccacaggacagacaacgatggtcttgggtttagatgcaaatgtacttttgggttccagctggataccgacgaaaggcactgtatcgccgtgcagaacttcctaattttttctagccaggtggccatccgcggtatacctttcactctgtctacccaggaagacgtgatggtgcccgtgtcagggaatccctctttcttcgtcggaattgatttcgatgcgcaagacagtacgatttttttctcagacatgtcaaaacacatgatctttaagcaaaaaatagatggtacaggccgcgagatacttgctgcgaatcgggtcgagaatgttgagtccctcgctttcgattggatctctaaaaacctttattggactgattctcattacaaatctatcagtgtgatgaggcttgctgacaaaactcgcagaacggttgtgcagtacctgaacaacccccgatccgtggtggtccatccttttgcaggctacctcttcttcaccgattggttcagaccagcaaagataatgagagcttggtccgacggtagtcatctccttccagttatcaacactaccctcggatggcccaacggcttagccatcgactgggcagcatcccggctctactgggtagacgcttacttcgacaaaattgagcatagcacatttgacggtctggacaggcgccggctcggacatatcgagcagatgacacatccctttgggctcgctatatttggcgaacacctgtttttcacagactggcgtctgggcgcaattattagggtccggaaggccgatgggggagagatgactgtgatcaggagtggcatagcatatatactgcatctgaaatcttatgacgtgaacattcagactggcagcaacgcttgtaaccaacctactcaccctaatggagattgttctcacttctgtttccccgtgccgaatttccaaagagtgtgtggctgtccatacgggatgcgtctcgccagtaatcatcttacatgcgagggagacccaaccaacgaacccccaaccgaacagtgcgggcttttctccttcccatgtaagaatgggcggtgcgtgccaaattactacctgtgtgacggcgtggatgactgtcacgacaactccgacgagcagctgtgtgggaccttgaacaacacgtgcagcagctcggcctttacctgtggtcacggagagtgcattccggcacattggagatgcgataaacgcaatgattgtgtggacggcagcgatgagcacaattgtcccacgcatgctcctgccagttgtctcgatacccagtacacctgcgacaaccaccagtgcatctctaaaaactgggtgtgcgatactgacaatgactgcggagacgggtccgacgaaaagaattgtaactcaacggagacatgccagccatcacaattcaattgccccaaccataggtgcatcgacctttcattcgtctgtgacggagacaaggactgtgtcgatgggtctgatgaggtgggctgcgtgctaaattgcaccgcaagtcagtttaaatgcgcttcaggcgataagtgcatcggtgtgaccaatcgttgcgacggcgtgtttgactgttctgataatagcgacgaggctggctgccccacccgccctcctggaatgtgtcattcagacgagttccaatgccaggaggacggaatctgcatccctaacttttgggagtgtgatgggcaccccgactgcctgtacggatcggacgaacacaatgcgtgcgtcccgaagacatgtcctagttcttacttccattgcgacaacgggaactgtattcaccgggcttggctgtgcgacagagacaatgattgcggtgatatgagcgatgaaaaagattgccctacccagcccttccgttgccccagctggcagtggcagtgcctcgggcacaatatctgtgtcaacctttcggtggtgtgcgatgggatctttgactgccccaacggcactgatgagtcacccctgtgtaacggcaactcctgttccgactttaacggcggctgtacccacgagtgcgtccaagagcctttcggcgcaaaatgcctgtgcccgcttggatttctcctggcaaacgattctaagacctgtgaggacattgatgagtgcgacatcctcggatcctgctcccagcactgttacaacatgagagggagcttcaggtgttcctgcgatactgggtacatgctggaatccgacggccgcacctgtaaagtgacagcctcggaaagcctgctgctcctggtggcgagccaaaacaagataattgcggacagcgtaacaagtcaggttcataatatctacagcttagttgagaatggctcctacatcgtcgctgtcgatttcgacagtatctctggccgcatattctggtctgacgccacccaaggcaagacgtggtccgccttccagaatggcacagaccgacgcgtcgtcttcgattcctcgataattctgacagagaccattgcgattgactgggttggccggaacctttactggaccgactacgctctggagaccattgaggtatctaagattgatggctctcacaggacggtgctaatctcaaagaatctcaccaatcctcgcggtctggcactggaccccaggatgaacgagcacctcctgttctggtccgattggggccaccatccaagaatcgaacgcgcttccatggacgggagcatgcggacagtgattgtgcaggataagattttctggccttgcggcctaaccatcgattaccctaaccgtttgctgtactttatggactcctacttggactatatggacttctgcgattacaatggccaccataggcgacaggtgatcgctagcgacctgattattcgtcatccctacgccttgaccctgtttgaggactcggtgtactggaccgatcgggccacccgtcgggtaatgcgcgccaataagtggcatggcggcaaccagtctgtcgtaatgtataacattcagtggccattgggcattgtggcggttcatccgtccaagcagcccaatagcgtgaatccatgcgccttctctcgatgtagccacctgtgcctcttatcctcccagggcccccacttctattcttgtgtgtgtccatctggctggtccctctccccagacttgttgaattgtcttcgggacgatcagccctttttgataactgttcggcaacacattatctttggcatctctcttaacccggaggtgaagagcaatgacgcaatggtgcccatagccgggatccagaacggcctcgacgtggagtttgatgatgcagagcaatatatttattgggtggagaatcctggcgaaatacacagagtgaaaaccgatggcacaaaccggacagtgttcgcttccattagcatggtaggccccagtatgaatcttgctctggattggatctcccgaaatctgtattcaactaatccgcgtactcagtcgatagaagttctgactctgcacggcgatataagatacaggaagacattaatcgctaacgacggaaccgctctcggcgttggattcccaataggtatcactgtagacccagctcgtggaaagttgtactggtcggaccaaggcacagacagcggcgtgcccgctaagatcgcctccgccaatatggatggcacttccgtgaaaacattgttcaccggtaaccttgaacaccttgaatgcgtgacccttgatatcgaggaacagaagttatattgggccgtgacaggaaggggtgtgatcgaacggggcaacgtggacggaactgatagaatgatcctggtgcatcagctttctcatccatggggaatcgccgtccatgactcatttctatactataccgatgaacagtacgaggtcatcgagcgcgtcgataaggcaaccggagccaataaaatcgtccttagggacaacgtgcccaacctgcggggactccaagtgtaccaccgacgcaatgctgcggaatcgagcaatggctgtagtaataacatgaatgcatgtcagcaaatctgtctacctgttccgggaggtttgttctcatgtgcctgcgccaccggctttaagctgaacccggacaaccgctcatgttccccatacaatagcttcattgttgtatctatgctttcagccatacgcggctttagtctggagctcagcgaccacagtgagacaatggttcctgtggctgggcaaggacggaacgcacttcatgtggacgtcgatgtgagctctggtttcatttattggtgtgacttttccagcagtgtggccagtgacaacgcaatccggcgcatcaagccagacggtagctctttgatgaatatcgtgactcatggaattggggagaacggcgtgagggggattgccgtcgattgggtcgccggtaacttatattttactaacgcgtttgtttctgaaacactcatcgaggtattacgcattaataccacataccggcgcgtcttgctcaaggtcacggtcgatatgccgcgacatatagtggtggacccgaagaacagatatctattctgggccgactacgggcagcgtccaaaaattgagcgaagcttcttagattgtacaaatcgcacagtgctggtgtcagaaggcatcgtgacaccaaggggcctcgctgtggatcgctcagacgggtacgtgtattgggtggatgattctttagacattatagcccggattcgaatcaatggagagaactcagaggttattagatacggtagtcgctacccaactccttatggcattacagtttttgagaattcaatcatctgggtggatagaaatctgaagaaaatattccaagcatcaaaggaacccgaaaacactgaaccgcctacagtgatccgagacaatattaattggttgcgtgatgtaaccatcttcgacaagcaggtccagcctagatctcctgcagaggtcaacaacaacccatgtttagagaacaatggaggctgctcacacttatgcttcgctttacccggcctgcataccccaaaatgtgattgtgctttcgggacgcttcagtctgacggtaaaaattgcgcaatatccaccgagaacttccttatatttgccttaagtaactccttacgcagtctgcacctggatccagagaaccactctcccccctttcagacgattaatgtggagaggacagtgatgtccctggactatgatagcgtatccgaccgaatttactttacacaaaacctcgcttccggagtgggtcagatctcatacgcaactctcagctccggtatccatactcctacagttatcgcatccgggattggtactgccgatggaatagctttcgactggattactcgtaggatctattatagcgattatcttaatcagatgatcaactcaatggcagaagacgggtctaacaggacagtcatcgctcgtgtccccaagccgagagctatcgttctggatccgtgccagggttacctgtactgggcagattgggacacacacgcaaagatcgagagggccaccctgggaggaaatttccgcgtgcccatcgtgaatagctcacttgtcatgccgtccgggcttactctggactacgaagaagacctcctttattgggtggacgcttctctacagaggatagagaggtcaactctgactggcgtcgatagggaggttatcgtgaacgcagcagtgcatgccttcggtctgaccctgtacggccagtatatttactggacggacctgtacacacagaggatttacagggctaataagtacgatggctctggtcaaattgccatgactaccaatctgctttcgcaacccagaggtatcaatacagttgtgaagaaccagaagcaacaatgcaataatccttgcgaacagttcaatggaggatgctctcatatttgcgctccaggacccaatggcgctgaatgccagtgtccacatgaaggaaactggtatctggctaataaccggaagcactgcatcgtcgacaatggcgagcggtgtggcgcatcttcgttcacatgctccaacggaaggtgcatttccgaagagtggaagtgtgataatgataacgactgcggagacggctctgatgagatggaatccgtttgtgcactacacacatgtagccccaccgccttcacctgtgcaaacggtagatgtgtgcaatactcctatcgatgtgactattataacgactgcggagatggctctgacgaggcgggttgcctgtttagagactgcaacgccacaacagagttcatgtgcaataaccggcggtgtatacctcgggagttcatttgtaatggggtggataactgtcatgacaacaatacatctgatgagaagaattgtcccgatcggacatgccagagcggctacaccaaatgtcataactctaacatctgcatcccaagagtgtacctctgcgacggagacaacgactgtggcgataatagtgatgaaaatccgacctactgcaccacccatacatgtagttcctccgaattccagtgcgcgtcaggccggtgcattcctcaacactggtattgcgaccaggaaacagactgttttgacgcctccgacgaaccagcaagctgcgggcactcagaaagaacctgcttagctgacgaatttaagtgcgacgggggacggtgcattccgtccgaatggatatgtgacggcgacaatgactgcggcgatatgagcgacgaagacaagcgccatcagtgtcaaaatcagaactgttctgatagtgaattcttatgtgttaatgaccgcccaccagacagacgctgcattccacagagctgggtgtgtgatggggacgtcgattgtactgacggctacgacgaaaaccaaaactgtacccgccgtacctgttcagagaacgaattcacttgtgggtacgggctctgcattccaaagatttttaggtgtgaccgtcacaatgactgtggagattactcagatgaaagaggctgtctctatcagacttgccaacagaatcagtttacttgccagaatggtcgctgcatctcaaaaactttcgtttgcgacgaggataatgattgtggtgatggaagcgacgagctgatgcacctgtgccacaccccggagcctacttgccctccacacgagttcaaatgtgacaacggtaggtgtatcgagatgatgaaactgtgtaatcatctggacgactgtcttgataattccgacgaaaagggctgcgggatcaacgagtgtcatgacccatccatttcaggctgtgaccacaactgcacagatactctcacctcattttactgtagctgtcggcctggttacaagctgatgagcgataaaaggacatgcgtggatattgatgaatgtaccgagatgccatttgtttgctcgcagaagtgcgagaacgtgattggttcgtacatatgtaagtgtgcaccagggtatctcagggagcccgacggaaagacgtgtcgccaaaactccaacattgaaccctacctcatcttctctaaccggtattacctcagaaatcttacaatagatggctacttttatagtttaatcttggagggacttgacaacgtggtggccctggactttgaccgggtggagaagaggttgtactggatcgatacccagcgacaagtcatcgaaagaatgttcctcaataaaacaaataaggagaccatcatcaatcacagactcccggccgctgaaagtttggccgtggactgggtgtcaaggaagttgtactggctagatgccaggctggacgggctgttcgtgtcggacctgaatggtggtcatcggagaatgctggcccaacactgcgttgatgcaaataatacattctgcttcgacaatcctaggggtctcgcgcttcacccacaatatggatacctgtactgggctgattggggacatcgggcatatattggacgcgtcggtatggacgggacaaataagtctgtaatcatatcgaccaaattggagtggccaaatggcatcactattgattataccaacgacctactgtactgggccgacgcacatcttggttatatagaatattcagatctggagggccaccacagacataccgtgtatgatggagctcttcctcacccgttcgccattacaatcttcgaggacaccatatactggaccgactggaacactagaacagtagaaaaaggaaacaagtacgacggatctaacaggcagacccttgtcaacacaacccaccgccccttcgatatccatgtgtaccatccctataggcaacccatcgtaagcaacccatgcgggacaaacaacggagggtgcagccacctttgtctcataaagcctggaggaaaagggttcacatgcgaatgcccggatgactttagaaccctgcagttatctgggagtacatactgcatgcccatgtgtagtagcactcagttcctctgcgccaacaacgaaaaatgtatccccatttggtggaaatgtgatggacagaaggactgctctgacggaagcgacgaacttgccttatgccctcagagattctgccggctcgggcagttccaatgttcagacggaaattgcacaagcccgcaaaccttgtgcaatgcgcaccagaattgtccagacggcagtgatgaggacagactgctgtgcgagaaccaccactgcgattccaacgaatggcagtgcgccaataagcggtgcattccagagtcctggcagtgcgatactttcaacgattgtgaggacaattcagatgaggactcgtctcactgcgcatctcggacatgtaggccaggacaatttagatgtgctaacgggcgatgtattccccaggcctggaaatgcgatgtggacaatgactgcggggaccattcggatgaacccatagaagagtgtatgtcaagtgcgcacctctgtgataattttactgaattcagttgcaaaactaactacaggtgtattcccaagtgggcagtgtgtaacggcgtggatgactgtcgggacaactcagacgagcagggatgtgaagaacgaacctgtcatcctgtgggggattttcgatgtaaaaatcatcattgcatacctctgcgctggcagtgtgatggccagaatgattgtggtgacaattccgatgaagaaaattgcgctccacgtgagtgcaccgagagcgaattccgctgcgtcaatcaacagtgcatacccagccgatggatctgcgatcattacaatgattgcggggacaacagcgacgaacgcgattgcgaaatgcggacttgccatcctgaatattttcagtgcaccagcgggcactgcgtccacagcgaactgaagtgtgacggttcggcagattgcctcgatgccagcgacgaagccgattgccctacacgcttccccgacggagcatattgccaggcaacaatgtttgagtgcaagaatcatgtgtgtatccccccctattggaagtgtgacggggatgatgactgcggtgatggctccgatgaggaactccatctgtgtctagacgtgccctgcaacagcccaaatagattccggtgtgataataatcgttgcatatattcccacgaggtgtgtaacggcgtggacgactgcggtgatggtacagatgaaactgaggagcactgcagaaagcccactccgaagccttgtactgagtatgagtacaagtgcggaaacgggcattgcataccacatgacaacgtgtgtgatgatgctgacgactgtggcgattggtctgacgagctagggtgcaacaagggcaaggagaggacatgcgcagagaatatctgcgaacagaactgcacacagcttaacgaaggagggttcatttgctcctgcacagcgggatttgagacgaacgtgttcgataggaccagttgcctggatattaacgaatgtgagcagtttggcacgtgtccgcaacactgccggaataccaaggggtcgtacgaatgtgtctgtgcggatggatttacatctatgagcgaccggcctggtaagcgttgcgctgccgaaggcagctcccctctcctcctgctccccgataacgttcgaatccgcaagtataatctatccagtgagcggttcagtgagtatctccaggatgaggaatatatacaggccgtggactatgattgggacccaaaggatataggcctgtccgttgtgtactacacagtgagaggcgaagggtcaagattcggagcaatcaaacgcgcgtacatccccaacttcgagagcgggagaaacaacctggttcaggaggtggacctgaagctgaagtacgtgatgcagcccgatggaattgctgtggactgggtgggaaggcatatatattggagtgatgtcaagaataagaggattgaggtcgcaaagcttgatggaagatacaggaaatggctgatctccactgacttagaccaaccagctgcaatcgcagtgaaccctaaactcggcttgatgttttggacagactggggtaaggagccaaaaatcgagtctgcgtggatgaacggggaggacaggaatattctggtgtttgaggatctaggttggccaaccggtttgtctatagactatctcaataatgacaggatctattggagcgactttaaggaggacgttatagagactatcaagtacgacggcaccgaccgccgcgtcatcgctaaagaggcgatgaacccctacagtctcgacatctttgaagatcagctgtactggatcagtaaagagaagggagaggtttggaagcagaataagttcggacaggggaagaaggagaagacgctggtagtaaatccttggctgacccaggttcggattttccaccagcttagatacaataagagcgtacccaacctgtgcaagcagatctgttcccatctgtgtttgctgcggcctggaggatattcttgtgcttgtcctcagggctcatccttcatcgagggatccaccacagaatgcgatgccgcaatcgagttaccaataaacttgccgccaccctgcagatgcatgcatgggggcaactgctatttcgacgaaacagacctgcccaaatgtaagtgcccgagtggctacaccggcaaatactgcgagatggcttttagcaagggcatttctcctgggactaccgcggttgccgtactgctcacaatcctactcattgtggttataggggcactggctattgccggatttttccattaccgtagaacggggtccttactaccagcccttcccaaactgccctcgctttctagtctggtcaaaccatcagaaaatgggaacggcgtcacttttcgcagcggagccgacctgaatatggatataggcgtgagcgggttcgggcccgagacagccatcgacagaagtatggctatgagcgaggattttgtgatggagatgggaaagcagcctattatcttcgaaaatcccatgtactcagccagagactccgccgtcaaagtagtacagccaatccaagtgactgtctcagaaaatgtcgacaataaaaactatgggtctcctatcaatccttcagaaattgtgcccgagaccaaccctacatcacctgccgcggacgggacacaagtgaccaagtggaaccttttcaagcgtaagagcaagcaaactaccaactttgagaaccccatctatgcccaaatggaaaatgagcagaaggaaagcgtcgctgctacacctccaccctctcccagcctgcctgcaaaaccaaaaccaccgtcgcgccgcgatcccacacccacctattcagcaactgaagacacgttcaaggatacagctaatctagtgaaggaggactcagaagtatag

SEQ ID NO: 122714 - DNA, 3678 bp, synthetic construct
  misc_feature 1..3678: note = Description of Artificial Sequence: Synthetic coding sequence
  source 1..3678: mol_type = other DNA
atggatagagggccagcagctgtcgcgtgtaccttgcttctggctctggtcgcctgcctggctcccgcaagtgggcaggagtgcgattcggcccatttccgctgcgggtcgggccactgcatcccagccgactggcgctgtgatgggactaaagactgttccgacgacgctgacgagattgggtgtgctgtggtgacctgtcagcagggctacttcaagtgccagtcagagggtcaatgcatcccgaattcctgggtttgcgaccaagaccaagactgcgacgatggtagtgatgaacggcaggactgcagtcagtccacatgcagcagccatcagatcacatgttccaacggccagtgtatcccgagtgagtatcggtgcgaccatgtgcgcgattgccccgatggcgccgatgaaaacgattgccagtaccccacttgtgaacagttgacctgtgacaatggcgcctgctacaatacatcacaaaagtgtgattggaaagtggattgtcgggacagctctgacgaaattaactgtaccgagatttgtcttcacaacgaattctcatgcggcaatggggagtgcatcccacgggcttacgtatgcgaccatgataacgattgccaggacggctcagacgagcacgcctgtaactatccaacctgtggtggctaccagtttacctgtccctccggcagatgtatctaccagaactgggtttgtgatggtgaagacgactgtaaggataacggggacgaggacggatgcgagtcaggaccgcacgatgtgcataagtgctcgccccgcgaatggagttgcccggagtccggccggtgtatctccatttacaaagtatgtgatggaattctggattgtcccggaagggaagatgagaataacacctccactggcaagtattgctcaatgaccctgtgttctgctctaaattgccagtatcagtgccacgaaaccccctacggtggggcgtgcttctgtccacccggatatatcatcaaccataatgactcccggacatgtgtggagttcgacgactgccaaatctggggcatttgcgatcagaagtgcgaaagtcgtccaggcaggcacttgtgtcactgcgaggaggggtatatcctggagagggggcaatactgcaaagcaaatgatagcttcggcgaggccagtatcattttttccaacggcagggatctgcttatcggagatatccacggccgctccttcagaatcctcgtagaaagccagaatcgcggcgtggccgttggagtcgcgttccactatcacctgcagcgggtgttttggaccgacacagttcagaacaaggtctttagtgtggatattaacggtcttaacattcaagaggttctcaacgtgtccgttgagaccccagagaacctggccgtcgactgggtgaataacaagatttacttagtagaaacgaaggtgaatcggattgatatggtaaatcttgacgggagctaccgggtcacccttattaccgaaaacctgggccaccctaggggaatagctgtggatcccaccgtagggaaaacggtagtccatggggggtcattgataccccacccgtttggcgtcagcttgtttgaaggtcaggtgttctttaccgactggactaaaatggccgtgttgaaggctaacaaattcacagagacaaacccccaggtctactatcaggcctcactccgcccgtatggggtgactgtgtaccactcgttgcgacagccttacgccactaatccatgcaaggataacaacggcggatgcgaacaggtgtgtgtgctgtctcatcgcaccgataacgacggtctaggcttcagatgcaaatgcacattcggatttcagctcgacacagatgagaggcattgcattggcagagagatcctcgccgctaaccgagtggaaaatgtggaatcactggcatttgattggattagcaagaatctgtactggactgacagtcattacaagagcatatcagtcatgcgcctggctgataaaacaaggagaactgtggtgcagtacctgaacaatcctcggtccgtggttgtccatcccttcgctgggtacctgttctttacggattggttccgccctgcaaagattatgcgcgcatggagcgatggcagccatctcttaccagtgattaacacaacccttgggtggccaaatggattggccatcgattgggctgctagtagattatactgggtagacgcttacttcgacaaaattgagcattccacattcgatggactcgacaggaggagattgggccacattgagcagatgacacatccattcgggctggccatcttcggcgaacatctcttttttaccgactggcggctgggtgccattatcagagtgcggaaagctgatggtggggagatgaccgtaattcgctcgggtatcgcctatattctacatctgaaaagctacgatgtgaatatacagactgggtccaatgcatgtaatcagcctacccacccgaatggggattgctcacatttttgtttccccgtgccaaattttcagagggtctgcggatgcccgtatggaatgagactcgcctcaaaccatctcacgtgcgagggggatccgacgaatgagccacccactgagcagtgtggacttttttcttttccttgcaaaaacggccggtgcgttcccaactactatctgtgcgacggagtcgacgactgccatgacaatagtgacgaacaactttgtgggacactaaataatacatgctccagtagcgcttttacttgcgggcacggggagtgcatccctgctcactggagatgtgacaagcgaaatgattgcgtggatggtagtgacgaacataactgtccaacacatgcacctgctagttgccttgacacccagtacacatgtgacaatcaccagtgtatctccaagaactgggtgtgcgacaccgataacgattgtggagacggttccgatgaaaagaattgcaatagtacagagacctgtcaaccttcacagtttaattgccctaaccacagatgtatagatctgagctttgtgtgcgacggagataaagactgcgtggatggcagcgacgaggtagggtgcgtactcaactgtacagccagtcagttcaagtgtgcatcaggggacaagtgtatcggagtgactaacaggtgcgacggcgtttttgactgcagcgataactccgacgaagccggctgtcctactaggcctcccggaatgtgccactccgatgaattccaatgtcaagaggacggcatctgcattccgaatttctgggaatgcgacggtcaccctgactgtctttacgggagcgatgagcacaatgcatgcgtgcctaaaacatgcccttcttcctatttccactgcgacaatggtaactgtatccatagggcatggctgtgtgaccgtgataatgactgtggtgatatgtccgacgagaaggattgtccgactcagcccttccgttgcccaagctggcagtggcagtgcctgggccacaacatatgtgttaacctaagcgtggtgtgcgacggaatcttcgactgccctaatggtactgacgagtccccactgtgtagtaaatttcccgatcattctctgcttgcaataaacagcttctag

SEQ ID NO: 122715 - DNA, 1941 bp, synthetic construct
  misc_feature 1..1941: note = Description of Artificial Sequence: Synthetic coding sequence
  source 1..1941: mol_type = other DNA
atgttagcccagcattgtgtggacgctaataacaccttctgtttcgacaacccaagaggactggccctacacccacagtatggatatctgtactgggccgattggggacatagagcttatatcggtcgtgtgggaatggatggcacaaacaaatctgtgataatctccaccaaactggagtggccaaacggtataacgatagattacaccaatgatctcctttactgggcagacgcccatcttggctacatcgaatacagcgatctcgaaggacaccatcgacacactgtgtatgacggcgctctgccccatccattcgcaattacaatttttgaagatacaatatattggaccgactggaatacaaggaccgtagagaaaggcaataagtatgacgggtctaatcggcaaacactcgtgaacactacccacaggccatttgatatacacgtttaccacccataccgacaaccaatcgtcagtaacccctgcggtactaataatggcggctgttcccacctgtgcctcataaagccaggtgggaagggatttacgtgcgagtgcccggatgactttcgaaccctgcagctgtcaggcagcacctactgcatgccaatgtgctctagcacccaattcctgtgtgcaaacaacgagaaatgcattcctatctggtggaaatgtgacggacagaaggactgtagtgatgggtccgacgagctggccctgtgcccccagcgattttgtagactggggcaattccagtgcagtgatggaaactgcacaagcccacagactctctgtaatgcccatcaaaattgccctgacggcagtgatgaggatcggttgttgtgcgaaaatcaccactgtgatagcaacgagtggcagtgcgcaaacaaacgctgcattcccgagagttggcagtgcgacaccttcaacgactgtgaggacaattcggatgaggattccagccactgcgcttcaagaacgtgcagaccaggtcagtttagatgtgccaatggaagatgtattccgcaagcttggaagtgcgatgtggacaacgattgtggagaccattccgacgagccaattgaagagtgcatgagtagcgcgcacctgtgcgataatttcactgaattctcctgcaagactaattacagatgtatacccaagtgggcagtctgtaacggcgttgacgactgcagggataattctgacgagcagggatgtgaagaacgcacttgccacccggtcggtgatttcaggtgtaaaaatcatcactgtatccccctgagatggcagtgtgatggtcaaaatgattgcggggataattcggatgaggaaaactgtgcaccccgcgagtgtacggaatcggagtttcgctgcgtaaaccaacagtgtatcccaagccgatggatttgcgatcactacaacgactgtggagacaattcggacgagcgcgactgcgggatgcgtctgatgaagctgatagttcctcatgcctttctaatggtccatactgcaagactgctgtgtagcaatgcaaagaccatgttcgtaagtcgacacataggtaatgtgatggctatgatgaccgtggccatggtgcagatgaaaaatttcacgtgtgcttggatgttccccgtgatccatcagacggtgtctggcgtaacaaccatagctgctttcattgtgatgagatgtgcaatggtctggatgactgtggagatggaactgatgcggcagcgttctacagtggaaaaccgcccattaaatctggtccagaatatgaacattagtgtggcaatgggtatcgcattccacatgacgatgtgcgtcatgatgccaatgaccgtggtgactggccccatgaactgggttgccattaaagagaagaaagagcatgtgttgaaaatctatgccagcaagatcgtgcccaactag

SEQ ID NO: 122716 - DNA, 2313 bp, synthetic construct
  misc_feature 1..2313: note = Description of Artificial Sequence: Synthetic coding sequence
  source 1..2313: mol_type = other DNA
atggagaagagggctgcggccggtctcgagggggccccaggagccagagcgcagcttgctgtggtctgcctcgtcaacatcttcctcactggccggttatccagcgccgtccctgccctcgctgcctgtagtggcaagctggaacaacataccgagagacgcggcgttatatacagccctgcctggcctctgaattacccgccaggaacaaactgctcgtggtatatccaaggcgatcgcggagacatgatcacaatcagtttccggaatttcgacgtggaagagagccatcagtgcagcctggactggctcttgctcggacccgctgccccaccacggcaggaagcctttcgcttatgtgggtctgccattcctccagccttcatctccgctcgtgatcacgtctggattttttttcacagcgacgctagcagtagtggccaagcgcaagggtttcggctctcttacatcagagggaaattaggacaggctagctgtcaagctgacgagttccgttgcgataatgggaagtgccttccaggtccctggcagtgtaataccgtggatgaatgcggggatggatctgatgagggaaactgcagcgcccctgcatctgagccccctggctcactgtgcccgggtggtactttcccatgcagcggcgctcggagcaccaggtgccttccagtcgagcgccgatgtgacgggctgcaggattgtggggacgggtccgatgaagcaggttgccccgatctggcatgcggaagaaggctcgggtccttttatggttcatttgcctcccctgatctgttcggcgcagcacgcggcccatccgatctccactgtacctggttggtcgatactcaggactcccgacgagtcctgctgcagctggaattaaggcttgggtacgacgactatgttcaagtctatgaaggtctaggggagagaggggatagactcctgcagaccctgtcctaccgatctaatcatcgtccagtaagcctggaagcggcccagggtagactcacagttgcatatcatgctagagccaggtctgccgggcatggtttcaatgctacgtatcaggttaagggctactgcctcccttgggagcagccatgtggctcaagttctgattctgacggcgggtccctgggcgatcaaggatgtttttcagagcctcagaggtgcgacggatggtggcactgcgctagcggcagagacgaacagggttgcccagcttgcccacctgaccagtacccctgtgagggtggcagcggcctgtgctatacacctgcggatagatgtaataaccagaagagctgtcccgatggcgcagatgaaaagaattgcttttcttgtcagcctgggacgttccactgcgggaccaacctctgtatcttcgagacatggcgttgtgacggacaggaggactgccaagatgggtctgatgagcacgggtgtctggccgccgtccctcggaaagtgatcactgccgccctgatcggaagcctggtgtgtggcctgctgctggtcatcgcgctcggctgtgccttcaaattgtatagcctaagaacccaggagtacagggccttcgagacacagatgacccgcctggaggctgagtttgtcaggagagaagctccaccatcatatggtcaactcattgctcagggcttaataccacctgtggaggacttccctgtgtatagtgcttctcaggcaagtgtgttgcagaatttgagaacagcaatgagaagacaaatgcgtagacatgcttctagaagagggccatccagaagacggctggggaggctgtggaacaggctctttcaccgtcctcgagcccctaggggacagataccccttctgacagccgctcgcccctcccagactgtgttgggggacgggtttttacagcccgctcctggagctgcacccgacccacctgcaccgctgatggacaccggctctactagagcagcgggagacagacctccgtccgcaccagggcgggcgccagaggtgggaccttcaggcccacctctcccctctgggctaagagacccagagtgccggcccgtggataaagacagaaaggtgtgtcgggagccgctagtggatggcccagctcctgctgacgccccgagggagccctgttccgcccaggatccacacccacaagtgtcaacggcgtccagcactctaggcccgcattccccagagcccctgggcgtttgtcggaatccgccccctccatgcagccccatgctggaagctagcgacgacgaggcactgcttgtatgttag

SEQ ID NO: 122717 - DNA, 858 bp, synthetic construct
  misc_feature 1..858: note = Description of Artificial Sequence: Synthetic coding sequence
  source 1..858: mol_type = other DNA
atgggaaatcaccttccagcattcggccctaggccaccaggtagacgcgaagccctgctttctcctgattgtccactgctgagactccacccaacaggcaagctgggccaggccagttgtcaagccgacgagtttagatgcgataacgggaaatgcctccccggtccttggcaatgcaacaccgtggacgagtgtggcgatgggtccgacgaaggtaactgctcggcaccagcatccgagcctcccggtagtctgtgtcctggcggcacattcccctgttctggtgcacgcagtacaaggtgcctgcctgtggaaagacgctgtgacggtttgcaggactgcggggatgggtcagatgaagccggatgcccagatctggcctgtggccgccgcctgggcagcttctatggttcttttgcatcacctgacttatttggagcagcgcgtggtccttctgatttgcactgcacgtggctggtggatacacaggatagccgcagagtgctgctgcagttggagctgcggctcggatacgacgattacgttcaggtgtatgaagggttgggagaacgcggggatcgactgcttcagaccctgagctatcggagcaaccaccggcccgtgagcttggaggctgcacaagggcggctcactgtcgcttatcatgccagggcccgttccgcaggccatggttttaatgccacatatcaagtcaaaggatattgtctgccctgggagcagccctgcggaagtagttcagatagcgatggaggcagcctgggggaccaaggctgcttttctgagcctcagcggtgcgatggatggtggcactgtgcttccgggagggacgaacaatag

SEQ ID NO: 122718 - DNA, 5718 bp, synthetic construct
  misc_feature 1..5718: note = Description of Artificial Sequence: Synthetic coding sequence
  source 1..5718: mol_type = other DNA
atgcggcgccagtggggagctctgttattaggagccctgttgtgcgcccacggtctggcctctagccctgagtgcgcctgcgggcgcagtcactttacctgtgctgtgagtgctcttggggagtgcacctgcatacctgcgcagtggcagtgtgacggagataatgactgtggcgaccattcggatgaggacggttgcatcttgcctacatgctccccacttgactttcattgtgataacgggaaatgtatcagacggagctgggtgtgtgacggcgacaatgactgcgaggacgattctgacgaacaggattgcccgccacgagagtgtgaggaagacgaatttccttgccagaacggttactgcatccgttctctctggcattgcgacggcgataacgattgtggagacaactccgacgagcagtgcgacatgaggaaatgcagtgacaaggagtttaggtgctccgatgggtcatgtatcgcagagcattggtactgcgatggggacacagactgtaaagacgggtccgacgaggagaattgtccatccgccgtcccggcacctccatgtaatctggaggagtttcagtgtgcctatggtcgttgcatcttagatatctaccattgcgatggagacgatgattgcggggactggagcgatgagtctgattgttctagtcaccagccatgccggtcaggggaatttatgtgcgacagcggcctgtgcatcaacgccggttggaggtgtgatggggatgccgattgcgatgaccagtcagacgagagaaactgtactacatccatgtgtacagcggaacagtttcggtgtcactctggtagatgtgtgcggctgagctggcgttgcgacggggaggatgattgtgctgacaattcagatgaggaaaactgtgaaaatactgggtccccccaatgtgcgctggatcagttcctttgctggaacgggaggtgcataggccagcgtaaactttgcaacggcgttaacgactgcggtgataacagcgacgagagcccccaacagaattgccggccgagaactggagaagaaaactgcaacgtgaataacggtgggtgtgcgcagaagtgccagatggttcggggggcagtacagtgcacttgtcacacagggtacagactaactgaggacgggcacacttgtcaggatgtgaacgagtgcgcagaagaggggtactgttctcagggctgcacaaattccgagggggccttccagtgctggtgtgagactggctacgagctgcgtccagatcgcaggtcttgtaaggcccttgggccagagccggtgttactgtttgccaaccgcattgatatccgtcaagtccttccccatcgatctgagtacactctgctgctgaataatctcgaaaatgccatcgctttagactttcaccaccgccgagagctcgtcttctggagcgatgtgacccttgaccgcatcctccgcgccaacctgaacggctctaacgttgaggaggtggttagtacaggtcttgagagccccggaggccttgctgtggattgggtgcacgacaagttgtactggacagacagtggcacttcacgcattgaggtggccaatcttgacggcgcccataggaaagtgctactgtggcaaaatttggaaaagcctcgcgccatagcactgcatcccatggagggcactatatattggaccgattggggcaatacaccccgaatagaggccagtagcatggacgggagcgggagaaggataatagcagacacacacctgttctggcccaatgggctgactatagactatgccggcaggcgaatgtactgggtggatgccaaacaccatgttattgagcgcgcgaatctcgacggatcccatcggaaggcggtgatttcacagggtctgccgcatccatttgctattaccgtgttcgaggatagcctctattggactgattggcacacgaaatcaataaactccgctaacaagttcactggaaaaaatcaggagattattagaaacaagctccattttccaatggacatccacactctgcacccccagagacagcccgccggcaaaaatagatgcggggacaataatgggggctgtacgcacctgtgcttgcccagtggtcagaattatacttgcgcttgcccaactggctttcggaagataagcagtcatgcctgtgcacagagcttggataagttcctcctgtttgcccggagaatggacatccgacgtatctcctttgacacagaggacctatcagacgacgtgattccattagcagacgtgcgcagtgcagtggcgctcgactgggattccagggacgatcacgtgtattggactgatgtaagcaccgataccatcagtagagccaaatgggacggaaccggacaagaagtagttgtcgatacttcactcgaatctccagctggcctggctattgactgggttaccaataagctctattggaccgatgctggcactgataggatcgaagtggctaataccgacggaagcatgcgtacagttttgatctgggagaacctggatcgcccaagggacatagttgtagagccaatggggggctacatgtattggaccgattggggcgcctctcccaagatcgagcgggctgggatggacgccagtggcagacaggtaatcatttccagtaacctcacatggcccaatggactggcaattgactatggttctcagcggttgtactgggctgacgcaggtatgaaaactatcgaatttgccgggcttgacggcagcaaacgcaaggtactgattggcagccaactgccccatcccttcggcttgactctttatggtgaacgaatttattggaccgactggcagactaagtctatccagtccgctgaccggcttaccgggctggatcgggaaactctccaggaaaatttagaaaacctgatggacattcatgttttccatagacgcaggccgccagtgtcaacgccctgcgctatggagaacggagggtgcagtcacctttgtttgaggtcgcccaacccatctggattctcatgcacgtgccccacaggaattaatctcttgtctgacggcaaaacatgctcacctggcatgaatagttttctgatctttgcccggcgcatcgatatccgtatggtgtcgctcgatattccttactttgcagatgtcgtggtgcctataaacattacgatgaagaataccatagctatcggcgtggaccctcaggaggggaaagtatactggagcgatagcactttgcacaggatatcccgcgccaatctagacggctcccagcatgaggacatcatcaccacgggcttacaaactaccgacggccttgccgtggacgccataggccgtaaggtatactggacagacaccgggacaaaccgaattgaagttgggaatctcgacgggtctatgcgcaaggttttagtgtggcagaatctcgattctcctcgagccatagtgctctaccacgaaatggggtttatgtactggactgattggggcgagaatgctaagctggagcgatctggcatggacggcagcgatagggctgttttgatcaacaataacttgggctggcccaatggattaacagtggacaaggcatcctcccagctcctttgggccgacgcgcatacggagcggatagaggctgcggacctgaatggggccaacaggcacaccctggtttccccggtgcagcacccttatgggctcacccttctcgactcctacatctattggacggattggcagactcgctctatccatcgcgccgataaggggactggaagcaatgtgatcctggttcgatccaacctgccagggctaatggacatgcaagctgtggaccgcgcacagcctctcgggttcaacaagtgtggctctcgtaatggtggttgtagccacctctgcctgccacggccttccggctttagctgtgcctgtcctactgggatccaattgaaaggtgatggaaagacctgcgacccaagtccagaaacctatcttttattcagctccagaggatccatcagaagaatcagtctggatacatctgaccacactgatgtgcacgtgcccgtccccgagctgaacaacgtcatttcgctagactacgatagcgtggatggcaaggtctactatactgacgtgttcctggacgtcatcaggcgtgctgacctcaacggttctaacatggaaacagtgatcggtcgggggttgaaaaccacagatgggctggcggttgattgggtcgcaagaaacctgtactggacggacactgggcggaatacaattgaggccagcagactcgatggcagttgtcggaaggtgttgattaacaattcactggacgagccacgagctattgccgtgtttcctcgaaagggttacctgttctggactgactggggccacattgctaaaattgagagggccaacttagatgggtccgagcggaaagtactgattaacaccgatctgggctggcccaacgggttaactctggactacgatactcgccggatttattgggtggatgcccatctcgatcgcattgagtctgcggacctcaacggcaaactcagacaggtgctggtgagccacgtttcgcacccattcgcactgactcagcaggaccgctggatttactggactgactggcaaacaaagagcatacagcgggtagacaagtattctggaagaaacaaggagaccgtcctggcaaatgtggagggcctgatggatatcatcgtggtctcaccacagaggcagacaggaactaatgcctgcggagtcaataatggtggatgcacccacctgtgttttgcgagggctagcgattttgtctgcgcatgtccggatgaacccgattccaggccttgtagcctcgtacctggactggtgccgccagccccccgagcgaccgggatgtccgagaagagtcccgttctccccaatacaccccctacgacactgtactccagtactacaaggacccgcacctccctagaggaggtggaaggacgttgcagcgagcgcgacgctaggctgggactgtgtgcaagatctaatgatgccgttcccgccgcaccgggcgaaggcctccatataagctacgcgatcggtggccttctgtcaatcctcttaatactcgtggtaatcgccgctcttatgctgtatagacataaaaagtcaaagttcacggaccccggtatgggaaacctgacttactctaacccctcctatagaacatcaacccaagaggtaaagatcgaagccatccctaaacctgcaatgtataaccagctgtgctataaaaaagagggcgggcccgatcataattacaccaaggagaagattaagatagtggaagggatttgccttctatctggcgatgatgcagagtgggacgatctgaaacagctcagaagtagtcggggcggacttttgagggatcacgtgtgcatgaaaactgacactgtctcaatccaggcctccagtggatccttagatgacacagaaaccgagcagctgctgcaggaagagcaatccgaatgttccagcgtccacactgccgcaacgccagagaggagagggagcctacccgacactgggtggaaacatgaacggaagctatcctccgaaagccaggtgtag

SEQ ID NO: 122719 - DNA, 4848 bp, synthetic construct
  misc_feature 1..4848: note = Description of Artificial Sequence: Synthetic coding sequence
  source 1..4848: mol_type = other DNA
atggaggcggccccgcccggaccgccgtggccactgctactcttgctccttttgcttctggcactgtgtggctgccctgctccagccgccgcctcccccctcctcctcttcgcgaataggcgggatgttagactcgttgatgctggaggcgtgaagctggagtctactatcgtggtcagcggactggaagacgccgcagcggtggatttccagttctccaaaggcgcggtctactggactgacgtctctgaggaggccattaagcagacgtacctgaatcaaactggagcagcagtgcaaaatgtcgtgataagtggcctggtgtcacccgacggcctggcgtgtgactgggtgggaaagaagctgtattggacagattccgagaccaataggattgaggtggccaacttgaacgggacttctagaaaagtgctgttttggcaggacttagatcagcctagggccatcgccctggacccggctcacggatatatgtactggactgactggggcgagacccctcgcattgagagggccggcatggacggctctaccaggaaaatcattgtcgattctgacatttactggcccaatggtttgactattgacctggaggaacagaaactgtactgggccgacgccaaactgagcttcattcaccgtgccaaccttgatggcagttttaggcagaaagtggtggagggctcactgacgcacccttttgcgctgactctctccggcgacactctttactggactgactggcagacgcgctccatccatgcctgcaacaagcgcactggtggcaaacggaaggaaatcctgtctgccctctacagtccaatggatatacaggtcttgtcccaggagagacaacccttcttccatacacgctgcgaggaagacaacggcggctgtagtcatctctgcctcctgtcaccgtctgaaccattttacacgtgcgcatgtcccactggcgttcagttgcaagataatggccggacatgtaaggccggggccgaggaggtgctcttactggcacgccgcaccgatctccggagaatctccctggatactccagactttacggatattgtgttgcaggttgatgatatcagacacgccatcgccatcgactacgatcccctggagggatacgtctattggacggacgatgaagtacgagccattcgccgcgcctacctggatggatctggtgcgcagacattggttaataccgaaatcaacgacccagacggaatcgcagtggattgggtcgcgagaaacctctattggacagacactggcaccgatcggatcgaagtcacccgcctgaacggcacctccaggaagattctggtctccgaggaccttgacgaaccacgagctatcgcgctgcatcctgtgatgggtttgatgtattggacagactggggtgaaaatcccaagattgaatgcgccaaccttgacggacaggagagacgagtgttggtgaacgcctccctcggatggcccaatggcctcgcactagacctgcaggagggtaagctatactggggagacgctaagactgataagatagaggttattaatgtggacgggactaagagacggaccttattagaggacaagctgcctcatatttttgggttcacgctgcttggggattttatttactggacagactggcaaaggcgctccatcgaacgtgtgcataaggtgaaagcctctagagatgtgataattgatcagctgcctgaccttatgggcctgaaagctgtcaacgttgcgaaggtcgtagggaccaacccctgcgctgatcggaatggagggtgttcacacttatgcttcttcacaccccatgctacacggtgtggttgccccatcggtctagagcttttgtcagatatgaaaacctgtattgttcccgaagctttcctcgtgttcacaagccgagccgccatacacaggatttccctggagaccaacaacaacgacgtggctattcctctgaccggcgttaaagaagcttctgcactggactttgacgtatccaataaccacatctactggacagacgtgagcttaaaaaccatttcacgtgctttcatgaatggctcctcggtcgagcacgtcgttgaatttggactggactaccctgaaggtatggcagttgattggatggggaagaatttatactgggctgacaccgggactaatcggatcgaggtggcaaggctggacgggcagttcagacaggttctcgtgtggagggacctggataaccctcggtctctcgcattggatccaacaaagggctacatttattggactgaatggggcggcaagccaaggattgtgcgggccttcatggacggaacaaactgcatgacactcgtcgacaaagtcggaagggcaaacgacctcaccatcgattatgccgatcagagactctactggaccgacctggataccaacatgatcgagtcgtccaatatgctcggacaggaacgtgtcgtgatagccgacgatctgccacatccttttggtttgacacagtattcggattatatttactggaccgactggaacctgcatagtattgagcgagctgataagacctctggcaggaataggaccctgatccagggccatctggatttcgtgatggacatcctcgtctttcattctagcaggcaggatggacttaacgattgcatgcataacaacggccagtgcgggcaattatgcctggctatccccggagggcacagatgtggttgtgcttctcattatacactggatccatcttctcggaattgttctccgcccactacctttctcctgttctcccaaaaaagcgcaatctcgcgcatgatccctgacgaccagcattcccccgacctgatcctcccgttacacggcctccgcaatgtaaaggccattgactacgaccccctcgacaagtttatctactgggtggacggtcggcaaaatatcaaaagagccaaagacgatggcactcaacctttcgtgctgacatcactgtcccagggccagaaccccgaccgccagccccacgacctgtcgatcgatatctatagcagaaccctgttttggacatgtgaagccaccaacacaatcaatgtgcaccgcctcagcggagaggctatgggagtcgttctccggggcgacagggataaaccgcgggcaatagttgtgaatgcggagcgagggtatctctacttcacaaatatgcaggaccgggccgctaaaatcgagcgggcagctcttgatggaactgagcgggaagtgttattcaccacaggactcataagacctgtggccctggtcgtcgacaacacattgggcaaattgttctgggtcgacgcagatctcaagagaattgagagctgcgatctgtccggggcgaacaggctgactttggaggatgcaaacatagtccagcccctgggattaaccattctgggaaagcacctgtattggatcgataggcagcagcagatgatcgaaagggtcgagaagactaccggcgataagagaacgagaattcaggggagggttgctcacctgaccggcatacatgcagttgaggaggtgtctctggaagaatttagcgctcacccatgtgcccgggacaatggaggatgttcacacatctgcatcgctaaaggagatggcaccccaaggtgctcatgccctgtccatcttgtacttctgcagaatcttctgacgtgtggagagccaccaacctgcagcccggatcagttcgcctgcgccacaggagagatcgattgtattccgggggcctggcgctgcgatggatttccagagtgcgacgatcaatcagatgaggaaggctgccccgtctgtagtgccgctcaatttccgtgcgctcgtggccagtgcgtcgatctgcggctgcgatgtgatggagaggccgattgccaggacagatccgacgaagccgactgcgatgctatatgtctgccgaaccagtttcgatgtgcttccgggcaatgcgtgctgataaaacagcagtgcgacagtttccccgattgtatcgacggatcagatgaactgatgtgcgagatcaccaagccccctagtgatgatagcccagcccatagctctgccatcgggcccgtcattggtatcattttgtccctgtttgtgatgggcggagtctacttcgtctgccagcgggtggtatgccagaggtatgcgggcgcaaatgggccctttccccacgaatatgtgagtggcacaccacatgtaccattgaacttcattgctcccggggggtcccagcatggacctttcacaggtatcgcctgcggaaaatccatgatgagtagcgtgtccctgatgggcggacgcggtggcgtccccctgtacgaccggaaccacgtcaccggagcaagcagctcttcaagttcttctacaaaggccacactgtacccaccgatactgaacccaccccctagtccagccacggacccctccctatataatatggacatgttctatagtagcaatataccagctactgcacgcccctaccggccctacatcatccgcggcatggccccccccaccaccccttgttccacggatgtctgtgacagcgactatagtgcatctcgctggaaagcctctaagtactatctggacctgaattcagacagtgatccttatccaccacccccaactccccacagccagtatttgtctgccgaggatagctgccccccctctcccgccaccgagagatcttacttccatctcttcccgcccccgccttcgccctgcaccgattcatcttag

SEQ ID NO: 122720 - DNA, 4842 bp, synthetic construct
  misc_feature 1..4842: note = Description of Artificial Sequence: Synthetic coding sequence
  source 1..4842: mol_type = other DNA
atgggggcagtactccgcagcctgctggcttgctctttctgcgttctgcttcgggccgccccactgctgctgtatgcgaatcgtcgtgatcttaggctagtcgacgcaacaaatggaaaggaaaatgcgactatcgtggtgggaggacttgaagatgctgccgcggtagactttgtcttctcacacggcttgatctactggagtgacgtgagtgaagaggcaatcaagcggacagaattcaataaaactgaaagcgtgcagaatgtagtggtctccggactgttatcaccggacgggctggcatgcgactggctaggagagaagctttactggacggactccgagactaatcgcattgaagtgtccaatctggatgggtcgctgaggaaagtgcttttttggcaagagctcgaccaaccccgcgcaattgccttggacccgtctagcggattcatgtattggacagactggggtgaggtgcccaaaattgagagagccggcatggacgggagttcaagatttattataataaattctgagatctattggccaaatggcttgacactggactatgaggaacagaagctttactgggccgacgccaaactgaattttatccacaagtctaatttggatggcaccaatcgtcaggcggtggtcaaaggcagtttgcctcatccttttgccctcactctctttgaagatatcttgtactggactgattggagtacacactctattttggcttgtaataagtacacaggagagggcttgcgcgagatacacagtgatatcttctctccaatggacattcacgcattcagccagcaacggcaacctaacgctaccaatccatgcggaatcgataatgggggttgctctcacctgtgtttaatgtctccagtgaagccattttatcagtgcgcctgccctactggggtgaagcttctggaaaatggaaagacttgcaaggatggtgccaccgaactgctgctgttagcccgccggacagaccttcgccgaatttctttggatacccctgatttcactgatattgttctccagctggaggatattaggcacgccattgctattgactatgacccagttgagggttacatttactggacagatgatgaagtccgtgccatccgacgctccttcatagacggatccgggagccaattcgtggtgacggcccagattgcccatcccgatggcattgccgttgactgggtggctcgcaacctgtactggacagatacaggaaccgaccgcatcgaagtaacaaggttaaacggcactatgcgtaagatcctaatctccgaagacttggaagagccgagagcgattgtgctcgatcccatggtggggtatatgtattggactgactggggggaaatccccaaaattgaacgagcagctctggatgggtcagacagggtagtcctggtcaacacctcacttggctggccaaatggactagccctggactacgatgaaggaaaaatctactggggtgatgccaagacggataagatagaggtcatgaatacggatggaacaggccgaagggtccttgtggaagataagattccccatatcttcggtttcactctcctgggcgattacgtatattggacagattggcagagacggtcaatcgagcgggtgcacaagagatcagctgaacgtgaagtgatcatagatcaactgccagacctgatgggcctcaaggccacgaacgtgcaccgggtgatcgggtcaaatccctgcgcagaagaaaatggaggttgtagccacctgtgtttgtatcggccacaaggattgcgatgtgcttgtcccatcggatttgagctgattagcgatatgaagacgtgcattgtcccggaagcgtttctgctgttttctcggagggccgatattcgcaggattagtctagagaccaataacaataacgttgctattcccctgacgggggttaaagaggcttctgcccttgactttgatgttactgacaaccgtatatactggactgatataagcctgaagacgatcagtcgggcttttatgaatggttcggccttggaacatgttgtggagttcgggctggattatccagaagggatggccgttgactggctgggaaagaacctatactgggctgatacaggcaccaaccggatcgaggtgtcgaagctcgacggacaacataggcaggtgctggtttggaaagacctggactcccccagagcactcgctttggaccccgccgagggctttatgtactggactgaatggggcggcaagcctaaaatagacagggctgccatggatggcagcgaacgcaccacactggtcccgaatgtgggccgggctaatgggttaacgattgactacgctaagagacgcctgtactggacggatttggatactaatttaatcgagagtagtaatatgctaggcttgaaccgggaagtgattgccgatgatctcccacatccttttggcctcacccagtaccaggactacatctattggacagactggtctagacggtcgattgaacgggctaataagaccagtggacagaatcggacaatcatccagggccatctcgattatgtgatggacatcttagtcttccacagctcaaggcagtccggctggaacgaatgcgcgtcttccaacgggcactgttcacatttgtgtctcgccgttccagtgggcggctttgtgtgtggatgtccggcacattactccctgaacgcagataatcgaacatgttctgccccaaccactttcctgctgttcagccagaagagcgccattaaccggatggtgattgatgaacaacagtcaccagatatcatcctcccgattcattccctacgcaacgtgagagccatcgattatgaccccctggataagcagttgtactggattgattctcgccagaatatgatccgcaaagcccaggaggacggcagccaaggattcaccgttgtggtttcaagtgtgccctcacagaaccttgagattcagccttacgatctctccatcgacatctatagtagatacatatactggacctgtgaagccaccaacgtgattaatgttacaagactggacggaaggtctgtaggcgtagtcctgaagggcgagcaggaccgtccacgtgcggtggttgtgaacccagagaagggttatatgtactttaccaacttgcaggagagaagtcccaaaatagagcgcgccgctctcgacggcaccgaaagggaggtcctgttcttctcaggactcagcaagcctattgctctggctcttgactctcgtttaggcaaattgttttgggctgacagtgacctgcgtcgcatcgagagctcggatctgagtggtgcgaatcgcattgtgctggaagactctaatatcctccagcccgtggggcttactgtctttgagaactggttatactggattgacaaacagcagcagatgatagaaaaaattgatatgaccggaagagagggaagaactaaggttcaggcccgcatagcccagctatcggacatccacgctgtcaaagaactgaacctccaggagtatcgccaacatccgtgcgcccaggacaatggtggctgtagccatatctgtctggtcaaaggcgacggtactactcgttgcagttgccctatgcacttggtgttgttgcaggacgaactttcctgcggcgaaccacctacttgttctccacagcagttcacgtgttttaccggcgagatcgactgcatcccagtggcttggcgatgcgatggttttactgagtgcgaagaccactctgacgagttgaattgtcctgtctgtagcgagagccagttccaatgtgcctctggccagtgcattgatggcgccttacggtgcaatggtgatgccaattgccaggataagagcgacgagaagaactgtgaggtgctctgcctcattgaccaattcaggtgcgcaaacggccagtgcatcggaaagcataaaaagtgtgaccacaatgtagattgttctgacaaatcggacgagctggattgttatccaaccgaggaaccagccccacaggctaccaacacagtcggctccgtcatcggggtgatcgtgaccatcttcgtgtccgggactgtgtacttcatctgccagaggatgctctgccccaggatgaagggcgatggcgaaactatgactaacgactacgtcgtgcacgggccagcctccgtgcctctcggttatgtccctcatccctcgagcctctccggtagtctccctggtatgtctcgagggaaatcaatgatctccagcttgagcatcatgggcgggtcatccgggccgccctacgatcgcgctcacgttactggcgcctctagctcatcctctagctccaccaaggggacctacttccccgccatcttgaatccgccgccttccccggccactgagaggtctcactatacaatggagtttggctacagttccaactcaccttcaacgcacagatcttattcatacaggccttattcttatcgccactttgcacctccaacgactccatgcagcacagatgtttgtgattctgactacgcaccttctcggcggatgacgtcagtggccacagcaaaagggtacacctcagacctgaactacgactcagagccagtgccgcccccgccaacccccagaagccagtacctgtcagcggaggaaaattacgaatcatgtccgcctagcccatataccgaacgcagctacagtcatcatttgtaccccccacctcctagcccctgtacagactcctcttag

SEQ ID NO: 122721 - DNA, 4437 bp, synthetic construct
  misc_feature 1..4437: note = Description of Artificial Sequence: Synthetic coding sequence
  source 1..4437: mol_type = other DNA
taactcgaccagccaagagcaattgcactcgacccatcctcagggtttatgtactggactgactggggggaggtgcctaagatcgagagagctgggatggacgggtcaagccgatttatcattattaactccgaaatctactggcccaacggcctgactctggactacgaggaacagaagttgtactgggcagatgcgaagctgaatttcatacacaagagcaacttggacgggaccaaccgtcaggctgttgtgaagggatctttgccgcatcccttcgccctgacactgtttgaagatatcttgtattggacagactggtccactcactctattctcgcctgcaataagtacactggagaggggctgagagaaattcactccgacatcttttcaccaatggacattcatgccttctctcaacagcggcagccgaacgccacgaacccgtgcggaatcgataacggcggatgctcacacctgtgcctgatgtctcctgttaaacctttctatcagtgcgcctgccctacaggggttaaactgcttgagaacggaaaaacatgtaaggacggagctaccgagttgctgctgctagcccgcagaactgacttgcgcaggatcagccttgatacccccgatttcactgatatcgtgctccagctcgaagacattcgtcacgccatcgcgatagattatgatccagtggagggatacatctactggacagacgacgaggtccgggcaatccgccgttcctttatagacggctctggctcacagtttgtggtcacagcacaaattgcgcatcctgacgggattgcagtggattgggtcgcccggaacctgtactggaccgataccggcactgatcgcatcgaagttacgagactgaacgggactatgcgaaaaatccttatcagcgaggacctcgaggagccacgcgccatcgtgctagatccaatggtgggttacatgtactggactgattggggggaaatccctaagattgagcgcgctgcattggacggatccgacagggttgtgctcgtcaacactagcttgggttggcccaatggcctggctctcgattacgatgaaggaaagatttactggggggatgccaaaacggataaaatcgaagtgatgaacaccgatggtacaggaagaagggtccttgtggaggataagattccacacatctttggatttacgttactcggagactacgtatactggaccgactggcagcgccgatccatcgaaagggtccataaacgaagcgcagaacgagaggtcatcattgaccagttaccggatctgatgggcctgaaagccacaaacgtgcaccgggtcatcggctccaatccttgcgctgaagagaatggtggatgctctcacctctgcctgtaccggccacaaggcctgagatgcgcttgtcctattggcttcgagttgatttctgatatgaagacgtgtattgttccagaggctttcctcttgttttccagacgggctgacatccggagaatctccttggaaactaacaataacaatgtggcgatacctctcacaggtgtgaaagaggcctctgccttggatttcgacgtgaccgataatcggatttattggaccgatatttcactcaagacaatcagccgcgcgtttatgaatggctctgccctggagcacgtggtggaattcggcttggactatccagagggcatggccgtcgactggctcggcaagaacctgtactgggcggacaccggaacaaacagaattgaggtgtctaaactcgatgggcagcatcgccaggttcttgtttggaaagaccttgactccccacgggcactggcccttgaccctgcagaaggatttatgtactggactgagtgggggggcaaaccgaagatcgatagggctgccatggatgggtctgagaggacgacactggtccctaacgttggccgcgccaacggactaacaatcgattatgcaaaacgaagactctattggacggacttggataccaatctcatcgaatcctctaatatgctggggctcaaccgggaggtgatcgcagacgatttgccacacccgtttgggctcactcagtaccaggactatatttattggactgattggagtcgtcgaagtattgagagggcgaataaaacatcgggccaaaatagaactatcattcagggccatttggactatgtgatggatatcctcgtgtttcactcctcccgtcagtccggttggaacgagtgtgcaagcagcaacggtcactgctcccatctatgtctggctgtacctgtcggaggtttcgtgtgcgggtgtccagctcattactcactgaatgcagacaatcggacctgctctgcccccactacattcctgttgtttagtcaaaaatcggctattaaccggatggtgatcgacgagcagcagtctcccgatatcatcctgcccattcattctctgcgaaacgttagagctatcgattacgatcctctggataaacagttgtattggatagatagcaggcagaacatgatccggaaggctcaagaggatggatctcagggattcactgtggtagtgtcttccgtgccctcacaaaacctggagatacagccgtacgacctgagcatcgacatttactctcgctatatctattggacttgcgaggccactaacgtgattaacgtgacccgccttgatggtagatctgtgggtgtggttctaaagggcgaacaggatcgcccaagagctgttgtggttaacccagagaagggctatatgtattttaccaatctccaggagcggtccccaaaaattgaacgcgctgcactcgatggaacagaaagggaggtcctcttttttagcgggctctccaagcccatagctcttgcccttgacagccgtctcgggaagctcttctgggccgactcagacctccggcggatcgaaagctctgatcttagtggtgcgaataggattgttctggaagattctaacatcttgcaacctgtcggcctcacagtgttcgagaattggctgtactggatcgacaagcagcaacagatgattgagaagatcgatatgaccggacgggaggggcggactaaggtgcaggccaggatcgctcagctctcagacatccacgccgtgaaagaactaaacctacaggagtacaggcagcatccctgtgcacaagataacgggggttgtagtcatatttgtctagttaagggggacggcacaactcggtgctcttgtccaatgcacttagtcctcctgcaagacgagctttcatgcggagagccacccacctgttccccacagcagtttacatgtttcactggtgagatagactgtattcctgtggcctggaggtgtgacggattcaccgagtgcgaggaccacagtgatgaacttaattgccccgtctgcagtgaatcacagttccagtgtgcctcaggccagtgcatagatggtgcacttcgctgtaacggcgacgctaattgtcaggataagtcagatgagaaaaactgcgaagtgctgtgcttaatcgaccaattcaggtgcgcgaatggccagtgcattggcaaacacaagaaatgtgatcacaacgtggactgcagcgacaaatccgacgaactggactgttacccaacagaggaaccagccccacaggcaaccaacaccgtcggtagcgtgattggggtcattgtcactatttttgtatccgggactgtttatttcatatgtcaacgtatgctatgcccacgcatgaagggagatggcgagactatgactaacgactacgtcgtgcacggacccgcctcagtccctctcggctatgtgcctcaccctagctcactctctggatcactgccgggcatgtccaggggtaagtcaatgatatcatccttaagcatcatgggaggatcctcaggccccccatacgacagagcccacgttactggcgccagtagctcttcatccagttctacgaaagggacttacttccctgctattctaaacccacctcctagtcctgccacggaaagatcacattacactatggagtttggctacagctcaaactcccctagcacccaccggtcatactcatacagaccatattcatacaggcacttcgccccacccacaacgccatgttcaactgacgtctgtgattcggattacgctccttctcgccgcatgaccagtgttgcgaccgccaagggctacacctcagacttaaattatgactctgaacccgtccccccaccgcctacgccccgcagccagtatctgtctgcggaagagaattacgaaagctgcccaccatctccctatactgaaagatcttactctcaccacctgtaccccccacccccctccccgtgtacagactcctcctag

SEQ ID NO: 122722 - DNA, 2382 bp, synthetic construct
  misc_feature 1..2382: note = Description of Artificial Sequence: Synthetic coding sequence
  source 1..2382: mol_type = other DNA
atgggcttacctgagcccgggcctctcaggttactggccttgcttttgctgttacttctcctcctgctcctccagttgcagcacctcgcggccgctgcagcagaccccttgctcggtggccaggggcccgctaaagattgcgaaaaggatcagttccaatgtagaaatgaacggtgcatcccttccgtgtggcgctgtgacgaggatgatgattgcttggatcactctgacgaggacgactgtcccaagaagacctgtgctgattcagactttacctgcgacaatggacactgtatccacgagaggtggaagtgtgacggagaagaggaatgtccagacggctcagacgagagcgaggcgacttgcacaaaacaggtgtgcccagccgaaaaactctcatgcggcccaacctctcacaaatgtgtgccggcctcctggaggtgtgatggggaaaaggactgcgagggaggggcagacgaagcaggttgtgccacctggctgaatgaatgtctgcacaataatggcggctgtagtcatatatgcaccgatctgaagattggtttcgagtgcacatgtcccgccggctttcaactgctggaccaaaagacctgcggggacatcgacgaatgcaaagaccccgacgcgtgctctcaaatatgcgtgaactacaagggatacttcaagtgtgagtgttacccaggttacgagatggaccttctgactaagaattgtaaggccgcggctggtaagagccctagccttattttcacaaacaggcacgaggtgcggcggatcgacctggttaaacgcaattattctagactgattccaatgctgaagaacgttgtggcgctcgatgtggaagtagcaaccaatcgaatctattggtgtgatctttcctaccgtaaaatttactccgcctacatggataaagcgtcggatcccaaggaacaagaagtgctcatcgatgagcaattgcacagcccggaaggtttggccgtcgactgggtgcacaaacatatctactggaccgacagcggcaacaagaccatctccgtggccactgtcgatgggggacgccggaggacccttttttcacggaatctgagcgagcccagggcaattgctgtcgacccactgcggggtttcatgtactggagcgattggggcgaccaagcaaaaatcgaaaagtcaggcctgaacggggtggacaggcagaccctggtcagcgataatatcgagtggccaaatggaatcacactggacctgttgtctcagcgactatattgggtggacagcaaactacatcagctgtctagcattgatttcagtggcggaaaccggaaaacgcttattagttctacagatttcctatcgcatccatttgggatcgcagtcttcgaggacaaggtgttttggacggacctggagaacgaggccatcttctcagccaaccgtctgaacggattggaaatttctatcctcgcagagaatctaaataacccgcatgacatcgtgatctttcatgagttaaagcagcccagggcgccggatgcctgcgaattgtctgtacaaccaaatggaggttgcgagtacctctgcctgccagctccgcaaatctcctcacattcccctaagtacacttgtgcatgccccgacacaatgtggctcggccccgacatgaagaggtgctatcgagcccctcaatcgacatctactacgactttggctagtactatgaccagaactgtcccggccacaacaagagccccaggaaccactgtgcatagatctacttaccagaaccactccacggaaacacctagcctgactgctgccgttccaagttcagtctccgtacctcgtgccccatctatatctccttcgacactgagtcccgccacctccaatcatagtcagcactacgccaatgaagacagtaaaatgggctctactgtgactgccgcagtaattggtatcattgtgcctattgtggtgatcgcactgttgtgtatgtccggctacctcatttggaggaattggaaacgaaaaaatacaaaatcgatgaacttcgacaaccctgtttatcgaaagacaaccgaggaggaggacgaggacgaactccatatagggagaaccgcgcagatcggtcacgtataccccgccgctatttccagcttcgaccgaccattgtgggcagagccatgcctcggagagacaagggagcctgaggaccccgcgcccgccctcaaagagctatttgtgctgccaggagagcccagaagtcagctccatcaacttccaaaaaaccctctctcggagctgcccgtagtgaaatcaaagcgcgtggctctgtctctcgaggacgacgggctcccttag

SEQ ID NO: 122723 - DNA, 2892 bp, synthetic construct
  misc_feature 1..2892: note = Description of Artificial Sequence: Synthetic coding sequence
  source 1..2892: mol_type = other DNA
atgggcctcccggagccaggaccactccgactacttgccctgctgctactgctgctacttcttctgctgttgcaactccagcacctggccgccgcagctgccgatccccttctgggtgggcagggccccgctaaggattgcgaaaaagaccagttccaatgccgcaacgaacgctgtattccgtctgtctggaggtgtgacgaagatgacgactgcctcgaccactcagacgaggatgattgcccgaagaagacctgcgctgattcagacttcacctgtgacaatggacattgtattcatgaacgatggaagtgtgacggtgaggaagagtgccccgacggatccgatgaatcagaagccacgtgtaccaagcaagtatgccccgccgaaaagctgagctgtggaccgacctctcacaaatgtgtccctgcctcctggcgttgcgacggagagaaggactgcgaagggggagccgatgaagctggctgtgccaccctttgtgctccacacgagtttcagtgtggcaatcgcagttgcctggccgccgtgtttgtatgcgatggagacgacgactgcggggatgggagcgatgagcgtggttgtgccgatccagcatgtggaccccgcgagtttcgctgcggcggagacggaggcggggcctgtatacctgagaggtgggtgtgcgataggcagtttgattgtgaagatagatctgatgaggctgctgagctgtgcggaagacccggaccaggggctacttctgcaccagcggcatgcgccaccgcctctcagtttgcgtgtagatcaggggaatgcgttcacctgggctggcgatgcgacggagaccgagactgcaaggataaatccgacgaagccgactgccctctcggcacctgccgcggagatgaatttcaatgcggggatggaacctgcgtgctggcgattaagcactgtaaccaggaacaggactgtcccgacgggagtgacgaggcggggtgccttcagggcctgaacgaatgtctgcacaacaatggcggttgctctcatatctgcacagacctgaaaattggcttcgagtgcacatgccctgccggatttcagctgctcgatcagaagacatgcggcgacatcgacgaatgcaaagacccagatgcgtgttcacagatttgcgtgaattacaaaggttattttaagtgcgaatgctacccagggtacgaaatggatcttttaacaaagaattgtaaagccgccgccggtaaatccccgtctctgattttcactaacagacatgaggtgcggaggatagacctggtgaaacggaattactccagactcatcccaatgttgaagaacgtcgtggctctcgacgtggaggtcgcaaccaatcgaatctactggtgtgatctaagctatcggaagatttactccgcctatatggataaagcctcagacccaaaggaacaggaggtgttaatcgatgaacaactgcattctcccgaggggctcgccgtggactgggtccataaacacatctactggaccgactccggaaataagacaatctccgtggcaacagtcgatgggggccggcgtcggactcttttcagtagaaacctgtcagaaccccgagcaattgcagtggatcccctccgcggattcatgtattggagcgattggggagatcaggccaaaatcgagaaatccgggcttaacggcgtggataggcaaaccctcgtgtctgacaacatcgagtggcccaacggaattacccttgatcttctatcacagcgcctgtattgggtggattccaagctgcatcagctcagctccatcgattttagcgggggaaacaggaaaaccctaatctcatcgactgacttcctgagtcatccgtttgggattgcggtctttgaggataaggtcttttggacggatctcgaaaacgaggccatttttagtgcaaatagattgaacggacttgaaatatcaatcctagccgaaaaccttaacaacccacacgatatcgtgatttttcatgaactgaagcagccgcgtgctccagacgcatgcgaactaagcgtgcaacccaacggagggtgcgaatacctctgcttgccagccccgcaaattagcagccacagccccaaatacacctgcgcatgtccagacacaatgtggctcggacctgacatgaaaaggtgctatagagccccacagtctacctctaccactacactggctagtaccatgacgcggacggtcccggcaactacaagagctcccgggacgactgtacataggtcgacataccaaaatcattctacagaaactccctcactgaccgcagcagttccgtcaagcgttagtgtgcccagggccccctctatttcaccttccacattaagtccagccaccagtaaccactcccaacactatgctaatgaggattctaagatgggtagcacggtgacagctgctgtcatcggaatcatcgtccctatagtagtgattgcactgctgtgcatgtccgggtacctgatctggaggaattggaagaggaagaataccaagtcaatgaatttcgacaatcctgtgtatcggaaaacaacagaagaagaagatgaggatgaactacacattggacgcaccgcacagattgggcatgtttacccagccgccatcagttccttcgaccggcccctctgggccgaaccctgccttggggagactagggagcccgaagacccggcccccgccttaaaagagctgttcgtcctccccggggagcctcgcagccaactgcaccagctgcctaagaatcctctgtccgaactgccagtggtgaagtcaaagagagttgccctgagcttggaagacgatggcctcccctag

SEQ ID NO: 122724 - DNA, 2103 bp, synthetic construct
  misc_feature 1..2103: note = Description of Artificial Sequence: Synthetic coding sequence
  source 1..2103: mol_type = other DNA
atgggccttccggaacccggacccttgcgcctattggctctgctgctgttgttgcttctactgctccttctgcaactgcagcacctcgcagcggcagccgccgacccacttctgggcggccagggccccgcaaaggactgcgagaaggaccagtttcaatgcaggaacgaacgctgtatcccaagcgtgtggcgatgtgacgaggatgatgactgcctcgaccatagtgatgaagatgattgtcctaagaagacctgtgccgacagcgatttcacctgcgataatgggcattgcatccatgagcggtggaagtgtgacggcgaggaagaatgccccgatggcagtgacgagtcagaagccacatgtaccaaacaggtctgtcctgctgagaagctatcttgcggccctacctcacataagtgcgtacctgctagctggaggtgcgacggtgagaaggattgcgaagggggagccgacgaggcagggtgtgctacaagtctgggaacctgccgtggggacgaattccagtgcggagacggcacttgcgtactagccatcaagcattgcaaccaggagcaggattgccccgacggatctgatgaagcgggctgtcttcagggcttaaacgagtgtctacacaataatggtgggtgttcccacatctgtactgacctcaaaataggtttcgaatgcacctgccccgcgggctttcagctgcttgaccagaagacatgtggggacattgatgaatgtaaggaccccgatgcttgtagtcagatctgtgtcaactacaaaggatactttaaatgcgagtgctatcctggctacgaaatggatctgctcacaaaaaattgtaaggccgccgccggaaagtctcctagcctgatcttcaccaacagacatgaagtccgccggatcgacctcgtaaaacgtaattatagccggctcatccctatgttaaagaacgtcgtggctttagatgtcgaggtggcgactaatcgaatctattggtgcgatttgtcttatcgaaaaatctacagtgcctacatggataaggcatccgatcccaaggaacaagaggtcctgattgacgaacagttgcatagcccagaaggcctggccgttgattgggtgcataagcacatatattggactgactcaggcaataagacaatctcagtggccacggtggatggaggtcggcgtcgaactcttttcagtcgaaacctttcagaaccccgtgcaatcgccgttgaccctctgcgtggttttatgtattggtcagattggggtgatcaggccaagatcgaaaaatctgggttgaatggggtggaccgccagacactggtttcagacaatattgagtggcccaacggtatcacgctagatctgctgtctcagagactttattgggtggattcaaaactccaccagctgagttctattgactttagtggtggcaaccggaagaccctgatctcttcaacagatttcctgtcgcacccttttggaatcgccgtatttgaagacaaggtattctggacagatctggagaacgaggctatcttctctgcaaatagactgaatggcttagaaatttctatcctagccgaaaatttaaataacccacacgacattgtcatattccacgagcttaagcaaccaagagctcccgatgcatgcgaacttagtgttcagcctaatggaggctgcgaatacttgtgcctgccggcaccacaaattagctctcacagccccaaatatacttgcgcttgtcccgacacaatgtggctcggccctgatatgaagaggtgctaccgtgacgccaacgaggacagcaagatgggctctacagttactgctgccgtgattggcattatcgttccaatcgttgtaatagcactattgtgcatgtcagggtacttaatctggcggaattggaaaaggaaaaatactaaatccatgaacttcgataaccccgtctaccgcaaaactactgaggaggaagatgaggatgaacttcacataggaagaacggctcagatcggacacgtttaccccgccagagtggccctgagcctcgaggacgatggactgccttag

SEQ ID NO: 122725 - DNA, 2715 bp, synthetic construct
  misc_feature 1..2715: note = Description of Artificial Sequence: Synthetic coding sequence
  source 1..2715: mol_type = other DNA
atggggctgcctgaaccaggaccgctcagactgttggcactactgctgctgctattgctccttctcctgcttcagctgcagcatctcgcagcagctgctgccgatcctctcctaggcggacaagggcctgccaaagactgtgagaaggatcaatttcagtgccggaatgagaggtgcattccatcagtctggcgttgtgatgaagacgatgattgtctggaccactccgacgaggacgattgtccgaaaaaaacgtgcgctgactcagactttacgtgcgacaacggtcactgcatccacgagcggtggaaatgtgacggggaggaggagtgtcccgacggcagtgacgagtctgaagctacctgtacaaagcaggtctgtcctgcagaaaaactgtcatgcggcccaactagccataagtgcgtaccggcatcttggcggtgcgacggggagaaggactgtgaaggcggggctgacgaggcggggtgcgctactctgtgtgccccacatgagtttcagtgcggcaaccgctcatgtcttgccgcagtgttcgtgtgcgacggcgacgatgattgcggggacggctctgacgagcggggttgtgccgatcccgcctgtgggccacgggagttccggtgtggcggcgatggcgggggcgcgtgtatccccgaacgttgggtatgtgaccgccagttcgactgtgaagatcgctccgacgaagcagccgagctttgcggtcggcctggccctggagccacatctgcgcctgccgcctgtgccactgcatctcagtttgcctgtaggtccggcgagtgcgtgcacctgggctggcgatgcgatggtgatcgggactgcaaggacaagtctgatgaagcagattgcccacttggaacctgcagaggtgacgagttccaatgcggagatgggacctgcgttctggccattaagcattgcaaccaagaacaggattgccctgatggtagcgatgaagccgggtgcctgcagggactgaatgagtgcctgcacaacaatgggggatgcagccatatttgcacagacctgaagatcggattcgagtgcacatgcccggccggatttcaactcctcgaccaaaaaacttgtggagacatcgatgagtgtaaggatccagatgcctgttcacagatttgcgttaattacaaagggtattttaagtgtgaatgttatcctgggtacgagatggacctgctcacaaaaaactgcaaggcggctgccggaaaatcgccctctctgatattcacgaaccgacacgaagtgcgcagaattgacctcgtgaagagaaactattccagattgatcccaatgctcaaaaatgtcgtggccttggacgtggaggtggctacgaaccgcatctactggtgtgacctctcctaccggaagatttactctgcatacatggataaagcttcggacccgaaggaacaggaggttctgatagacgagcagctgcactccccagagggcttggccgtggactgggttcacaaacatatttattggaccgattccgggaataagacaatctcagtggcgactgttgacgggggccggcgacgtactctgttttctaggaacctgtctgagcccagagccattgcagtagatccccttcgcggatttatgtattggtctgactggggagaccaggcgaaaatcgaaaagagcggcctcaacggcgttgatcggcagaccctggtgagtgataatattgagtggccaaacggaattaccctagatctcctatctcagcgcctgtactgggtcgactctaagctgcaccagttgtcctccattgatttctccggcgggaatcgaaagacgttgattagcagcactgatttcttatcccatccgtttggtattgccgtcttcgaggacaaggtcttttggacagacctggagaacgaggcaatctttagcgccaatcgccttaatggcctggaaatctccatcttagctgaaaacctgaataacccgcacgatatagtgattttccatgagttgaagcaaccccgcgctccagatgcctgcgaactctccgtgcagcccaatgggggctgcgagtacctatgcctcccggcaccccagatctcaagtcatagcccaaaatacacctgcgcatgtccagacacaatgtggctgggtccagatatgaaaagatgttaccgggccccgcagtccacaagcacgaccacactagcctctaccatgacccggaccgtccccgctaccacacgcgctccaggcactaccgtgcatcggagtacctatcagaaccactcaacggagaccccatcactcacagccgccgttcccagctcagtctccgtgccgagggctcccagtataagcccgagcacgttgtcaccagcaacttctaatcattctcagcattatgctaacgaagactcaaaaatgggtagcactgtaacagccgctgtgatcggaataatcgtacctatcgttgtgattgccctgctgtgcatgagtggctatttaatttggcggaattggaaacggaaaaacaccaagagcatgaacttcgataatccagtctatcggaaaaccaccgaagaagaagatgaggacgagcttcatattggccgcacagcccagatcggtcacgtgtacccggcccgcgtcgccttatctctcgaggacgatggcctgccttag

SEQ ID NO: 122726 - DNA, 1074 bp, synthetic construct
  misc_feature 1..1074: note = Description of Artificial Sequence: Synthetic coding sequence
  source 1..1074: mol_type = other DNA
atggcccccagacgcgtgcggtctttcctacggggtctgcctgctctattgctattactgctttttcttggcccctggcctgctgctagccacggcggtaagtacagcagagaaaagaaccagcccaagccaagccctaagcgcgagtctggtgaagaatttagaatggagaagttgaatcagctatgggagaaagctcagcgattgcatctccctccagtacgactcgcggagctgcacgccgacctgaagatccaagaaagagacgaactcgcctggaagaaattaaaattggacggattggatgaggacggcgagaaagaggccagactaatccgcaatctcaacgttattctcgctaaatatggattggacgggaaaaaggacgcaaggcaggtgacgtcaaatagccttagcggtactcaggaggatggcctcgacgatccccgcctggagaagctgtggcataaggcaaagacctcgggcaagttctctggggaagaattggataaattgtggcgcgagttcttacaccacaaagaaaaggtgcacgaatacaacgtgctcctcgagacgctgagtcgtaccgaggagatccacgaaaacgtgatctctccatctgatttatcagacattaaagggagtgttctgcactctaggcacacggagctcaaggaaaagctaagatcaattaatcaaggcttagaccgactgcggcgggtctcacatcagggctatagtacggaggctgagttcgaggaaccacgagtgattgatttgtgggacctcgctcagagcgccaacctgacagacaaggagctagaggctttcagggaggagttgaaacacttcgaagccaaaatcgagaagcacaaccattatcagaagcagctggaaatcgcacacgagaaactgcggcacgccgagagtgttggagatggggaaagagtgtcccgtagccgggaaaagcacgctctcttggagggtcggactaaggaactcgggtacactgtgaagaagcatttgcaggaccttagcggcaggatcagccgcgccagacacaatgaactgtag

SEQ ID NO: 122727 - DNA, 402 bp, synthetic construct
  misc_feature 1..402: note = Description of Artificial Sequence: Synthetic coding sequence
  source 1..402: mol_type = other DNA
atgaattacatgccagggactgcctctctcattgaggacattgacaaaaagcatttagtactcctgcgcgacgggaggacgctgattggcttccttaggtcaattgaccaatttgcgaacctcgttttgcaccagactgtggaacgcattcatgtcggcaagaagtacggcgatatccctagaggcattttcgtggtgaggggcgagaacgttgtcttgctaggagagatcgacctcgagaaggagtctgacacacctttgcaacaagtatccatcgaggagatactcgaggagcagagggtggagcagcagaccaagctcgaggcagagaagctaaaagttcaggctctcaaggatcgtggcctgtccattccgagagctgatacgctagacgaatattag

SEQ ID NO: 122728 - DNA, 588 bp, synthetic construct
  misc_feature 1..588: note = Description of Artificial Sequence: Synthetic coding sequence
  source 1..588: mol_type = other DNA
atggctgcgcctcccggggagtacttctcggtagggagtcaagtgtcgtgccgaacatgtcaggagcagaggctgcaaggagaagttgtggcatttgactatcagtctaagatgctggccttgaaatgtccatcatctagcggaaagccaaatcacgcggatatactgctcatcaaccttcagtacgtgtcagaagtggagatcattaatgatagaacagagaccccccctcccctcgctagcctgaacgtgtccaagcttgcctccaaggcaagaactgagaaagaggagaaactatctcaggcttacgccatcagcgctggagtctctctagagggtcagcagctgttccagaccattcataaaacaataaaagattgcaaatggcaggaaaaaaatatcgtagtcatggaggaagtcgtgatcacccccccctatcaggtggagaattgcaagggcaaggaggggtccgcgctgagccacgttcgcaagattgtcgagaagcatttcagggacgtggagtcccaaaagatactccaacggagccaggctcagcagccacagaaggaggcagctttatcttcttag

SEQ ID NO: 122729 - DNA, 588 bp, synthetic construct
  misc_feature 1..588: note = Description of Artificial Sequence: Synthetic coding sequence
  source 1..588: mol_type = other DNA
atggccgctccccccggcgaatatttctccgttggctcccaagttagttgtagaacctgccaagaacagaggcttcaaggagaggtcgtggctttcgattaccagtctaaaatgcttgctctcaagtgtccatccagcagcggtaagcctaaccatgctgatatcttgctgattaatctccaatacgtctccgaggtggaaatcatcaatgatagaacagaaacccctcccccactggcaagtctcaatgtatcgaagttggcctcgaaggcccgcaccgagaaggaagagaagctgagccaggcatacgcaattagtgccggggtttctttagaaggccagcagctgttccaaacaatacataagaccattaaagactgcaagtggcaggagaaaaacatcgtggtcatggaggaggtcgtgatcacacccccctaccaagtggagaactgcaaagggaaagagggcagcgccttgagccatgtgcggaaaatcgtcgagaaacattttcgcgacgttgagtcccaaaagattctgcagcgcagtcaggctcagcagccccagaaggaagcagctctgtcaagctag

SEQ ID NO: 122730 - DNA, 288 bp, synthetic construct
  misc_feature 1..288: note = Description of Artificial Sequence: Synthetic coding sequence
  source 1..288: mol_type = other DNA
atgctcttttatagttttttcaaatctttggtagggaaagacgtggtcgtcgaacttaagaatgatttgtctatctgtggcaccctgcactcggtggaccaatatctcaatataaaactcacggatatctctgtcaccgatcccgagaagtatccccacatgttgtccgtaaagaactgcttcattagaggtagtgtggtgaggtacgtgcagctgcccgcggatgaggtggacacccagctactgcaggatgcggctcgaaaagaagctctgcaacagaagcagtag

SEQ ID NO: 122731 - DNA, 288 bp, synthetic construct
  misc_feature 1..288: note = Description of Artificial Sequence: Synthetic coding sequence
  source 1..288: mol_type = other DNA
atgttgttttacagtttcttcaaaagccttgttggaaaggatgtggtagtggagctcaagaacgatttatccatctgtggcactctgcactctgtggatcagtatctaaatattaagctaaccgacatcagtgtgacggacccagaaaaatatccacacatgctgtcagtgaagaattgtttcatccgggggtcagtcgtgcgttacgtgcaattgcccgcagacgaggtcgacactcaactgctgcaggacgccgccaggaaagaagctctccagcagaagcagtag

SEQ ID NO: 122732 - DNA, 288 bp, synthetic construct
  misc_feature 1..288: note = Description of Artificial Sequence: Synthetic coding sequence
  source 1..288: mol_type = other DNA
atgttgttctattccttttttaaatccctcgtgggaaaagacgtagtcgtggaattaaagaatgatctgagtatttgcggcaccctgcacagcgttgaccaatatcttaatattaaattaacagacataagtgtgaccgatcctgagaaatacccgcacatgctatctgttaaaaactgctttattcgcggttccgttgttagatatgtgcaactgcccgccgacgaggttgacacccagctgctccaggatgccgccagaaaagaagccctgcagcagaagcagtag

SEQ ID NO: 122733 - DNA, 288 bp, synthetic construct
  misc_feature 1..288: note = Description of Artificial Sequence: Synthetic coding sequence
  source 1..288: mol_type = other DNA
atgctgttttatagtttttttaagtccctagtgggcaaggatgtagtcgtggagcttaagaacgatctgagcatatgcggcacattgcactcagtcgatcagtacctgaacataaaactgacagacatctccgtcaccgaccctgagaaatacccacatatgctttctgtgaagaactgcttcatacggggctcagtcgtgcggtacgtccagctgccggctgacgaagtagacacacagctcctccaggatgccgccaggaaggaagctctccagcagaagcagtag

SEQ ID NO: 122734 - DNA, 288 bp, synthetic construct
  misc_feature 1..288: note = Description of Artificial Sequence: Synthetic coding sequence
  source 1..288: mol_type = other DNA
atgctgttttactccttttttaagagcttagtgggaaaggacgtagtcgtcgagctgaagaacgacctctccatttgcggcacattgcactcagtcgatcaatacctgaatattaagctgacagacatctccgtgacagatcccgaaaagtacccacatatgcttagcgtgaagaactgctttatccgcgggtccgttgtgcgatatgtgcagctgccagctgatgaagtggacacgcaactgctgcaggacgctgcacgcaaggaggccctgcagcagaagcaatag

SEQ ID NO: 122735 - DNA, 288 bp, synthetic construct
  misc_feature 1..288: note = Description of Artificial Sequence: Synthetic coding sequence
  source 1..288: mol_type = other DNA
atgttgttctattcttttttcaagtctctggtcggtaaagatgttgtagtggaactgaagaatgatctgagcatttgcggcaccctgcattctgtggatcagtacctgaatattaaattgacagatatatctgtcactgacccggagaagtatcctcatatgctgagcgtgaagaactgttttatccgggggagtgttgtaaggtacgtccagcttcctgctgatgaggtggacactcaattgttacaagatgccgcccggaaagaagcactacaacagaaacaatag

SEQ ID NO: 122736 - DNA, 309 bp, synthetic construct
  misc_feature 1..309: note = Description of Artificial Sequence: Synthetic coding sequence
  source 1..309: mol_type = other DNA
atggcagacgatgttgaccagcagcagaccactaacactgtggaggaacccctggacctcatccggctgtctttagacgagcggatttatgtgaaaatgcgaaacgaccgcgaactcaggggcaggctccacgcctatgatcagcatcttaacatgattctgggggatgtggaagagacggtcacaactatagaaatcgatgaggaaacatatgaagaaatctacaaatcaaccaagcgaaacatccccatgctcttcgtgagaggtgacggggtcgttctggtggccccgccgttgcgcgtaggatag

SEQ ID NO: 122737 - DNA, 420 bp, synthetic construct
  misc_feature 1..420: note = Description of Artificial Sequence: Synthetic coding sequence
  source 1..420: mol_type = other DNA
atgcttcccttgagcctgctgaaaaccgcacagaaccaccccatgctggtagagctcaaaaatggagaaacatacaatggccacctggtgtcttgcgataactggatgaatatcaacctgagggaggtgatttgcacttcccgggatggagacaagttttggagaatgcccgagtgttacatcaggggcagtactatcaaatacctccgaataccagacgaaataatcgatatggttaaggaagaagttgtagccaaagggcggggaagaggcggcctgcagcagcaaaaacaacagaaaggcagaggcatgggcggagccggtaggggtgtcttcggaggccgagggagagggggtattcccggaacaggcaggggccagccagagaagaaacctgggagacaggcaggcaagcaatag

SEQ ID NO: 122738 - DNA, 420 bp, synthetic construct
  misc_feature 1..420: note = Description of Artificial Sequence: Synthetic coding sequence
  source 1..420: mol_type = other DNA
atgctccctctgagcctgctgaagaccgcccagaaccaccctatgctggtggagctcaaaaatggggagacatataatggccacctcgtatcttgtgacaattggatgaacattaacttaagggaagtcatatgcaccagccgagacggagataagttttggaggatgccagagtgctacatccgtgggtcaacaattaagtacttacggatcccggatgagatcatagatatggtaaaggaggaggtcgtcgccaaggggcgcggtcgcggcggtctgcagcagcagaaacagcagaaaggtcgcgggatgggaggcgctggtaggggggtcttcggtggccggggaagaggtggaatacccggcactggccgcgggcagccagagaagaaacccggccggcaggctggaaaacaatag

SEQ ID NO: 122739 - DNA, 276 bp, synthetic construct
  misc_feature 1..276: note = Description of Artificial Sequence: Synthetic coding sequence
  source 1..276: mol_type = other DNA
atggcagccaacgctactacaaatccgtcccagctcctgcccctcgagttggtggacaagtgtattggaagtcggatccacatcgtcatgaagagcgataaagaaatcgttggcactctgttgggcttcgatgactttgtcaacatggtgttggaagatgtaacagaattcgaaataacccccgagggaaggaggatcaccaaacttgatcagatcctgctcaacggaaacaatatcaccatgttggtcccaggaggcgagggacctgaggtgtag

SEQ ID NO: 122740 - DNA, 243 bp, synthetic construct
  misc_feature 1..243: note = Description of Artificial Sequence: Synthetic coding sequence
  source 1..243: mol_type = other DNA
atgagcctcaggaaacagacgccctctgattttcttaagcagatcatcggccggccagtcgttgtaaagctgaatagcggggtagactacaggggggtgctggcatgcctcgacggatatatgaacattgccctggaacagaccgaggagtacgttaacggtcagctgaagaataaatatggcgacgcctttattagaggtaataacgtcttgtacatctcaactcagaagcgccgcatgtag

SEQ ID NO: 122741 - DNA, 243 bp, synthetic construct
  misc_feature 1..243: note = Description of Artificial Sequence: Synthetic coding sequence
  source 1..243: mol_type = other DNA
atgagcctgcggaaacagactccgtccgactttcttaagcagataataggaagacctgtagtggttaaactgaactcaggagttgactataggggtgtgctcgcatgcctggatgggtacatgaacatagctctggagcaaacggaggagtacgtgaatggtcagctgaagaacaaatacggggatgccttcatcagggggaacaatgtcctctacattagcacgcagaagagacggatgtag

SEQ ID NO: 122742 - DNA, 243 bp, synthetic construct
  misc_feature 1..243: note = Description of Artificial Sequence: Synthetic coding sequence
  source 1..243: mol_type = other DNA
atgtcgctgcgcaaacagactccttccgatttcctaaagcagatcattggccgacctgtggttgtcaaactcaactccggggtcgactatcgcggggttctcgcatgcctggacggatacatgaatattgcccttgaacagacagaggagtacgtcaacggtcagctcaagaataaatacggcgacgccttcatccgcggaaataacgttttgtacatcagcactcagaagaggcgtatgtag

SEQ ID NO: 122743 - DNA, 243 bp, synthetic construct
  misc_feature 1..243: note = Description of Artificial Sequence: Synthetic coding sequence
  source 1..243: mol_type = other DNA
atgtctttgcgaaagcagacaccaagcgacttcctgaaacagatcattggtagaccggtggtggtgaaactgaactcaggagtcgattaccggggagtcctggcttgtctagatgggtatatgaacatagcactcgagcagactgaagagtacgtgaacggccagctgaagaacaagtatggggacgccttcatcaggggcaataatgtactctatattagtacacaaaagcggaggatgtag

SEQ ID NO: 122744 - DNA, 312 bp, synthetic construct
  misc_feature 1..312: note = Description of Artificial Sequence: Synthetic coding sequence
  source 1..312: mol_type = other DNA
atggcggataaagaaaaaaaaaaaaaggaatctatattggacctcagcaaatatatcgataagactatacgcgtgaaattccaaggggggcgcgaggcctccggcatcttaaagggcttcgaccctctgttaaatctggtgctcgatggcacgattgaatatatgagagaccctgacgaccagtacaaactgactgaggacacacgtcagctgggcctagttgtctgcagagggacgtcagtggtgctaatatgcccccaggacggtatggaagcaatacccaatcccttcattcagcagcaggacgcctag

SEQ ID NO: 122745 - DNA, 1116 bp, synthetic construct
  misc_feature 1..1116: note = Description of Artificial Sequence: Synthetic coding sequence
  source 1..1116: mol_type = other DNA
atgagcgcccaggcgcaaatgcgggccctgttggaccagctcatgggcaccgcacgggacggcgatgagactcgccagagagtgaagtttactgatgatcgagtgtgcaaatcccatctcctggactgttgtccccacgatattctagccggaaccagaatggatctgggtgagtgcacaaagatacatgatctggcactgcgggctgactacgaaatcgcctccaaagagagagatctgttctttgagttggacgctatggatcatctggagtcctttatagccgagtgcgataggcggaccgagctggctaagaagcggttggcagagacccaggaggaaatcagcgccgaagtaagcgccaaagccgagaaggtgcatgagttgaatgaggagattggtaagctgctcgccaaggcagagcagctcggagccgaggggaacgtggatgaatcccagaaaattttgatggaggtcgagaaggtaagagctaagaagaaggaagctgaggaagaataccgcaacagcatgcctgcatcatcttttcagcagcagaagctccgcgtttgtgaagtatgttcggcctacttagggctacatgacaatgaccggcggctggcagaccatttcggcggtaaactgcacttagggttcattcagattcgcgagaaacttgatcagttgcggaaaactgttgcggagaaacaggaaaaacgcaatcaggacagactgaggcggcgcgaggaacgcgaacgtgaggagaggttaagtaggcgcagcggcagtcgaactcgggacagacggcggagccggagcagagaccgcagacgtagaagatcaagatccacatctcgcgagagaagaaaattgagcagaagccggagccgggatcgacaccggaggcatagatcccgttcccggagccactcccgaggtcaccgtagagctagtagagacagatcggctaaatataagttctctagggaacgggctagcagggaggaatcctgggagtctggccgctccgagaggggcccacctgactggcggctggagagtagtaacggcaaaatggcttcgcgaagaagtgaggaaaaggaagcaggtgagatttag

SEQ ID NO: 122746 - DNA, 978 bp, synthetic construct
  misc_feature 1..978: note = Description of Artificial Sequence: Synthetic coding sequence
  source 1..978: mol_type = other DNA
atgtctgcacaagcccagatgcgtgcacttctagaccagctgatgggcaccgctcgggacggggatgaaacccggcaacgtgttaagtttaccgacgaccgggtctgcaaaagtcaccttctggactgctgcccccacgatatcttggcgggcacaagaatggatctgggggagtgtaccaagatccacgacctggctctgagagccgattatgagatcgcctcgaaggagagagacttgttcttcgagcttgatgccatggatcacctggagtcattcattgctgaatgcgaccggagaacagaacttgctaaaaagcggctggctgagacacaagaggaaatatcagcggaagtgagcgccaaggccgagaaggtacacgagcttaatgaggagattggaaaactgctcgccaaggccgaacagcttggcgctgaaggtaacgttgacgagagtcagaaaatcctgatggaggttgagaaggtgagggctaaaaagaaagaggccgaggaagagtatagaaatagtatgcccgcttcatcattccagcagcagaaattgagagtctgtgaagtctgctcagcctatctcggtctccatgacaacgatcggcgtctcgccgaccattttggcgggaaactccacctcggattcattcagatcagagagaagttggatcaacttaggaaaacagtggccgaaaagcaagagaagagaaatcaggaccgcttacgccgcagagaggagcgcgagagagaagagcgactatcccgaaggagcggctcacgaactcgcgaccgacgaaggagtaggtctagggaccgcagacgtcgacgcagccgatctacctcccgcgaaagaaggaaactgtcaagaagtcggagccgcgaccgccatagacggcaccgtagtcggtcaagaagtcactcccgtggacatcgtcgggccagtagagatcgctctgctaagtacaaatag

SEQ ID NO: 122747 - DNA, 819 bp, synthetic construct
  misc_feature 1..819: note = Description of Artificial Sequence: Synthetic coding sequence
  source 1..819: mol_type = other DNA
atggacctgggcgaatgtaccaagattcatgatctggcgttacgcgcagactacgaaattgcatccaaagagcgcgatttgtttttcgaactggatgctatggatcacctggagagcttcatagccgagtgtgatagaaggaccgagctcgcgaaaaagcgactggctgagacacaggaggagatttccgccgaggtctctgccaaggcagagaaagtgcacgagctgaacgaggagattggcaaattactcgcaaaggctgagcagttgggggccgaagggaacgtggatgaaagccagaaaatcttgatggaggtggagaaagtgagagccaagaagaaagaggccgaagaggaatacagaaatagtatgccggcaagcagttttcagcagcagaagcttagagtctgcgaggtttgttcggcgtatcttggccttcacgacaatgatcggcggcttgctgaccacttcgggggcaagcttcacctgggtttcattcaaatcagggaaaagctagaccagctacgcaagacagtcgccgaaaaacaagagaagagaaatcaagaccggttgaggcgtagggaagagcgagagcgggaggagaggctctctagaaggtctgggtctaggacaagagatcgcaggagatcccgttctagggacaggcgcaggaggcgatcccgtagcacatctcgtgagcggagaaaactctcacgctcgcgctctagagataggcaccgcaggcatcggagcaggtccagaagtcactctagaggacacagaagggcctccagagatcgtagtgctaaatacaaatag

SEQ ID NO: 122748 - DNA, 978 bp, synthetic construct
  misc_feature 1..978: note = Description of Artificial Sequence: Synthetic coding sequence
  source 1..978: mol_type = other DNA
atgtcggctcaggctcagatgcgggcgctgctagaccagttgatgggtaccgcccgcgacggcgacgagaccaggcagagagtgaagtttactgacgaccgagtatgcaaatctcacctactggactgttgtccgcacgatatcctcgcgggtactaggatggatttgggagagtgtactaaaattcatgacctggccctccgagctgactacgaaatcgcaagcaaagaaagggatctgttttttgaactagacgccatggaccatctagagagctttatagctgaatgtgacagaaggacagagctagcaaagaagagattggcagagacccaagaagaaatatccgccgaggtgtcagccaaagcggaaaaagtgcatgagctgaacgaagagataggcaagcttctggcgaaggccgagcaactgggggccgaaggcaatgtggatgaatctcagaaaatccttatggaagtagagaaagtcagggccaagaaaaaggaagcggaagaggaatatagaaacagtatgcctgctagcagcttccagcagcagaagctacgtgtatgcgaggtgtgttccgcctatctcggcctacacgataacgatcggcggttggccgaccactttgggggaaagctgcacctggggtttatacagatcagggaaaagcttgaccagttacggaaaacagtggctgaaaaacaggaaaagagaaatcaggatcggcttcggcggagagaagagcgcgagagggaagagaggctgagccgcaggtcaggaagccgcacacgcgataggcggcgaagccggtcccgagacagacgccgtagacgctctcgttctacatccagggagcgacgaaagcttagcaggtccaggagcagagaccggcacagacggcataggtccagatccaggtcccattccaggggtcacagacgagccagccgggatcgttctgctaagtacaaatag

SEQ ID NO: 122749 - DNA, 99 bp, synthetic construct
  misc_feature 1..99: note = Description of Artificial Sequence: Synthetic coding sequence
  source 1..99: mol_type = other DNA
atggacctgggcgagtgtactaagatccatgaccttgccctgcgggctgactacgagattgcatccaaagaacgcgatttattttttgagctcgactag

SEQ ID NO: 122750 - DNA, 549 bp, synthetic construct
  misc_feature 1..549: note = Description of Artificial Sequence: Synthetic coding sequence
  source 1..549: mol_type = other DNA
atggaccacttggagagctttattgcggaatgcgatcgaagaaccgaacttgccaaaaagagattggccgagacacaggaggagatcagcgccgaggtgagcgccaaagccgaaaaggtgcatgaactcaatgaggaaatcggaaagctgctggcaaaggccgagcagctgggtgccgaggggaatgtggacgaatcacagaaaattctgatggaggtggagaaagtgagggctaagaagaaggaggccgaggaggagtataggaattccatgcctgcctccagcttccagcagcagaagctgcgagtgtgcgaggtatgttcggcatatttaggactccacgacaatgacagacgattagccgaccatttcggtgggaaattgcatcttgggtttattcagattcgcgagaagctagaccagctgcggaaaaccgtcgctgagaagcaggaaaaacggaaccaagaccgtctgcgcaggcgtgaagaacgcgaaagggaggagcgactgtctaggaggtcaggaagccgcacccgtgaccgcagatag

SEQ ID NO: 122751 - DNA, 183 bp, synthetic construct
  misc_feature 1..183: note = Description of Artificial Sequence: Synthetic coding sequence
  source 1..183: mol_type = other DNA
taacggagacggtcgcggtcccgcgaccggcgccgccgacgcagcagatcaacttctagagaaaggagaaaattgtccaggagtcggagtcgggatcgccatcgcaggcacagatcccgtagcagatcacatagtagaggccaccggcgggcctccagagaccggtccgccaagtataagtag

SEQ ID NO: 122752 - DNA, 255 bp, synthetic construct
  misc_feature 1..255: note = Description of Artificial Sequence: Synthetic coding sequence
  source 1..255: mol_type = other DNA
atggaccacctggagtctttcattgcagaatgcgatcggagaaccgagctcgcaaaaaaaagactcgcagagacccaagaggaaattagcgcggaggtttctgctaaagcagaaaaggttcatgagctgaatgaagagatcggtaaactgctcgctaaggcagagcaattaggtgccgaaggtaatgtagatgaaagccagaagatacttatggaggtggaaaaggtgcgcgctaagaaaaaagaggcagagtag

SEQ ID NO: 122753 - DNA, 1176 bp, synthetic construct
  misc_feature 1..1176: note = Description of Artificial Sequence: Synthetic coding sequence
  source 1..1176: mol_type = other DNA
atgcctgcttatttaaaccttcagggtagcgtccggaaggcaccgcactccccttccagagacacaaccaggcagcgtataaagttttccgacgatagagtatgcaagtcccacctgctgaactgctgtcctcacgacgtcctgtctggcacacgcatggatctcggggagtgtctgaaggtgcacgacctggccctccgcgccgattacgaaatcgcttcaaaggaacaggattttttctttgagctggacgccatggatcatctccagagttttatcgccgactgtgaccggaggacagaagttgctaaaaaacggcttgccgaaactcaggaggaaatcagcgccgaggtcgccgctaaagctgagagggtacatgagctcaacgaagaaatcggcaagctgcttgcgaaagtggaacagctgggggctgaggggaacgtcgaggagagccagaaggttatggacgaagtggaaaaggccagagccaaaaagcgagaagccgaggaagtgtatcgcaatagtatgcccgccagctcctttcagcagcaaaagctcagagtctgtgaagtttgttcggcctatctgggacttcatgacaatgacaggagactggctgaccacttcggtggaaaattgcatctaggcttcattgagattcgagaaaagctcgaggagctcaaaagggtggtcgccgagaaacaggaaaagcgcaaccaagaaaggcttaagcgccgcgaagagcgggagcgcgaggagcgggaaaagttgcgacgatcaagaagtcattccaagaacccaaaaaggtcacgctcccgagaacacaggcgacatagaagtcgctctatgtctcgggaacgaaaaaggcgcaccagaagcaagtctagggagaaaaggcatagacaccgctcacgttcatctagccggagtagatcaagatcacaccagcgctctcgccattcttcccgggacagatcccgagagagatccaaacgacgatcctctaaagaaaggtttagagatcaggacctggcgtcttgcgacagagatagaagcagcagggaccgatcaccaagagaccgagatagaaaagacaagaaaagatcctacgagagcgctaatggtagatcagaggatagacggagcagcgaggagcgtgaagcgggcgaaatctag

SEQ ID NO: 122754 - DNA, 1179 bp, synthetic construct
  misc_feature 1..1179: note = Description of Artificial Sequence: Synthetic coding sequence
  source 1..1179: mol_type = other DNA
atgtcggcccaggctcaaatgcgcgcaatgctcgaccagttgatggggacatcgcgcgacggcgacaccacccggcagaggatcaagttcagcgacgaccgggtttgcaaatcccacctgctgaattgttgtccacatgatgtgctcagtggcaccagaatggatctgggagagtgtctgaaagtgcacgacctggctctgcgcgcagactatgagatcgccagcaaagaacaggacttttttttcgagttggacgccatggaccatctgcagtcatttatcgcagactgcgataggcgtaccgaagtggctaagaaaagactggcagaaacccaagaagaaatctcagctgaggtggccgcaaaggccgaacgtgttcatgagctcaacgaagaaattgggaagttactggctaaagtcgaacaacttggtgccgaaggcaatgtagaggagtcacagaaggtgatggatgaagtggagaaggctcgggccaaaaaacgggaggctgaggaggtgtaccgaaactctatgcccgccagtagtttccagcagcagaaactcagggtttgtgaggtctgtagcgcatatttggggctccatgataatgacagaaggctggctgaccatttcgggggaaaacttcacctgggctttatcgagattagagagaagcttgaagagctcaaacgtgtggtggccgaaaaacaagagaagcgtaaccaggagcgcctgaaaaggcgagaagagagggagagagaggaacgtgaaaagctgagaagatcccggtctcattccaaaaatccaaaaaggtcaagaagtcgagaacaccggcggcaccggagtcgcagtatgtcacgggagcgaaagcggagaactcggtccaagtcaagagagaagcgccacagacacagatcccggagcagctcaagatctaggagccggtcccaccaaagatctcggcatagttcaagagatcgctcccgagagcgcagcaagaggcgctcctctaaagaaaggtttcgcgaccaggaccttgccagctgcgacagggataggtcttcccgcgacaggagcccacgcgatagagaccgtaaggacaaaaagcggtcatatgagagtgcaaacggaaggagcgaggaccgtcggtcttccgaggaaagagaagcaggtgagatatag

SEQ ID NO: 122755 - DNA, 1170 bp, synthetic construct
  misc_feature 1..1170: note = Description of Artificial Sequence: Synthetic coding sequence
  source 1..1170: mol_type = other DNA
atggtcatccactcacagctgaagaaaattcagggggcgagcgagagaatgggcgatacaacaagacaacggatcaaattttccgatgaccgcgtctgtaagagccacctcctgaattgctgccctcacgacgtgttgtctgggaccaggatggatctgggcgaatgtttaaaggtgcacgatttagccctcagggctgactacgaaatagcgtctaaggagcaggattttttttttgagttggacgcaatggatcacctgcagagttttatagccgattgtgatcggagaacagaggtcgctaaaaagcgcctcgccgagacccaggaggaaatttctgctgaggtggcggccaaagcggaacgggtccacgagctcaacgaagaaattggaaaactcctggccaaagtagagcagctgggagccgagggtaacgtggaggagtcccagaaggtcatggatgaagtagaaaaagcccgcgccaaaaagcgcgaggccgaggaagtgtacaggaacagcatgcccgccagctcgttccagcaacagaagctcagggtgtgtgaagtgtgctccgcctacctgggactacacgacaatgacagaagattagccgatcacttcggggggaaactacatctgggctttatcgaaatccgggaaaaattggaagagctgaaaagggtcgtggcagaaaagcaagagaagagaaatcaggaacgcctgaagcggagagaggaacgcgaaagggaggaacgcgagaaactccgcagaagcagatctcactccaaaaatcctaagcgttcgcgcagtagggagcatagacgacaccgatcgcggtcgatgagtcgtgagaggaagaggcgcaccaggtcaaagtcacgggaaaaaaggcatcgccatcgtagtcggtcctcctccagatccagatcgcgatcacaccagcgatcgcgccactcttcaagggaccgtagcagagagcgatctaagcgccggagttcgaaggagcgattccgcgaccaggacctcgcatcttgtgacagagaccggagttccagagacagaagtccccgcgaccgggaccgaaaggataagaagcggtcctatgagtcagctaacggtagaagtgaggatcggcggagctccgaggagcgggaggctggagagatctag

SEQ ID NO: 122756 - DNA, 1377 bp, synthetic construct
  misc_feature 1..1377: note = Description of Artificial Sequence: Synthetic coding sequence
  source 1..1377: mol_type = other DNA
atggcggccctgggctctccttcgcacaccttccgaggtcttctgcgtgagctacggtatctctccgcagctaccggcagaccctatcgggatacagccgcctaccggtacctcgttaaggcgttccgcgcccaccgagtcaccagtgaaaaattatgcagggcccagcatgagttacatttccaggccgcaacttacctttgcttgctgagatccatacggaagcacgttgcactccaccaggagtttcacgggaaaggtgatactacccggcagcgaatcaagttctctgacgaccgcgtgtgcaagagccatctgttaaactgctgcccacacgatgtccttagcggcacgaggatggacctgggagaatgcttgaaagttcacgatcttgcattgcgcgcagactatgagatagcctccaaagaacaggacttcttctttgagctcgacgcaatggaccatctccagtcttttatcgccgactgcgataggagaaccgaagtcgctaagaaacggctggctgagacacaagaagaaatatccgccgaagtggctgcaaaggccgagcgggtgcatgagctgaacgaggaaattggtaaacttcttgccaaagtggagcaactgggtgcagagggcaatgtggaggaatctcagaaagtgatggacgaggtcgagaaggctagagctaagaagcgggaagcagaagaagtgtaccgcaactctatgccggcctctagctttcagcagcagaagctgcgcgtttgtgaagtgtgtagcgcatacttgggactacatgataatgacagacggcttgccgaccactttggggggaaacttcaccttggctttattgagatccgcgaaaagctggaggagctgaagcgcgttgttgcagaaaaacaggagaaaaggaatcaggagcgattgaagcggcgagaggagcgcgagagagaagaacgagagaaacttcgaagatcccgtagccactcaaagaaccccaaaaggagccgctctagagagcacaggagacacaggagcagaagcatgagccgcgaacgcaagcgaagaactcgcagtaaatctagagaaaagaggcaccggcaccgcagtaggtctagctctcgctccaggagccgctcacatcagaggtcccggcattcatccagagacaggagtcgtgaaaggtcaaaacgaagatcctcaaaagaacgattcagagaccaagacctcgcatcctgtgacagagatcgttccagcagagacaggtctcctagggaccgcgaccggaaggacaagaagaggagctacgaatcagccaatggcagaagtgaggataggaggtcctcagaggaacgggaagcaggagaaatctag

SEQ ID NO: 122757 - DNA, 1179 bp, synthetic construct
  misc_feature 1..1179: note = Description of Artificial Sequence: Synthetic coding sequence
  source 1..1179: mol_type = other DNA
atgtccgcacaggcacagatgcgcgctatgttggaccaactgatgggaacttcccgtgatggggatactacccgtcaacgcataaagttttctgatgacagggtttgcaagtcccatctgttaaactgttgcccacatgatgttttgtcagggacccgaatggacctcggtgagtgcctcaaggtccatgatctagccctgcgagcagactatgagattgctagcaaagaacaagactttttctttgaactcgatgcaatggatcacctccaatcctttatcgccgactgtgatcgacgaacggaggtggccaaaaagcgtctggccgagactcaggaggagatatctgctgaagtcgctgccaaagcagagcgagtccacgagttgaatgaggagatcggaaagctcctcgctaaagttgagcagctgggggcggaggggaacgtagaggaaagccaaaaagtgatggatgaagtggaaaaggccagggcaaaaaagcgagaagcagaggaagtttacaggaattctatgcctgcttcgtccttccaacaacaaaaactgagagtgtgcgaggtgtgctctgcatatctgggactccatgataatgacagacgcctagcagaccattttggaggcaaactgcatctgggcttcatagagattcgggaaaaacttgaagagctcaagcgcgtagtggctgaaaagcaagagaagcgtaaccaggagcggctgaagagaagagaagagagggaaagggaggaaagagagaaacttagacgatcccgaagccactctaagaatccaaaaagaagtaggtctcgggagcatagacgccatcgctcacggtccatgagtcgcgaaagaaaaagaaggactcgttccaagtccagagaaaagagacatcgacacaggtcaagatcttcttctaggtcgagaagccgatcccaccaacgcagccgtcatagcagtcgggaccggtcacgcgagaggtccaaacgccggagctctaaagaacggttcagggatcaagacctcgcttcgtgtgacagagaccgctcaagtcgcgatagatcaccacgagaccgcgatcgcaaggataagaaacggtcatacgagtctgctaacggacgctcagaagacaggaggtcttctgaggagcgggaagccggtgaaatttag

SEQ ID NO: 122758 - DNA, 252 bp, synthetic construct
  misc_feature 1..252: note = Description of Artificial Sequence: Synthetic coding sequence
  source 1..252: mol_type = other DNA
atgagtgcacaggcacaaatgagagccatgttggaccagttgatgggtacttcccgcgacggaagcatgtatctttgcctgcccaccagcatctgcaagggggtgtccgagagaccacggattcgacaggccgagatccagttggtcaacgaatccaattcagtaatgacggaatatgcgcgtgtaaccttcagtacggtcgtgctgatgatgagctttctcgaactggagtggattctggaaaatgtgtag

SEQ ID NO: 122759 - DNA, 1299 bp, synthetic construct
  misc_feature 1..1299: note = Description of Artificial Sequence: Synthetic coding sequence
  source 1..1299: mol_type = other DNA
atgatcagtgcagcacaactgttggacgagcttatgggtcgagatcgcaatctcgctcccgatgaaaaacgctctaatgtccgctgggaccacgaatccgtgtgtaagtactacctttgtggcttttgccctgcagaattatttacaaacaccaggtctgatctgggcccttgcgagaagattcatgacgaaaacctgcggaaacaatatgagaaatcctctagattcatgaaggtcgggtatgagagagattttttgcggtacctgcagagcctgttggccgaggtggagaggcgaatccggagaggccacgcacgcctggctctttcccagaaccagcaaagcagcggagccgcaggccccaccggcaaaaacgaagagaaaattcaagtgctgactgataagatcgatgtgctgttacagcagattgaggaactcgggagtgaaggcaaagttgaggaggcccagggaatgatgaagctggtggagcagctaaaggaagaaagagagctactcagatctaccacttctacaattgagtcgtttgccgcgcaagaaaagcagatggaagtttgtgaggtgtgcggcgcgttcctaatagtgggggacgcccaatcccgggtcgacgatcatctcatgggcaagcaacacatgggatacgcgaagattaaggcgacagtagaagaattgaaggagaagttgagaaaacgcacagaggaacccgatcgtgacgagagactgaagaaggaaaaacaagaaagagaggaacgcgagaaggagcgggagagagaacgcgaagaacgagagcggaaaaggcggcgggaagaagaggagagggaaaaagaacgcgccagggatcgcgagcgaagaaagcggagcaggagtcgctcccggcacagtagtcgtacctctgatcggaggtgctcaaggtcacgcgaccacaagcgctcaagaagccgggaaaggaggagaagtcggtctagagaccgcaggcggtcccggagtcacgatcgaagcgaacgcaaacaccgttcccggagcagggacaggcggaggagtaaaagtagagaccgcaagagctataagcacagatctaaatcacgagatagggaacaggataggaaatccaaagaaaaggagaaaaggggatctgacgataagaaatcatccgtaaagagcggctcaagagagaaacagtcggaggacacgaataccgagagcaaggagtccgacaccaagaatgaagtgaacgggaccagcgaggacattaaatcagaaggcgatacgcagtctaactag

SEQ ID NO: 122760 - DNA, 240 bp, synthetic construct
  misc_feature 1..240: note = Description of Artificial Sequence: Synthetic coding sequence
  source 1..240: mol_type = other DNA
atgatttcggccgcccagctactggacgagctaatgggccgggatcggaaccttgcgcctgatgaaaagcgtagcaacgtgaggtgggaccacgaatcagtctgcaagtattatttgtgtgggttttgccctgcggagctgttcaccaacacccggagcgacttggacgtgttcggcagaggcgataacataagggatgttagcaagtttctggaggacgataagtggatggaagagtag

SEQ ID NO: 122761 - DNA, 1299 bp, synthetic construct
  misc_feature 1..1299: note = Description of Artificial Sequence: Synthetic coding sequence
  source 1..1299: mol_type = other DNA
atgatcagtgcagcccagttgttggacgagctcatgggcagagaccgcaatctcgcccctgatgaaaaaaggagtaacgtccggtgggatcatgaaagcgtgtgtaaatactatctgtgcggtttctgccccgcggagctcttcaccaacacacgcagtgatttgggaccatgtgaaaaaatccatgatgaaaacctccgtaaacagtatgagaagtcatccagatttatgaaagtgggctatgagcgggactttctcagatatctccagagtcttctcgcagaggtggaacgcaggatcaggaggggccacgcccgcttggctctttctcagaaccagcagagtagtggtgcggccggccctactggcaaaaacgaggagaagatacaggtgctcactgacaaaattgacgtactcctgcagcagatagaagagctggggagtgagggtaaggttgaggaggctcaggggatgatgaaactggttgagcagctaaaggaggaaagggagttgctccggagcacgactagcacgatcgagagtttcgctgctcaggaaaagcagatggaggtctgcgaagtttgcggcgcctttctgattgtcggcgatgcccagtctcgggttgacgatcacctgatgggtaaacagcatatggggtacgcaaagataaaggctaccgtcgaggagttgaaagagaaacttagaaagaggactgaggagccagatagggacgaacggctgaaaaaagaaaagcaagaaagagaggagagggaaaaggagcgggagcgtgagcgagaggagcgggagcgtaaaaggaggcgggaggaagaggaaagggagaaagagcgcgctagagacagagagcgtaggaagcggtcacggagccggagtcggcattcttctcggacatcagaccgtcggtgttcccggtccagggatcacaaacggagcaggagccgtgaacgacgacgcagtcggagccgggaccgccgccggagcaggagtcacgaccggagtgagaggaaacatcgatctcggagccgagatcggaggcgcagtaaaagtagggacagaaaatcttacaaacacaggagtaagtctagggatcgcgaacaggatagaaagtccaaagagaaggagaaaagagggagcgacgacaaaaaatcctccgtcaaaagtggcagccgagaaaagcagagtgaagacaccaacaccgaatctaaagagagcgacaccaaaaatgaggtgaacggaacttcagaggatatcaagagcgaaggggacacccagagcaactag

SEQ ID NO: 122762 - DNA, 711 bp, synthetic construct
  misc_feature 1..711: note = Description of Artificial Sequence: Synthetic coding sequence
  source 1..711: mol_type = other DNA
atgatttccgcagcacaactcctagatgagttgatgggccgggataggaacttggctccggatgagaaacgatctaacgtgaggtgggaccatgagagtgtgtgcaaatactatctgtgtgggttctgtccagcagaactgttcactaacacccgaagtgatctcggcccttgtgagaagatacacgacgaaaaccttaggaagcagtatgagaagtcttcacgttttatgaaggtgggctatgagcgcgacttcctaagatacttacagagcctgcttgccgaagtggaaagacgaataagacgcggccacgctcgactcgccttatctcagaaccagcagagcagtggggccgctggccctactggtaagaacgaggagaaaatccaggtgctcaccgataagatcgatgtcttactacaacagatcgaagaattaggctctgagggcaaggtggaggaggcacagggaatgatgaaattggtggagcagctgaaggaggagcgtgaactcctgcggagtaccacatctacaatcgaatcgtttgccgcacaagagaaacagatggaggtttgcgaggtgtgcggagccttcctgatcgtaggcgatgcccaaagtagggttgatgatcatctgatggggaaacagcatatgggttacgccaaaattaaggcaaccgtcgaggagaaaaagaagaagaaaaagaagtag

SEQ ID NO: 122763 - DNA, 1071 bp, synthetic construct
  misc_feature 1..1071: note = Description of Artificial Sequence: Synthetic coding sequence
  source 1..1071: mol_type = other DNA
atgaaagtgggctacgaacgggactttctgaggtatctccagtctctgctcgctgaggtcgagcggcgcatccggagggggcatgctaggttggcactcagtcagaatcaacagtcatctggagcagccgggccaaccggaaaaaacgaggaaaagatccaggtcctgacagataaaatcgacgtacttctgcaacaaatcgaggagctgggctcggagggtaaggtcgaagaggcacaggggatgatgaaactggttgagcagctgaaggaggagcgggagctgctacgtagcaccacgtccacaatcgagagtttcgccgcccaggaaaaacagatggaagtgtgcgaggtttgtggtgcatttctgattgtgggggatgctcagtctagggtcgacgaccacttgatgggcaagcagcacatgggttacgcaaaaataaaagccacagtagaagagctgaaagaaaaactgcggaagaggaccgaggagcccgacagggatgaacggctcaagaaggaaaagcaggagcgtgaagagcgggagaaggaaagggaaagggagcgggaagagagggagcggaagcgcagacgggaggaagaagaacgggagaaagaacgcgcccgggaccgggaacgaagaaaacgtagccgctcccggtcccgccacagctctcggacatcagacagacggtgctcccggtcccgcgaccacaaaaggtcccgttccagagaacgtagaaggagccgctcacgggatagacgaagatcaagatctcacgaccgctccgagagaaagcataggtcccgatcgcgtgaccggaggcgtagcaaatcacgagacagaaaaagctacaagcacaggtccaagtccagagatcgggagcaggaccgcaagagcaaagaaaaggagaagagaggctcggacgataaaaaatcgtcggtgaaatcaggaagtcgcgagaaacagtcagaagatactaatacggaatcaaaggaaagcgacactaaaaatgaggttaacggtacaagtgaggacatcaagtccgagggcttgtttgtcacagtgtag

SEQ ID NO: 122764 - DNA, 1017 bp, synthetic construct
  misc_feature 1..1017: note = Description of Artificial Sequence: Synthetic coding sequence
  source 1..1017: mol_type = other DNA
atgtccctgtcagccttcactttgtttctcgcactgatcggaggcaccagcgggcaatactatgattacgactttcccctgagcatttatggccagtctagccctaactgcgcccctgagtgtaactgccctgaaagttatcccagtgcaatgtattgtgatgagttgaaacttaaatcagtgccaatggtcccccccggtataaaatatctctacctacgaaacaatcagatcgaccacatcgacgagaaggcctttgagaatgtgactgatttacagtggctaatcctcgaccataacctgttggagaatagcaaaatcaagggtagagtcttctctaaattgaagcaactcaaaaaactgcatataaaccacaataacctgaccgaatcagtcggccctctccccaagagcctggaagacctccaactgacacacaataaaatcactaaacttggcagcttcgaagggctggtgaatctaacgtttatacatctgcaacacaaccggctcaaagaagacgccgtttcagccgccttcaaagggctgaagtccctggagtacttggacctgagcttcaaccaaatagcccgactcccctccggcctgcccgtgagtctgctgaccctctatttggacaataataagatcagcaatattccagatgagtattttaagcggtttaatgccctgcagtatctgcgcctgtcccacaacgagctggccgatagcggtatccctggcaatagcttcaacgtaagctcactcgtggagttggatttaagttacaacaaactcaagaatattcctacggtaaacgaaaacctcgaaaattattatctcgaggtcaatcagctcgagaaattcgacattaaatcgttctgtaagattttgggtcccctatcatactcaaagataaagcacctccggctggacggaaacagaatcagtgaaacatccctcccccccgacatgtacgagtgccttagagtggccaacgaggtcacacttaattag

SEQ ID NO: 122765 - DNA, 2100 bp, synthetic construct
  misc_feature 1..2100: note = Description of Artificial Sequence: Synthetic coding sequence
  source 1..2100: mol_type = other DNA
atgaaacagcgcttcagtgcgttacagcttctgaagttactgttgctcttgcagccgccattacctagggcactacgggaggccctatgccctgaaccttgtaactgtgttcccgatggtgccctgcgatgcccgggcccgacagctggtctcaccaggctgagtctagcctacctgccggtgaaggtgatcccaagtcaggcctttcgcggcctgaatgaggtgattaagatcgagattagccagatagacagcctcgaacgcatagaagcgaatgcttttgataacctcctgaatctgagcgaaatattgattcagaacactaagaatctccgatacatcgagcccggggccttcatcaatttaccgcgtcttaagtacttgtcaatctgtaacaccgggattcgaaagttccctgacgtgacgaaggttttcagttccgaatcgaacttcattctcgaaatttgtgataacctgcacatcacaaccataccaggaaatgcctttcaaggcatgaacaacgaaagtgtcactttgaagctgtacggcaacgggttcgaggaggtccagagccacgcctttaatggcacgacgctgacctcactggagctcaaggaaaacgtacacctggagaagatgcataatggcgcattcagaggtgccacgggtcctaaaacgctggatatttctagcactaaattgcaggctcttccttcttatgggctggagtcaattcagagactgattgccactagttcttatagtctgaagaagctaccatctcgagaaacattcgtgaaccttctggaggcaactctgacgtacccatctcattgttgcgccttcagaaatttaccaacaaaggaacaaaacttctcccacagcatttctgagaatttctctaaacaatgtgagtcaactgttcggaaggtgaataacaaaacactgtactcttcaatgctagctgaatctgaactgtccggctgggattacgagtacggcttttgcctgcccaagacacctcggtgtgcccccgagccagatgcgtttaatccgtgcgaggatataatggggtatgacttcctccgagttctcatttggttaataaacattcttgcgatcatgggcaacatgactgttttattcgttctgctgacctcccggtataagctcaccgtccctagatttctcatgtgcaacctctcattcgccgacttctgcatggggctttacctgcttctgatagcatcagtggattcacagacaaaaggtcagtactacaatcatgcaatcgattggcagacaggcagtggctgctcaactgccggattctttacagtctttgctagtgagttgagcgtctatactttgaccgtgataaccctcgagcgctggcataccattacctatgccattcacttggaccagaaactcagattaaggcatgctatactgattatgttgggaggctggctgttttcttcactgattgctatgctcccacttgtgggcgtgtctaattatatgaaagtgtctatttgtttcccaatggatgtcgagaccacactgagccaggtttacattctgaccattcttatcctgaacgtggtagcatttttcatcatttgcgcttgctacatcaagatatatttcgctgtgcggaatccggagctcatggcgaccaacaaggacaccaagatagccaagaaaatggcgatcctcatcttcactgactttacgtgtatggcacctatcagttttttcgccattagtgccgcatttaaggtgcctctgatcaccgtgaccaacagcaaggtgttgctggtcctattttatccaattaacagctgtgcaaacccctttttgtatgctatattcactaagactttccagcgggacttcttcctcctgttatctaaattcggatgttgcaaacgacgggccgaactgtatcgccggaaagatttctccgcctatactagtaattgtaaaaatggctttacaggcagtaataagccttcccagagcactctgaagctcagcacccttcactgccagggcaccgctctgctggataaaacacggtacactgaatgttag

SEQ ID NO: 122766 - DNA, 1914 bp, synthetic construct
  misc_feature 1..1914: note = Description of Artificial Sequence: Synthetic coding sequence
  source 1..1914: mol_type = other DNA
atgaagcaacggttctccgctctgcagctgctgaaacttttactgctgctccaacccccacttccacgagccctgagagaggctctgtgtcctgaaccatgcaactgcgtgccggacggagcccttagatgcccggggcctacggctgggctgactcggctgagtttagcctatcttcctgtcaaggttatccccagtcaggctttccgaggattgaacgaggtcatcaagatcgagatcagccagatcgacagtctggagagaattgaggctaacgcatttgacaacctgctcaacctttctgaaattttgatccagaacactaaaaatcttaggtatatcgagccgggagcattcattaaccttccaagacttaagtacttgtctatctgtaacaccgggatccggaaattccccgatgtgacaaaggtcttttcatcagaaagcaacttcatcctggagatctgcgataatctccatataaccaccattcctggaaatgcttttcaggggatgaataatgagtccgtgactcttaagctgtatgggaacggcttcgaggaggtccagagccatgccttcaatggcacgaccctgacaagcctggagctgaaggaaaacgtgcacctagagaaaatgcacaacggggcgtttcgcggtgcaacagggccgaagaccttgcaaaacttttctcatagtatcagcgagaatttttctaagcaatgtgaatctactgtaaggaaggtgaataataagacgttatattccagcatgctggccgaatctgagctgtcaggatgggattatgaatacggattctgtttgcctaagactcctcgctgtgcccctgagccggatgcctttaacccctgtgaggacatcatgggatacgattttctgcgcgtgctgatttggctaatcaatatattagcaattatggggaatatgaccgtcttgttcgtcttgctgacctctaggtataaactcacagttccccggtttctgatgtgtaacttgagctttgctgatttttgcatgggactgtatctcctactgatagcctcagttgatagccagaccaagggtcagtattacaaccatgctattgactggcaaaccggctcgggttgctcaacagcaggcttttttacggtttttgccagtgaactatcagtctatacacttacagtcattacgctggaacgctggcacaccatcacctacgcaattcacctggaccagaagctgagactgcgccacgctatcttaatcatgctcgggggctggctattctcaagtctaattgccatgctcccactggtcggagtcagcaactacatgaaggtgtcgatctgcttccctatggacgtagagacaaccttgtcgcaagtttacatacttactatcctgatactgaatgtggttgcttttttcataatttgcgcatgctatatcaaaatttatttcgccgtgaggaacccagaactcatggccaccaataaggatacaaagatcgcaaagaagatggcaattctgatctttaccgatttcacctgcatggcacctatcagcttctttgcgatcagcgctgcttttaaagtccctctcatcaccgttacaaattccaaggttctactggtgctgttttatcccattaattcttgcgctaacccattcctgtatgccatcttcaccaaaacctttcagcgcgatttcttcctgctcctctctaaatttggttgctgcaaacggcgagcagaactttataggcggaaagatttttcagcttacacctctaactgcaagaacggctttaccggttcaaacaaaccatcacagtcaaccctgaaactgagtacccttcactgtcaggggactgcccttcttgacaagacccggtatactgagtgctag

SEQ ID NO: 122767 - DNA, 978 bp, synthetic construct
  misc_feature 1..978: note = Description of Artificial Sequence: Synthetic coding sequence
  source 1..978: mol_type = other DNA
atgaaacagaggttttctgcactccagctgctgaagctgctacttttgctgcagccccccttgccccgggccttgagggaagcactttgccccgaaccctgtaactgcgtgccggacggagcactccgctgccctggaccgaccgccggcctgactcgcttatcattggcgtatttaccagtcaaggtgattcccagtcaggctttccgtgggctgaacgaagtgattaagattgaaattagccagattgattctttagagcggattgaagctaacgcattcgataacctgctaaatttgtccgaaatacttatccagaatacaaagaacttgagatacatagagccaggagcttttataaatctgcccagattaaagtacctctccatatgcaacaccgggatcagaaagtttcccgatgttaccaaggtctttagctccgagtccaatttcatcttagagatttgcgacaatctccatattacaactattcccggcaatgcattccaggggatgaacaatgaatcagtgacattaaagctgtacgggaacggatttgaggaagttcagagtcatgcattcaatggtacaacactcaccagcctcgagctcaaggagaacgttcacctggagaagatgcataacggggcgttccgcggagccacaggtccaaagacgctggatatttcaagcacaaaattgcaagccctgccgagttacgggctcgaatcgatacaaagactgatcgccaccagcagttactcccttaaaaaactcccgtcgcgcgagactttcgtgaatcttctcgaagccaccttgacttacccgtctcactgttgtgcatttaggaacttgcctaccaaggagcagaacttttctcatagcatctctgaaaacttttcaaagcagtgcgaatcaacagtccggaaagtcaacaataagacactgtccaagccgagaatcaatgggtaccagtag

SEQ ID NO: 122768 - DNA, 990 bp, synthetic construct
  misc_feature 1..990: note = Description of Artificial Sequence: Synthetic coding sequence
  source 1..990: mol_type = other DNA
atgaaacagcgatttagcgctttacagttactgaagctgctgttgctgctccagcccccactgccaagggccctacgggaggctctgtgtcctgagccctgtaactgtgtaccagacggcgccctaagatgtcctgggccaacggcaggcttgactagacttagcttggcatatctgcccgtgaaagtaatccctagtcaagccttcagaggcctgaatgaggtgattaagattgagattagccagattgactcccttgagagaatcgaagccaacgcttttgacaacctgctgaatctaagtgaaatcctcatacaaaataccaagaacttgcggtacattgagccgggagcatttatcaacctgccacgattaaagtacctctcgatttgcaacactggaatccgcaaatttcccgatgtgaccaaagtattttcctctgagagtaatttcatcctcgagatttgcgacaatctccacatcaccactatccccgggaatgcgttccagggcatgaacaacgagagcgtgacactgaagctgtatggcaacggattcgaagaagtgcagtctcacgcattcaatggaactacgctgacatcactcgagctgaaggaaaacgtgcacctggagaaaatgcataatggtgcttttagaggggccacagggccaaaaactctcgacatctctagcacaaagcttcaggcgctcccttcctacggtctggaaagtattcagagacttattgcaacctcgtcatactccttgaaaaaacttccatcacgcgaaacgtttgtgaatcttcttgaagctacgcttacctatcctagccactgctgcgccttccgtaacctgccaacaaaagaacagaattttagtcactcaatcagcgaaaacttctctaagcaatgtgaatctaccgtgaggaaagtgaataacaagacgcttctgctgcatggagcactgagcgcagcgcatagcctttcctag

SEQ ID NO: 122769 - DNA, 2019 bp, synthetic construct
  misc_feature 1..2019: note = Description of Artificial Sequence: Synthetic coding sequence
  source 1..2019: mol_type = other DNA
atgaagcaaaggttcagtgctttacagcttctgaagctgctcctactgctccagcctccgctacctagggcattgagggaagctctctgcccagaaccatgcaactgcgtgccggatggcgctctgagatgccccgggcccactgccggcctcactaggctctctctggcctacctccccgtgaaggttatacccagtcaggcttttcgtggacttaatgaggtgattaagattgagatttcccagattgatagccttgaaagaatcgaagccaacgccttcgataacctccttaacctgagtgagattctgatccaaaatacaaaaaatctccgatatatcgagcctggcgctttcattaatctacccagactcaagtaccttagcatctgtaacaccggaatccggaagtttccagatgtcaccaaggtattctcatctgaaagcaattttatccttgaaatttgcgacaatcttcatattacaacaatcccaggcaacgcatttcagggcatgaataatgagagcgtcactctcaagttgtacggaaacggatttgaagaagtgcagtcacatgcctttaacggcacgacgctaacttcccttgaactgaaggaaaacgtgcatctggaaaagatgcacaatggcgcctttaggggggccactggccctaagacattagatatttcttctacaaagctgcaggctttacccagctacgggttggagtcgatccaacgactgattgcaacctcatcgtactctcttaagaaactaccatcaagggagacctttgtcaatcttctcgaagccacactgacatatcccagccattgctgtgccttccgcaacctcccaacgaaagattatagctccatgttggccgagagcgagctgtcaggctgggactacgaatatggcttttgcctaccgaagacccctaggtgcgcccccgaacctgatgcatttaacccatgcgaggatatcatgggttacgacttcttaagagtcttgatctggcttattaacattctcgctattatgggaaacatgaccgtcctgttcgtcttgctcactagccgatataaactaaccgttccccggttcctgatgtgcaacttatcgttcgctgatttctgtatgggattgtatctcctgctgatcgcatctgttgatagccagactaaggggcagtattacaatcatgccattgattggcagactggctctggctgctcgacggctggtttctttaccgtgttcgcatccgagctgtctgtttacaccttgactgtaatcacactcgagaggtggcacaccatcacctatgccattcatctcgaccaaaagctccgtctgaggcatgctatcctgatcatgctcggcgggtggcttttctcttcactgatcgcaatgctccccttggtcggggtctcaaactatatgaaagtgagtatttgcttcccaatggacgtggaaactacacttagtcaggtgtatatcctaaccatccttatcctgaatgttgtcgccttcttcattatctgtgcttgctacatcaagatttattttgccgtgcggaaccctgaactcatggcaactaataaagacactaagatcgccaaaaaaatggcaatcctcatattcaccgactttacatgtatggcccctattagtttctttgccattagtgcggctttcaaggtgcccttaattacagtgaccaattcaaaggtgttgttggtgctgttttatccgatcaatagttgtgctaaccccttcctctatgccatcttcactaagacattccagcgcgacttttttctcctactctccaagttcggctgttgcaaaaggagagccgagctgtatagaagaaaagattttagcgcatatacgagcaactgcaagaacgggttcacaggcagcaataaacctagccagagcacactcaaactgtccacactgcactgccagggaactgcgcttctggataagacgcggtacaccgagtgctag

SEQ ID NO: 122770 - DNA, 396 bp, synthetic construct
  misc_feature 1..396: note = Description of Artificial Sequence: Synthetic coding sequence
  source 1..396: mol_type = other DNA
atgacgcccctactcactctgattttagttgtgctgatggggctgccgctggctcaggccctagactgccacgtgtgcgcttacaatggagataattgttttaatcccatgaggtgtcctgccatggtcgcctattgtatgacaaccaggaccagcgccgcagaggcaatctggtgccatcagtgcacaggcttcggcggttgtagccatggatccaggtgcctgagggatagcacccattgcgttaccaccgctacaagagtgctgagcaacaccgaagatctgcctcttgtcactaaaatgtgtcacatcggctgtccggacatccctagtctcggactgggaccttacgtttccatcgcctgttgccagacatccctctgcaaccatgattag

SEQ ID NO: 122771 - DNA, 351 bp, synthetic construct
  misc_feature 1..351: note = Description of Artificial Sequence: Synthetic coding sequence
  source 1..351: mol_type = other DNA
atgaccccattgctaacgcttatcttggtggtgctgatggggctacccttggcacaggccctggattgtcacgtgtgcgcttataacggagacaactgtttcaaccccatgagatgtcccgctatggtagcttattgtatgactacacgcacgtactacacccctacacggatgaaagtcagcaagtcttgcgtgcctagatgcttcgagactgtttatgacggatattctaagcacgcgtctaccactagctgctgtcagtatgacctctgcaatggaacagggctggcgacccccgcaaccctagcactagcacccatactactggcaaccctgtggggactactctag

SEQ ID NO: 122772 - DNA, 351 bp, synthetic construct
  misc_feature 1..351: note = Description of Artificial Sequence: Synthetic coding sequence
  source 1..351: mol_type = other DNA
atgacgcccctgctgaccctgatcctggttgtgctgatgggcctgcctctggcacaggcccttgattgtcatgtgtgtgcgtataatggggacaactgtttcaaccccatgaggtgcccagcaatggttgcctactgtatgacaacaagaacttattacactcctactaggatgaaggtttctaagagttgtgtgccccggtgtttcgaaactgtatatgacggatatagcaaacacgcatcaacaacaagttgctgccagtatgatctatgcaacgggacgggcttagccacccctgcaaccctagccttagctcctatactgctagcaactctgtggggcctcctgtag

SEQ ID NO: 122773 - DNA, 351 bp, synthetic construct
  misc_feature 1..351: note = Description of Artificial Sequence: Synthetic coding sequence
  source 1..351: mol_type = other DNA
atgacacccctgctgaccctcatcctggtggttttaatggggctccccctggctcaggccctagattgccacgtatgcgcgtataacggggacaattgcttcaaccccatgcgctgtccagctatggtggcttactgtatgaccactcggacgtactatacaccaacccgtatgaaggtgtcaaaatcctgtgttccccgatgttttgagactgtgtacgacggatatagcaagcacgcaagcacaacctcttgttgccagtatgatctgtgcaatggcaccggcttagccaccccagcaaccctggctctggcccccattctgctggccacactgtggggactgttgtag

SEQ ID NO: 122774 - DNA, 249 bp, synthetic construct
  misc_feature 1..249: note = Description of Artificial Sequence: Synthetic coding sequence
  source 1..249: mol_type = other DNA
atgacccctctattgacccttatcctcgtggttctcatgggtttgcctctggcacaggctctggattgtcatgtttgtgcgtacaatggcgacaactgtttcaatcccatgaggtgccctgctatggtagcctactgcatgaccaccagaacctattacactccaacgcgcatgaaagtctcaaaatcctgtgtgcccaggtgcttcgagacagtatacgatggttattccaaacacgccagcacatag

SEQ ID NO: 122775 - DNA, 255 bp, synthetic construct
  misc_feature 1..255: note = Description of Artificial Sequence: Synthetic coding sequence
  source 1..255: mol_type = other DNA
atgacccccctcttgacgcttattctggtcgtcttgatgggcctgcctctagcccaagccttagactgccacgtctgcgcctacaatggcgacaactgctttaaccccatgaggtgccccgcaatggtggcttattgcatgactaccaggacatattacacacctacaagaatgaaagtctcaaagtcctgcgtgccacgctgcttcgagacagtgtacgacggctacagcaagcacgcctctactacctcgtag

SEQ ID NO: 122776 - DNA, 1041 bp, synthetic construct
  misc_feature 1..1041: note = Description of Artificial Sequence: Synthetic coding sequence
  source 1..1041: mol_type = other DNA
atggatcccgcccggaaagccggcgcccaggctatgatatggaccgcgggctggctgttgcttctgctgcttagaggcggcgcccaggctttggagtgttactcctgcgtgcagaaggctgacgacggttgctcacccaacaagatgaagacagtaaaatgtgcccctggggttgatgtgtgtacagaagccgtgggcgccgtggaaacaatacacgggcaatttagccttgccgtcagaggctgtgggtccggcctgccagggaaaaatgatcggggcctggacttacacggccttcttgcttttattcagctgcagcagtgtgcacaggatagatgcaacgccaagctgaatctgacatccagggccctggatccagctggcaatgagtccgcctacccacctaacggggttgaatgctatagctgcgttgggttatctagagaagcctgccaaggaaccagccctcctgtagtgagctgttacaacgcgtcagaccacgtatataaaggctgcttcgacggtaacgtaaccttgaccgcagcgaacgtgacagtttcgttgcctgtgcgtggctgtgtccaggatgagttttgtactagagatggggtgaccggtcctggtttcacactgtctgggagctgctgtcagggctcccgctgtaacagtgatctgcggaacaaaacatatttctctcctagaatcccgcccctggtgagactccctcctcccgaaccgaccacagttgcatcaacaacatcagtgactaccagtacttccgcgcccgtgaggccgacaagtaccaccaagcccatgcccgcacctacctcacagactccaagacagggagtcgagcacgaagccagccgggatgaggagccccgattgaccggcggagctgccgggcaccaggatagaagcaactccggccaatatcctgccaaggggggacctcagcagccccataataagggatgtgtcgcgcctacggccgggctggcggcgcttttgctcgcagtggctgccggcgtgctgctttag

SEQ ID NO: 122777 - DNA, 885 bp, synthetic construct
  misc_feature 1..885: note = Description of Artificial Sequence: Synthetic coding sequence
  source 1..885: mol_type = other DNA
atggaccctgccagaaaagcaggggctcaggcaatgatctggacggctggctggctgctgttactgctgctcagagggggcgctcaggccctcgaatgttatagttgtgtccaaaaggcagatgacggatgtagcccaaacaaaatgaagacggtcaagtgcgctcctggtgtagatgtctgtactgaggccgtaggggcagtggaaaccattcacggacagttctctcttgccgtgcgcggatgtggatctgggcttccaggcaaaaatgacagaggacttgaccttcacggactcctggcgttcatccagttgcagcagtgtgcccaggaccgctgtaatgcaaagttaaatctgacgtctcgagcgttggaccctgccgcagccgctaacgtaacagtcagtctcccagtgagaggctgtgtgcaagatgagttctgcacaagagacggggtcacagggcccgggttcacccttagcggcagctgctgtcagggaagtcggtgcaattctgacttacggaataaaacttatttctcaccaaggatccctccgcttgtacggctgcctccgcccgaaccaaccacggtggcgtccacaacatcggtgacaacatccaccagcgcccccgtcagacctacctcaacgaccaaacccatgcccgctccaacctcacaaactcccaggcagggcgtggaacacgaagctagtcgggatgaggaaccccgactcaccgggggagccgctgggcatcaggatcggagtaacagcgggcagtaccctgcaaagggcggccctcagcaaccccacaacaaaggatgtgtcgcccccacggctggcctggcagccctgctactcgctgtggcagcaggcgtgctgttgtag

SEQ ID NO: 122778 - DNA, 516 bp, synthetic construct
  misc_feature 1..516: note = Description of Artificial Sequence: Synthetic coding sequence
  source 1..516: mol_type = other DNA
atggaacctgggccagccctggcctggctgctgctactgtcactgctggctgactgcttgaaagccgctcagagccgcgatttcacagtgaaggacattatctacttacacccctctacgactccctacccaggggggttcaagtgctttacttgcgagaaagctgctgataattacgaatgcaataggtgggcccccgatatttactgcccccgagagaccaggtactgctacacccagcacactatggaggtgactgggaacagcatttcagtgaccaaaagatgcgtcccgctggaagagtgtctgtccacgggttgtagggattccgagcatgagggccataaggtttgcacgtcatgttgtgaaggcaatatttgtaatctgccgctgccaaggaacgagacggacgcgacctttgctacaacaagtcccattaaccaaacaaatggtcaccctcggtgcatgtccgtcatcgtgtcttgtctgtggctttggctgggcctgatgctgtag

SEQ ID NO: 122779 - DNA, 516 bp, synthetic construct
  misc_feature 1..516: note = Description of Artificial Sequence: Synthetic coding sequence
  source 1..516: mol_type = other DNA
atggagcctggccccgctttggcctggctgctcctgcttagcctgctagctgattgccttaaggcagctcaatcacgggattttaccgtcaaggatatcatctacctgcacccttcaacgactccctatcctggggggtttaagtgtttcacatgtgagaaggccgctgacaactacgaatgtaaccgatgggccccagatatctattgtcccagggaaacgcgctattgttacactcagcatactatggaagttacaggcaatagcatttccgtaactaagcgctgcgtcccactcgaggaatgtctgagtaccggatgccgagactctgagcatgaaggacacaaggtgtgcacttcgtgttgtgaggggaatatctgcaacctgccgttaccaaggaacgagaccgatgcaactttcgctaccacgtcacccattaaccaaacaaatgggcatcctcgctgcatgagcgtgatcgtgagctgcctctggctgtggctcggtttaatgctgtag

SEQ ID NO: 122780 - DNA, 162 bp, synthetic construct
  misc_feature 1..162: note = Description of Artificial Sequence: Synthetic coding sequence
  source 1..162: mol_type = other DNA
atggaacctggccctgctctcgcatggttgctgttgctgagtctcctcgccgactgcctgaaagccgcacaatccagggatttcaccgtgaaggatatcatatatttgcacccttctaccactccttaccccggagggttcaaatgcttcacatgtgagtag

SEQ ID NO: 122781 - DNA, 969 bp, synthetic construct
  misc_feature 1..969: note = Description of Artificial Sequence: Synthetic coding sequence
  source 1..969: mol_type = other DNA
atggctcggtgctttagtcttgtgctgttgctgacctcgatttggaccacacggctactggtccaaggttctctgcgggccgaggagctttccattcaagtgtcctgccggatcatggggatcaccttggtcagcaagaaggctaaccagcaactgaactttacagaagctaaggaagcgtgtagacttctgggcctctcattagcaggcaaagaccaggttgaaactgccctcaaagctagcttcgagacatgcagctacggatgggtaggagatggctttgttgtgatcagtagaatatctccaaatccgaaatgtggcaaaaacggggttggggtactcatctggaaagtgccagtgagcagacagttcgccgcctattgttacaactccagtgatacctggaccaattcctgtatacccgagattattacaactaaggatcccatctttaatactcagaccgccacccaaacaaccgagttcatcgtcagcgacagcacatattctgtagcctctccgtactccacgatcccagcacctaccacaacccctcctgcacctgcctcaacgtctattccacggcgcaagaaactgatctgtgtaacggaagtcttcatggaaaccagcaccatgagtacagagacagagccctttgtcgagaacaaggcagccttcaagaacgaggcggctggattcggaggcgtgcctaccgccttgctggtcctggcccttttgttcttcggggctgcagccgggcttggattttgctacgtgaaacgctatgttaaggcatttcccttcacaaataaaaaccaacagaaggaaatgatcgagacaaaggtggttaaggaagaaaaggcgaacgacagcaacccaaatgaggaatcaaaaaaaaccgacaagaacccagaagaatccaaatcaccttcaaaaaccacagtccgctgtctcgaggctgaggtatag

SEQ ID NO: 122782 - DNA, 387 bp, synthetic construct
  misc_feature 1..387: note = Description of Artificial Sequence: Synthetic coding sequence
  source 1..387: mol_type = other DNA
atgagaacagcactcctgctgctcgctgcactggccgtggccaccggcccagcactaacactacgatgtcatgtctgcacttcttcctccaattgcaagcattccgtcgtgtgtcctgcaagttcccgcttctgcaaaactactaataccgtggaacctctgcgcggcaatctggtcaagaaggactgcgcagaatcctgtactccatcatacaccctgcaagggcaagtctccagcggaacctcatcgacccagtgctgtcaggaagatctctgtaacgaaaaactgcataacgccgctcccacacgaactgccttggcccacagtgccctcagtttgggtctggctttatctctcctggccgtgatcctcgctccatccctttag

SEQ ID NO: 122783 - DNA, 396 bp, synthetic construct
  misc_feature 1..396: note = Description of Artificial Sequence: Synthetic coding sequence
  source 1..396: mol_type = other DNA
atgaagatctttctcccagtgctgctggctgctctgctcggagtcgaacgcgcaagttcactcatgtgtttctcttgtctaaatcagaagtcaaatctctattgtctgaaacctacaatttgtagcgaccaggataactactgcgtgaccgtctcggcgtctgccggcataggcaacctcgtgacattcgggcattctttgtccaagacctgttcacccgcttgccccattcctgagggcgtcaacgttggcgtggcctccatgggaattagctgttgtcagagctttctttgcaacttttctgccgctgatggtgggctgcgggcctcagtgaccttacttggggcgggactactgctcagtcttttgccagctcttctcaggtttggcccatag

SEQ ID NO: 122784 - DNA, 396 bp, synthetic construct
  misc_feature 1..396: note = Description of Artificial Sequence: Synthetic coding sequence
  source 1..396: mol_type = other DNA
atgaagattttcctccccgtgctcctggcggccctgctcggggtggagcgggctagctctctgatgtgcttctcatgccttaaccagaagtctaacttgtactgcctcaaacctacaatctgtagcgatcaggacaattactgcgtgaccgtgagcgctagcgccggcattggcaacttggtgacgttcggtcacagcttgtcgaagacgtgctcgccggcatgccccatccctgagggtgtgaatgtgggcgttgcgagtatgggaatttcgtgctgccaaagttttttgtgcaactttagtgcagcggacggcgggttgagagcctcagtgaccctccttggcgccggactgctgttaagtttactgcctgccctgcttaggtttggaccatag

SEQ ID NO: 122785 - DNA, 267 bp, synthetic construct
  misc_feature 1..267: note = Description of Artificial Sequence: Synthetic coding sequence
  source 1..267: mol_type = other DNA
atgaagatttttttacctgtattattggctgccctcctcggcgttgagcgggcatcttctttgatgtgcttctcttgcctcaatcagaagagcaacctctactgcctcaagcctacgatttgcagcgaccaggacaactactgcgttaccgtcagtgcaagcgccggaattggtaacctggttacctttgggcacagcctgagcaagacctgctctcccgcatgtcctataccagagggcgtcaatgtgggcgtggccagcatgtag

SEQ ID NO: 122786 - DNA, 396 bp, synthetic construct
  misc_feature 1..396: note = Description of Artificial Sequence: Synthetic coding sequence
  source 1..396: mol_type = other DNA
atgaagatcttcctccccgtgctgttagcggctttgctgggagtcgagcgggcaagcagtctgatgtgcttcagctgtcttaaccagaaaagcaacctttattgtcttaaaccaacaatttgcagtgatcaagataactattgcgtgaccgtgtcagctagtgcaggaatagggaacctcgtgacctttggccattccctgagcaagacttgctcccccgcctgtcctattcccgagggggtgaatgtgggggtggcttctatgggcattagctgctgtcagtcttttctctgcaatttcagcgctgctgacggtggactcagggcgtcagtgaccctgctgggagctggccttctgctttctctgctccccgcacttcttagatttggcccttag

SEQ ID NO: 122787 - DNA, 396 bp, synthetic construct
  misc_feature 1..396: note = Description of Artificial Sequence: Synthetic coding sequence
  source 1..396: mol_type = other DNA
atgaagatctttcttcctgtcttactggccgccctgctgggggtagaaagggcttcgagtctgatgtgcttcagttgcctgaaccagaagagcaatctctactgccttaagcctaccatctgtagcgaccaggacaactattgtgtgactgtgagtgcctccgcgggaattggcaacctggttacattcgggcatagtctgtccaaaacatgctcccccgcctgtcccatacccgaaggcgttaatgtcggggtcgcctcgatgggcatctcatgttgtcagtctttcctttgcaatttttccgcagctgatggcgggctcagggccagtgtgaccctactgggcgcaggcctgctcttatccctcttgcccgcactcctaagattcggtccttag

SEQ ID NO: 122788 - DNA, 396 bp, synthetic construct
  misc_feature 1..396: note = Description of Artificial Sequence: Synthetic coding sequence
  source 1..396: mol_type = other DNA
atgaagatttttcttccggtcctcctggcagctcttctgggcgtagagagggccagcagccttatgtgcttttcatgcctgaaccagaagtctaacttgtactgcctaaaacccaccatttgctctgaccaagacaactattgtgtgacagtctccgcctcagccggtattggcaacctagtaaccttcggccacagtcttagtaagacttgttctcccgcctgccctattcccgagggcgtgaacgtcggagttgcttcaatgggaatttcctgttgccagtccttcctgtgcaatttcagtgcggcagacggcggcctgcgagccagcgtgactctcttgggtgccggactgctccttagcctgctacccgctctgttgagattcggaccctag

SEQ ID NO: 122789 - DNA, 396 bp, synthetic construct
  misc_feature 1..396: note = Description of Artificial Sequence: Synthetic coding sequence
  source 1..396: mol_type = other DNA
atgaagattttcctgcccgttctgttggccgcactcctcggcgtggagcgcgccagcagtcttatgtgtttctcatgcctaaaccagaaatcgaacctgtattgtttgaaaccaacaatatgctcagaccaagataactattgtgttacagtgagtgcttctgccgggataggcaacctagttacattcggacacagtctatctaagacgtgctcaccggcctgccctatacccgaaggagttaatgtgggggtcgcctcaatgggaatctcttgctgtcagagttttctgtgtaatttctctgcagccgatggggggctgcgggcctcagtcaccctcctgggcgccgggcttctcttgtcactcctgcctgctctgcttcgatttggcccatag

SEQ ID NO: 122790 - DNA, 396 bp, synthetic construct
  misc_feature 1..396: note = Description of Artificial Sequence: Synthetic coding sequence
  source 1..396: mol_type = other DNA
atgaaaattttcctcccagttttgctggcagcgctactgggtgttgagcgtgctagttctcttatgtgcttcagttgcttgaatcagaagagtaatctatactgcctcaagccaaccatatgtagtgaccaagataactattgcgtgaccgtatccgcaagtgccggaatcggcaacctcgttactttcggtcattccctatcaaaaacctgcagtcctgcctgtcctattcccgagggggtaaatgtgggcgttgcctccatgggaatctcctgttgtcagagttttctttgcaacttcagcgccgccgacggcggactaagagcatccgtgactctactcggtgctggactcctcctatctttactgcccgcactccttagattcgggccctag

SEQ ID NO: 122791 - DNA, 402 bp, synthetic construct
  misc_feature 1..402: note = Description of Artificial Sequence: Synthetic coding sequence
  source 1..402: mol_type = other DNA
atgaaaccacagtttgtgggcattctgcttagcagtctcctgggcgccgcattgggcaatcgaatgcggtgttataattgtggaggctctccctcatcctcctgcaaggaggccgtgacaacttgtggagaaggacgaccccagcctggtcttgaacaaatcaagttaccaggcaatcctccagtgaccttgattcatcagcaccccgcttgtgtagctgcacaccactgtaaccaggttgaaacagaatccgtgggagacgtaacttacccagcgcaccgggattgttatctgggcgacctatgcaatagcgccgtggcaagccacgtcgcccccgccggaatcctcgcggcagccgccacggccctgacttgcctcttaccagggctctggtccgggtag

SEQ ID NO: 122792 - DNA, 525 bp, synthetic construct
  misc_feature 1..525: note = Description of Artificial Sequence: Synthetic coding sequence
  source 1..525: mol_type = other DNA
atgaagccccaattcgtcgggatcctgttaagctcacttttaggggctgccctgggaaataggatgcggtgttacaactgtggtggatctccctcaagcagttgcaaggaagccgtaacaacatgcggcgaaggcaggcctcaaccaggattagaacagatcaaactgcccggaaacagacggtgcttcctccgtggattaaaaatcccactgggcagtttaaaatcgcacctcttatgtccaagacggcaggtccttaaacctggcgtgcaacacccctcattcatactatcgctgtcccccagcgacctggattctcctacctcctcactccgacgtagcccatccctgcagagcagcggtgatcgggtgggcgggaggagggatctttcttcccctcaaggtctgctacccggaagacccgtccagcagcggaggggaaagccgtgcggtccttgtcggcatttcggctgctccagttatcgtcctgacctatccctggccagaacagtcgaacgcatctag

SEQ ID NO: 122793 - DNA, 402 bp, synthetic construct
  misc_feature 1..402: note = Description of Artificial Sequence: Synthetic coding sequence
  source 1..402: mol_type = other DNA
atgaagccccagttcgtcggcattttgctgtcctcgctcctgggggccgcgctcggaaatcggatgcggtgttacaattgtggcggctccccttcttcttcttgtaaggaagccgtaacaacatgtggggagggcagacctcagcccggactggagcaaattaaactcccgggaaatccccccgtgaccctcattcaccagcaccctgcctgtgtagccgcccatcattgtaaccaggtcgagactgagtcagtcggggatgtgacataccctgcacaccgcgactgctacttaggcgacctctgtaacagtgccgtggccagccacgtcgcccccgccggaattcttgccgcggcagccacagcactgacctgcctgctgcccggactctggtccggttag

SEQ ID NO: 122794 - DNA, 1149 bp, synthetic construct
  misc_feature 1..1149: note = Description of Artificial Sequence: Synthetic coding sequence
  source 1..1149: mol_type = other DNA
atggctgtgctgttccttctcctcttcctctgtggaactccgcaggcggctgataatatgcaggccatctacgttgccctaggggaggccgtcgagctcccgtgccctagtccgcctacattgcacggggacgaacacctgtcttggttctgtagtcctgctgctggtagctttacaacgctggtggctcaggtacaggtggggagacccgccccggatcccggtaagccaggacgggagtcacgcttaagactgctggggaattattcattgtggttggaggggagcaaagaagaagacgccggacgctactggtgcacggtactgggccagcatcataattaccagaactggcgcgtgtacgacgtgctggtgctgaagggctctcagctcagtgctcgggccgccgatggaagcccatgcaacgttctgctgtgctcggtggtgcccagcagacgcatggattcagtgacgtggcaagagggcaagggacctgtgcgcggccgggtccagagcttctggggatccgaggcagcgcttctgctagtgtgccccggagaaggcctatctgaaccacgaagccgcaggcccaggattattaggtgtctcatgactcacaataaaggtgttagtttctcgctagcagccagtatcgacgccagccccgctctttgcgccccttccaccggatgggacatgccctggatactgatgctgctgctgactatggggcagggagtcgtcatcctcgcgctgtcaattgtcttgtggcgtcagagggtgcgcggagctcctggccgaggcaaccgcatgcggtgctacaactgcggcggttcccctagcagcagttgtaaggaggccgtgacgacttgtggagaaggaaggcctcagcccggcttagagcaaattaaactgcctgggaacccccccgtgacactgattcatcagcatcccgcttgcgtggctgcccaccattgtaatcaggtagagactgagagtgtcggtgatgtcacttatcccgcgcacagagattgctatctgggcgatttatgtaactccgccgtagccagtcatgttgccccagcagggatcctggctgccgccgccacagcgcttacctgtctgctccctggcctgtggtcgggctag

SEQ ID NO: 122795 - DNA, 402 bp, synthetic construct
  misc_feature 1..402: note = Description of Artificial Sequence: Synthetic coding sequence
  source 1..402: mol_type = other DNA
atgaaaccacaattcgtcggcatactcttgtcaagcctacttggcgcagccctcggaaacagaatgcggtgctataattgcgggggctcaccttcaagctcatgtaaggaagcagttacaacctgcggggaaggcaggccacagccaggtctggagcagatcaaactccccgggaatccgcctgttacattgatccaccagcatccagcttgcgttgcggcgcaccattgtaaccaggtggaaaccgagtccgttggagacgtcacttaccccgctcaccgcgactgttacctcggcgatctgtgtaactccgccgtggcatcacacgtagccccggcgggcatcctcgctgccgcagcaactgccttgacttgcctgctgcccggcttatggtctgggtag

SEQ ID NO: 122796 - DNA, 402 bp, synthetic construct
  misc_feature 1..402: note = Description of Artificial Sequence: Synthetic coding sequence
  source 1..402: mol_type = other DNA
atgaagccacagttcgttggcatcctgttatcctctttactcggggccgccctaggaaacaggatgagatgttacaattgtggcgggagtccttcaagctcatgtaaggaagccgttaccacttgcggagagggcaggcctcaaccgggattagaacagataaaactgcctggcaatccacctgtgaccctgatccaccagcaccctgcctgtgtggccgctcaccattgcaaccaagtggaaacagaatcggtgggggacgtgacctatcctgcacaccgggactgctacctgggggatctctgcaatagcgcggtagccagccatgtggctccagccgggattctggccgctgccgctactgcgttgacatgccttctcccagggctgtggagcgggtag

SEQ ID NO: 122797 - DNA, 1149 bp, synthetic construct
  misc_feature 1..1149: note = Description of Artificial Sequence: Synthetic coding sequence
  source 1..1149: mol_type = other DNA
atggctgtgctgttcctgctgctttttttgtgcgggacgccacaggccgccgacaacatgcaggcgatttacgttgcactgggtgaggcagtggaactgccctgccctagcccacccacccttcacggtgacgagcacctcagctggttctgctcccctgccgccggttctttcacaactttggttgcccaggttcaggttggccgaccagcacctgacccggggaagcccgggcgcgagtctcggcttaggctgctgggcaattatagtctttggctggagggatcaaaagaagaggacgcaggacgctactggtgcgcggtgctggggcagcatcataactatcagaattggcgggtgtacgatgtcttggttctcaaaggatcccagctgagtgccagggccgctgacggctccccatgtaacgtgttactatgttccgttgtgccgagccgcaggatggactcggtcacgtggcaggaagggaaaggtccagttaggggacgggtccagtctttctggggctcagaagccgctttactcttggtgtgccctggcgaggggttgtcagaacctagatctaggagacctcgcattatccggtgtttgatgacccataataagggagtgtcattctccctggctgcatcaattgatgcatcaccagctctgtgcgccccgtcgaccgggtgggacatgccatggatactgatgctgttgcttacaatgggacagggcgtggtgatacttgctctctccatcgttctatggcgccagagggtgcgtggcgcccccggacgcgggaataggatgcggtgctacaactgtgggggaagcccctcctctagctgcaaggaggcagtgaccacatgcggggaaggaaggcctcagcccggactggagcagattaaactacccggcaatcctccggtgactttgatccatcagcacccggcctgcgtggcagcacaccactgcaaccaggttgagaccgaatccgtgggggatgtcacttaccccgcgcaccgggactgctacttaggtgatctctgcaactcggccgtggcctcccacgtggcccccgccggaattctggccgccgccgcaacggccctgacatgtctcttgcctggcctctggagcggctag

SEQ ID NO: 122798 - DNA, 402 bp, synthetic construct
  misc_feature 1..402: note = Description of Artificial Sequence: Synthetic coding sequence
  source 1..402: mol_type = other DNA
atgaaaccccagtttgtgggcatcctccttagttctctgctcggtgcggcccttggaaatcgaatgcgctgctataattgtggtggcagcccttcttcgacctgtaaagaagcagtcactacctgtggcgagggccggccgcaaccaggtctggagcaaatcaaactccccggcaaccctccggtcacactcatccaccagcatccagcctgcgtagccgcccatcactgcaaccaggtggagaccgagagtgtgggggacgtgacgtaccctgctcatcgagactgctatctgggcgacctgtgtaactctgcggttgccagccatgttgcaccggcagggattttggctgccgccgcaaccgcactcacatgcctcctgcccggactgtggtcagggtag

SEQ ID NO: 122799 - DNA, 402 bp, synthetic construct
  misc_feature 1..402: note = Description of Artificial Sequence: Synthetic coding sequence
  source 1..402: mol_type = other DNA
atgaagccccaatttgtaggcattctactgagctccttactcggcgctgcactaggcaatcgtatgagatgttacaattgtggaggaagcccatcctcaagctgcaaggaagccgtcaccacgtgcggggaaggaaggccgcagcctgggctagaacagatcaaactccccggaaacccacctgtgactctgatccatcagcaccctgcctgtgtggctgcacatcactgtaaccaggtggaaacggagtcagtgggcgatgtgacataccctgctcatcgggactgctacctcggtgacctgtgtaacagtgccgttgcgagccatgttgcacctgccggcattctcgcagccgccgctacagccttgacttgtctgctgccaggcctatggtcaggctag

SEQ ID NO: 122800 - DNA, 402 bp, synthetic construct
  misc_feature 1..402: note = Description of Artificial Sequence: Synthetic coding sequence
  source 1..402: mol_type = other DNA
atgaagccacagttcgtcggtattctgctttcgtctctcttgggcgcagccctcggcaatcgaatgcgctgctataactgtgggggcagcccgtcttcatcatgtaaggaagcagtaacaacttgtggcgaaggcaggccccaaccagggctggagcaaatcaagctgccaggcaaccccccagttaccctgatccatcagcatccagcttgtgtggctgcacatcattgcaaccaggtggagactgagtctgtgggagacgttacataccctgcccatagggattgttacctgggcgatctctgcaattcagccgtcgctagtcatgtagcccccgccggcattctcgccgccgccgctactgctctgacttgtctgctgcccggactgtggtccggatag

SEQ ID NO: 122801 - DNA, 525 bp, synthetic construct
  misc_feature 1..525: note = Description of Artificial Sequence: Synthetic coding sequence
  source 1..525: mol_type = other DNA
atgaaaccgcaattcgtgggaatccttctgtccagcttgctgggagcggcgcttgggaaccggatgaggtgttataactgcggtggcagcccttcgtcctcctgcaaggaggccgtgacgacgtgtggtgagggtagaccccagccagggctcgagcagatcaaactgcccggaaatcgacgttgttttctccgcggcctgaagatcccattagggtctctgaaatcacatctcttatgtccaaggagacaggtgctcaagcccggcgtgcagcacccctcgttcatcctgtccctgagccccagtgacctcgatagcccgacaagctcgctgaggcgctccccttctcttcagtctagtggcgatcgggtgggcggacggagggatctgtccagtcctcagggtctgctgcccggtagacctgtccagcagcgacgcggtaagccctgcggcccctgcagacactttggttgttcatcctacaggccggatctgagtctggcaagaacagtagaacggatttag

SEQ ID NO: 122802 - DNA, 486 bp, synthetic construct
  misc_feature 1..486: note = Description of Artificial Sequence: Synthetic coding sequence
  source 1..486: mol_type = other DNA
atgctggcaccccaacgaacgagagccccatctcctagggccgctcctaggccaaccagatctatgctgccggcagccatgaaaggtctgggcctggctttgttagccgtgctcctatgttccgctcccgcgcacggactctggtgccaggattgtacccttacaactaactctagccattgcacccccaaacagtgccaacccagtgacactgtctgcgccagtgtgcggatcaccgatccgagttcttccagaaaggaccactcagtaaataagatgtgtgcctcctcatgcgacttcgttaagcgccattttttttctgattatctcatgggcttcatcaattcaggtatattgaaggtagacgtggattgctgcgagaaagacctgtgcaacggcgccgccggggctggtcactctccgtgggctcttgcaggaggcctactgctctctttggggcctgctctgctctgggctggtccctag

SEQ ID NO: 122803 - DNA, 486 bp, synthetic construct
  misc_feature 1..486: note = Description of Artificial Sequence: Synthetic coding sequence
  source 1..486: mol_type = other DNA
atgctggccccccagaggacacgcgccccctcaccacgggcagcccctaggccaaccagatctatgctcccagcggcaatgaagggcctgggcctagccctgcttgctgttcttctttgcagcgccccagcacatggactttggtgtcaggactgtaccctgacaactaactcatcccactgtactcccaagcagtgtcagccaagtgatacagtgtgtgccagcgtgcgtatcacagaccccagttcttctcgtaaggatcactctgtcaacaaaatgtgcgccagtagctgtgatttcgttaaacgtcatttcttctctgactacctgatggggtttatcaactcaggaattctgaaagttgacgtggactgttgcgaaaaagacttatgtaacggggctgcgggggcgggacactccccctgggccctcgctggagggttgctgctgtcccttgggcccgccctgctgtgggccgggccttag

SEQ ID NO: 122804 - DNA, 423 bp, synthetic construct
  misc_feature 1..423: note = Description of Artificial Sequence: Synthetic coding sequence
  source 1..423: mol_type = other DNA
atgttgccagccgccatgaaaggcctaggcctggcattgttagccgttcttctgtgctctgcacctgcacacggcctctggtgccaggattgcaccttgactacaaattccagccattgcactcctaagcagtgtcagccgagcgacacagtgtgcgcatcggtccgtattactgatccctcctcttcaagaaaagatcattccgtgaacaagatgtgcgcgtcctcctgcgattttgtcaagagacacttcttttccgactacctgatgggatttataaactctggcattctaaaagtggatgtcgattgctgtgaaaaggacctatgtaatggggccgcgggcgccggacactcgccttgggctttggcaggcggacttcttctctcactaggccccgcgcttctgtgggctggcccctag

SEQ ID NO: 122805 - DNA, 1971 bp, synthetic construct
  misc_feature 1..1971: note = Description of Artificial Sequence: Synthetic coding sequence
  source 1..1971: mol_type = other DNA
atggtagccccgaagtctcatactgacgactgggctccaggtcctttttcttccaaaccccaacggagccagttacagatatttagttctgtgttacagacatctcttctcttcctacttatgggactgagagcaagcggcaaagacagtgcaccaactgtggtatcgggcattctcggcggatctgtaacactacccctgaacatctcagttgatactgagatcgaaaatgtgatatggatcggtcccaagaatgccttggcatttgccagacccaaggaaaatgtcaccattatggtcaagagctacttaggccgcctggatatcaccaagtggagctacagcttgtgcatatctaacctgactttgaacgacgccggtagctataaagcccagattaaccagcgtaatttcgaagtgaccacagaagaggaatttacactgttcgtctacgaacaattgcaagagcctcaggttaccatgaagtcggtcaaagtaagcgagaactttagttgcaacattaccctgatgtgcagcgtgaagggagcagagaaatctgtgctgtactcttggacccctcgcgagccacacgcctccgaaagtaacgggggctccatccttacagtgagtaggactccctgtgatcctgatttgccctacatatgtactgcacagaatccagtgtcacaacgaagcagcctgccggtccacgttggccagttctgcacagatcccggcgcctcaaggggtgggactaccggggaaaccgtggtcggagtcttaggagagcccgtgactcttccgctcgctctgccagcctgccgggacacagaaaaagtggtgtggttatttaatacatctatcatttccaaggagcgggaagaagccgctaccgccgatccactgattaagagccgtgatccttacaaaaatagagtttgggtgtccagccaggactgttctctaaaaatcagccagctgaagatcgaggatgcaggaccttaccatgcatacgtctgtagcgaagcttctagcgtaaccagcatgacccatgtaacattgctcatctatcgacgcctccggaaacctaagattacttggtccctgcgtcattcagaggacggaatctgccgcatctccctcacctgctccgtggaggatggaggtaatacagttatgtacacgtggacccccctgcagaaagaggcagttgtgtcacagggggaaagtcacttgaacgtgtcttggaggtcttcagagaaccaccctaatctcacttgtactgctagcaaccccgtaagcagaagctcccatcagtttcttagcgagaatatatgttctggaccagaaaggaacactaagttgtggataggactgttcttaatggtgtgccttctgtgtgtcggaatcttctcttggtgcatctggaaacgtaaggggcggtgctcagtgcctgccttttgctcaagtcaggccgaggcacctgccgatacacccgagccaaccgcaggccacaccctttatagcgtcctgagccagggttatgagaaattggacacccctctccgaccagccaggcagcagcctaccccgacctcagactcatctagcgatagcaatctcaccactgaggaagatgaggataggccggaagtgcacaaacccatctctggtaggtacgaggtgttcgaccaggtgactcaggaaggagccggacacgaccccgctcctgagggacaggctgattatgacccagtgaccccttacgtgaccgaggttgaaagcgtcgtcggtgaaaatacaatgtatgcgcaggtttttaatttgcagggaaagacccctgttagtcagaaggaggaaagcagcgcgacaatttattgttctatccgcaagcctcaagtagtcgtgcccccaccgcaacaaaacgacctggaaatccccgaatcacctacatacgaaaactttacctag

SEQ ID NO: 122806 - DNA, 1566 bp, synthetic construct
  misc_feature 1..1566: note = Description of Artificial Sequence: Synthetic coding sequence
  source 1..1566: mol_type = other DNA
atggtcgcccccaaaagtcacaccgacgattgggcacccggtcctttcagttcaaaaccccagaggagccaactccagatcttcagttcagtcctccagacaagtctactgtttctgttgatgggtttacgagcatcaggaaaggacagtgcacctaccgtcgttagtgggattttaggcgggtctgtaacattacctctgaacatctccgtggacacggaaatcgagaacgtgatctggatcgggccaaagaacgctctggcctttgctcggcctaaggaaaacgtgaccattatggttaagtcttacttaggccgactggacatcacaaagtggtcctacagcttgtgcatctccaacttgacactgaatgatgctgggtcgtataaagcccagatcaatcagcgaaacttcgaggtgacgacggaggaggagtttaccctgttcgtctatgaacagctgcaggagcctcaggtgaccatgaaaagtgtgaaggtgagcgaaaacttcagctgtaacatcacactgatgtgttcggttaaaggtgctgaaaagagcgtcctctattcctggacgcctagggagccacacgcgtccgaatcaaacggcggatcaatcctgactgtgtcccggaccccctgtgatccggacctcccctacatctgcactgcacaaaaccccgtctcccagcgctcgtcccttccagtgcacgtgggccaattctgcaccgaccccggcgcatctcgtggagggactactggggagaccgtagttggtgtcttgggggaacccgttactctcccactggccttgccggcctgtcgagataccgaaaaggtggtttggttatttaacacatcgattatatccaaggagcgtgaggaggcggctaccgccgatccgctgatcaaatctcgcgacccctacaagaaccgggtgtgggtcagctcccaggactgctccctgaagatttcccagctgaaaatcgaagatgcggggccttatcatgcctacgtttgctccgaggcttcaagcgtgacaagcatgacacatgtcacgctattgatatacaggcctgagcgaaacaccaagctttggattgggctttttttgatggtctgccttctgtgtgtgggaattttttcatggtgcatatggaagagaaaagggcgctgtagcgttccagctttttgctctagtcaagcagaagctcccgcagatacacccggctatgaaaaactagacacacctctgaggaaacctattagtgggcgctatgaagtcttcgatcaagtgacgcaggaaggcgccggacatgatccggctccggagggccaggctgattatgatcccgtcactccatacgtgactgaggtagaatctgtcgtaggcgagaataccatgtacgcgcaggtcttcaatctgcaggggaagactcctgtaagtcagaaggaagagtcatccgcaacaatttactgtagcatcagaaaacctcaggtggttccccccccccagcaaaatgacctggaaatacccgagagtcctacatacgaaaacttcacatag

SEQ ID NO: 122807 - DNA, 813 bp, synthetic construct
  misc_feature 1..813: note = Description of Artificial Sequence: Synthetic coding sequence
  source 1..813: mol_type = other DNA
atgacccacgtgacacttctgatttatagaaggctcagaaaaccaaagatcacttggagtctgcggcacagtgaagatgggatttgtcggatttcacttacctgttccgttgaggatgggggaaatactgtgatgtatacatggaccccgctgcagaaagaagctgtggtgtcccagggcgagtctcacctaaacgttagttggcggtcttcagaaaatcaccctaacttgacttgtaccgcctcgaacccggtcagtcggtccagccaccagtttctgtcagaaaatatttgctcaggtccagagcgaaacacaaagctctggatcggccttttcctgatggtttgtttactttgtgttggtatatttagctggtgtatttggaaacggaaagggcgctgctctgttcctgccttctgcagcagtcaagctgaggcaccggccgacactcccgggtatgaaaagctggacactccccttcggcctgcccgccagcagcccacccccacttctgacagctcgtcagacagcaatctcacaaccgaagaagacgaagatcgcccagaggtccataagcccatttctgggcgatatgaagttttcgaccaggtgacccaggagggcgctgggcacgatccagcccctgagggtcaggcggactacgacccagtcacaccatacgtgactgaagtggagtccgtcgtaggcgaaaacaccatgtacgcacaggtgttcaatcttcaggttgtgcccccaccccagcagaacgatcttgagattcccgaatctcctacttatgaaaattttacatag

SEQ ID NO: 122808 - DNA, 813 bp, synthetic construct
  misc_feature 1..813: note = Description of Artificial Sequence: Synthetic coding sequence
  source 1..813: mol_type = other DNA
atgacccatgtgacgctcttgatttacagaagattgagaaaaccaaaaatcacctggagccttcgccactctgaggatgggatttgccgaatatctctaacttgcagtgttgaggatgggggcaacacggttatgtacacctggactcccctgcagaaggaagctgttgtgagccagggcgagtcccatcttaacgtctcatggcgcagtagcgaaaatcatccaaacctgacatgtaccgccagcaaccccgttagccggagctctcatcagtttctctctgaaaacatctgctccggtccagaacgtaacactaaattgtggattggcttatttctcatggtttgtctcttgtgcgtgggcatcttttcttggtgcatttggaagcgcaagggtcgatgctcagtgcctgccttctgctctagtcaggctgaagcccccgctgacactcccggatacgaaaagctggacacacccctccgacctgcacggcagcagcccactcccacaagcgattcctccagtgatagtaatctcacgacagaagaagacgaagaccgccctgaggttcacaaaccaatttccggaaggtatgaggtttttgaccaggtgacccaggaaggcgcaggccacgacccagcaccagagggccaagctgactatgaccctgtcacaccctacgtcactgaggtggaatcggtagtaggggagaatacaatgtacgcccaggtgttcaacctacaggtggtgcccccaccgcaacagaatgacctcgagatccccgagagccccacctatgagaattttacttag

SEQ ID NO: 122809 - DNA, 1968 bp, synthetic construct
  misc_feature 1..1968: note = Description of Artificial Sequence: Synthetic coding sequence
  source 1..1968: mol_type = other DNA
atggtggcgcctaagagtcacaccgacgattgggcccctgggcctttttctagtaaacctcaacggagccagctgcagatatttagctctgttctccagacaagtttgctgttcctgctaatggggctccgcgcgtctggcaaggattccgcaccaaccgtggtgtccgggatcctgggtggcagcgtaacacttcccctgaatattagcgtagatacagagatagagaatgtaatatggatcggaccgaaaaacgctctagccttcgcgcggcctaaggagaacgtgacgataatggttaaaagctatctggggcgccttgacattaccaagtggagttacagtttgtgcatctctaatctcacccttaatgatgccgggtcttacaaggcccagattaaccagcggaattttgaagtgaccacagaagaggaattcacacttttcgtgtacgagcaactgcaggaaccccaggttacaatgaaatcggtgaaagtgtccgagaacttctcttgcaatatcacactgatgtgtagcgtcaagggcgccgaaaaatcagtgctgtactcatggacaccccgcgagccgcacgcatctgagtccaatggcggctccatactgacggtgtcgcggactccttgcgatcccgatcttccgtatatttgtacagcacagaatcctgtctcccaaagatcttctcttcccgtgcacgtgggacagttctgcacagatcccggcgcctctcgtggcgggacaactggtgaaactgtggttggtgtgctaggagaaccagtgaccctcccgctggccctccccgcatgccgcgacacagagaaggtcgtgtggctgtttaatacaagcattatctccaaggaacgagaagaagccgccacagcagaccctctcataaagtcaagggacccgtacaaaaatcgggtgtgggtgtcaagccaagactgctctctgaaaatatcccagctgaaaatagaggacgccggcccttaccatgcctacgtgtgttccgaagcctcatctgtgacaagcatgacacatgtgactctgctgatctatcgtagacttagaaaaccgaagataacctggagcctgcgacactcagaagacggcatctgcaggatctcactcacatgctctgtggaagatggaggaaacacagtgatgtacacctggactccactgcagaaagaagcagtggtgagccagggcgaatctcacctcaacgtgtcctggagatcatcggagaaccatcctaacctgacctgcaccgccagcaaccctgtgtcaaggtcctcacatcagtttttgtccgagaacatttgcagcggtcccgagcgtaacaccaaattgtggattggtctgtttcttatggtttgtctcctgtgtgtgggcatattcagttggtgcatctggaagcggaaggggaggtgtagcgtgccagcattctgcagtagtcaagccgaggctccagcagatactcctgagcctacggctgggcatacattgtactccgtactcagccaaggatacgagaaactcgatacacctctccgtccggcacggcagcagccaacccctaccagcgactcgagctctgattcaaacctcaccacagaagaagatgaagacagacctgaggtgcacaagccgatctccggcagatacgaggtgtttgaccaggtgacccaagaaggtgccggccatgaccctgcccctgagggccaggctgattacgacccggtgactccatacgtcaccgaagtagaatcggtggtgggtgaaaatacgatgtatgcacaagtgtttaaccttcagggcaaaactccagtctcccagaaagaagaatcttcagccaccatctactgttccatcagaaagcctcaggtcgtgccaccaccacagcaaaatgatctggaaatccccgaatctcccacttacgaaaattttacatag

SEQ ID NO: 122810 - DNA, 1116 bp, synthetic construct
  misc_feature 1..1116: note = Description of Artificial Sequence: Synthetic coding sequence
  source 1..1116: mol_type = other DNA
atggtcgcaccaaagtctcacactgacgactgggcaccaggcccatttagctctaaaccacaacgcagtcagttgcaaatcttttcctccgttcttcagaccagtttactgtttctcctaatgggacttcgggcaagcggcaaagattccgcacccacagttgttagtgggattcttggcggctcagtgaccctgcccctgaacatctcagtcgatacggaaatcgaaaatgtcatttggattgggcctaaaaatgccttagccttcgccagaccaaaggaaaacgtcacaatcatggtgaagagctacctcggtaggctggatataacaaagtggtcttactccctttgcatctctaacctgacactgaatgatgcaggctcgtacaaagctcagattaaccagcggaatttcgaggtgacaacagaagaagagttcacactgtttgtgtacgaacagctccaagagccacaagtgaccatgaagtctgtgaaggtgagtgaaaatttctcttgtaacataacgctcatgtgcagcgtcaagggggccgagaagtcagtgctgtatagttggaccccacgagaaccacatgcgtctgaatcgaatggtggcagtatactgacggtgagccggacaccttgtgaccccgacctcccctatatatgtacagctcaaaaccccgttagtcagcgaagcagtcttcctgtccacgtcggacagttttgcacagaccctggtgcctcacggggcggcactactggtgagaccgtggtgggcgtgctcggggagcctgtgacgctgcccctggccctccctgcatgtagggatactgagaaggttgtgtggctgtttaacacttctatcatcagtaaggaacgagaggaggccgctactgcagaccctcttataaaaagtagagacccgtataagaatcgggtatgggtttccagccaggactgctccctgaaaatctcccagctgaaaatagaggatgctggcccatatcatgcctatgtctgctcagaggccagtagtgtcaccagtatgacacacgttactctcttaatatacagagagtctttggggagagcccccataacaagatttctgctttag

SEQ ID NO: 122811 - DNA, 1809 bp, synthetic construct
  misc_feature 1..1809: note = Description of Artificial Sequence: Synthetic coding sequence
  source 1..1809: mol_type = other DNA
atgggcctgagagccagcggcaaggattccgcacccaccgtggtgagcggaatcctggggggctctgtcacgctgccactcaacattagcgtcgatacagagattgagaacgtgatctggataggtccaaagaatgctttagcctttgcgcgacccaaggaaaatgtgaccataatggtaaagagctatctcggcaggcttgatattacaaaatggtcatacagtttgtgtataagtaacttgacacttaacgacgcgggaagctacaaggcccagatcaatcagcgtaactttgaggtcaccactgaagaggaattcacacttttcgtttacgagcagctccaggaacctcaggtgaccatgaaatctgtgaaggtctctgaaaacttttcctgtaacattactttaatgtgtagtgtgaagggtgcagaaaagtcagttctttatagctggaccccacgcgagccacacgcctcagaatcaaacgggggcagtatccttaccgtatcacggacaccttgcgaccccgatctgccctatatttgtactgcccaaaatcctgtaagccagcgttccagcttgcctgtccacgtgggtcagttctgtacagatccaggagctagcagagggggtactacgggagaaactgtggtgggcgtgctaggagagcctgtcacccttcctttggcattgcccgcttgtagggacacagagaaggtggtctggttgttcaacacatcaattattagcaaagagcgggaggaggcagctacggccgatcccctcattaaatcaagagatccttacaagaacagagtctgggtatcctcccaggattgctctctgaaaatcagtcagctgaagattgaggatgctgggccgtaccacgcttacgtatgttcggaagctagctctgttactagtatgacgcatgtgaccctcctcatttataggagacttagaaagccaaagattacgtggtcactcaggcacagtgaggacgggatttgccgtattagcctgacctgtagcgtcgaagacggtggcaatacagtaatgtatacatggacaccattacagaaggaggccgttgtgtcccagggggaaagccatctcaatgtgtcttggagaagttctgagaatcatccaaacttaacctgcaccgctagcaatcccgtgagccgcagcagccaccaattcctcagcgagaatatctgctccggacctgaacggaacacaaaattgtggatcggcctgttccttatggtgtgcctcctgtgtgtcgggatattcagttggtgcatctggaaacgcaagggacgttgttctgttcccgccttctgctcctcacaggccgaagcccctgccgacacacccggctatgagaagcttgatacccctcttcggccagcccgccagcagcctacacccacctcggatagctcgtctgacagcaacctgaccacagaggaagacgaagatcgccctgaggtgcataaacctatttctgggagatacgaagtcttcgatcaggttacccaggagggggcaggccacgaccccgcccccgaaggccaggccgactacgatcctgtgactccatatgtgacagaggtcgagagcgtcgttggcgaaaacactatgtatgcccaggtgttcaacctccaggggaaaacccctgtgtcacagaaggaggagtcttcagctaccatctattgttccattaggaaaccgcaggtcgtggtcccccctccccaacagaacgacctggagatcccagagtcccccacatacgaaaactttacctag

SEQ ID NO: 122812 - DNA, 582 bp, synthetic construct
  misc_feature 1..582: note = Description of Artificial Sequence: Synthetic coding sequence
  source 1..582: mol_type = other DNA
atggtagcgcccaaatcacacaccgatgactgggcaccaggtcccttctcttctaaaccccagaggagtcaactacaaatcttttcctccgtgctgcaaacctcattgttgttcctgctgatgggcctccgtgcttctgggaaggactccgcgcctaccgtcgtgtccggcattcttgggggatccgtcactctcccgctgaatatatctgtcgatactgagattgaaaatgttatctggattggacccaagaacgctctcgcttttgcccgccccaaagaaaatgtgacgatcatggtgaagagctatttggggcggctagacatcactaaatggtcatactccttgtgtatttcaaacctgacactgaacgatgccggtagttacaaggcccagatcaatcagaggaatttcgaggtgacaacagaagaggaatttacactgttcgtgtatgcaccatttatagaaaaattgagcgtacacgtgatcgagggagatcatcggaccctgttggaaggatctggcctggaatcgataatctctacgctggctgaaccacgcgtgtctgtaagggaggggtag

SEQ ID NO: 122813 - DNA, 1581 bp, synthetic construct
  misc_feature 1..1581: note = Description of Artificial Sequence: Synthetic coding sequence
  source 1..1581: mol_type = other DNA
atggggttgagggccagcgggaaagatagtgctccaacagtggtgtctggtatcctaggcggatcagttacactgcccctgaacattagcgttgatacagagattgaaaacgttatctggataggacccaaaaacgccctcgcctttgcgcggcccaaggagaacgtgacaatcatggtgaaatcctatttgggcagactcgatattactaaatggtcttactccctgtgcataagcaatcttacgttgaacgatgctggctcttacaaggcccaaatcaatcagcgtaactttgaggtgactaccgaagaagagtttacacttttcgtctatgagcagctgcaggaaccccaggtcacaatgaaaagtgttaaagtgtcggaaaacttttcctgcaacataacacttatgtgctccgtcaagggagcggagaaatctgtcctctactcgtggaccccccgagaaccacacgcctcagagtcgaatggaggatctatacttactgtcagcaggacaccatgcgacccggacctgccttatatctgcacagctcagaaccccgtgagccagcgcagttcactgccggtccacgtgggacaattctgcacagatccgggcgcaagcaggggagggactaccggggagaccgtggtgggcgtgctcggggagccagtgacccttcccttggcgctgcctgcttgcagggacaccgaaaaagtggtttggttgttcaatacaagtataatcagtaaagaaagagaagaggccgccaccgctgatccactgattaaaagcagggatccctataagaatcgcgtctgggtgtcttcccaggattgttcactcaagatttctcagctgaaaattgaggacgccggaccgtatcacgcctacgtttgcagtgaagcgtcctccgttacaagtatgacacacgttactctgctcatttatcgcccggagaggaatacgaaactgtggatcggcctcttccttatggtctgtctgctgtgtgtaggaattttctcctggtgcatctggaagaggaagggaaggtgttctgtgccagctttctgctccagccaggcggaggcacctgctgatacacctgagcccacggcgggacacactctctatagcgttctatcccaaggctatgaaaaactggatacgcctttgcgcccagctcggcagcagcctacccccacatcagacagtagttccgatagtaatctgacaaccgaagaagatgaagatcgaccggaggtgcacaagcctatatcaggccggtacgaggtctttgatcaggtcacccaagagggagccggccatgacccagcacctgagggccaagccgattacgaccccgtaaccccttacgtgactgaagtggaaagcgttgtgggcgaaaacaccatgtacgcgcaggtattcaatttgcagggaaagactcctgtgtctcagaaagaggagtcctcagcaaccatttactgctctattcggaaaccccaggttgtagtgccaccaccgcagcagaacgacttggaaattcccgagagcccaacgtacgagaattttacatag

SEQ ID NO: 122814 - DNA, 1884 bp, synthetic construct
  misc_feature 1..1884: note = Description of Artificial Sequence: Synthetic coding sequence
  source 1..1884: mol_type = other DNA
atggcgagagggtcagtgtctgatgaagaaatgatggagcttcgagaggcattcgctaaagtagataccgacggtaacggctacattagcttcaacgaactgaacgatctctttaaagctgcatgtctcccattgccaggttacagggtccgcgagattacggaaaatctaatggccacaggagatctggaccaggatggaagaatcagcttcgatgagtttatcaagatctttcatgggctgaaatctaccgatgttgctaaaactttccggaaagccattaataaaaaggaaggtatatgtgccatcgggggtaccagtgagcagtcaagtgtcggaacacagcattcttatagcgaagaggagaaatacgcatttgtgaattggataaacaaagcactggagaacgaccccgattgtcggcacgttatccccatgaaccctaatactaatgacctgttcaatgccgtgggcgatggaatagtgctgtgtaagatgatcaacctgagtgtcccagataccatcgacgaaagaacaattaacaagaaaaaacttaccccttttactatacaggaaaatctgaacctcgcactaaactctgcctccgctattggatgtcacgtagtaaacataggagccgaggatcttaaagaaggcaagccctatctagtccttgggctcctgtggcaggtgattaagatcggcttattcgccgatatcgaactgtcaaggaatgaagcactcattgccctgctgcgagaaggcgaatcacttgaagaccttatgaaactttcccccgaggagctccttcttagatgggctaactaccatctggagaacgcaggctgtaacaagataggaaatttttcaaccgacattaaggacagtaaggcctattaccacctactcgaacaggtggcaccaaagggcgacgaggaaggtgtgcctgccgttgtaattgacatgtctggacttcgagagaaggacgacatacagagggccgagtgtatgctacagcaggctgaacggctcggatgccggcagttcgtgactgccaccgacgtagttagaggcaaccctaaactgaatctggcgttcatcgcaaatttatttaatcgataccccgccctccataaaccagagaaccaggacattgactggggggccttggagggggaaacccgcgaagagcgcacattcagaaattggatgaatagcctgggcgtgaacccacgcgtgaaccatctgtattctgatctttctgatgcattagttatcttccaattgtatgagaagatcaaagtcccggtggactggaatcgggtgaataagcccccctatcccaagctgggaggaaacatgaagaaactcgaaaactgcaactatgctgtggaactaggaaagaaccaagcaaagttcagtcttgtcggaatcggaggccaggatttgaacgagggtaatcgaaccctgacactcgcgctgatatggcaactgatgcgaagatacacactcaatatccttgaagagatcgggggcgggcagaaggtaaacgacgatatcatagtgaactgggtgaatgaaactctcagagaggctaaaaaatcttcttctattagtagtttcaaggaccctaaaatctccacgtcgctccctgtactcgaccttatcgacgcaatccagcctggttctataaactacgacctactcaagacagagaacctgaatgacgatgagaaacttaacaatgccaaatatgcgatctcaatggctcggaaaataggagctcgtgtgtatgccttaccggaagacctggtagaggtgaaccccaagatggtcatgaccgtgttcgcttgcttgatgggaaaaggaatgaagcgggtgtag

SEQ ID NO: 122815 - DNA, 1884 bp, synthetic construct
  misc_feature 1..1884: note = Description of Artificial Sequence: Synthetic coding sequence
  source 1..1884: mol_type = other DNA
atggctcgaggttccgtatctgacgaagaaatgatggaacttagagaagcgttcgccaaagtggatacggatggaaacggatacatatcttttaatgaactgaatgacctatttaaagccgcctgcctgccgcttcccggctaccgggttagagaaattactgaaaacctaatggccacaggcgaccttgaccaggatggccgcataagctttgacgagtttatcaaaatattccatggcttaaagagtacagatgtggcgaagactttccgcaaggcaattaacaaaaaagagggaatttgcgctatcggcggaacatctgaacaatcatccgtgggtacacagcattcctattccgaagaggagaaatacgcttttgttaattggatcaataaagccttggagaatgaccccgattgcaggcacgtaattcccatgaacccaaacacaaatgacttattcaacgctgtcggcgacggcattgttctgtgtaaaatgatcaatcttagtgtccccgatactatcgacgaaaggacaattaataaaaagaaactcactccctttactatccaggagaatctgaacctagctttaaatagcgcgtctgctatcggatgtcacgtagtaaacatcggggcggaagacttgaaagagggaaaaccgtatcttgtgctgggactgctgtggcaggtgatcaaaataggtctgttcgcagatattgagttgtccagaaatgaggcgctgattgcactgctgagagagggggaaagcctcgaggatctcatgaagttgtctccggaggagctcctgctgcggtgggcaaattaccatctggagaatgctggatgtaataagattggaaatttcagtacggacattaaggatagcaaagcgtattaccacctactcgaacaagtcgctccgaaaggggacgaggagggagtgccagccgtcgttatcgatatgagtggccttagagaaaaggacgatattcaaagggccgaatgtatgctgcagcaggcagaacgcttgggatgtaggcaattcgtgactgccaccgatgtggtgaggggcaaccccaaactcaacctggcctttatcgcgaacctgttcaacaggtacccagccctacataagcctgagaatcaagatattgattggggtgccctagaaggggagacccgtgaagaacgaacgtttaggaactggatgaacagcctgggcgttaacccaagagtgaatcatctgtactccgatctgtctgacgcgctggttatcttccagctctatgagaagatcaaagtcccggtagattggaatcgggtcaacaagcccccctatcccaagttgggagggaacatgaaaaagttggagaactgtaattacgccgttgaactgggcaaaaatcaggctaagttcagcctggtcgggatcggcggccaagacctgaacgaagggaatcggactctcaccttagcccttatctggcagcttatgaggagatatactctcaacattctggaagagattggtggcggccagaaggtgaatgatgacattatcgtcaactgggtcaatgagacattgagagaggccaaaaagagctcgagtatcagctcttttaaagacccgaaaatctctacaagtctgccagtgctggaccttattgacgcaatacaacccggctccattaactacgacctgcttaagacggagaacctgaacgacgacgaaaaacttaataacgcaaaatatgctataagcatggctcgcaagattggcgcaagagtgtatgcgcttccagaggatctcgtcgaagttaatccgaagatggtgatgacagtgtttgcctgcctgatgggtaaggggatgaaacgagtttag

SEQ ID NO: 122816 - DNA, 741 bp, synthetic construct
  misc_feature 1..741: note = Description of Artificial Sequence: Synthetic coding sequence
  source 1..741: mol_type = other DNA
atggcccgcggctctgtgtcggacgaggagatgatggagttgagggaagccttcgctaaggtggacacagacggaaacggatacatctccttcaatgagttgaacgacctattcaaggctgcctgtctcccccttcccggttaccgcgtccgcgagattacagagaacctgatggcaacaggagatctggatcaggacgggcgcatctctttcgatgagttcattaagattttccacggcttgaagagcacagacgttgctaagacctttagaaaggccattaacaaaaaggaaggaatctgcgctatcggaggcacgtctgaacaatcatccgtgggcacccagcatagctatagcgaggaggaaaagtacgcatttgtgaactggatcaacaaagctctcgaaaatgatccagattgtcgacacgtgatccctatgaatcctaatacgaatgatctgtttaacgcggtcggcgatggcatagttctgtgtaagatgatcaatctgagcgtcccggataccattgatgagaggacaattaataaaaaaaagctcacaccgttcactatccaggagaacctgaatctcgccctgaattctgctagcgccattggatgccacgtcgtgaatatcggggccgaagatctgaaagaggggaaaccttatctggtccttggactactgtggcaagttattaagattggactcttcgccgacattgaactgtctaggaatgagtag

SEQ ID NO: 122817 - DNA, 591 bp, synthetic construct
  misc_feature 1..591: note = Description of Artificial Sequence: Synthetic coding sequence
  source 1..591: mol_type = other DNA
atgtgtgctgaagacggggatagtaagttctcaatgagtatttcgatgaactctcccttcctcgagattctacatctggagaattgcaattatgcagtcgaactgggcaagaaccaggccaagtttagccttgttggtattggcggccaagacctcaatgaaggcaatcggacgttaactctggcactaatctggcaacttatgaggcgctacacactcaatatcctggaggagataggaggcgggcagaaggtgaacgacgatataatcgtgaactgggtgaacgagactctccgcgaagccaaaaagagcagctccataagcagtttcaaggaccctaaaatctctactagtctccccgtgctggatctcatcgacgccatccagccgggatccatcaactatgatctgttgaaaactgaaaatctgaatgatgatgagaaactgaataacgcaaaatatgcaatcagcatggccagaaagattggcgctagggtgtacgctctacctgaagacttggtggaggtgaaccccaagatggtgatgacagtattcgcatgtctgatgggcaagggcatgaaacgggtgtag

SEQ ID NO: 122818 - DNA, 201 bp, synthetic construct
  misc_feature 1..201: note = Description of Artificial Sequence: Synthetic coding sequence
  source 1..201: mol_type = other DNA
atggccagaggctccgtaagcgacgaagaaatgatggagctgagagaggccttcgcgaaggtagacactgatggcaacggctatatcagcttcaacgaactcaatgacctcttcaaggccgcatgtttaccccttcctggctatcgggtcagggagataactgagaacctgatggccacgggggatttggatcaagactag

SEQ ID NO: 122819 - DNA, 1602 bp, synthetic construct
  misc_feature 1..1602: note = Description of Artificial Sequence: Synthetic coding sequence
  source 1..1602: mol_type = other DNA
atggcacttcgcaatgtaccattcaggtccgaggtcttgggatgggatccagattccctagccgattactttaagaagctgaactacaaagactgtgagaaggccgtgaagaagtatcacattgatggtgccaggtttctgaacctgacagaaaatgatatccagaagtttccaaaactgcgtgtgcctatactcagtaagctcagccaggagatcaacaaaaatgaagagcgtaggagcatttttacaaggaaaccccaggtgccccgttttccagaagagacagagtcccatgaagaggataacggcggttggtctagcttcgaggaggatgattatgagtctcccaatgacgaccaagacggcgaggacgacggggactacgagtctccaaacgaggaagaagaagcgcccgtggaagatgatgccgattacgagccaccgccgtcaaacgacgaagaggcgcttcagaattctatcctgcctgctaaaccgttcccaaatagcaactctatgtacatcgatagacccccctccggtaaaacgcctcagcagccccccgtgcctccacagcgcccgatggcggctctgcctcccccccccgctggacggaaccacagcccgctgcctcctccacagaccaatcacgaagagccctcccggagccgaaaccataagacagctaagctcccggccccctccattgacagaagtacaaaaccaccattggatcgctccttggctcccttcgaccgggaaccttttaccctcgggaagaagcccccgttctctgacaagcccagcattcccgcaggtcgttccttaggagagcacctgccaaaaattcagaagcctcctctgcctcctacaacagaaagacacgagaggagcagtcccctccctggcaagaagcccccagtgcccaaacacggatggggcccggatagaagggaaaacgacgaggatgatgtacaccagcgccctcttccgcagccagccctcctccccatgtcaagtaatactttcccgagtcgcagtactaaaccttctcctatgaatcctctgccaagctcacatatgccaggtgcctttagcgagagtaactcatcttttccacaaagcgcaagcctgccaccttacttctcacaggggccgtcaaatcgaccccccattagagctgaaggcaggaactttccattaccactccccaataaacctcgcccgccgagccccgcagaggaagagaacagcctgaacgaagaatggtatgttagctatatcacacggcctgaggctgaagcagccctccgtaaaatcaaccaagatggcacctttttggtaagagattcaagcaagaagacaacaaccaacccttacgtgctcatggtgttatacaaggataaagtttataatatccagatcaggtaccagaaagagagccaagtatatctgctgggaactgggctacggggtaaagaagacttccttagcgtgtctgacattatcgattacttcaggaagatgcctctgctgctgatagatggcaagaatcgaggctccagataccaatgcactttgacccatgcggccgggtatccatag

SEQ ID NO: 122820 - DNA, 1578 bp, synthetic construct
  misc_feature 1..1578: note = Description of Artificial Sequence: Synthetic coding sequence
  source 1..1578: mol_type = other DNA
atgtgggaagcacaattcctggggctcctgttccttcagccactgtgggtggccccagtgaagccccttcaaccaggagccgaagttcctgtggtatgggcccaggagggggcccctgctcagcttccttgttcaccaacaattcctcttcaggatcttagtctcctgcgacgggcaggcgtgacctggcaacatcagcctgactcaggccctcccgccgctgctccaggtcatccgctggcccctgggcctcacccagctgcaccttcctcctggggtcctcgaccgcgaaggtacactgtgctatcggtcgggccgggcggtctgagatctggtcggcttcctctgcaacctagagtacagctggacgagagagggcgtcagcgtggcgatttttctctgtggttaaggccggctagaagggcagatgctggcgaataccgcgctgcagtccacctcagagatagagcactcagttgtagactcaggttacgacttgggcaggctagcatgactgcctccccccccggtagtctccgggcatctgattgggtcatcctgaattgctcattctctcgcccagataggcccgcttccgtgcactggttccggaacagaggccagggccgggtgccggtacgcgaatctcctcatcaccaccttgccgaaagcttcctctttctccctcaggtgtcgccgatggattcaggcccttggggctgcatcttaacttaccgtgacgggttcaatgtatccatcatgtacaatctgacggtgctgggcctagaacccccaactcctctcacagtgtatgctggtgctggctcgcgagtcggactgccatgcaggctgccggctggagtgggaaccaggagttttctgaccgcaaagtggactccccccgggggtggcccggacctcctcgtaacaggagacaatggcgattttactctcagattggaggacgtgtcccaggcacaggcaggtacctacacatgtcatattcatctgcaggagcagcaattaaatgccacagtcacattggcaatcatcaccgtcacacctaagtccttcggcagcccgggaagtctgggtaagctgctttgcgaggttaccccagtatctggccaggaaagatttgtttggagctctcttgatactccttcccaacgatcttttagcggcccttggctcgaggcccaggaggcacaactgttaagccagccttggcagtgccagctgtaccaaggagaacgcctgctcggcgcagctgtgtactttaccgagttgtctagccccggagctcagcggtcaggcagagctccgggcgccctgcctgctggacacctcctcttattcctgatcctgggggttctctccctgctgttgctggtgactggcgcgtttgggtttcatctttggcgacgccagtggcgcccacgtcgcttctctgcccttgagcaagggatccatccccctcaggcccagtcgaaaatagaggaacttgagcaagagcctgagcccgagccagagcctgaacccgagccagaaccggaacccgaacctgaacaactgtag

SEQ ID NO: 122821 - DNA, 1020 bp, synthetic construct
  misc_feature 1..1020: note = Description of Artificial Sequence: Synthetic coding sequence
  source 1..1020: mol_type = other DNA
atggccgaagcatccagtgatcctggcgcagaggaaagagaagagttgctcgggcccacggctcagtggtcggtggaagatgaagaagaagctgttcatgaacagtgccaacacgagagggataggcaactccaggcccaagatgaggagggagggggccacgtgcctgaacgtccaaagcaggagatgttgctgtcactgaagccgagcgaggcccccgaactcgatgaagacgagggcttcggcgactggtcacagaggccagagcagaggcaacaacacgagggtgcccaaggagcactggacagtggggagcccccccagtgcagaagtcccgaaggtgaacaggaagaccgaccaggcctgcatgcttacgaaaaggaggattctgacgaggtgcacctggaagagttgagtcttagcaaggaagggcccggccccgaggacacggtgcaggacaacttaggtgcggcaggggccgaggaggagcaggaagagcaccaaaaatgtcagcagcctcgtacccctagccccttagtcctcgagggcacaattgaacagtcatctcccccactgtcaccaacaactaagttgatcgaccgcaccgaatccttaaatcggagtatcgaaaaatccaacagcgttaagaagagccagccggacctaccaattagtaaaatcgatcagtggcttgaacagtacacccaagccatcgaaacagccggtagaaccccgaagctcgcgcgtcaagccagtatagagctcccttccatggccgtcgcatccaccaagtctcggtgggagacaggcgaggttcaggcccagtccgcagccaaaactccatcttgcaaagatatcgtggccggtgacatgtcaaaaaagtccctgtgggagcagaagggaggatctaagacctcctctaccataaagtctacaccttctggaaagagatacaagtttgtggccacaggccatgggaaatatgaaaaagtgctagtcgaaggtgggcctgctccttag

SEQ ID NO: 122822 - DNA, 834 bp, synthetic construct
  misc_feature 1..834: note = Description of Artificial Sequence: Synthetic coding sequence
  source 1..834: mol_type = other DNA
atgctgttgtccctgaagccttctgaggccccagagctggacgaagacgaagggttcggagattggtcacaaagacctgaacaaaggcagcagcatgaaggggctcagggggcgttggacagcggggaaccaccacagtgcaggagtccggagggcgagcaggaagacaggcccggtctgcacgcgtacgagaaggaagactccgatgaggttcaccttgaggagctgagcctttccaaagagggccctggccccgaggacaccgtgcaggataacttgggagctgctggcgcagaggaagagcaagaagaacaccagaaatgtcaacagcccaggaccccatcccccctggttttggagggtaccatcgagcagtcatcacctccactgtcccctacaaccaaactgattgatcgcaccgaaagtctcaaccgctctattgagaagagtaactctgttaaaaagtcacaacctgacctgccgattagcaagattgatcagtggcttgaacaatacacccaggccatcgagaccgctggaagaacccccaagctggcgcgccaggccagtatcgagctgccctccatggctgttgcgtctaccaagtctcgttgggagacgggagaggttcaagcccagtcggccgctaaaaccccttcatgcaaggacatcgtcgcgggagacatgtcaaaaaagtcattgtgggaacaaaaagggggttccaagacatcgagcaccatcaagagtactccttctggtaagaggtataagtttgtggctactggccatgggaaatatgaaaaagtgttagtggagggtggccctgcgccttag

SEQ ID NO: 122823 - DNA, 834 bp, synthetic construct
  misc_feature 1..834: note = Description of Artificial Sequence: Synthetic coding sequence
  source 1..834: mol_type = other DNA
atgctgttgagtctgaaaccaagcgaggcccctgaactggatgaggacgaagggttcggcgattggtcacagaggccagaacaacgccagcagcacgaaggagcccagggagctctggactccggagagccccctcagtgcagaagtcctgagggtgagcaggaagacagacccggcctacatgcctacgaaaaagaggattccgatgaagtccatctggaagaactgtctctctccaaagagggacccgggcccgaggacacagtccaagataatcttggtgccgcaggggcagaggaagagcaggaggagcatcagaagtgtcaacaaccaaggacaccctcgcctctcgtgctggaaggcactattgagcagtcatccccaccactctcccccaccaccaaactgatcgaccgcacagagagcctgaatcggagcattgagaagagtaacagcgtgaagaagtctcagcccgatttgcctatcagtaagatcgatcaatggctggaacagtatacccaagctatcgagaccgctggccggactcccaagctggcccggcaagccagcatcgagctccctagcatggccgtggcatccacgaaatccaggtgggagacaggtgaagtgcaggctcaaagcgccgctaaaactccttcttgtaaggatattgtagccggagacatgagcaaaaaaagcctgtgggaacagaagggtggatcaaagacaagcagtaccattaagagcaccccttcgggcaagcgctataagttcgtcgccaccggacatggtaagtatgaaaaagttctcgtcgaaggggggcctgctccttag

SEQ ID NO: 122824 - DNA, 669 bp, synthetic construct
  misc_feature 1..669: note = Description of Artificial Sequence: Synthetic coding sequence
  source 1..669: mol_type = other DNA
atgctactgagtttgaaaccaagtgaagctccagagctagatgaagatgaaggcttcggggactggagccagcggccagagcagcgtcagcagcatgagggcgcacagggcgccctggactcaggggaaccaccacagtgccgttcacccgagggcgaacaagaggaccggccgggcctgcacgcatatgaaaaagaagattctgacgaagtgcacttggaagagttaagcctttcgaaggagggcccaggcccagaggatactgtgcaagacaatctcggagctgcaggagcggaagaggagcaggaggagcaccagaaatgtcagcagcctcggacccccagccctctggttctggagggcacaattgagcagagcagccctccccttagccccacaactaagctgatcgataggactgaaagcctaaacaggagtatcgagaaatctaatagcgtaaagaagtcgcagcctgacttgcccatcagcaaaatcgatcaatggctggagcagtatacccaggcgatagagacagctggccgaacgcctaaactcgcacggcaggcctcaattgaactcccaagtatggctgtggcgtctacaaagtctcggtgggaaacaggagaagtccaagcgcagtccgctgccaagacaccttcttgtaaatag

SEQ ID NO: 122825 - DNA, 183 bp, synthetic construct
  misc_feature 1..183: note = Description of Artificial Sequence: Synthetic coding sequence
  source 1..183: mol_type = other DNA
atgctgctgagcttaaagccaagtgaagcccccgaacttgatgaagatgaggggtttggggattggtcccagcgtccggaacagaggcagcagcacgagggagctcagggagccctggactctggcgaaccccctcagtgtaggagccctgagggggaacaggaggacaggcccggcttgtag

SEQ ID NO: 122826 - DNA, 669 bp, synthetic construct
  misc_feature 1..669: note = Description of Artificial Sequence: Synthetic coding sequence
  source 1..669: mol_type = other DNA
atgctgctgtccttgaagcctagcgaagctccagagctggatgaggatgagggatttggcgactggagccagcgtcccgagcaaaggcaacaacacgagggggctcaaggagcgctcgatagcggggagcctccacagtgtcgctcaccagaaggcgagcaagaagacagacctgggctgcacgcctatgagaaggaagattccgacgaagtccacctggaggaactcagcctgtccaaagagggtccaggccccgaggacacagtccaggacaatctcggagccgcaggtgcagaggaggaacaggaagaacaccaaaagtgccagcagccccgcaccccttctcctctggtgttggagggtaccatcgagcagtcttctccccccctctcacctacaactaagctgattgaccggacagaatctctcaatagaagcatagaaaagagcaacagcgtaaagaaaagccagcccgatctgcccatatccaaaattgaccagtggctggagcagtacacacaggccatcgaaacggctggcagaacaccgaaactcgccagacaggccagcatcgaacttcccagtatggctgtcgcctctactaagtcaaggtgggaaactggggaggtgcaggcgcagagtgcagccaagacgccctcttgcaaatag

SEQ ID NO: 122827 - DNA, 381 bp, synthetic construct
  misc_feature 1..381: note = Description of Artificial Sequence: Synthetic coding sequence
  source 1..381: mol_type = other DNA
atgctgctcagccttaaacctagcgaagcacccgagctcgacgaagatgaggggttcggcgattggtcccaacgtccagaacagaggcagcaacatgagggggcccagggcgcactggacagtggggaacctccccagtgtcgctcaccggagggcgagcaagaagacaggccgggtctgcatgcctacgaaaaagaggactccgacgaggtccatttggaagaactctcgctgtcgaaagaagggcccggcccggaagacactgtacaagataaccttggcgccgctggcgccgaagaggaacaagaggagcatcagaagtgccagcaacctcgaactcctagccccctggtgctggagggaacaatcgagcaatcgtag

SEQ ID NO: 122828 - DNA, 195 bp, synthetic construct
  misc_feature 1..195: note = Description of Artificial Sequence: Synthetic coding sequence
  source 1..195: mol_type = other DNA
atgctgctgtcactaaagccttcggaggccccagagcttgacgaggacgaaggcttcggagattggagtcagcgcccagaacagcgccagcagcatgaaggcgctcagggcgctctcgatagcggcgagccacctcaatgtcgatccccagagggagaacaggaagataggcctggcctgcacgcttacgaatag

SEQ ID NO: 122829 - DNA, 1404 bp, synthetic construct
  misc_feature 1..1404: note = Description of Artificial Sequence: Synthetic coding sequence
  source 1..1404: mol_type = other DNA
atggcccctatttggagcccgccaggcagggtttccgggtgtcatctgtcctccggccctgcccctggatctgcagtaggcccctggcttggcacgccccacccatccctgccactgcccctcgcccctcacaaacctcccccccctgggcttcccggatctgccgggcagacctcactgcctgctcaacgggagtgtgtgtttccgggcgacgcagctgttcaccaggagttgtgtggcctaggcttcgaggagtgtctcggctctataccacaggcccatcaatgttacctgaccaatggtcccaagagaaggaagtgcagcccgcggcggcgtgggagagcccccgcttggctttgtggcggtagccccccatgtcaccagggactggggcacgaacacccctccagcggaccatccaccaattgttccccccgtcctactgcccaatggtcagtggaagatgaagaggaggccgttcacgaacagtgtcagcatgagcgagatagacagctccaggcccaggacgaggagggaggtgggcacgtgcccgagaggcccaagcaggagatgctgctcagtcttaaaccatcagaggcccccgaactagacgaagacgaggggtttggagattggagccagcgacccgagcagaggcagcagcacgaaggggcccagggcgcacttgactctggggagccacctcagtgtagaagtccagagggcgaacaagaagacagacctgggctccacgcttacgagaaggaagacagcgatgaggtgcatctggaggagttgagcctgagcaaagaggggcccggcccagaagatactgtgcaggacaatctcggcgccgccggcgccgaggaagagcaagaagagcatcagaagtgccagcaaccacgaacaccatcgccactggttctcgagggcactatcgaacagtctagcccgccactttcccccacgaccaagctcatcgataggactgagagcctgaatcgatctattgagaagtctaatagtgtgaaaaaaagccaacctgatctgcccatttccaagatcgaccaatggctggagcagtacacgcaggcgatcgagaccgccggccggactcctaagctcgccaggcaagcctccatcgagcttccttccatggctgtcgcgagtactaagtccaggtgggagaccggtgaagtccaggcacaatcggcagccaagacccctagttgtaaggacatagtggcaggggatatgtcaaaaaaatctttatgggagcagaaaggcggttcaaagacttcctcaacaatcaaatctaccccaagcggtaagcgatataagtttgttgccaccggacacggaaagtacgagaaggtgctagtcgagggtggacccgcgccatag

SEQ ID NO: 122830 - DNA, 618 bp, synthetic construct
  misc_feature 1..618: note = Description of Artificial Sequence: Synthetic coding sequence
  source 1..618: mol_type = other DNA
atgacgccccccgaacgcttgttcttgccaagagtatgtgggactaccttgcaccttctactgcttgggctgctgctcgtgctcctccccggtgcccagggtttaccaggagtcggattgaccccttctgccgctcagaccgctcgccagcatccaaaaatgcaccttgcacattcaaatctgaagccagcagcccacctcattggtgacccttctaagcagaactctcttctctggcgcgcaaataccgatcgcgccttcctccaggacggtttctccctcagcaacaactcactcctagtccccacttctgggatctacttcgtgtactcccaggtggtgttctcaggtaaggcctattcccccaaggcgacttcctcccccttgtacctcgcacacgaagtgcagcttttttcttctcagtatccttttcacgttcctctactttcgtcccagaagatggtgtacccagggcttcaggagccgtggttgcactccatgtaccatggagccgcattccagctgactcagggggatcagcttagtacacacacagatggcatcccccatctggtgttgtcaccatccactgttttcttcggtgcctttgctctgtag

SEQ ID NO: 122831 - DNA, 618 bp, synthetic construct
  misc_feature 1..618: note = Description of Artificial Sequence: Synthetic coding sequence
  source 1..618: mol_type = other DNA
atgacaccgcccgaacggttattcttgcctagggtttgcgggactacactccacctcctccttctgggactcctgctggtcctactgcccggcgcacaaggcctccccggagttgggttaacgccatctgctgcccagacagcccgtcagcatcctaagatgcacctggctcactctaacctgaagccggccgcacacctaattggggacccatcgaagcagaattccctgctctggcgcgcaaatacggacagagctttcctacaggatgggttttccttgtccaacaatagtttactggtgccgaccagcgggatctatttcgtttactcacaggtggtattctccgggaaggcttactcaccaaaggccacttcatctcccttataccttgctcatgaggttcaactcttttcatcccaatatccgttccatgtgcctctgctgagttcccaaaaaatggtctatccaggtctgcaggagccttggctgcatagtatgtaccatggcgccgcctttcagttgacacagggggatcaactgtcaacccacactgatggcatcccacacctggtactgtcgccatctacggtgtttttcggcgcattcgctttatag

SEQ ID NO: 122832 - DNA, 618 bp, synthetic construct
  misc_feature 1..618: note = Description of Artificial Sequence: Synthetic coding sequence
  source 1..618: mol_type = other DNA
atgacacccccagaacgcctgtttctcccgagggtgtgtggaactactctgcaccttttgcttctggggttgttgctggtcttgttgcccggggcccaggggcttcccggggtcggtcttactccgtcggctgcccaaacagctcgacaacatccaaaaatgcacctcgctcatagcacattaaaaccagccgctcacctcattggagacccaagtaagcaaaactccctgttgtggagggccaacacggacagggctttccttcaagacggcttttcgctgtcgaacaattccctactggtcccaacttccggaatatactttgtctactcacaggtagtcttcagcggcaaagcctacagcccaaaggccaccagctctcctctatacttagcccatgaggttcagcttttctcctcccaatacccattccacgtccctctgttatcttcccagaaaatggtgtatcccggcttgcaggagccctggctgcactctatgtatcatggggcagcctttcagctgacgcaaggagaccagctgtctacacacacagacgggattccgcatttggttttaagtccttctactgttttttttggcgcctttgcgctctag

SEQ ID NO: 122833 - DNA, 618 bp, synthetic construct
  misc_feature 1..618: note = Description of Artificial Sequence: Synthetic coding sequence
  source 1..618: mol_type = other DNA
atgacgcctcctgagagattgtttctgcccagagtttgtgggacgacattgcatttgctgttgctgggactcctgctggtgctcttacctggagcccagggattgcctggagtcggattgacacctagtgccgctcagaccgcaaggcagcatcccaaaatgcacctggcccactccactctaaagcccgcagcccacctgatcggcgatccaagcaaacagaactccctgctctggcgggctaataccgatagagcatttctgcaagatggctttagtctgagtaacaattctctgctggttccaacctcaggaatctactttgtttactctcaagtagtgtttagcggaaaagcttactctcccaaggccacgtcgagccccctgtatctggctcacgaagtgcagctcttctccagtcagtacccattccatgtgccactgctgagcagccagaaaatggtgtacccaggcttacaggaaccttggttgcacagtatgtatcacggtgcagcatttcaattgacacagggagaccagctgagcacacacaccgatggtatccctcatctggtccttagtcccagtacagtgttcttcggtgcttttgccctgtag

SEQ ID NO: 122834 - DNA, 618 bp, synthetic construct
  misc_feature 1..618: note = Description of Artificial Sequence: Synthetic coding sequence
  source 1..618: mol_type = other DNA
atgaccccacctgagcgcctgttcctgccaagagtctgcggcacaactctgcacttactgctgttggggctactgttggtgctactgccgggagcgcaaggcctccccggggtgggactgacacctagtgccgcccagacagctcgccagcaccccaaaatgcacctggcccattcaactctcaagcccgccgcccacttgataggcgatccctcaaaacaaaattcccttctctggagggcaaacactgatcgcgcatttctccaggatgggttcagtctgtccaacaattcgcttctagtccctacttctgggatctacttcgtgtacagccaggtggtcttctctgggaaggcctactcgcctaaagcaacatcgtcccccctgtatttagcacacgaggtgcagctttttagttcacagtacccttttcatgtccctttgctgagctcccaaaagatggtgtacccggggcttcaggaaccctggctccatagcatgtaccacggagctgcgtttcaactcacccagggggaccaattgtctacacacactgacggaatccctcatcttgtgttgagtcccagtacggttttctttggcgcgttcgcactctag

SEQ ID NO: 122835 - DNA, 618 bp, synthetic construct
  misc_feature 1..618: note = Description of Artificial Sequence: Synthetic coding sequence
  source 1..618: mol_type = other DNA
atgacaccacctgagcgtctttttctccctagagtccgagggaccactcttcatttactgctgctgggtctgctcctggtgttgctgccaggagcacaggggctgcccggcgtaggcctgactccatcagccgcacagaccgcacggcagcaccctaaaatgcacttagcacacagcaccctgaagccagcggcccacttgattggagatccatctaagcagaatagccttctttggagagctaatactgacagagcatttctgcaggacggatttagtctttccaacaactccctgctagtgcctacttctgggatttatttcgtctacagccaggtcgtgttctctgggaaggcgtatagccccaaggccacctcatccccactctatttggcccatgaagtacagctgttcagtagccagtatcccttccatgtccccctgctgagcagccagaagatggtgtaccccggcctccaggaaccgtggttacattccatgtatcacggtgctgcctttcaactcacacagggcgatcagttgagtacccacacagacggaattccacatctggtgctctcaccatccacagtgttcttcggggcgttcgccctgtag

SEQ ID NO: 122836 - DNA, 618 bp, synthetic construct
  misc_feature 1..618: note = Description of Artificial Sequence: Synthetic coding sequence
  source 1..618: mol_type = other DNA
atgactccccccgagcgtctattcctgccgcgggtctgcggcactactcttcacctgttacttcttgggctgctcctcgtgctgctcccgggggcccagggcctgcccggagttggacttaccccctccgccgcccagacggccagacagcacccaaaaatgcatcttgcccatagcacacttaaacccgcagcccatctaatcggcgaccctagcaaacaaaatagcctcctgtggcgtgctaacaccgatagggccttcctgcaggatggattctccttatctaacaacagtctgctggtgccaacctccggaatctatttcgtctactcccaggtggtgttttccggcaaagcctactcgcctaaagccacctccagccctctgtacctggcacacgaggtgcagctgttttcctcacagtaccccttccacgtgcccctgctttcctcccagaagatggtctatcccggactgcaagagccatggcttcattcaatgtatcacggcgccgccttccagttaacacagggtgaccaattgtctacacataccgacggcattcctcatctggtcctgtccccatccacggtatttttcggagctttcgccctgtag

SEQ ID NO: 122837 - DNA, 417 bp, synthetic construct
  misc_feature 1..417: note = Description of Artificial Sequence: Synthetic coding sequence
  source 1..417: mol_type = other DNA
atgaccccgcctgaaaggctgtttctgcctagagtgtgcggtacgaccctgcatttactcctgttagggctgcttctggtgctgttacccggtgcccaggggctgcccggcgtcggcctaaccccatctgctgcccagaccgcgagacagcaccctaagatgcatctggctcactctacgctgaaacccgcagcccacctgattggggacccttctaaacagaactcgctgctgtggcgcgcaaataccgatcgggcctttttacaggatggctttagcctcagcaataacagcttactcgtacccacctctggtatatactttgtctattcacagggatccagtccgccgttgctatggccttttcagcagctgaagtcctctttaattaagtctcccgagctgtctaagaagtag

SEQ ID NO: 122838 - DNA, 618 bp, synthetic construct
  misc_feature 1..618: note = Description of Artificial Sequence: Synthetic coding sequence
  source 1..618: mol_type = other DNA
atgactccaccggaacgtctgttcttacctcgggtgaggggaacaacccttcacctattattgttggggctgttattagtgttactgccaggagctcaggggctgccaggggtggggctcaccccgtctgccgctcagactgcacgccagcatccgaaaatgcatcttgcgcattccactctgaagcccgcagcccacctgatcggagaccctagcaagcaaaattctctgctgtggcgagccaataccgaccgagccttcctgcaagacggcttctctctgtctaataactctctcctggtgccgacctccggcatctactttgtgtactcgcaggttgtcttcagcgggaaagcttacagccccaaagccaccagcagccccctttacctggcgcacgaggtgcagctgtttagcagccagtacccattccatgttcctctgctgtctagtcagaagatggtctaccccgggttacaagagccttggttgcactctatgtaccacggcgcagcattccaactaacacaaggggatcagttgtcaacccatacagacggaattccacatctggttttgagcccatctactgtctttttcggggcgttcgccctctag

SEQ ID NO: 122839 - DNA, 618 bp, synthetic construct
  misc_feature 1..618: note = Description of Artificial Sequence: Synthetic coding sequence
  source 1..618: mol_type = other DNA
atgacacctccagaacgtctctttttacccagggtacgggggacaaccttacacctgctcctcctagggctgttgctcgttctcctgcctggtgcccagggactcccaggtgtgggattgactccatctgctgcccagacggcacggcagcaccccaagatgcatctcgctcattctaccctgaagccagctgcccatctgatcggtgacccatctaaacagaacagcctcctctggcgtgccaacacagaccgggcttttctacaggatgggtttagcctctccaataatagcctgctcgtgccaactagcggaatctatttcgtgtactcacaggtagtgttcagcggcaaggcgtattctccaaaagcaacttcatcccccctgtatttagcacacgaagtgcaactgttttcatcccagtacccatttcatgtgcctcttctttcatcccaaaagatggtttatcctggtctacaggagccctggctccattctatgtaccacggcgctgcttttcagttaacccaaggagaccagcttagcacgcacaccgatggcattccccacctcgtgctctccccttctacagtttttttcggcgccttcgcactgtag

SEQ ID NO: 122840 - DNA, 618 bp, synthetic construct
  misc_feature 1..618: note = Description of Artificial Sequence: Synthetic coding sequence
  source 1..618: mol_type = other DNA
atgacacctccagagcgcttattcttgcctcgggtctgcgggaccacacttcacctcctgctgctggggcttttactcgtgctacttcctggcgcccaagggctccctggtgtcgggctgactccctccgcagcccagacagcccggcagcacccgaagatgcatttagcgcattcaactctcaagcccgctgcgcatctaatcggggacccgagtaagcaaaatagcctcctctggcgggcaaataccgatagggcgtttctgcaggacggtttcagtctgagtaataatagcctcctggtccccacgtccgggatatatttcgtatatagccaggtcgtgttttcaggaaaggcttactctccaaaggccactagctcacctctttaccttgctcacgaggtgcagctgttttccagccagtatcctttccatgtcccactgctcagctcccagaagatggtctacccaggacttcaggaaccctggctgcacagcatgtaccacggcgctgctttccagctcacacagggagaccagctcagcacccacaccgatggtatcccgcatttggtactttctccgtccacagtgttcttcggcgcttttgcgctttag

SEQ ID NO: 122841 - DNA, 618 bp, synthetic construct
  misc_feature 1..618: note = Description of Artificial Sequence: Synthetic coding sequence
  source 1..618: mol_type = other DNA
atgaccccacctgagcgactgttccttccccgagtgtgtggaaccacactgcacctacttctactgggcttactgctggttttgcttcctggcgcgcaggggctgccaggcgtcggacttacaccaagtgccgcccagacagcccggcagcaccctaagatgcatttggcacacagtaccctaaagcccgctgctcatcttattggggacccctcaaaacagaatagcctgctgtggcgggcaaatacagacagagcgtttttacaggacggtttttctctctctaacaacagtctgctggtccctacatcaggcatatacttcgtgtactcacaggtggttttctctggtaaggcttacagtccaaaggcaaccagcagtccactttaccttgcgcatgaggtccagttgttcagttcccagtacccctttcacgtccctctgctttcatcccaaaaaatggtgtacccaggactgcaggagccatggctacattccatgtaccatggcgcagccttccaactcacgcagggtgatcagctgagtactcacactgatgggattcctcacctggtcctgagcccgtctacagtttttttcggcgctttcgcactttag

SEQ ID NO: 122842 - DNA, 618 bp, synthetic construct
  misc_feature 1..618: note = Description of Artificial Sequence: Synthetic coding sequence
  source 1..618: mol_type = other DNA
atgacaccacccgaacgcctctttctgcccagagtgcgtgggaccaccctgcatttgctgctactgggcctactgctcgtactcttgcctggcgcccagggcctccctggtgtaggtcttactccatctgcggcccagactgctcggcagcaccccaagatgcacttggcccattctaccctgaagccagcagctcacttgatcggagaccccagcaagcagaacagcctgctctggagggctaacactgatcgtgccttccttcaggatggtttcagcctctcgaataacagcctacttgtgcctacatcaggaatatatttcgtttattcacaggtggttttcagcggtaaagcgtactcccccaaggccacctctagtcctctgtatttggctcatgaggtgcagctgttttcgtctcagtaccctttccatgttcctttgttgagttcccagaaaatggtttatcccggtctgcaggagccctggctgcactctatgtatcacggagcggcatttcagcttacccagggagatcaattgtccacacacactgatgggatcccacacctcgtcctatcacccagcacagtttttttcggcgcctttgcactctag

SEQ ID NO: 122843 - DNA, 417 bp, synthetic construct
  misc_feature 1..417: note = Description of Artificial Sequence: Synthetic coding sequence
  source 1..417: mol_type = other DNA
atgacacctcccgagcgcctctttctgccaagagtgagaggcactacgttgcacctgttgttactaggccttctcctggtgttgctgcccggagcacaaggcctacccggcgtagggctgacccccagcgccgctcaaacagcccgtcagcaccccaagatgcacctggctcatagcacactcaaaccggccgcccacctgataggggaccctagcaagcagaactcacttctctggcgtgcaaataccgatcgtgctttcctgcaggacggcttcagcctcagtaataacagcctgctagtacccacctcaggcatttattttgtttattcccagggctcctcaccacctctgctgtggccttttcagcaactgaagtcgagcttaatcaagtcgccggaactaagcaaaaagtag

SEQ ID NO: 122844 - DNA, 474 bp, synthetic construct
  misc_feature 1..474: note = Description of Artificial Sequence: Synthetic coding sequence
  source 1..474: mol_type = other DNA
atgacccctccagaacggctctttcttccccgagtgtgtggcacaacactgcacctgctcttactgggcttgctgcttgttctcttacccggcgcccaggggttacctggggtggggttaacaccgtcagcagcacagactgctagacagcatcctaagatgcacctcgcccattcgaacttgaaacctgctgctcacttgattggagacccctcaaagcagaacagtttgctgtggcgggcgaacacagatagagcctttctccaggatggattttccctgagtaacaatagtctgctggtgcctacatccgggatttattttgtttacagtcagttaccagaagacggcgtgtcccgcgctgcaggcaccctggccgctctggatgttccgagaggctgtgtgcccgctcaccccggccgtcctgccatccatcctcatcgatggcacccaccacccagtccacaaccatag

SEQ ID NO: 122845 - DNA, 417 bp, synthetic construct
  misc_feature 1..417: note = Description of Artificial Sequence: Synthetic coding sequence
  source 1..417: mol_type = other DNA
atgaccccgccagagcggctatttctccccagagtctgcggcacgacgttgcacctcctcttgctcggcctcctgttggtgctcttacccggggctcaagggcttcccggcgttggtctgaccccctcagcagcccagacagcccggcagcaccctaaaatgcatctggcccactccaccttgaagccagctgcgcacctcataggagaccctagtaaacagaacagcttgctgtggcgtgcaaatactgacagagccttcctgcaggacggattctcactgtctaataacagcctgctggtgcctacaagcggcatctacttcgtttacagtcagggctcaagtccaccactcctttggcccttccagcagctgaaatctagtctgattaagagtcctgagctgtctaaaaaatag

SEQ ID NO: 122846 - DNA, 417 bp, synthetic construct
  misc_feature 1..417: note = Description of Artificial Sequence: Synthetic coding sequence
  source 1..417: mol_type = other DNA
atgacaccacccgaacgcctgtttctcccacgagtctgtggaaccactcttcacctgctactgctgggactcttgctggtcctcctgccgggggcacaaggactacctggtgtggggctcactccttctgctgctcagactgcacgccagcaccccaagatgcatttagcccattctaccctcaaacctgctgcacacctaatcggcgatcctagcaaacagaattcgctgctctggagagcaaacacagaccgggctttcttgcaggacggcttcagtcttagtaataatagcttgctggtccccacctctggaatttacttcgtttactcccagggctcctctccaccccttctgtggccatttcagcaactgaaaagctcactgatcaagtcgcctgaactgagtaaaaaatag

SEQ ID NO: 122847 - DNA, 417 bp, synthetic construct
  misc_feature 1..417: note = Description of Artificial Sequence: Synthetic coding sequence
  source 1..417: mol_type = other DNA
atgacgccaccggagcgattattcctgccccgggtcagagggaccaccttacatctacttttgctaggcctgctgctggtcctattgcccggagcccaagggttacctggtgtaggacttaccccatcagccgcacaaaccgctcggcaacatcccaagatgcatttagcacactccacgctgaagccagctgcgcacttgattggcgatccctctaagcagaactcactgctgtggcgagcgaacactgatcgtgcctttctgcaggatggcttcagtttgagcaataattccctccttgtccctacctctggcatctatttcgtctattcgcagggatcctctccaccactcctgtggccctttcagcagttgaaaagttccctgataaagagccccgaactgtctaaaaaatag

SEQ ID NO: 122848 - DNA, 735 bp, synthetic construct
  misc_feature 1..735: note = Description of Artificial Sequence: Synthetic coding sequence
  source 1..735: mol_type = other DNA
atgggtgcccttggcctggagggtcgcgggggccgacttcagggacgcgggtctctgctgcttgccgtggccggggccacttctctggtcacacttcttctcgcggtcccgatcactgttctggctgtcttagcactggtgcctcaggaccagggaggattggtgactgaaaccgcagaccctggggcccaggcccaacaggggcttgggtttcaaaagctccctgaggaggagcccgagaccgacctgagtcccggcttgccggccgcccacttgatcggcgcacctctgaaaggccagggtctggggtgggagacaaccaaggagcaagccttcctgacctctggaactcaattcagcgacgcggagggcctggctttgccacaggacggtctctactacttgtattgtctggtggggtaccgaggacgggccccacccgggggcggtgacccccagggccgcagtgttactttaagaagtagcttatatcgtgctggcggagcgtacgggcctggaacaccagagctactgctggaaggggccgaaacagtgactcccgtgctggatccggccagaagacagggttacggccccctgtggtacacatccgtaggtttcggggggcttgtgcagttgcgcaggggggagcgcgtttacgtgaacatctcacatccagatatggtcgacttcgcgagaggcaaaacatttttcggtgctgtgatggtgggatag

SEQ ID NO: 122849 - DNA, 735 bp, synthetic construct
  misc_feature 1..735: note = Description of Artificial Sequence: Synthetic coding sequence
  source 1..735: mol_type = other DNA
atgggagccttgggcttagaaggacgcgggggacgcctgcaaggccgaggctcactactcttggccgtggccggagccacatcgcttgtgaccctgctcctcgccgtgccaatcaccgtcctggccgtgctggctttagtgccccaggaccaaggcggccttgtgaccgagactgccgatccaggcgctcaggcgcagcaaggtcttggcttccagaaattgcctgaggaagaacccgaaaccgatctctctcccggtcttcccgcagcccacttaatcggcgctccccttaagggacaaggccttggatgggagaccactaaggagcaggcttttttaacatctggtacccagttctctgatgccgaggggctggccctgccccaggatggcctctattacctgtattgcttggtggggtatcggggcagggcccctcctggcgggggggatccgcagggccgctcggtcactctaagatcgtcattataccgcgccgggggcgcctacggccccggtacccccgagctgttgttggagggtgccgaaacagtcactccagtgctagacccagctagaaggcagggatacggccctttatggtacacctcggttggttttggaggcctggtccaactccgacgaggcgagcgcgtgtatgttaatattagtcacccagatatggtggatttcgccagaggcaagacatttttcggcgccgtgatggtagggtag

SEQ ID NO: 122850 - DNA, 735 bp, synthetic construct
  misc_feature 1..735: note = Description of Artificial Sequence: Synthetic coding sequence
  source 1..735: mol_type = other DNA
atgggcgcacttggcctggaggggagaggcgggcggttgcagggcagaggatcactcctgctggccgtggccggtgcaacgtctctggtgacgttgctgctggccgtccctattacagtactggcagtcctcgccctcgtgccacaggatcaggggggactcgttacggaaacagctgatccaggcgcccaggctcagcagggcctggggtttcagaagctgccagaggaggagccagagacggatctgtcacccggtctcccagccgctcacctaatcggtgcccctttaaagggccagggcctaggttgggagactaccaaggaacaggcctttttgacaagcggcactcaatttagtgatgctgagggtttggcactgccccaggatggcctgtactatctctactgcctcgtggggtatagaggacgagcgcctccaggcggaggcgatcctcagggacggtcagtcacattgaggagctccttgtatagagccggaggagcgtacggtccgggcacaccagagctcctgctcgaaggcgctgaaactgtaacgcctgtgcttgaccccgctaggagacagggatacgggccgctctggtacacaagcgttggcttcggaggactagtgcagctgaggcggggagaacgggtctatgtgaatatatctcaccctgacatggtggattttgctaggggaaagacctttttcggcgcagtgatggtgggctag

SEQ ID NO: 122851 - DNA, 735 bp, synthetic construct
  misc_feature 1..735: note = Description of Artificial Sequence: Synthetic coding sequence
  source 1..735: mol_type = other DNA
atgggggcccttggcctcgaggggcgggggggacggctgcagggaaggggctccctgcttctggccgttgccggggcgacctcccttgttacactgcttctggcggtgcccatcactgttctggccgtgctggcccttgtgccacaggatcagggcggcttggtgaccgaaacggccgacccaggtgcccaggcacagcaaggcttaggattccagaagcttcccgaggaagagcccgaaacggatctgtcacctgggctgcctgcagctcacctcatcggagccccactcaaagggcagggcctgggatgggaaaccacaaaggaacaggctttccttacgtcaggcactcaattttccgatgcagagggactcgccctgcctcaggacggtctatattatctttactgccttgtgggctatcgaggtagagctccacctggcgggggagaccctcaggggcggagcgtcacactccgaagtagtctttaccgcgcggggggagcgtacgggcctggaacaccagagttgctcttggaaggcgctgaaacagtgaccccagtgctcgatcctgcgcgtcgccagggttatggacccttatggtatacgagcgtgggattcggcggacttgttcagttgcgtaggggtgagcgggtgtacgtcaatatctcccatcctgatatggttgattttgcccgaggtaagactttttttggcgctgtgatggtaggatag

SEQ ID NO: 122852 - DNA, 735 bp, synthetic construct
  misc_feature 1..735: note = Description of Artificial Sequence: Synthetic coding sequence
  source 1..735: mol_type = other DNA
atgggtgccctgggcttggagggtaggggaggaagactccagggacggggtagcttgctgctagcggttgcaggagcaacatctctggttaccctgctgctagcagttccaattactgtcctagcagtccttgccctggtgcctcaggatcagggagggctagtgaccgagaccgctgatccaggagcgcaagcgcagcagggcctcggcttccaaaagctgccggaggaggagcctgagaccgatttaagcccaggactaccagccgctcatcttatcggagctcctctgaaaggccagggtctgggatgggagacaactaaggaacaggcgtttctgacatccggaacacagtttagcgacgccgaaggattagccttgccccaggacggactgtactatctttattgcctagtcggctataggggccgtgctccccctgggggaggggatccacaggggcggtccgtgaccctcaggtccagcttatatcgagccggcggtgcctacggacccgggacccctgaattactgttggaaggcgcagagacagtcacccccgtcctagaccccgcacgccgccagggatatggacccctgtggtataccagcgtcggcttcggagggctggtgcagctaagacggggagagagggtttacgtcaacatttcccatccagatatggtcgactttgccagaggaaaaacattcttcggcgccgtgatggttggctag

SEQ ID NO: 122853 - DNA, 735 bp, synthetic construct
  misc_feature 1..735: note = Description of Artificial Sequence: Synthetic coding sequence
  source 1..735: mol_type = other DNA
atgggggccttaggccttgaggggcggggaggccgcctgcagggccgcgggtcactcctgttggcagtggccggcgcaacctctctggttactctcctcttggctgtccctatcaccgttctcgctgtgctggctctcgtgccccaagatcagggcggactcgttacggagacggcggaccctggtgcccaagctcagcagggcctcgggttccagaagttacctgaggaggagcctgaaaccgacctaagcccaggcctgcccgccgcacacctgatcggcgccccactgaaagggcaggggttggggtgggaaaccacgaaggagcaggcgttcctcacatctggcacccagttcagcgacgctgaaggactagcgttacctcaggatgggctctattatctctattgcttggtcgggtataggggtcgggcaccgcccggcggtggcgaccctcaaggcaggagtgtaacactccgctcctccctctatcgcgctggcggggcatacgggccaggaactcccgagttactgttggaaggcgccgaaacagtcacgcccgttctggacccggcccgccggcagggctatgggcccctgtggtatacatctgtcggatttggcgggctcgtgcagcttcggcgcggagaaagggtctacgtcaacatttcgcaccctgacatggtggatttcgctcgggggaaaaccttttttggggctgtcatggtcggctag

SEQ ID NO: 122854 - DNA, 234 bp, synthetic construct
  misc_feature 1..234: note = Description of Artificial Sequence: Synthetic coding sequence
  source 1..234: mol_type = other DNA
atgggcgcacttggcttagagggccgcggagggcgcttacaagggaggggtagcctactcctggcagtggctggcgccacttcgctggtcaccctgctccttgcagtacctatcacagttttggccgtccttgcccttgtccctcaggatcagggtggactaggatttagatcttgccagcgacgctctcagaagcagatatctgccccaggctcccagctacccaccagctag

SEQ ID NO: 122855 - DNA, 735 bp, synthetic construct
  misc_feature 1..735: note = Description of Artificial Sequence: Synthetic coding sequence
  source 1..735: mol_type = other DNA
atgggagcactcgggttagagggtcgagggggccgactgcaaggcaggggctctcttctccttgctgtagccggcgccacatccttagtcacgttgttgctggctgtgcccattactgtactggccgtgctggctcttgtgccgcaggaccagggagggctggtcaccgagactgccgacccaggcgcccaggcccagcaggggctcggttttcagaagctgcctgaagaagaaccggagacggaccttagtccaggcctgccggctgctcatctcatcggtgcccccctgaaaggccagggtctgggatgggagacaaccaaagagcaagcctttctgacctcaggcacccagttttccgacgccgaggggcttgcgctcccacaggacggtttgtactacttatattgtctagtggggtaccgcgggagggcgccccctggcggtggagacccccagggccgcagcgtcaccctcagaagcagtctttacagggccggcggtgcgtatggacctggaacccccgagctgctcctggaaggagccgagacagttaccccagtgctggatcctgcacgtaggcagggctatggtcccctctggtacacgagcgtcgggttcgggggcctggtgcagctgcggcggggggagcgggtgtacgtcaacataagccatccagatatggtggactttgccagaggtaaaaccttcttcggtgcagtgatggtcggctag

SEQ ID NO: 122856 - DNA, 735 bp, synthetic construct
  misc_feature 1..735: note = Description of Artificial Sequence: Synthetic coding sequence
  source 1..735: mol_type = other DNA
atgggcgccttaggcttagaaggtcgcggcggcagacttcagggtaggggctccctgctgctggctgttgccggagcaacgtctctagtgacactactgctcgctgtgccaataacagttctggccgtgctcgcactagtacctcaggatcagggcggtctcgtgacagaaacggctgatccaggggcccaggcccagcagggcctgggcttccagaagcttcccgaggaagagccagagactgatctgtcgcccggcctcccagccgctcatcttattggcgcgccactcaagggccagggattgggatgggagaccacaaaagagcaggccttcctgaccagcggcacccagttttccgatgcagaaggcctcgccctccctcaggacggtctctactacttatactgtctggtgggctacagggggagggcaccccccggcggcggggatccccaggggcgcagtgtcacactgcgcagctctctgtacagagctggtggtgcctacgggccaggaactcctgaactgctgctcgagggcgccgaaacagtgacccctgtccttgacccggctcgaaggcagggctacggtccgctgtggtacacatctgttggttttgggggcctggtgcagctgaggaggggagaacgcgtttacgtgaacattagtcaccccgacatggtggatttcgctagaggaaagaccttcttcggcgcggtgatggtgggttag

SEQ ID NO: 122857 - DNA, 276 bp, synthetic construct
  misc_feature 1..276: note = Description of Artificial Sequence: Synthetic coding sequence
  source 1..276: mol_type = other DNA
atggctgcatcctctagggcccaagtgctgagtctgtaccgggcgatgctcagggagagtaagcggttttcagcttacaattacaggacgtatgcagttcgacggattcgagacgcctttagagagaataagaatgtgaaggatccagttgagatacagacactggtgaataaagccaagcgtgatctgggcgtcataaggaggcaagtgcacatcggtcaactttactccaccgacaagctcattattgagaaccgcgacatgcctagaacttag

SEQ ID NO: 122858 - DNA, 393 bp, synthetic construct
  misc_feature 1..393: note = Description of Artificial Sequence: Synthetic coding sequence
  source 1..393: mol_type = other DNA
atggcagcctcttctcgcgcacaagttctttcattatatagagccatgctccgagaatcaaagagattctctgcctataactataggacgtacgccgtgaggaggattagagacgctttccgcgagaataagaacgttaaggaccccgtggagattcagactttggtgaacaaggctaaacgagaccttggggtaatccgacgccaaatggattcccacagcgtagcacaggccggggtccattggaacgacctctcttcactgcagccactacctccgtggtttaaacagttttcttgcctctcccttccgtctagttgggactacagacgtaccccgccccgtttggccaacttctgcatcttatcccgggatgtaatttcactctactag

SEQ ID NO: 122859 - DNA, 291 bp, synthetic construct
  misc_feature 1..291: note = Description of Artificial Sequence: Synthetic coding sequence
  source 1..291: mol_type = other DNA
atggccgccagcagcagggcccaggtgctgtccttataccgggccatgctacgagagtctaagagattttctgcctataactatagaacctacgccgtacgtcggatacgggacgcctttcgcgaaaacaaaaacgtgaaggatcccgtggaaattcagactttggtgaataaggccaaaagagatttaggcgtgattcggcgccaagtggctgagcagggcactgccgccaggagaaagagcggcaatagcagtcgctctctgggcaaaccatgcactagttggccgtag

SEQ ID NO: 122860 - DNA, 2559 bp, synthetic construct
  misc_feature 1..2559: note = Description of Artificial Sequence: Synthetic coding sequence
  source 1..2559: mol_type = other DNA
atgctctcggggaagaaggccgctgcggctgctgcagccgctgcagcagccgccactggaacagaagccgggcccggcactgccggtggctcagagaatggctctgaagtagccgctcagccagctggcctcagtggccccgccgaagtgggacccggggccgttggggagcgcaccccgaggaagaaagaacccccaagggccagtcctcccggcgggctggctgaaccgcctggctccgccggaccacaggccggaccgaccgttgtgccggggtccgccacacccatggagacaggcattgcagagacccccgagggcagacgtacatccagacgaaaacgcgctaaagtagagtatagggagatggatgaatctctagctaatcttagcgaagatgaatattactccgaggaggagaggaatgcaaaagctgaaaaggagaaaaagctacctcctcccccaccccaagcccctccagaagaggagaacgaaagcgagccagaggaaccgtctggagttgaaggagcggccttccaaagtcgactgccacatgacaggatgacttcccaagaggcggcttgtttccccgatattatttccggaccacaacagactcagaaggtcttcctctttatccgcaacagaacactgcaattgtggttagacaaccctaaaattcaactgactttcgaggcaacactgcagcagttagaggcaccctacaattctgatacggtgctggtgcatcgcgtgcattcgtatctagagcgccacggactgattaacttcgggatctataagcggattaagcccctgcctacaaaaaagacagggaaggtgataatcattggatctggggttagcggcttggccgctgcccggcagttgcaaagctttgggatggatgtgaccctgttggaggctagggacagagttgggggacgcgtcgcaacctttaggaaaggaaactatgtggccgatctcggagccatggtcgttacaggtttaggcgggaatcccatggccgtggtgtctaagcaggtgaacatggagctggcaaagatcaagcagaagtgccccctctatgaggctaatggtcaagcggtgcctaaagagaaggacgagatggtcgaacaggaatttaatcggctgttagaagccacatcgtatctgtcccaccagctggacttcaatgtgctcaacaacaagccggtcagcttgggccaagctctggaggtggtgatccagctccaggaaaaacacgtcaaggacgagcagatcgagcattggaagaagattgttaagacccaggaggaattaaaggaactgcttaataaaatggtcaacctgaaggagaagatcaaggaactgcatcagcagtacaaggaggcctcagaggtcaagcccccaagagacattacagccgagtttctggtgaaatcaaagcatcgcgatttgactgccctctgtaaggaatatgatgagctagcagagacccagggcaaactagaggagaaactccaggaattagaagccaacccacctagcgacgtctacctgagcagccgtgaccgccagatcttggactggcactttgctaacctggaatttgccaatgctacgcccttgagtactctatcgctgaagcattgggatcaagatgacgatttcgaatttaccgggagccatctgactgtgcgcaacggatatagctgtgtccctgtagccctcgctgagggcctggatataaagctcaatactgccgtgcggcaggtgaggtacacagcttcaggttgtgaggtcatcgcagtcaacacccggagcacttcgcagacgtttatatacaagtgcgacgctgtgctctgtactctgccacttggagtgcttaagcaacagccgccagctgtgcagttcgtcccgcctctcccggagtggaagacatccgcagtccagagaatgggcttcggtaacctcaataaggttgtgctgtgctttgacagggttttctgggacccaagcgtaaaccttttcggacatgtgggctcaaccactgcgtcacggggcgaactcttccttttctggaatctctacaaagctcccatcctgctggccctggtagctggcgaggcagccgggataatggagaacatctcagatgatgtaatagtcggacgttgccttgccattctgaaggggatcttcggaagtagtgccgtgccccagcctaaagaaacggtggtaagtcggtggcgggcggacccatgggccaggggtagctactcatacgtggccgccggttccagcgggaatgactacgatctgatggcacagcctattacgcctgggccaagcatacccggggcccctcagccaataccccgactctttttcgccggcgagcacactatccggaactaccctgcgacagtccacggagccttattaagcgggttaagggaggcagggcgcatcgcagaccaatttctcggcgctatgtacacactcccacgacaagccacaccaggagttccagcacagcagagcccgagtatgtag

SEQ ID NO: 122861 - DNA, 2631 bp, synthetic construct
  misc_feature 1..2631: note = Description of Artificial Sequence: Synthetic coding sequence
  source 1..2631: mol_type = other DNA
atgttgtcggggaagaaagccgcagcagctgcagcggcagcagcagccgccgcgaccggtacggaagcaggtccagggacggcgggtggtagcgaaaacggctccgaggtggccgcgcaacctgccgggctcagcggcccagccgaagtggggccaggagccgtcggggaaagaacacctcggaaaaaagaaccaccccgcgcgagtccaccaggcggcctggccgaacctcctggttcagcgggacctcaggcagggcccaccgtcgtgccgggcagcgccacacccatggagacagggatcgcagaaaccccagagggacggcgcacttccaggcgtaaacgcgcaaaagtggaataccgggaaatggacgaaagccttgccaatctgtcggaggatgagtattactccgaagaggaacgtaacgctaaagcggaaaaagagaaaaagcttcctcctcccccgccgcaggcaccacccgaagaagaaaatgagagcgagcccgaggagccctctggccaggcaggcggacttcaggacgattcctctggcggatatggggatgggcaagcttcaggcgtggagggcgcagctttccagtcccggctgccacatgacagaatgacctcccaggaggctgcttgctttccggatattatctctggaccgcagcagacccaaaaggtctttctttttattcgaaaccggactctgcaactctggcttgacaatcctaaaatacagcttactttcgaagcaactctgcaacagctggaggcaccctacaactcggacaccgtattagtgcaccgagttcattcctaccttgagaggcatgggctgatcaactttggcatctacaagcggattaagcccctgccaacaaaaaaaacggggaaggttattattattggtagtggcgtcagcgggctcgctgctgcaaggcagctgcaatccttcggaatggatgtcacccttctggaggcacgcgacagggttggtggcagagtggcaactttccgcaagggtaactatgtggccgatctgggagcaatggtcgtcacaggactcggcggcaatccaatggccgtcgtgtcaaagcaggtaaacatggaactcgccaaaatcaagcaaaaatgccccctctacgaggctaacggccaggcggaacggattatagtccctaaagaaaaagatgaaatggtcgagcaagaatttaataggcttctggaggccacttcctatctgagccaccagctggatttcaacgtgctcaataacaagcccgtatctctgggacaggcgctcgaagtggtgatccagcttcaagaaaaacatgtaaaggacgagcagatagagcattggaagaagattgtaaaaacccaagaagagcttaaggagctattaaataaaatggttaacttgaaggaaaagatcaaagagctccaccagcaatataaggaagcctcggaagtgaaacccccacgggatataacagcggaattcctagtcaagtccaagcaccgggatctaaccgccctgtgtaaagaatatgatgaacttgccgagacccaaggaaagttggaggaaaagctccaagaactggaggctaatcctcccagtgatgtctacctctcatcccgagaccggcagatcttggactggcactttgcaaatctcgagtttgccaacgcaacaccactgtcgaccctgagcctgaaacactgggaccaggacgacgattttgagttcactgggagtcatctgaccgtcagaaacggctattcttgcgtgcccgtagctctggctgaaggtctggacatcaaactaaacacggcagtccgtcaggtcaggtacaccgccagcggctgcgaagtgattgccgttaatacaagaagcacctctcagacattcatttacaagtgcgatgctgtgttgtgcacactgcctttgggcgtgctgaagcagcagccacctgccgtgcaatttgtcccacctttgcccgagtggaagacaagtgccgtgcagcgtatggggtttggcaacctgaataaagtggtcttatgcttcgatcgggtgttctgggacccatcggtgaatttgttcggccacgttggctctactacggcctccagaggagaactattcctcttttggaatctctacaaagcacctatcctgctggctctcgtggctggcgaggccgctggcataatggaaaacatatccgatgatgtgatcgtaggacgatgcctcgcaatcctcaaaggcatcttcgggtcaagcgccgttccccagcccaaggagactgtcgtgtcgagatggcgagcggacccctgggccagagggagttactcttacgtcgctgccggcagttcagggaatgattacgaccttatggcccagcctattacacccggcccatctatccctggcgcccctcaacccatcccacgcctgttcttcgcaggcgagcacacaattcgcaactaccccgcaacggtacacggggcccttctcagtgggctgcgtgaggcagggcgtatcgctgaccaattcctgggtgccatgtatactctacctcgccaggccactcccggggtgccagcccaacagtcaccttccatgtag

SEQ ID NO: 122862 - DNA, 2631 bp, synthetic construct
  misc_feature 1..2631: note = Description of Artificial Sequence: Synthetic coding sequence
  source 1..2631: mol_type = other DNA
atgctcagtggcaaaaaagccgctgcagcagctgcggctgcagctgccgcggccactgggactgaagctggaccagggacagcagggggaagtgagaatggaagcgaggtcgccgcacagcccgcggggctgagcggaccagcagaggtgggtcccggtgccgtaggggaacggactccgagaaaaaaagagcctccacgggctagccctccaggtggcctggcagagccacctgggagtgcgggcccacaagcaggtcccacggttgttcctggttccgctactcctatggagaccggcattgctgagacccctgaaggtcgccgcacgtcaaggcgaaagcgcgccaaggtggaatacagagagatggacgagagcctggcgaatttatccgaagatgagtattatagtgaagaggagaggaatgccaaggccgagaaagaaaagaagctgccgccaccccccccacaggcaccccctgaagaggaaaatgagtccgaacccgaagagcccagcggccaggccggcggtctgcaggacgacagctcaggcggttacggtgacggacaggcttccggagtggagggggccgcttttcagtcccgtttgccacacgatcgaatgaccagccaagaagctgcttgtttccccgatatcatttccggaccccagcagactcagaaagtgttcttgttcatccggaatcgcactctgcaattgtggctagacaatcccaaaatacaacttacatttgaagccacattacagcagcttgaggcaccctacaatagtgacaccgtgttagtacacagagtccactcctatcttgagcgccatgggctcattaacttcggcatttacaagcggataaagcctctgcccactaagaagaccgggaaagtcataattatcgggagcggcgtgtctggcttagctgcagcaagacagctgcagtcctttggtatggatgtgaccctgctggaggcccgagaccgcgttggcggcagagtggccacttttagaaaaggaaattacgtagcggatttgggcgctatggtcgttaccggactgggagggaaccccatggccgtggtgtcaaaacaagtgaatatggagcttgcaaaaattaaacaaaagtgtcctttgtacgaggccaacggacaggccgatacggtgaaggtaccgaaggagaaagatgaaatggtcgaacaggaattcaacaggttgcttgaagccacttcttatctgagtcatcagttggatttcaacgtgctcaacaacaagccagtatcactgggtcaagcactcgaggtcgtcattcagctccaggagaagcacgtcaaagacgaacagattgagcactggaagaagattgttaaaactcaggaagagctaaaggagcttctaaataagatggtgaacctcaaggagaaaatcaaagaactgcaccagcagtacaaagaggcctctgaggtcaaaccgccccgcgatattacggccgaattcctggttaagtccaagcatagggaccttacggccctgtgcaaggaatacgacgagctagccgagacacagggtaagctggaagagaagctgcaggagctcgaagctaaccccccaagcgacgtttacctctcctctcgagaccgccagattctggattggcactttgccaacttagagtttgctaacgccacccccctgtcaaccctgtcgctcaaacattgggatcaggacgatgacttcgagtttaccggctctcacttgactgtgcgtaatggatacagctgtgtgcccgtagctctcgcagagggcttggacatcaaactgaacacggccgttagacaggtgcgctataccgcctccggctgcgaggtgatagccgtgaacactaggtctacctctcagacgttcatctacaagtgcgacgccgtgctgtgcaccctgccactgggagtactgaagcagcagccgccagctgttcagttcgtcccccccctgccagagtggaaaacatccgctgtccaacgcatgggttttggcaatctgaataaagtggtgctgtgctttgatagagtgttttgggacccttcagtgaatctatttggacacgtcgggagtacaaccgcatcaaggggcgaactgttcctcttctggaatttgtacaaagcccccatattgctggccttagtggctggcgaagccgcaggaatcatggagaatatcagcgacgatgtgatcgtgggaagatgcctggcgatcctgaagggaatcttcggctccagtgcagtccctcagccaaaggagacggtggtgtccagatggcgcgctgacccctgggcgcggggcagctacagctacgtggccgccggttctagcggtaacgattatgaccttatggcccagccgatcacccccggcccaagcattcccggagccccccaacctatacctaggctcttcttcgctggtgagcacactatcaggaattacccagcaactgtccatggcgctctgctgagtggcctgcgcgaggcaggaaggattgcagatcagttcctgggagcaatgtataccctcccaaggcaggcaacacccggagtacctgcacagcagtctccgtcgatgtag

SEQ ID NO: 122863 - DNA, 1773 bp, synthetic construct
  misc_feature 1..1773: note = Description of Artificial Sequence: Synthetic coding sequence
  source 1..1773: mol_type = other DNA
atggctacgccaagaggcaggactaagaaaaaggcctcttttgaccacagcccagatagcctgcctttgaggagctccggacgccaggccaagaagaaagccacagagacaactgacgaagacgaggacggtggctccgagaagaagtatcggaagtgcgagaaggccggctgcacggcaacctgtcctgtttgctttgccagtgcatcagagcggtgtgcgaagaacggatacacctccagatggtaccatctgtcttgtggagagcacttttgcaatgagtgttttgatcattactaccggagccacaaagacggatacgacaaatataccacctggaaaaaaatctggactagcaatggcaaaaccgaaccctctccgaaggcctttatggcggatcaacagttaccatattgggtccagtgcaccaaacctgaatgcagaaagtggagacagttgaccaaggaaatccagctcacccctcaaatcgccaaaacataccggtgcggcatgaaacctaacacagccatcaagcccgagacgtcggatcattgctccctgccagaggacctcgaggccctcacccctcagaagtgcatccctcatataattgtccgtggtttggtgcgtattagatgcgttcaggaggtggagcgcatcttgtacttcatgacacggaaaggtctgatcaacactggcgtgcttagtgtcggggcagatcagtaccttctgccaaaagattaccacaataagagcgtgatcattatcggcgctggtccagccgggctggcggcagccaggcaactgcataactttgggatcaaagttacagtcctcgaggccaaagataggatcggcggacgtgtttgggacgacaagagttttaagggggtgactgtcggtaggggcgcccagattgtgaacgggtgcattaataacccagtggccctaatgtgcgagcaagttagtgctagaagctgggaccacaatgagtttttcgctcagttcgctggtgatcacactctgctgacacctggttacagcgtgatcattgagaaactggctgaggggttggacattcaactcaaatcacctgtacagtgtatcgactattccggcgacgaagtgcaggttaccacaactgacggaacaggatacagtgcccaaaaggttcttgtgacggtcccattagcgctgcttcaaaagggagccattcagttcaaccccccgctgagtgagaagaaaatgaaggcgataaacagtttgggcgctggcatcattgagaagatcgctctgcagtttccgtaccgcttttgggactcaaaagtgcaaggagcagacttcttcgggcacgtgccgccatcggcgtctaagcgagggcttttcgccgtgttttatgacatggacccccagaagaaacattcggttctcatgtccgttatcgccggcgaagcagtggctagcgttaggacactggatgataaacaggtactccagcagtgcatggctaccttgcgcgagctgtttaaggaacaggaggtcccagacccaacgaaatactttgtcactcggtggtctaccgatccttggattcagatggcttactcgtttgtgaaaactggcggtagcggcgaggcttatgacataatcgccgaggacattcaaggcacagtgttcttcgccggggaggcaaccaatcgacactttccccagacagtcacaggcgcgtacctgtcaggggtgagagaggcctcgaaaattgctgcattctag

SEQ ID NO: 122864 - DNA, 2463 bp, synthetic construct
  misc_feature 1..2463: note = Description of Artificial Sequence: Synthetic coding sequence
  source 1..2463: mol_type = other DNA
atggctaccccaagaggccgtaccaaaaagaaggcctcttttgatcattccccagattcattaccactcagatctagtggtcgtcaagcaaaaaaaaaagcaacagaaactacagacgaagacgaggatggcggcagcgaaaaaaagtatcgaaaatgtgaaaaagctggatgcaccgctacatgcccggtctgtttcgcatcggccagtgagaggtgtgctaagaacggctatacttccaggtggtaccatctgagctgcggcgaacacttttgtaatgagtgctttgaccactactatcggagccataaagacggatatgacaaatacacgacctggaaaaagatttggacttcaaacggcaagactgaaccgtccccgaaagcatttatggcagatcagcagctgccctattgggtgcagtgcacaaagcctgagtgtcgtaagtggagacagctgaccaaagaaatccagctgacaccacaaatcgccaagacctacagatgcgggatgaaaccaaacactgcaataaagccggaaacatccgaccactgctcccttcctgaggacctgagggtactggaggtgtccaatcactggtggtattccatgctcatcctcccccctcttcttaaagacagcgttgccgctcctcttttatcggcatactaccctgattgtgtcggtatgagtccatcatgcacgtcaaccaatagggctgccgcaacagggaacgcatctcccggcaagctggaacactcaaaagcagcactttctgtccacgtgccgggaatgaaccggtattttcaacctttctaccagcctaacgagtgtggcaaggcactgtgcgtgcgtcctgacgtcatggagctcgacgagctgtacgaatttccagaatatagcagggatcctacaatgtacttggcactccgcaaccttattttggctctgtggtacaccaactgcaaagaagccctcactccccagaagtgtatccctcacatcatcgttcgggggttagtgagaattcggtgcgtgcaggaagtggaacggatcctctactttatgactcggaagggattgatcaacactggagtgctaagcgtgggagccgatcaatacctcttgcccaaagactaccataataaaagcgtgattattattggagcagggcctgccggcctggccgcggctagacagttgcacaattttgggataaaagttaccgtgctggaagcgaaagatcgaatcggtggaagagtgtgggatgataagtccttcaagggagtgaccgtgggccggggcgcccaaattgttaacggatgcatcaacaatccagtagccttaatgtgtgagcagctggggatatccatgcataagttcggtgaaaggtgcgacctaatacaagagggagggcgcattacggaccccacaatagacaagcggatggattttcacttcaacgcattgcttgatgtggtatccgagtggagaaaggacaaaactcagctgcaagacgtgcccctgggcgaaaagattgaggaaatctacaaagcttttatcaaagaatcggggatacaattctctgagctggaaggacaagtgctccagttccacctgtccaacctggagtacgcttgtggcagtaacctgcaccaggtcagtgccaggtcctgggaccataatgaatttttcgcccagtttgccggggaccatacattgttaactcctggctattctgtgattatcgaaaagcttgcagagggtctagatattcagcttaaatcccccgtgcagtgtatcgattacagcggcgatgaggtccaggttaccaccaccgacggtaccggctactcagcccagaaggtcctggtaacggtgccgctggccctccttcagaagggcgctatccaattcaaccccccactgtctgagaagaaaatgaaggctatcaacagcctgggcgcaggaatcatcgaaaagatcgcccttcagttcccatacagattttgggacagtaaagtacaaggagcagattttttcggccatgtgcccccctccgccagcaagaggggactgttcgccgtattctacgacatggacccccagcacagtgttctgatgtcagtgatcgccggcgaggccgtggcctccgtgcggactctagatgacaaacaggtgctgcagcaatgcatggcaacgctgcgagaactgttcaaagagcaggaggttcctgaccctaccaagtactttgtgacaaggtggagtacagacccgtggattcagatggcctacagctttgtgaagaccgggggtagcggggaggcctacgacatcattgccgaagatatacaaggcacagtcttctttgcgggtgaggctaccaaccgacactttccgcagacagtgactggggcttacctgagcggagtgcgggaggcctctaagatagctgcattctag

SEQ ID NO: 122865 - DNA, 2472 bp, synthetic construct
  misc_feature 1..2472: note = Description of Artificial Sequence: Synthetic coding sequence
  source 1..2472: mol_type = other DNA
atggctaccccgaggggcagaaccaagaaaaaggcatcgtttgatcattctcccgactctctaccgctgcgaagtagcggccggcaggccaaaaagaaggcgacagagacaaccgacgaggacgaggatggcgggtctgaaaagaagtatcgcaagtgcgagaaagcaggttgcaccgccacctgccctgtttgtttcgctagcgctagcgaaaggtgcgccaaaaatgggtacacatcaaggtggtaccacctcagctgtggagaacacttctgtaatgaatgctttgaccactactaccgttcccataaagatggctacgataagtacacaacctggaagaagatctggacatccaatggaaagacagaaccttctccaaaagcattcatggccgaccaacagctcccctactgggtccagtgcacgaagccagagtgtcggaagtggcggcagctcaccaaagagatccagcttacaccgcaaatcgctaagacctacaggtgcggaatgaagcccaacactgccatcaagccagagacatccgatcattgttctcttccagaagatctgcgggttctcgaagtatcaaaccactggtggtactcaatgctgattctgccccccctgctaaaggattcagtggccgccccactgctcagcgcttactaccccgactgcgttggaatgagccccagctgcacctcaaccaacagagctgcagcaactggtaacgcgtccccgggtaagctggaacattctaaagcagctcttagtgtgcacgtgcctggaatgaacaggtattttcagcccttctaccaacccaatgagtgcggcaaagccttatgtgtgcgccccgacgttatggaactagacgagctttacgaatttccggagtacagccgcgacccaacgatgtacctcgcccttcgtaacttgatcctggccctgtggtatactaattgtaaagaggctctcacaccacagaagtgcattccacatatcattgtgaggggtttagtgagaatccggtgcgtccaggaagtggaaagaattctgtacttcatgactagaaaagggctgatcaataccggagtgctgtccgtcggggctgaccagtacttgctgcctaaagattaccataataaatctgtcattataataggggcgggccccgccgggctggccgctgcacgccaactgcataatttcggcataaaggtgactgttctcgaggcaaaggaccgaatcggaggtcgtgtctgggacgataagtctttcaaaggcgtgaccgtggggaggggcgcccagatagtgaacggttgtataaacaaccccgtggctttgatgtgcgaacagctggggattagcatgcataaattcggagagagatgtgacctcatccaagagggcgggcggattacagatccaactattgataaaaggatggacttccattttaacgccctgttggacgttgtcagtgagtggcggaaagacaagacccagctgcaggacgttcctctcggcgaaaaaattgaggaaatctacaaagctttcattaaggaaagtggcattcaattcagcgagctggaagggcaggtcctccagtttcacttgagcaacctggagtatgcatgcggctctaatttgcaccaggtgtctgctagaagctgggaccacaacgaatttttcgctcagtttgctggggaccatacactcctgacccctggatatagcgtgatcatcgagaagctggcagaagggctcgatatccaactaaaatccccacaggttcaatgtattgactactcaggtgacgaagttcaggtaacaacaactgacggaacgggttattctgcccagaaggtgctagtgaccgtgccactggctctcttacaaaaaggcgccatccaatttaacccgccactgagcgaaaagaagatgaaggctatcaactccctcggcgccggcattatcgagaaaatcgccttacagttcccttatagattttgggattccaaggttcagggggctgacttcttcggtcacgtccctccaagcgccagcaaacgcgggttgttcgcagttttctacgatatggatccccaaaagaagcacagtgttttaatgtctgtgattgccggggaggctgtcgcctcagtaaggacactcgatgacaagcaggtcttacagcagtgcatggcaactctgagggagctcttcaaggaacaggaggtgcctgacccaaccaagtactttgtaacccgctggagtacagacccctggattcagatggcttattcatttgtcaaaaccggtggctcaggagaagcatacgacattattgcagaagacatccagggaacagtgttcttcgcaggcgaggctacaaatcgccactttccacagactgtgacgggggcctacctgagtggtgtacgtgaggcctctaagattgcggctttttag

SEQ ID NO: 122866 - DNA, 1776 bp, synthetic construct
  misc_feature 1..1776: note = Description of Artificial Sequence: Synthetic coding sequence
  source 1..1776: mol_type = other DNA
atggctactccacgcgggaggaccaagaaaaaagccagctttgaccactcaccagactctctgccattaagatcgtccggtcgacaggcaaagaagaaggcaactgagacaacggacgaggatgaggacggaggtagtgagaagaaataccgcaaatgtgagaaggctggatgcaccgccacctgtcctgtttgtttcgcgagcgcttctgaacggtgtgccaaaaacggttacacttctcggtggtaccacctgtcatgtggagaacatttctgcaacgagtgttttgaccattactaccggtcacacaaggatggctacgacaagtacacaacgtggaagaaaatttggaccagtaatgggaaaaccgaaccaagcccgaaggcgttcatggccgatcagcagctgccgtactgggtgcagtgtactaagccagagtgcagaaaatggcgccagctgacaaaggagatacaattgaccccccagatagccaagacctacaggtgtgggatgaagccaaacactgctatcaaacccgaaacttctgatcactgtagtttaccggaagacttagaagccttgacgccccaaaagtgcattccccatatcattgtacgtggactagtcagaatccggtgtgtgcaggaggttgagagaatcctgtatttcatgactcgaaaaggattaataaataccggcgtgttgagtgtaggagccgaccaatatctattgcccaaagattatcataacaaatcagtcattatcattggggctggtccagccggccttgctgcagcaaggcagctccacaattttggcataaaagtgacggtcctggaggctaaggacagaattgggggacgcgtgtgggacgacaagtccttcaagggcgtgacggtgggacggggggcccagatagtgaacgggtgcattaacaaccccgtggccctaatgtgcgagcaggtgtctgccaggagttgggaccataacgagtttttcgcccaattcgctggtgaccacactctcttaacccccggctattcagtcatcatcgaaaagctagcagagggcctggatattcagcttaagagcccccaggtccagtgtatcgactactccggcgatgaggtacaggttacaactactgatgggaccggctattccgcccagaaggttctagtaacggtgccactcgctctacttcagaagggggccatccagttcaatcctcccttgagcgaaaagaaaatgaaagcaattaatagccttggagccggcattatcgagaagatagccctgcagtttccataccggttttgggattccaaggtgcagggggctgacttcttcggacacgttcccccttcagcgtcaaaacggggcttgttcgcggtgttttacgatatggatccccaaaagaaacatagtgtgctgatgagtgtcattgctggggaggcagtggcctccgtgcgcacactggacgataaacaggtgctgcaacagtgcatggcaacgctgcgcgagctttttaaggaacaggaggtgcctgatccaaccaaatattttgtgaccaggtggagtacagatccatggatccagatggcctactctttcgtgaaaacaggcgggagcggagaagcctatgatatcatcgccgaggatatacagggcactgtttttttcgcaggtgaggcaaccaaccgacattttccgcaaaccgtgactggggcatacctgtcgggggtgagggaagcctctaaaatcgccgcattctag

SEQ ID NO: 122867 - DNA, 1923 bp, synthetic construct
  misc_feature 1..1923: note = Description of Artificial Sequence: Synthetic coding sequence
  source 1..1923: mol_type = other DNA
tagtgcagccttccagaggatcttagagtgttagaggtttctaatcattggtggtacagcatgctgatcctgccccccctgttgaaggattctgtggccgctcccctcctgtccgcctattaccccgactgcgtgggaatgtcaccatcctgtactagcactaacagagcagctgctaccggcaacgcctctccagggaaactcgagcactctaaagcggcgctcagtgttcacgttcctggcatgaaccgctatttccagcccttttaccagcctaacgagtgtggtaaggccttatgcgtaaggcctgatgttatggagcttgacgagctctacgagtttcctgagtactctcgcgatcctaccatgtaccttgctctacggaacctaatcctggctctgtggtacactaattgcaaggaagcccttaccccccagaaatgcattcctcacataattgtgcggggactggtacggattcgctgcgtgcaagaggtggagaggatcctctacttcatgacacgcaagggtctgatcaacaccggtgtgctcagcgtcggggcggaccagtatttgctgcccaaagactatcataacaaatccgtgattatcatcggagctggcccagccggcctagccgctgccaggcagctgcataacttcggcattaaggttacggtgctagaggcaaaggatcggatcgggggaagagtttgggacgataagtccttcaagggggttacagtgggccgtggagcccagattgtcaatgggtgcatcaacaacccagtggcactgatgtgcgagcagctcggcatctctatgcataaattcggggagcggtgcgaccttatccaagaagggggacgaatcactgatccgaccatcgacaaacggatggactttcacttcaatgcccttctggacgtcgtgagcgagtggaggaaggacaagactcaactgcaagacgtaccactgggagagaagattgaggaaatttacaaggccttcatcaaagagagtggtattcaattttctgagctggagggccaggttttgcaattccacttaagcaatctggagtacgcatgcggatccaatctacatcaagtcagcgctcgctcctgggatcacaacgagtttttcgctcaattcgcaggtgaccatactcttctcacacccggttactctgtgatcattgaaaagctcgcagaggggcttgacatccagctgaagtctcctcaagtccagtgcatagattacagtggcgacgaagtacaagtgaccactaccgacggaaccggctatagcgcccaaaaagtgctggtcacagttcccctggccctgctgcagaaaggcgccatacaatttaacccaccactgagcgagaagaaaatgaaggccattaactctttaggagcaggaatcattgagaagatcgcgcttcagttcccttaccggttttgggactcgaaagtgcagggtgcagacttcttcggacatgtgccgcctagcgctagtaaacggggtctgttcgctgttttttatgatatggaccctcagaaaaagcactccgtgttaatgtccgttatcgctggcgaagctgtggcatccgtcaggacactggatgacaaacaggtcttacaacagtgcatggccacgttgagagagctgttcaaagaacaggaagtcccagatccaacgaaatactttgtaaccagatggtccacagatccctggattcagatggcatattcattcgtgaagactggaggttcaggcgaagcttacgatattattgccgaggacattcagggcaccgtcttttttgcgggagaggccactaacagacatttcccccagacagtaacaggagcttacctctcaggtgtgcgcgaagcctctaagatagctgccttttag

SEQ ID NO: 122868 - DNA, 342 bp, synthetic construct
  misc_feature 1..342: note = Description of Artificial Sequence: Synthetic coding sequence
  source 1..342: mol_type = other DNA
atgagcgtcattgctggcgaggccgtggcatccgtcagaaccctcgatgataagcaggtgttacagcagtgcatggccacattgcgcgaactgtttaaggagcaggaggtgccagacccaactaaatatttcgtcaccagatggtcaacggatccctggatccagatggcctactcatttgtgaaaacgggaggatccggtgaagcttacgacatcattgctgaggatatccagggaactgtcttcttcgctggggaagccacaaatagacactttccccaaacggttacgggtgcttatctgagtggcgtgcgcgaagcatcaaaaattgctgctttttag

SEQ ID NO: 122869 - DNA, 3966 bp, synthetic construct
  misc_feature 1..3966: note = Description of Artificial Sequence: Synthetic coding sequence
  source 1..3966: mol_type = other DNA
atggtacttaccctgggcgagtcatggccggtgcttgttggccggcggtttctctccctcagcgcagccgacgggtctgatggaagccacgacagttgggacgtggagcgtgtggccgagtggccatggctcagcgggacgatcagagctgtgtcccacacagacgtcacaaagaaggatcttaaagtctgcgtggaattcgacggcgaatcttggagaaagagacgctggatcgaggtctatagtcttctacgccgggccttcctggtggaacataatctggtgttagccgagcgcaagagcccagaaatctccgaacggatcgtgcaatggcccgccatcacctacaagccactccttgacaaggccggtcttggttccatcacctcagtgagatttctcggcgaccagcagagagtgttcctcagcaaagacctcttaaagccaatacaggacgtgaactcactgcgactctctctgaccgataaccagatcgtgagcaaggagttccaggctctgatcgtcaaacacctggacgagtctcacctcctgaagggggataagaacctggtgggctccgaagtcaagatttacagcctggatccatcgacacaatggttctctgcaacagtgatcaacggcaacccagccagcaagacccttcaagtcaattgcgaagagatcccagccttgaagatagtggacccttccctaattcacgtggaggtggttcatgacaacctggtgacctgcggaaatagtgccagaataggggccgtgaagcgaaagagttccgagaataatggcacactggtatcaaagcaggccaaaagctgttccgaagccagcccgtcaatgtgccccgtgcagtctgtcccaaccacagtatttaaagagattctgctcggatgcactgctgctactccgccatcaaaggacccccgtcagcagtctacacctcaggctgccaatagccccccaaaccttggagcaaaaattcctcagggctgccataaacagtcactgcctgaagaaatctccagctgcctgaataccaaaagcgaggcgctccgaaccaaaccagatgtctgtaaggccgggctcctctctaaaagttcccagatcgggaccggcgacttgaaaatactgaccgagccaaaagggtcatgcacgcagccaaagaccaatactgatcaggagaatcgcctggagagcgtgccacaagcgctcacaggcctgcctaaggagtgtctaccgaccaaggccagctccaaagctgagctggagatcgccaacccccccgagctccaaaagcacctggaacacgcgccctccccctctgatgttagcaatgccccagaagtgaaagcaggagtaaattctgacagccctaacaattgcagcgggaaaaaagtcgaaccaagcgccctagcctgtcgctcacagaacctcaaagagtcatctgtcaaagttgataacgagtcctgctgttctcggtccaataataaaattcagaatgcaccaagccgtaaatcagtgctgaccgaccctgcgaagctaaaaaagctgcagcagtccggtgaggcatttgtgcaggacgactcctgcgtgaatatagtcgcccaacttccaaagtgcagagagtgtcgcctggatagcctgcgcaaagataaggagcagcagaaagactccccagtcttttgtagattcttccactttcggcgtctgcagttcaacaagcatggagtgctgcgagtcgagggctttcttaccccgaataagtatgacaacgaggctatcggattatggctgcctctgaccaaaaatgtcgtcggtatcgacctggacacggctaaatatatcctcgccaatattggcgaccacttctgccagatggtgattagcgagaaggaagcgatgtcgacaattgagccgcaccggcaggtagcttggaaacgcgccgtgaagggagttcgcgagatgtgcgacgtctgcgacactaccatatttaacctgcactgggtgtgcccgagatgtggattcggagtgtgtgtcgactgctatcgcatgaaaagaaagaactgccagcagggggctgcctataagacctttagctggctcaagtgcgttaaatcccaaatccacgaacctgagaatctaatgcctactcagattattccaggcaaggccttatatgatgtcggggacatcgtacattctgtgagagccaaatggggaatcaaagctaattgcccatgctctaatcgccaatttaagctgttctccaagccagcgtctaaagaagatctgaagcagacaagcttggctggggagaagccaactctcggtgccgtactgcagcagaatccctctgtgctggagcctgccgcagtgggcggagaggctgcttcaaagcctgctggcagcatgaagcctgcatgccccgcatctaccagtcccctgaactggttggcagacttgacctccggcaatgttaataaagagaataaggagaagcagccgaccatgcccatcttgaagaacgagatcaaatgtctccctccactcccgcccctgtcaaaaagttccaccgtgctccacacctttaattcaactattctgacaccagttagtaacaacaacagcggctttcttaggaatttgcttaattcatctacgggcaagactgagaacggcctgaagaataccccaaaaatattagatgatattttcgcatctctcgtccagaataaaaccacatctgacctcagtaagagacctcaggggttaactattaagccctcaattctgggcttcgacaccccccactactggctgtgcgacaaccggctcctgtgtctgcaggaccctaacaacaagtctaactggaatgtgttccgcgagtgttggaaacagggacaaccagtgatggttagtggggtgcatcataagttgaacagtgaactttggaaacctgagtctttccggaaggagttcggggagcaggaggtggatcttgtgaattgtcgcacgaacgagatcattacaggcgccactgttggtgatttttgggacggattcgaggatgtcccaaatcgcctgaaaaacgaaaaggaacctatggtgctcaaactgaaggactggccacctggcgaagattttcgggacatgatgccctctcggtttgacgacctgatggccaatatcccactgcctgaatacaccagacgcgacggcaaattgaatttagcctcccgcctcccaaattactttgtcagacccgacttaggcccaaaaatgtataacgcttacgggctaattacacccgaagaccgtaagtacggaaccactaacctgcatctggatgtcagtgatgccgccaacgtgatggtgtatgttgggataccgaagggacagtgcgagcaagaggaagaagtgctcaagacaatccaggatggggactccgacgagctgacaatcaagaggtttatagagggtaaggaaaaaccaggagccctttggcacatctacgccgcaaaggataccgagaaaatcagagagttcctcaagaaggtttccgaagaacaggggcaggaaaatcccgccgaccacgacccaattcatgatcagagctggtatctggacaggtcactacggaaacgactccaccaggaatatggggtccaaggatgggccatcgttcagtttttgggcgatgtcgtgttcatccccgcgggcgccccccatcaggtccataacttatatagctgcatcaaagtggctgaggattttgtgtctcctgagcatgtcaaacactgcttttggctcacccaggaattcaggtacttgagccagacacacaccaaccatgaggacaagctgcaagtcaaaaacgtgatataccatgccgtcaaggatgcggtcgcaatgctcaaggccagtgagagcagctttggcaagccatag

SEQ ID NO: 122870 - DNA, 3966 bp, synthetic construct
  misc_feature 1..3966: note = Description of Artificial Sequence: Synthetic coding sequence
  source 1..3966: mol_type = other DNA
atggttctcaccctgggcgaaagctggccagtgcttgtagggcgtcgctttctgagtctgtcagccgccgacggcagtgacggaagccatgactcctgggatgtggagcgcgtcgccgaatggccttggctgtccggaacaatccgggccgtaagtcacacggatgtcactaagaaagatcttaaagtgtgcgtagagttcgatggagaatcatggcgcaaaagacgttggattgaagtatacagcttgctccgccgtgcgtttcttgtcgaacataacctggtactggccgagcgaaagtccccagagatctcggagaggatcgtgcagtggcccgctataacgtacaagccactgctcgataaagcaggactagggtccataacgtccgtccgcttccttggagaccaacagcgagtcttcctcagcaaggatctcctcaagcctatacaggacgtcaacagcctgagactctctttgacggacaatcaaatcgtaagcaaagagttccaagcgctcatcgtcaaacacctggatgagagccacctgttaaagggagataaaaacctggtcgggagcgaagttaaaatatacagcctggatcccagtacccagtggttttccgctactgtaatcaacggaaacccagcatctaagacgctgcaagtgaactgcgaggagataccagcccttaagatcgtcgatcctagtctgattcatgtggaggtcgtacacgataacctggtcacttgtggtaacagcgcacgaatcggggctgtcaagcggaagtccagcgaaaacaatggcacccttgtatcgaagcaagccaagtcttgctctgaggcctctcctagcatgtgtcccgtgcaatccgtgcccacaacagtgtttaaggaaattcttttagggtgcacagcagcaacgccaccttcaaaagaccctagacagcaatctacaccacaggctgctaattcgccaccaaacctcggagctaagataccccaaggttgtcacaagcagtcactccctgaggaaatctctagctgtctgaatacaaagtcagaagctttgaggactaagcctgacgtgtgtaaagctggtttactgagcaagagctcacaaattggaaccggggatttgaaaatactgacggagcctaaggggagttgcacccagcccaagacaaacaccgaccaggaaaacaggctcgaaagcgtgccgcaggctctcaccggcctccccaaggagtgcctgcccacaaaagccagctcgaaggctgagttggaaattgcgaatcctcctgagctgcaaaaacatctggagcacgcgccttcacctagtgatgtgagcaatgctccagaggtgaaggccggagtcaattcggattcccctaacaactgttcgggcaagaaggtcgagcccagcgcattggcctgccgttctcagaacttgaaggagtcgagtgttaaagtagataacgaatcctgttgcagtaggtccaacaacaaaatacaaaatgctccaagccggaagtccgtgctgaccgacccagcgaagcttaagaaactgcagcagagcggcgaggcgttcgtccaggacgactcttgcgtcaatatcgtcgcacagttaccaaagtgtagggagtgcaggcttgactctctgagaaaagataaagaacagcagaaagactcccccgtattctgcaggttcttccactttcggaggctgcagtttaataaacatggggtgctcagagtggaaggctttctgacacccaacaaatacgataacgaggccatcggactgtggttgccactgacaaaaaacgtggtggggatcgacttagacacagctaagtacattttggcgaatataggcgaccacttctgtcagatggtgatttcagagaaggaggcaatgagcacgattgagcctcaccgccaggtggcatggaagcgggctgttaagggagtcagggagatgtgtgatgtctgtgacaccaccatcttcaacttacattgggtgtgccctagatgcgggttcggagtgtgtgtcgactgctatcgcatgaaacggaagaattgccagcagggcgcggcctataaaacctttagttggctcaaatgcgtgaagagccagatccacgagcctgaaaatctaatgcccacccagatcattccgggaaaagccttatacgacgtgggagatatcgtgcactctgtgagagctaagtggggcatcaaggccaattgcccatgttccaataggcaattcaaactgttttcaaaacctgccagtaaggaagatttaaagcaaacaagtctcgccggcgagaaacccacgctgggcgccgtgctacagcaaaatccgtcagtactcgagcccgctgccgtaggtggtgaggcggcgtctaagccggctggatctatgaaaccagcttgtcctgcaagcacatctcccctgaactggttggcggatctgacatctggcaacgtcaataaggagaataaagaaaaacagcctacaatgccgattctgaaaaacgagatcaaatgcctgccgccactcccaccgttgtctaagtcatctaccgtgctgcacacgttcaattctactatcttaactcctgtgtcgaataataactccggatttctccgcaaccttctgaattcatcaacgggaaaaacggaaaatggcctcaaaaacacccccaaaatattggacgacattttcgcgagcctggtgcagaacaagacaacctctgacctgtccaaacgcccacagggtttgacaattaaaccgagcatactgggatttgacacgccccactattggctatgtgacaacagactactctgcctgcaggatcccaataacaagagcaactggaacgtgttccgagagtgctggaaacagggccagcctgtcatggtgagcggggtacatcacaagctgaacagcgagctctggaagcccgagagttttcgcaaagagttcggggaacaagaggtggatcttgtgaactgtcggaccaatgagataattacaggagctactgtcggagacttttgggatggctttgaagatgtgccaaataggctgaagaatgagaaggaaccaatggtgctgaagctcaaggactggcccccaggagaggatttccgcgatatgatgccctcaaggtttgatgacctgatggccaacatacctctccccgagtatacgcgccgcgacggtaaacttaatctggctagtcgactaccaaactacttcgtccggccagacctgggccccaagatgtacaatgcctatgggttaattactcccgaagatcgaaagtacggaacgactaacttacatctggatgtaagcgatgccgccaacgtgatggtgtacgtgggcattccgaaaggtcagtgtgagcaagaggaggaggtcttgaaaactattcaagacggcgactccgacgaactcacgatcaaacgcttcattgaaggcaaagagaaacccggcgcactgtggcacatctacgctgctaaggacactgaaaagattagggagttccttaaaaaggtatccgaggagcaaggacaggagaacccggccgatcacgatccaattcacgatcaaagttggtaccttgaccgtagtttgagaaagagactgcaccaagagtacggcgtccagggctgggccatcgtccaatttctgggagacgtggtgttcattccagctggggctccacaccaagtgcataacttatattcatgcattaaggtcgccgaggatttcgtgagcccagaacatgtcaagcattgtttctggctcacccaggagttcagatatctctcccaaacccacacaaaccacgaggataagctccaggttaagaacgtgatctatcacgcagtgaaagacgcagtcgcaatgctgaaagcatccgagtcaagctttgggaagccctag

SEQ ID NO: 122871 - DNA, 3966 bp, synthetic construct
  misc_feature 1..3966: note = Description of Artificial Sequence: Synthetic coding sequence
  source 1..3966: mol_type = other DNA
atggtgctgaccctgggggagtcctggccagttctggtcggccgacgatttctgtcactgagcgcagccgacggctctgatggatcacacgacagttgggacgtcgagagggtcgcggaatggccctggctcagcgggacgattagagctgtgtctcacacagacgtgactaaaaaagatcttaaggtgtgtgtcgagttcgacggagaatcgtggagaaaacggagatggattgaggtgtattcactgctgcgccgcgcatttctggtggagcataatctcgtgcttgctgagaggaagtctccggagatcagcgagaggattgtgcaatggcccgctatcacttacaaacccctgttagacaaagcgggactgggctcgatcactagtgtacgatttctcggcgaccagcagagggtttttctctctaaggatctgttgaaaccaattcaagacgtgaactcactgcggctgtcattgacagataaccagatcgtgtcaaaggaattccaggctctcatcgtgaagcacttagacgagtcacatcttctgaaaggcgacaaaaatctggtggggtcagaggttaaaatctattccctcgaccctagcacacaatggttttccgcgaccgtgattaatggaaaccccgcgtctaaaacgcttcaggtgaactgcgaagagattcctgccctgaagattgtagatcccagcttaatccatgttgaagtggtccacgacaatctcgtgacatgtggcaactccgcccggatcggtgctgtaaaaaggaagtcctctgagaacaatggaacactggtatctaagcaggcgaaaagctgctcggaagcctcacccagcatgtgccccgtacagagtgttccgaccaccgttttcaaagaaatcctccttgggtgtaccgccgcgacaccaccttctaaggacccgagacagcagagcaccccacaagcggcaaatagccctcctaacctcggcgctaagatcccccaggggtgtcataagcaaagcctgcctgaagaaatttcatcctgtcttaatactaagtctgaagctcttcggactaaaccagacgtctgtaaggcagggttgctgagtaagtccagccagatagggacgggagaccttaagattctaaccgaaccaaaggggtcttgtacacagccaaaaacgaacacagaccaggaaaatagactggagtccgtcccacaagccctcaccggactcccaaaggaatgcctgcctaccaaggccagttcaaaggctgaactggagattgccaatcctcctgagctccagaagcatcttgagcacgcaccctctccctccgatgtgtctaacgctcccgaggtgaaagccggcgtcaatagtgacagcccaaataactgcagcgggaagaaggttgagccttctgccctcgcctgcaggtcccagaacttaaaggagagctcagtcaaggtggacaacgagagttgttgtagcaggtcgaataacaaaatacagaatgctccaagtcgtaagagtgtcctgaccgaccccgccaagctgaaaaagctccagcagagtggagaggccttcgtgcaggatgactcttgtgtgaacatcgttgcacagctcccgaagtgtagagaatgcagactggattccttgaggaaagacaaggaacagcagaaagacagccctgtgttctgccgtttcttccacttcagacggcttcagtttaacaagcacggtgtgttgcgagttgagggcttcctgacgccgaacaaatacgataacgaggcaattgggttgtggctgccgcttacgaagaacgtggtcgggatcgacctagatacagctaagtacatcctggctaacataggggaccacttttgccagatggtcattagtgagaaggaagctatgtctaccattgaacctcaccgacaggttgcatggaagagagcagtaaagggtgtgcgagagatgtgcgatgtgtgtgacacgaccattttcaatctgcattgggtctgccctaggtgcggctttggcgtgtgtgtagattgctaccgtatgaaaaggaaaaattgtcagcaaggcgccgcttacaaaacgttcagctggctaaaatgtgtcaagagccagatccacgagcccgaaaatttgatgccaacccagattatcccagggaaggctctctatgatgtcggcgatattgtgcacagcgtcagagcaaagtggggcatcaaagccaactgtccttgttcgaatcgacagttcaagttgttctctaagcccgctagcaaagaggacttgaaacagacctccttggccggggaaaaacctactctcggggccgtactgcagcagaacccttctgtactcgagcccgccgctgtcggaggcgaggccgcttccaagcctgcaggtagtatgaagcccgcatgtcccgccagtacaagccccttaaactggctcgccgatctgacatctggcaatgtcaataaagagaataaggagaaacagcctacgatgcctattctgaagaacgaaattaaatgcttgccccccctgccccccctcagcaaaagctccacagtcctgcataccttcaacagtacaattttgacaccagtgtccaataataactcaggctttcttcgcaaccttttgaattcctcaactggcaagactgagaacgggttaaaaaacacacctaagattcttgatgatatctttgcctccctagtccagaataagacaacatccgacctgagcaagcggccccagggcctgacaataaaacctagcatcctaggatttgataccccacattactggctgtgtgacaataggctattgtgcctacaggaccccaataataagtcaaactggaatgtttttagggagtgctggaaacagggtcagccagtgatggtgtcgggggtgcaccataagctgaatagcgagctgtggaaacctgaaagttttcgcaaggagtttggagaacaagaggtggacctcgttaattgtcgcactaacgaaattattactggtgcgacagtaggcgacttctgggacggatttgaagacgttcctaatcgattgaaaaatgaaaaggaaccaatggtgcttaagctgaaggattggccccccggcgaggattttagggatatgatgccatcgagattcgacgatctgatggctaacataccccttccagaatacactaggagggacggaaagttaaacctggcttcccgtcttccaaattattttgtgagacccgacttgggacccaaaatgtataatgcttatggacttatcacgccagaggacagaaaatacggcacaacaaacttgcacctagacgtgagcgacgccgcaaatgtgatggtctatgttggcatacccaaaggacagtgtgagcaggaggaggaggtcctcaaaacaatacaggacggagactccgacgagctcacgatcaagagattcattgagggtaaggagaaaccaggggcactgtggcatatctacgcagcgaaagacacagaaaaaatcagagagtttctaaaaaaggtgagtgaagaacagggccaggaaaatcccgccgaccacgacccaattcatgaccagtcctggtatcttgatcggtccctccgcaaacgcctccaccaggagtacggtgtgcaaggatgggctatagttcagttcctaggtgacgtggtgttcattccagcaggtgcacctcatcaggtacacaatctttattcttgtatcaaggtggccgaggactttgtaagcccagaacacgtgaagcattgcttctggctgacacaggaattccgctacctgtcccagacgcatacgaatcacgaggacaagttgcaggtaaagaatgtgatttatcacgccgtgaaggatgccgtcgctatgcttaaagcgtctgaaagtagtttcgggaagccttag

SEQ ID NO: 122872 - DNA, 513 bp, synthetic construct
  misc_feature 1..513: note = Description of Artificial Sequence: Synthetic coding sequence
  source 1..513: mol_type = other DNA
atggtactgaccctaggagaatcatggcccgtgctggtcggccgccggttcctcagcctgtcagcagccgacggctctgacggttctcatgactcctgggatgtagagcgtgttgccgagtggccgtggctgtctggaacgattcgtgctgtgtcacatacagatgtgactaagaaagatctaaaggtctgcgtagagttcgacggagaaagctggcgcaaaagacggtggattgaagtctacagcctactccgccgggcctttctggtagaacacaatctggtactggccgagcggaagtctcctgagataagcgagagaatcgtacaatggcctgccattacctacaaacccctcctggataaggctggcctggggtccataactagcgtcaggttcttgggggatcaacagagggtctttctgtcgaaggatctgttaaagccgatacaggatgtcaattccctccgtctgtctcttacagataatcagattgtcagtaaggagttttag

SEQ ID NO: 122873 - DNA, 2136 bp, synthetic construct
  misc_feature 1..2136: note = Description of Artificial Sequence: Synthetic coding sequence
  source 1..2136: mol_type = other DNA
atggtgctaacactgggagaaagttggcctgtattggtgggccggcgctttctttcgctgtccgccgccgacggcagtgacggctcacatgactcttgggacgtggaaagggtcgctgagtggccgtggttatccggtaccattagggctgtaagccacacagacgtaaccaaaaaggatctcaaagtctgcgtggaatttgatggtgaaagctggcgcaagagaaggtggatcgaggtttactccctgttgagacgtgcttttcttgtagagcataatttagttctggccgaaaggaagagtccagagattagcgaacgcatcgtgcaatggcctgccataacatataaaccccttctggacaaggctggcttgggtagtatcacatctgtacgcttcctgggcgaccaacagagagtattcttaagtaaagacctgctaaagccaatccaagacgtaaatagtctgcgactgtccctcacggacaatcagatcgtcagtaaagagtttcaagccctgatcgtgaagcacctggacgaaagccatctgctcaagggcgacaagaacctcgtggggtctgaagttaaaatctatagcctggacccgagtacccaatggtttagcgcgacggtaataaacggtaaccctgcttctaaaacactccaagttaattgcgaggagataccagccctaaagatcgtggatccctctctcatccacgtagaggtggtgcatgataacctggtcacttgcggaaactccgccaggattggcgccgttaaacgcaaatcaagcgagaataacggcaccttggttagtaagcaggctaaaagttgtagcgaggcttctccttctatgtgccccgttcagagtgttccaaccaccgtattcaaagagattctactcggctgcaccgcggcaacgcccccgtcaaaggatcctcgacaacagtcgacccctcaggctgcgaactcccctcccaaccttggtgccaagatccctcagggatgtcataaacaaagcctgcctgaagagatcagtagctgtttgaacacaaagtccgaagcactgagaacaaaacctgatgtgtgcaaggcgggtctgctctccaaatcaagtcagatagggactggtgacctgaaaatcttgacagagcctaaagggtcctgtacccaacctaagactaacactgaccaagagaaccggcttgaatctgtcccgcaggccttgaccggactgccgaaggagtgcctgccaacaaaagctagctccaaggctgagttagaaattgccaacccccctgagttacagaagcatctggagcatgcacctagtccaagcgacgtgtccaatgcccccgaggtgaaggccggagttaatagcgactcaccaaataactgtagtggcaagaaagtagagccaagcgctctggcgtgccgcagtcagaacctcaaggagtcaagtgtgaaggtagacaacgagtcatgctgttctaggtcaaataataaaatccagaatgcacccagtaggaagagtgttctcactgaccccgctaagttgaagaaattgcagcaaagcggtgaagccttcgttcaggatgattcatgtgtgaatattgtggcccagttgcctaaatgtagggaatgccggctggatagtctcaggaaggataaggagcagcaaaaggactctccggttttctgcaggttcttccacttccgtagactgcagtttaataagcatggcgtcctccgagtcgaagggttcttgaccccaaataagtatgacaacgaggcgatcggcctctggctccccctgaccaaaaacgtggtgggtattgacctcgacacggccaagtacatactggctaatatcggcgaccacttctgccagatggttatcagtgaaaaagaagccatgagtacaatagaacctcaccgacaggtggcttggaagcgggccgtgaagggagtccgggagatgtgcgatgtgtgtgacacaacaatctttaacttacactgggtttgccctcgctgcggcttcggggtttgtgtggattgttaccggatgaagaggaaaaattgtcaacagggcgaaaatagatttgattccccacccgctcccctccattcgtag

SEQ ID NO: 122874 - DNA, 366 bp, synthetic construct
  misc_feature 1..366: note = Description of Artificial Sequence: Synthetic coding sequence
  source 1..366: mol_type = other DNA
atggtgctgacccttggggagtcgtggcccgtcctcgttggccggcggttcctgagtctctccgctgctgacgggtccgacggctcacatgacagctgggacgttgagagggtcgccgaatggccatggctgagcggcaccatcagagcagtgagccacacagacgtcactaagaaggacctgaaggtttgtgtggaattcgatggagagtcttggagaaagcgacggtggatcgaagtatactcgctgttgagacgcgcttttttggtggaacacaatctggttcttgctgaacgcaagagccccgagatttctgagagaatagttcagtggcctgcaattacatataaacctctgctcgactag

SEQ ID NO: 122875 - DNA, 3984 bp, synthetic construct
  misc_feature 1..3984: note = Description of Artificial Sequence: Synthetic coding sequence
  source 1..3984: mol_type = other DNA
atggtgttgacgctcggcgaaagctggcctgtgctggtgggtcggagatttctttctctttccgctgccgatgggtccgatggcagccacgattcttgggatgtggagcgggttgctgagtggccttggctttctgggaccattcgagcagtgtctcacaccgatgttacaaagaaagatttaaaagtgtgcgttgaatttgacggagagagctggcgcaaacgacgctggattgaggtctacagccttttaaggagagcctttctggtggaacacaatcttgtactcgccgagcggaaatcccctgagatttcagagcgcatcgttcagtggcccgcaatcacctacaagcccctattggacaaagcaggactcgggtccattacaagtgtccgcttcctgggcgatcaacagagggtattcctcagcaaagacttgctgaaaccaattcaagacgtgaatagcctgcggctctctctcacagacaatcagatcgtctcaaaagagtttcaagcactgattgttaagcacttggacgagtctcatctcctcaagggcgacaagaacctcgtgggcagcgaggtcaaaatctacagtctggacccttctactcagtggttttctgctactgtgattaacggcaatccagcatcaaagacactgcaggttaactgcgaggagattcccgcattgaaaatagtggatccttccctgattcatgtcgaagtagtgcatgacaacctggtgacgtgcggcaacagtgcccgcataggtgccgtcaaaaggaagtcatccgagaataacggtacactggttagcaagcaagccaagtcctgttccgaggcgagcccttccatgtgcccagtgcagtccgtcccaactaccgtctttaaggaaattcttctgggatgtacggctgccacgcctccgtcaaaggacccccgccaacagtcaaccccacaggccgccaattcaccgccgaatcttggagccaaaatcccccagggttgccataaacagagcctccctgaagaaatttcatcctgtctgaatactaagtccgaagctctgcgaaccaagccggatgtctgtaaagcgggcctgctcagcaagagctcccagattgggacaggcgacctgaaaattcttaccgagcctaaaggcagttgcactcagcccaagacaaacactgaccaggagaataggcttgagtcagtgcctcaagccctgactggtttgccgaaggaatgtcttcctaccaaggcaagcagtaaggcagagctggagatagcgaatccgccagagcttcagaagcacctggagcacgcgcccagtcctagtgacgtgtccaacgctcctgaagttaaggccggtgtgaattcagactctcctaataattgctcgggaaagaaggtggaaccgtctgccctggcgtgtcgctctcaaaatctaaaagagagctctgtaaaggtggataacgagagctgctgctcccgcagcaataacaaaattcagaacgctccatcgcggaagtccgtcctaacggatcctgccaagttgaagaaactgcagcaaagtggagaagcatttgtgcaggacgattcatgcgtcaatattgtggcccagttacccaagtgtcgcgagtgccgactggattcactgagaaaggacaaagaacagcagaaagatagtccagtcttctgccgctttttccactttcgacgtttacagtttaataaacacggcgtgctcagagtagagggtttcttgaccccaaacaagtacgacaatgaggcaatcgggctctggctgcccctcacaaaaaacgttgtaggaatcgatctcgacactgctaaatatatcctggccaacataggcgatcatttctgtcagatggttatctcagagaaagaagccatgagtaccatcgagccgcaccgacaggtggcctggaaacgggcggtcaaaggtgttagagaaatgtgtgatgtctgtgataccactatctttaacctacactgggtgtgccccaggtgcggattcggcgtgtgcgtggactgctatcgcatgaagcgaaagaattgtcagcagggggcagcctataagaccttctcttggttgaagtgcgtgaagagtcaaatacacgaaccagagaaccttatgccgacacagattattccaggaaaggcactttacgacgtaggcgacattgttcactctgtgagggccaaatgggggataaaagctaactgcccctgttctaatcgacagttcaagttgttttctaagccagcatcgaaggaggatctcaaacagacatccctggcaggagagaaaccaactctgggggccgtgctgcaacaaaatccgagtgtgctcgagcctgctgctgtgggaggggaagctgcctccaagccagctggctcaatgaagcctgcgtgcccggctagcacatcacctctgaattggctggccgatctcacctcaggcaacgtcaataaggaaaacaaagaaaagcaacccactatgcccattctcaagaacgaaattaaatgcttaccccccctcccacctctctcaaaaagctcaacagtccttcacaccttcaattccaccatcctaacacccgtgagcaacaacaacagcggcttcttgcgcaacctgttgaacagctcaacaggaaagacagagaacgggcttaaaaatacacccaaaatcttagatgacattttcgccagcctggtgcagaataagaccacgagtgatttatccaagagaccccagggcttgactataaaaccaagcattctggggttcgacacaccccactactggctctgcgacaatcgactcttgtgtctacaggaccctaacaataagtccaattggaatgttttccgggagtgctggaaacaaggccagcccgtgatggtgtctggcgtgcatcacaagttgaattccgagttgtggaagcccgagtcttttcggaaggagttcggcgagcaggaggtcgacctcgttaactgtcggacaaatgagataataaccggcgctaccgtgggcgatttctgggacggatttgaagacgtgcctaacagactgaagaatgaaaaggagcctatggtgctcaagctcaaagattggccacccggggaggatttcagggacatgatgccatcccggtttgacgacctgatggccaatatacctctgccagagtacacccgccgcgatggaaagctgaatctggccagcagattacctaattactttgtacgtcccgaccttggacctaaaatgtataacgcgtatggcctcatcacacctgaggatcgcaagtatggaactacaaacctgcacctggacgtgagcgacgctgccaatgtgatggtgtatgtcggaatccccaaaggtcagtgcgagcaggaggaggaagtgctgaaaactattcaagacggcgactccgacgaattaaccatcaagcgattcatcgaaggtaaggagaagcccggggcactctggcacatctacgccgccaaggacacggagaaaataagggaattcctgaaaaaagtttcagaggaacagggacaagagaatccggccgaccacgatcccattcacgatcagtcgtggtacttggaccgcagtcttcgtaaaagactgcatcaggaatatggcgttcagggctgggctattgttcaatttttaggcgatgtggtgttcattccggccggagctccacatcaggtgcacaatttgtactcttgcattaaagtcgctgaggatttcgttagtcctgaacatgtcaaacactgtttttggctgacacaggaattcagataccttagccaaactcatacaaatcatgaagacaagctccaggttaagaacgtgatctatcacgctgtaaaggacgcagtggccatgttaaaggttaatcccgtgctggctaacctgaacctgcctgctcactggaaatag

SEQ ID NO: 122876 - DNA, 3810 bp, synthetic construct
  misc_feature 1..3810: note = Description of Artificial Sequence: Synthetic coding sequence
  source 1..3810: mol_type = other DNA
atggtgctcactctcggggaatcatggccggttctggtgggtcgtagatttttgtctctctcagccgctgacgggagcgacggcagccacgactcctgggacgtagagcgtgtggccgaatggccctggctcagcggcacaatccgagcggtgtcccatactgacgtgactaagaaagacctaaaaacatacaagcccctgctggataaggccggactgggatccatcacgtctgttaggtttcttggcgatcaacagcgcgttttcttaagcaaagacctgttgaagccgatccaggatgtcaacagcttacgcctgtctctgactgacaatcagatagtgtccaaggagtttcaggctttgattgtcaagcacttggacgaatctcacctcctgaaaggagacaagaatctagtggggtcagaggtgaagatctattctctggaccccagtacacagtggttcagcgctactgtcattaacgggaacccagctagcaagaccttgcaggtaaattgcgaagaaatacctgctctgaaaatagtcgatccaagcctgatacacgtggaagtagtgcatgacaacctagtcacatgtgggaacagcgctcgtattggggccgttaaacgaaagtcgagcgaaaacaatggtactttagttagcaagcaggctaaaagctgttctgaggccagccccagtatgtgtccggtgcaatctgtgccaacgacagtattcaaagagatccttctgggctgcaccgcggccacaccaccctctaaggacccgaggcaacagtctacccctcaagcagcaaattctccccctaatctcggagccaagatcccccagggctgccataagcagagtctgcccgaggaaatctcctcttgtctgaacaccaagtctgaagccctcaggaccaagccggatgtgtgtaaagccggactgctctccaaaagctctcagataggaaccggcgacctgaagatcttgaccgagcctaaaggaagttgcacccagccaaaaacaaacacagatcaggaaaatcggctagagtctgtgccccaggcactgacgggtctcccaaaagagtgtcttccgacaaaagcttcgagtaaggcggaattagaaatcgcaaatcccccagagctgcagaaacacctggagcatgctccatcgcctagcgatgtttccaatgcacctgaagtgaaggccggagtgaactctgactcccctaacaactgctctggcaaaaaggtggaaccgtccgctcttgcatgtaggtctcagaacttgaaggaaagctcagtaaaagtggacaatgagtcctgctgctcccgttcaaataataagatccaaaacgccccctcaagaaaatccgtcctgaccgatcccgctaaattaaaaaagctgcaacagtccggagaggcctttgtgcaagatgacagctgtgtcaacatcgtagcccagctccccaaatgccgggagtgccggcttgattctttgaggaaggacaaagagcagcagaaggactctccagttttctgcaggtttttccatttccgtcggctacagtttaataagcatggagtacttagagtggagggatttctgacaccaaataagtacgacaacgaagcaatcgggctttggttgccccttacaaaaaacgtggtgggcatagaccttgacactgctaagtatatcttagctaacattggagatcatttttgtcagatggtgatctccgaaaaggaggccatgtcaaccatcgaaccacacagacaggtagcatggaaacgggcagtgaaaggcgtgcgggagatgtgcgatgtttgtgatacaacaatcttcaacctccactgggtgtgccctcgatgcggcttcggagtgtgtgtggattgctaccgaatgaagcgcaagaactgccagcagggggccgcatataaaactttctcatggctgaagtgcgtgaaatcccagattcacgaaccagagaatctaatgccaactcagattataccaggcaaagccctttacgacgtgggtgatatcgtgcactcagtaagggccaaatgggggatcaaagctaactgcccatgcagcaacagacagttcaaattgttttctaagcctgcttctaaagaggaccttaaacaaaccagtctggccggagaaaagccgaccctgggcgccgtgctgcagcagaatccttccgtgctggaacccgccgctgttgggggggaagccgcctccaagccagcagggtcaatgaagcccgcgtgtcctgccagcacttccccactgaattggcttgccgatctgacttcaggcaatgtgaacaaagaaaataaggaaaaacagcccacgatgcctattctgaaaaatgaaatcaagtgtctccccccgctgcctccactctctaagtcaagtacggttctgcacacgtttaattccacaattttaactcccgtgtctaacaataatagcggtttcctccggaatctcttgaatagctcaactggcaaaaccgaaaacggacttaaaaacacccccaaaattttggatgacattttcgcctctctcgtccagaataaaactacaagcgatctctctaagagaccacaggggctgactattaaaccctccattctcggctttgacacccctcattactggctctgcgataatcgcctactgtgtctgcaggaccctaataacaagtcaaattggaacgtgtttagagagtgttggaaacaggggcagcctgtgatggtaagtggagtccatcataagctgaactctgaactctggaagccagaatcattccggaaagagtttggagagcaggaggtggatcttgttaactgcagaactaacgaaattatcactggggccaccgttggcgacttctgggacggcttcgaagatgtccctaataggctgaaaaacgaaaaagagcccatggtactgaagctcaaggattggccgcccggggaagatttccgggatatgatgccttcccggtttgatgacctgatggctaatatccctctaccagaatatactagacgggacggtaaactaaacttggccagtaggctacccaactacttcgtgaggccagatttaggccccaaaatgtacaacgcttacggcctgatcacccccgaggatagaaagtacggaaccactaacctccatcttgatgtgtcagatgctgcaaatgtgatggtgtacgtgggcatcccaaagggtcagtgcgagcaggaggaggaggtgttgaaaaccattcaggacggcgattccgacgagctcaccatcaagaggttcatcgaggggaaggagaagccaggagccctgtggcatatctatgcagcgaaagacaccgagaagatcagagaattcctcaaaaaagttagcgaggagcaaggccaagaaaatccagccgaccacgaccctatacatgatcagtcctggtaccttgatagatcgttgcgcaaacgtttgcaccaggagtatggcgttcagggctgggcgattgtccagtttctcggcgatgtggtatttatccctgcaggagccccacaccaggttcacaatctttatagctgcattaaagtggcggaggacttcgtgtcccctgaacacgttaaacattgcttttggttaactcaagagttcaggtatctttcccagacacacaccaatcatgaagacaagctgcaggtgaaaaacgtgatataccatgccgtcaaagatgcagtagctatgctgaaggcatctgagtctagttttgggaagccctag

SEQ ID NO: 122877 - DNA, 5286 bp, synthetic construct
  misc_feature 1..5286: note = Description of Artificial Sequence: Synthetic coding sequence
  source 1..5286: mol_type = other DNA
atggctgatgccgcggcaagccctgtgggcaaacggttgctcttgctgttcgcggataccgcagcttccgccagcgcaagcgcccctgctgctgcagccgccagcggcgacccggggcctgcgttaagaacacgggcctggagggctggcactgtgagagctatgtcgggtgccgtgcctcaggatctcgctatcttcgtagaatttgacgggtgtaattggaagcagcattcgtgggtgaaggttcatgccgaggaagtgattgttctacttctggagggaagtctcgtctgggccccccgggaggatccagttttgcttcagggaatccgcgtcagcatagctcagtggccagctttaacttttacgccccttgttgataaactaggactcgggtccgtcgttcctgtggagtatttgctggatcgcgagctcaggttccttagtgacgctaacgggctgcatctgtttcagatggggaccgattcgcaaaaccagattctgctcgaacacgctgcccttagagaaaccgtgaacgccctgatctccgaccaaaaactgcaagagattttcagccgcgggccgtactctgtacagggacaccgcgtgaagatctaccaacctgagggagaggagggatggctgtacggtgtcgtgtcacaccaggactctattactcggctgatggaagtgtctgttactgagtccggtgaaatcaagtcggtcgatccccgattgatccacgtgatgttgatggataattctgccccccagagcgagggcggaacactcaaggcagtcaaatcctcaaaggggaaaaagaagagagagtcaatcgagggaaaggacgggcggcggagaaagtcagcatcagattccggttgcgaccccgctagtaagaagctgaagggcgatcgcggagaggtggactcgaacggctctgacggtggcgaagcttcccggggtccttggaaaggcggaaatgcctccggcgagcctggcctcgatcagagggccaaacaaccgccatctacctttgtacctcaaattaacagaaacattcgcttcgccacatataccaaggaaaatggcaggaccttagtggttcaggatgaaccggtgggaggcgatacaccggctagctttactccgtattctaccgccaccggccaaacacctctggccccagaggtgggcggggcggaaaacaaggaggcgggaaagaccttggagcaagtgggccagggcattgtggcgagtgcagcagtggtcacaacagccagcagcacacctaacactgtgcgcataagcgacacaggactggctgccggaaccgtccctgagaaacagaaggggtcaaggagtcaagcttccggcgaaaacagcaggaactccatcctcgcttcatcaggctttggcgctccactgccatcttcatcacagccactgactttcggctcggggcgctcccagtcaaatggggtcttggctacagagaataagcctctaggatttagcttcggctgtagcagtgcccaggaggcccagaaagataccgatctgagcaagaatctgttttttcaatgtatgagtcagactctccctaccagtaattacttcacgactgtctctgagtcccttgcagatgactcctcttcccgcgattctttcaaacagtccttggagtcactgtccagtgggctctgcaaaggccggtcagtcttgggcacagacacgaaacccggctctaaagctggctctagcgttgatcgcaaagtgcccgccgagtctatgcctaccctcacacccgcctttcctcggagcctgttgaacgcgcggacacctgagaatcacgagaatttgtttctccagccccccaagctgtctagggaggaacccagcaaccctttccttgcctttgtggaaaaggtggaacatagccccttcagttcattcgccagtcaggcctccggcagctcctctagcgcaaccactgtgacatctaaagtggccccgtcctggccagagtcccacagtagtgctgacagtgccagtctcgcaaaaaaaaaaccgctcttcattactaccgactccagtaagctggtatccggggtgctgggatccgctctgacttccggaggaccgtcgctgtccgccatgggtaacggtagaagctcatccccaaccagttcacttactcagcccatcgaaatgcccacactcagtagcagccccaccgaagaacgccccaccgtcggcccaggacagcaggataaccctctcctgaagacatttagcaatgtcttcggccgtcatagcggaggatttttaagttcccccgccgactttagccaggagaacaaagctcccttcgaggccgtcaaacggttctcacttgacgaaagaagtctggcatgccgtcaggattccgattccagcacgaatagtgatttgtccgacctctccgatagcgaggagcagctgcaggctaaaactggactgaaagggattcccgaacaccttatgggaaaactggggccaaacggcgagagatctgcagaacttctgctcgggaagtctaagggtaaacaagcacctaagggtagacctaggactgctcccctcaaagtagggcaaagtgttcttaaggacgtgtctaaggtcaaaaagctaaaacaatcgggtgaaccgttcctccaagatggatcatgcattaacgtggcccctcacctgcacaaatgcagggagtgtaggctcgaacgataccgaaaattcaaggagcaggaacaggacgactccacagtggcttgccggtttttccatttccggcggctcatcttcaccaggaagggcgtactgcgcgtagagggattcttgagccctcagcagagcgatcccgacgccatgaatctgtggatccccagcagcagccttgccgagggcatcgacctcgagacctccaagtatattctagctaacgtgggagaccagttttgccagcttgtgatgtctgaaaaggaagcaatgatgatggttgagccccaccagaaagttgcatggaagagagccgtgagaggcgtccgggagatgtgtgacgtctgtgaaactactttattcaatatacactgggtgtgcagaaagtgcggcttcggcgtctgcctggactgctatcgtctcagaaagtcaaggcctagaagtgagactgaagagatgggcgatgaagaggtgttctcctggctcaagtgcgcaaagggtcaaagccacgagcctgagaacctcatgcccacacaaattattcccggaactgctctgtacaacatcggagacatggtgcatgctgcaagagggaaatggggcatcaaggccaactgcccctgtatttcacggcagaacaagtccgtgttaagaccagccgtcactaacggcatgagccagttaccatctatcaatcctagtgcctcgtcagggaatgagacaacctttagcggcggaggtgggcctgccccagttacaactcccgaacctgatcatgtacctaaagcagacagcactgacattcgatcagaggaaccgcttaagacggattccagcgccagtaatagtaatagcgaactgaaagctatcaggcctccatgtcctgatactgcgcctcctagcagcgccctccactggctggccgatctggcgactcagaaggctaaggaagagacaaaggaggcaggctcgcttcggagtgtgttaaacaaggaaagccatagtccctttggactcgacagctttaatagcaccgcaaaagtgtccccactgactccaaaattgtttaactcactacttctgggaccgaccgccagcaacaataaaaccgagggttcttcccttcgcgatctgctgcactccggtcccggaaaattgccccagacccccctggacacgggaatcccattccctccagtgttctcaacatcttctgccggagtcaagtctaaggcctccctgccaaactttttggaccatatcatcgccagcgtggtcgagaataaaaagacatctgatgcctccaagcgcgcctgcaatctgaccgacacccagaaggaggtgaaagaaatggttatgggccttaacgtgcttgaccctcatacaagccactcctggctgtgcgacggccggctcttatgcctacacgatccaagcaacaagaacaattggaaaatttttcgagagtgttggaagcagggccagcctgtgctggtctccggtgtccacaagaagctgaagtcggaattatggaaacctgaggcgttttcccaggagttcggagaccaggatgtggacctggtgaattgcaggaactgtgccattatttctgacgtcaaggtgcgcgacttctgggacggcttcgagataatttgcaaacgactgcgttctgaagatggccagcccatggtgctgaagctaaaagattggccaccaggtgaagacttccgcgacatgatgccgacacgatttgaagatctaatggaaaatctaccattgccagaatacaccaagcgtgacgggagactcaatctggcaagccgtttgcctagctattttgtacgacctgatctcgggcccaaaatgtacaacgcctatggcctgatcaccgccgaggatcgaagagtgggaaccacaaatttgcatctggatgtgtccgatgctgttaatgttatggtgtacgtggggattccaattggagagggggcccacgatgaggaagtgcttaagacaatcgacgaaggcgatgctgacgaagtgaccaaacaaaggattcatgacggtaaagaaaagcctggagccctctggcacatctatgctgcaaaagatgcggagaaaatccgggagctcctgcgtaaggtgggggaggaacagggacaggaaaacccccctgaccatgacccaatccacgaccagtcatggtatctcgaccagaccctcaggaagagactttatgaggagtacggagttcaaggctgggccatcgtacaatttttaggcgacgcagtgttcatccctgcaggggcgccccatcaggtccacaacctctattcttgcataaaggtggccgaggacttcgtaagtcctgagcacgtcaagcattgttttcggctgactcaggagttcagacacctgagcaatacccacacaaaccatgaggacaaactacaggtcaaaaatatcatctaccatgcagtgaaggatgctgtaggaaccctgaaggctcatgagtctaaacttgcaagatcctag

SEQ ID NO: 122878 - DNA, 4254 bp, synthetic construct
  misc_feature 1..4254: note = Description of Artificial Sequence: Synthetic coding sequence
  source 1..4254: mol_type = other DNA
atgggtgcaatggagataaatcggaatattagattcgccacctatacgaaggaaaatgggcggactctcgtcgtgcaggatgaaccagtggggggggatacacccgcctctttcaccccctatagcactgcaaccggccagacacctttggcccccgaggtggggggagctgaaaacaaggaagcgggaaaaaccctagagcaggtgggacagggaatcgtggccagtgcagcagtagtgacaaccgcatcctccacgccaaacaccgtgaggatttccgacaccggcctcgccgcgggtacagttccagagaagcagaagggctctaggtcacaggcctctggagaaaactccaggaacagtatactggctagctctggattcggcgcaccactgccgagctctagccagccactgacctttggctcaggacggtctcagtctaacggagtcctggctacagagaataaaccgttgggtttttcattcggttgtagttctgctcaggaggcacagaaagacactgacctgagcaagaatctttttttccagtgcatgagccagaccctcccaacttctaactactttacgaccgtgagcgagtccttggcagatgattcatctagtagggattcttttaagcagtccctggagtccctatctagcggcttgtgtaagggtaggagtgtcctgggaactgacaccaagcctggttcaaaggctggatcatctgtcgaccgtaaagtacctgcggaaagtatgcccacactgacacccgcgtttccccggtcactgctgaacgcgcgaactccagaaaatcacgaaaacttgttcttgcaacctcccaagctgtctcgagaggagcccagtaatccattcctcgcctttgtcgagaaagtggagcactcaccgttctctagctttgcctctcaagcaagtggatcctcaagctcagctacaactgtcacttcaaaagtggcaccatcttggccagaatcccactcgagtgccgacagcgcaagtctcgcaaaaaagaaacctctgttcatcaccacagatagttcaaaactagtgtccggcgttctgggatctgccctcacttccggtggtccttctctcagtgctatggggaacggacgcagctcctccccaacatcatccttgacacagcccatcgaaatgccaactctcagctcgtctccaaccgaggagagaccaactgtgggccctggacagcaagataatcccctgctgaaaacctttagtaatgtgtttggccgccactccggggggtttctcagtagcccagcagatttcagtcaggagaacaaggcccctttcgaagcagtgaaaaggttttccttagacgaacggagtttggcttgccggcaggattctgacagttccaccaatagtgatctatctgacctgtccgattccgaggagcagctgcaggccaaaacagggttgaaggggattccagagcacctgatgggaaagctaggtcctaatggagagcgatctgcggaactgctgttgggaaaatctaagggaaaacaggcccccaaagggaggccaaggactgcacctcttaaagtggggcaatcagtgctgaaagatgtgagcaaggttaaaaagcttaagcagagcggagagccttttttacaggacgggagctgcatcaatgttgcacctcacctgcacaagtgccgggagtgtaggttagagcgctatcggaagtttaaagagcaggagcaggatgactctacagtcgcttgtaggttttttcatttcaggcgactgatcttcacccggaagggtgttctcagagtggaaggcttccttagtccccaacagtccgatcctgatgccatgaacctatggattccctcatcctccctggcagagggaatcgacctggagacaagcaaatacattctggccaacgttggcgaccagttttgccagctggtcatgtccgaaaaggaggcaatgatgatggtggaaccacaccagaaagtagcgtggaaaagggcagtgagaggggtccgggagatgtgcgacgtgtgcgagacaacactgttcaacatccactgggtgtgccgcaaatgtggtttcggagtttgcctcgactgctaccgccttcggaaaagcagacccagatcagagacagaggaaatgggtgacgaggaggtgttctcttggctgaaatgcgccaaggggcagagtcacgagcccgagaacttgatgccaacacagattatccctggcaccgcgctctacaacatcggcgatatggtgcacgccgcgcgggggaagtggggcatcaaggccaattgcccctgtatctcaaggcagaacaagtccgtactgagacctgctgttacaaatgggatgtctcagctccccagcattaatcccagcgcttcctctggcaatgagaccactttctccggcggtggaggacctgcacctgtgaccaccccggagcctgaccatgtccctaaggccgatagcactgacatcagatccgaggagccccttaaaactgactcctcagccagcaactccaatagcgagctcaaggcaatccggccaccttgcccagacactgctcccccctctagtgctttgcactggctggccgatttggccactcagaaagcaaaggaagaaactaaagaagccggctcactccgtagcgttcttaacaaggagagccattctcctttcgggctcgactcatttaactcaaccgccaaagtttccccgctgacaccaaaactctttaacagtctcctcctgggacctactgcctctaacaataagaccgagggttcctccctcagagacttgttacactctggccctgggaaattaccgcagacgcccctggatactggtattccattcccacccgtattcagcacctcctctgctggcgtgaaatctaaggcgtctctcccaaatttcttggatcacatcatagcctctgtcgtcgagaataagaaaacctctgatgcatcgaagagggcatgcaatctcaccgatactcagaaagaagtgaaagagatggtcatgggcttgaatgtgctggacccacatacaagccattcttggctgtgtgatggtagactcctgtgcttgcacgacccaagcaataagaataactggaagatctttcgtgagtgttggaaacagggccagccagtactggtctccggagtgcacaagaagctcaaatccgagctgtggaagcctgaggcattttctcaggagttcggcgaccaggacgtggatctggtgaattgtaggaactgtgccatcatctcagacgtaaaggttagagacttctgggacgggttcgagatcatctgtaagagactgagatcagaagatgggcagccaatggtgttgaagctgaaagattggcctcctggagaggactttcgcgacatgatgccaactcggttcgaagacctcatggaaaatttaccgcttccagagtacactaagcgcgatggtcggctcaatttggcatcccgacttccctcttacttcgtccggcctgaccttggaccgaaaatgtataacgcctatggccttatcacggcagaggataggcgagtggggaccaccaatctacacttagacgtgtcggatgcggtaaatgtgatggtgtatgtgggtattcctattggggaaggggcgcacgacgaagaggtgctcaaaacaatcgacgagggcgacgccgacgaggtgacgaagcagcgaatccacgatggcaaggagaaaccgggtgctctgtggcatatctatgctgctaaggatgccgagaaaataagggaactcttgcggaaggtcggggaggagcaggggcaggagaacccccctgatcacgaccccattcatgatcagtcgtggtacctggaccagactctacgaaaaagactttacgaagaatacggcgtgcagggttgggccatcgtgcagttcctaggggacgcagtgttcatcccagccggtgcccctcatcaggtgcacaacctctactcatgtatcaaggtagccgaggactttgtgtcacctgagcatgtgaagcattgctttaggctcacccaggagttccgacacctgagtaatacccataccaaccatgaagataagttacaggtgaaaaacatcatctatcacgctgtgaaagacgcggtggggacactcaaggcacacgaaagcaagctagcacggtcctag

SEQ ID NO: 122879 - DNA, 2382 bp, synthetic construct
  misc_feature 1..2382: note = Description of Artificial Sequence: Synthetic coding sequence
  source 1..2382: mol_type = other DNA
atgaatctttggatccccagctccagtttggctgagggaattgacctggaaacctcaaagtatatactcgctaacgtcggggaccagttctgtcaactcgtgatgtccgagaaggaggccatgatgatggtcgagcctcatcaaaaggtcgcttggaaaagggcagttcgtggagtcagggagatgtgtgacgtatgcgagaccaccttgttcaatattcattgggtctgtcggaagtgcggattcggggtgtgccttgattgctaccgcctccgtaagtcacggcctcgcagcgagactgaggaaatgggcgacgaagaggtgtttagctggctgaagtgtgcaaagggccagagccacgagcccgaaaaccttatgccaacgcaaatcatccctggaacggctttgtacaatatcggtgacatggttcatgccgccaggggcaagtggggaataaaggcaaactgtccctgcattagcagacagaataagagtgtccttcgaccggccgtaaccaacggaatgtctcaactgccatcaattaatcctagcgctagcagcggaaatgaaactacctttagtggcggaggtggccccgctccagtgacaactcctgagcccgatcacgttcctaaagctgattcaacagacattcgatcggaggagcccctcaaaaccgacagctccgcttccaatagcaattctgagcttaaggctatcagacctccatgcccagacacagcaccgccgtcatccgcgctacactggctggcggatcttgctactcagaaggctaaggaggaaacaaaagaggccggttctcttcgatccgtcctaaataaagagagccattctccttttggactggatagctttaatagcactgctaaggtgagtcccctgactcccaaacttttcaacagcctactcctggggcccactgcatctaataacaagacagaaggtagtagtctccgtgacctcctgcactctgggcccggcaagctgccccagactccactcgacaccgggatcccgttcccacctgtttttagcacatccagtgccggggttaagtctaaagcctctttacctaactttctggatcacataatcgcttctgttgttgaaaacaagaagaccagtgatgctagcaaaagagcctgtaacctgactgacacccagaaggaggtgaaagagatggtgatgggcttgaatgtactcgatccacacacatcacactcctggctgtgcgacggacgtctgctgtgcctgcacgaccccagcaataaaaataattggaaaatatttcgagaatgttggaaacagggtcagccggtcctcgtgagcggggttcacaaaaagcttaaatcagaactgtggaagcccgaggcgttttcacaggagttcggcgaccaagatgtcgatttggtgaactgtaggaactgtgccatcatcagcgatgttaaggtcagagacttctgggacggctttgaaatcatttgtaagaggctgcgcagtgaagacggccagcccatggttctgaagctgaaggattggccccccggcgaagactttcgggatatgatgcccacacggtttgaggacttgatggaaaatttgccactgcctgaatataccaagcgcgacgggagactcaacttggcaagccggctgccgagctattttgtgcggccagacctcggtccaaagatgtacaatgcctacggactcattaccgcagaagatcgacgggtggggactaccaatctccacctcgacgtcagcgatgctgtcaacgttatggtctatgtcggaatccctatcggcgaaggagcacatgatgaggaggtgttgaagacaatcgacgaaggcgatgccgatgaagtgaccaaacagagaatccatgatggcaaagagaagccgggcgccctctggcacatttacgcagcaaaagatgcagagaagatccgcgagcttcttcgaaaggtgggcgaagagcagggtcaggagaaccccccagatcacgatccgatccacgatcaatcatggtatttggaccaaacgctgcggaagcgactttacgaggagtatggcgtgcagggttgggcaatagtgcagtttctgggagatgcagtgtttattccggcaggggcccctcatcaggtccataatctctatagttgcattaaggtcgccgaagatttcgttagccctgagcacgtcaagcactgcttcaggctgactcaggaatttaggcacttgtcaaacactcacactaaccacgaggacaagctgcaagtcaaaaatatcatttatcacgccgtcaaggatgcagtggggactctgaaggcccatgaatctaaactcgccaggtcatag

SEQ ID NO: 122880 - DNA, 4656 bp, synthetic construct
  misc_feature 1..4656: note = Description of Artificial Sequence: Synthetic coding sequence
  source 1..4656: mol_type = other DNA
ggctggaggtggctctacggcgtggtgagccaccaggatagcattaccaggttgatggaggtctccgtgaccgagtccggtgagattaaatctgtagatcctaggttgattcatgtgatgttaatggataactccgctcctcagagtgagggcggtacccttaaagccgttaagtcatctaagggcaagaaaaagcgggagagtatcgagggaaaagacggaagaaggcgcaagtcggccagcgattcagggtgcgatccagcctcaaagaagctgaagggggatagaggcgaggttgattccaacggtagcgatggcggtgaggctagtcggggcccctggaaaggagggaacgcaagcggcgaacctggtctggaccaacgggcgaaacagcctccgtctacctttgtccctcagattaacaggaacatccgtttcgccacatataccaaggagaatggtaggactttggttgtacaagacgagcctgtgggaggcgacactccagcttcatttacaccctattctaccgcaactggacagactcccctggcccccgaggtgggaggagccgaaaacaaggaggcaggcaagaccctcgagcaagtggggcagggtatagtagcaagcgcggcagtggtgactacggcttccagcactccaaataccgtccgcattagtgatacggggttggctgcaggaactgttccagaaaagcagaagggctcacgcagtcaggcaagtggcgagaactcacgcaactccattctcgcgtcctccggcttcggagcccccctcccaagttccagtcaacctctcacattcggctcgggccgctcacaatcaaatggggtccttgctacagagaataagcccttaggcttttcttttggatgtagcagtgctcaggaagcacagaaagatacagacctgtcaaaaaatttatttttccagtgcatgagccagactctcccaactagcaactacttcacaactgtgtctgagagcctcgcagacgatagttcgagcagggacagttttaaacagagtcttgagagcttatcctccggcctctgcaagggcaggagtgtcttgggcactgatacgaagcctgggtctaaagctggttcctcagtggacagaaaggtgccagccgaaagcatgcccacgctgacacccgccttcccccggagcctgttgaatgctcgcacaccagagaatcacgaaaatctctttctccagccaccaaagctgagccgggaggaacctagtaatccctttcttgcctttgtcgagaaggtggaacatagcccattctcatcttttgccagccaggcttccgggagctctagttctgctactacggtcacttctaaagtggccccctcatggcctgagagccactctagcgctgattctgcttctctggcaaagaagaaacccctcttcatcacaaccgactcgagtaagctggtaagtggcgtgctgggaagtgccctgactagcggagggccatccctcagcgcaatggggaacggccgatccagcagtcctacttctagtttgacgcagccaatagagatgccaacgttgagttcttctcctacagaagagcgaccaaccgtcgggccaggccagcaggacaacccccttctgaaaacattctcaaacgtcttcggacgccatagtggaggctttctctcatcccccgctgatttcagtcaagaaaataaggccccatttgaggccgtaaagagattttctctggatgagcggagcctcgcctgtcgtcaggacagcgattctagcactaattcagatctaagcgatctttctgattccgaggagcaactacaggccaagacaggattaaagggcatacccgaacacttgatgggaaagctcggaccaaacggagagcgtagcgcagagcttttactcgggaagtcaaagggaaaacaagctcctaagggccgtccgaggacggctcctttgaaggtagggcagagcgtgttaaaggacgtctcaaaagtgaagaagctgaaacaatcaggcgagccttttctccaagatggttcctgcataaacgtagcgccacacttgcataagtgcagagaatgccgcctggagagatacaggaaattcaaggagcaggagcaggacgacagcacagtcgcgtgtaggttctttcactttcgcaggttgatttttaccagaaaaggcgtgctgcgagtagaaggatttttgtcccctcaacaaagcgatccagatgctatgaacctctggatccccagctctagcctggcggagggcatcgaccttgagacatcaaaatacattttggctaacgtgggagaccagttctgtcaacttgtaatgagcgagaaagaggcaatgatgatggtcgagccccaccaaaaggtggcatggaaacgggccgtcaggggggtcagagaaatgtgtgatgtttgtgagaccacgctattcaacattcattgggtttgtagaaagtgtgggtttggggtatgtcttgactgctataggctgagaaagtcccgcccacggagcgaaacagaggagatgggtgacgaggaggtgttttcttggcttaagtgtgccaaaggacaaagtcacgagcccgaaaatttgatgcccacgcaaattattccgggaaccgcgctgtataacatcggagacatggtccacgcggcaaggggaaagtggggaattaaagccaattgcccctgcatttcccgtcagaacaaaagcgtgctgcgaccagctgttactaatggaatgtcgcagcttccctccatcaatccatcagcgagctctggaaacgagactaccttttcgggtggcggaggcccggcacctgtaaccaccccggagcctgatcacgtgccaaaggccgatagtactgacattcgcagcgaggaacctctgaaaacagattcgtctgcctcaaacagtaattcagagttaaaggcaattcggcctccctgtcccgatactgcccctccctcatcagctttgcattggttggcagacctggccactcagaaagcgaaggaggagaccaaggaggctggctcactgaggtctgtgttgaataaagaatcgcacagccctttcgggctggattccttcaatagcactgctaaggtctctccgctgactcctaagcttttcaactcactactacttggtcctaccgcttccaataacaaaacagaagggagttctctgcgagatctgttacattccggcccagggaaacttccacaaacccctctagacaccggtatcccattcccacccgtgttctcaacttctagcgctggcgtgaagtcaaaggctagtcttccgaacttccttgatcacattatagcatccgtggtcgagaataaaaagacgagcgacgccagtaaaagggcctgtaatctcacggatacacagaaggaggtcaaggaaatggtgatgggactgaacgtcctggatccccatacaagccattcttggctgtgtgatggtaggctcctgtgtctccatgacccgtccaacaagaacaattggaaaatttttagggaatgctggaaacagggacagccagtgttggtgtccggagtccataaaaaactcaagagcgagctgtggaagcctgaagccttcagtcaggaattcggagaccaggatgtggatcttgttaactgccggaactgcgctatcatcagtgatgtgaaggtgcgcgacttctgggatggtttcgagattatttgtaagaggttgcggagcgaggacggacagcccatggtattgaaactcaaagactggccacctggagaggattttagggatatgatgccaacacgcttcgaggacctcatggaaaatttgccactgccagaatacacgaaaagggacgggaggctcaacttggctagtaggctgccctcatactttgtaagacctgatctgggtcccaaaatgtacaacgcctatggccttatcacagcggaggaccgccgagtgggcacaactaacctccaccttgatgtgtctgacgcagtcaacgttatggtgtatgtcgggattcccatcggagaaggcgcccacgacgaagaggtgcttaagactatagacgagggcgacgcagatgaggtcactaaacagcgcatacacgacggtaaggagaaaccaggtgcactgtggcatatctatgcagccaaggatgctgaaaagattagagaattgttaagaaaagtgggcgaagaacagggtcaagagaatccgcctgatcacgacccgatacatgaccagtcttggtacctggaccagacattgagaaagcgcctctacgaggaatacggcgtgcaaggttgggctatcgtgcagttcctcggggacgccgtcttcattcctgcaggggctccccatcaggtccacaacctatactcctgcatcaaggttgccgaagacttcgtcagcccagaacatgtgaaacactgctttaggttgacgcaagagttcagacacctgtcaaatacccacaccaatcacgaggacaaattacaggtgaaaaacatcatatatcatgctgttaaggacgcggtgggcaccctgaaagctcacgaatctaaactagcaaggtcctag

SEQ ID NO: 122881 - DNA, 2148 bp, synthetic construct
  misc_feature 1..2148: note = Description of Artificial Sequence: Synthetic coding sequence
  source 1..2148: mol_type = other DNA
atggcaggggttggacccggaggctacgcagctgagtttgttccacctcctgaatgtcctgtctttgagccctcttgggaagagtttacagaccctctttcttttataggtcggatacgccctcttgctgagaaaaccggaatttgcaaaattcgcccccctaaagaatatgcactatccggttggaatttgaataatatgccagtgctagagcagagcgtacttgcccatatcaacgtcgacatttccggtatgaaagtgccttggctgtatgtgggtatgtgtttctcctcattctgttggcatattgaggatcactggagctactccataaattatctgcattggggggaacctaagacgtggtatggagtcccctcccacgccgcagagcagctggaagaggtgatgagggaattagcccctgagctgttcgaatcgcagcccgatctccttcaccaactggtgaccatcatgaaccccaacgtgctgatggagcacggcgtgccagtgtataggaccaaccagtgcgctggcgaattcgttgtgacctttcctcgcgcttaccactctgggttcaaccagggatacaattttgctgaggccgttaacttctgtaccgctgactggttacctattgggcgccagtgtgtgaatcattaccgtaggctccgaagacactgcgtcttttcccacgaagaactcatctttaaaatggccgcagaccctgaatgtctggacgttggtctcgccgcgatggtttgcaaggagctgaccctgatgacagaggaagagacccggctgagagagtctgtggttcaaatgggagtcctgatgagcgaggaagaggtgttcgagctagtgcccgacgacgagcgccaatgtagcgcatgtcgaacaacgtgcttcctctcagccttaacctgtagttgcaacccagagaggctagtctgcctttatcacccaaccgatctttgtccttgtcccatgcaaaaaaaatgtctccggtatcggtatcctttggaggacctaccatctttgttgtacggagttaaagtcagggcccaaagctacgatacatgggtgtctcgcgtgaccgaggcactctccgcaaattttaatcacaagaaggacctgattgagctacgggttatgctggaagacgctgaagatcgtaaatatccagagaatgacctattccgaaagcttcgtgatgccgtgaaggaggctgagacctgcgcgtcggttgcacagctgttactctctaaaaagcagaaacacaggcagtcacctgactcaggtaggactaggactaagctgaccgtggaggagctaaaggccttcgtccaacagcttttctcactaccatgcgtaataagccaagcgcgccaggtcaaaaacttgctcgacgacgtggaggagtttcatgagcgagcccaggaagccatgatggatgagacgcccgactccagtaagttacagatgctcatagatatgggatcctccttatacgttgaacttccagaactcccaaggctcaagcaggaattgcagcaggcacgctggttggacgaagtgcggctgacactctctgatccacagcaagttaccctggatgtgatgaaaaaacttatcgatagtggagttggactcgcaccgcatcatgccgtcgaaaaagctatggccgaactgcaggaactgcttacagtctctgagcgatgggaggagaaggccaaagtttgccttcaggctcggccccggcacagcgtagcgagcctggaatccattgtcaacgaggcaaagaacatccctgcctttttgccgaacgtgctcagcctgaaagaggccctccagaaggccagagaatggacagctaaagtcgaagctattcaatcgggctccaattacgcttacctagagcagcttgagtccctatccgctaaaggccggcctatccccgtgaggcttgaagccctaccccaggtggaaagtcaggttgctgctgcgcgagcctggagagaaaggactgggagaacatttctcaagaagaattcctcccacacactgctccaagtgctaagtcccagaacagatataggagtgtacgggagcggcaagaacaggcgcaaaaaagtgaaggagctgtag

SEQ ID NO: 122882 - DNA, 4911 bp, synthetic construct
  misc_feature 1..4911: note = Description of Artificial Sequence: Synthetic coding sequence
  source 1..4911: mol_type = other DNA
atggccggcgtggggccaggggggtacgcagctgagttcgtgccaccaccagaatgcccagtgttcgagccttcttgggaagaattcacagaccctctgagcttcataggcagaatccgtcctctggccgaaaaaacgggaatctgtaagatacgaccacccaaggattggcagccacctttcgcatgcgaggtgaaatccttccggttcacaccaagagtccagcggctcaatgagctggaggccatgacacgggtgcgcttggactttctggaccagcttgccaagttttgggagcttcaggggtccacgctgaaaattccagtggtggagcggaagattcttgatctgtatgccttatctaaaatcgtagctagcaagggaggctttgagatggtgacaaaggagaaaaagtggtcgaaggtcggctctcgcctgggatatctgccaggaaaagggactggatcgctgctgaagtcccactatgagagaatcctgtacccatatgagctctttcaaagtggtgtgagtctgatgggggtccaaatgcccaacctggacctgaaggagaaggtggaacctgaagtcctttcaactgatactcaaaccagcccagaacctgggacacgaatgaatatccttccaaagaggactagaagagttaagacccaatccgagtcaggagacgtctctcgtaacaccgagctcaagaagctccaaatctttggcgccggcccgaaggtggtgggactagctatgggcaccaaagataaagaggatgaggtaacccgacgacgcaaggtaaccaatcgatccgacgcattcaacatgcagatgcggcaacggaaaggaacccttagtgtaaactttgttgatctgtacgtatgtatgttctgtggccgtgggaataacgaggataaattacttttgtgcgacggatgcgacgattcctaccacacattctgtctcattccaccactacctgatgttccaaaaggcgactggcgatgccctaagtgcgtcgctgaagaatgtagcaagccacgtgaggccttcggtttcgaacaggccgttcgggagtataccctacagtcctttggggagatggcagacaacttcaagagcgactacttcaacatgcccgttcacatggtgcccacggagttagttgaaaaagaattttggcgcctcgtgtcatctatcgaggaggatgtgattgtggagtatggggccgacatttcatccaaagatttcgggagcggcttccctgtcaaggatggccggcgaaagatccttccagaagaagaggagtacgctctgtctgggtggaatctgaacaatatgcctgtgctggagcagagtgtgcttgctcacattaacgtggatatcagcggcatgaaggtgccttggctgtatgttggcatgtgcttttcgtccttttgttggcatatcgaggaccactggagctatagcattaactatctccactggggcgaacccaaaacttggtatggggtcccgagccacgcggcagagcagctcgaagaggtgatgagggaactcgcacctgagttatttgaatcccagcccgatctgctccaccagctggtgacaatcatgaaccctaatgtcttaatggagcatggcgttccagtttataggaccaaccagtgcgccggggaattcgttgtcacgtttccaagagcataccactcaggctttaatcaaggctacaattttgccgaagctgtcaacttctgcactgcagactggctgccaattgggcgtcagtgtgttaatcactatagaaggttaaggagacattgtgtcttctcccacgaggagctgatttttaagatggctgcagacccagagtgcctggatgtggggctggctgccatggtgtgcaaggaattaacattaatgaccgaggaagagacacgattgcgagaaagcgtcgtgcaaatgggcgtgctgatgtccgaagaggaggttttcgaacttgtgccggacgatgagcgtcaatgctctgcttgcaggacgacttgttttttgagtgcgctgacgtgtagctgcaaccctgaacgtctggtttgtttatatcatcccacagatctgtgcccatgcccaatgcagaaaaagtgtctccgctaccgctacccccttgaggatctgccatccctcttgtatggggtgaaggtcagggcccagtcttacgatacgtgggtcagccgggtgaccgaagccctgtctgccaacttcaatcataaaaaggacctcatcgaactccgcgtgatgttggaagatgctgaagaccgcaaataccctgagaacgacttatttcgaaaactcagagacgccgtgaaagaagctgagacctgtgcttcagtcgcacagttgttgctgtctaagaaacagaagcacaggcagagccctgatagcggccgaacgcgtacaaagttgacagtcgaggaactcaaggcattcgtgcaacagctgttcagtctcccttgtgttatctcgcaggctaggcaggttaagaatctccttgacgacgtggaggaattccatgaaagggctcaggaagctatgatggacgagacacctgactcatcaaagctccagatgctgattgacatgggaagttctctctacgtagagctgccggagctaccccgactgaagcaggaactgcagcaggctaggtggttagatgaagttaggcttactctttctgatccacagcaggtaacgcttgatgtgatgaaaaagctaatcgactctggtgtgggactggccccacaccacgcagtagagaaagcgatggccgagcttcaagagttacttactgtgagcgaacgatgggaagaaaaggctaaagtttgtctccaggcaagacctagacacagtgtggcttcgcttgagtccatagtcaacgaggccaagaacattcccgccttcttgccgaatgttctgagcctgaaggaagcgctacagaaagcccgtgagtggactgcaaaggtggaagctatccagtccggtagcaattacgcatatcttgagcagctcgagagcctctccgccaaaggaagaccaataccagtgcggctcgaggctttgcctcaggttgagagccaggtagcagctgcccgagcatggagagagaggaccggccggaccttccttaaaaaaaactcttctcacaccctactgcaagtgctgtccccccgcactgacatcggcgtctacggcagcggcaagaaccgaaggaagaaggtaaaggaactaatcgaaaaagaaaaggagaaagatttggatctggagccgttgtctgacctggaggagggtctcgaggaaaccagagatacagccatggtcgtcgccgtgtttaaagagcgcgagcagaaagagatcgaggcaatgcactccttacgggctgccaacttagcaaaaatgactatggtggacaggatagaggaggtgaagttttgtatctgcaggaagactgcgagcggtttcatgttacagtgcgagctgtgtaaagactggtttcacaacagttgtgtgcctctgccaaagagtagctcccagaagaagggctcctcttggcaggcaaaggaagtgaagtttctttgtcccctctgtatgcgctctcggcgacccagactggagacgattttgagcctgctcgtctccttgcagaagttgcccgttagactgccggagggcgaagcattgcagtgtctaacagaaagggccatgtcgtggcaagatcgcgccagacaagcacttgcgacggacgagctaagctcagctttggcgaaattatccgtactcagtcagaggatggtcgagcaggccgcaagagaaaagacagaaaagattatcagtgctgagttgcaaaaagcagcggcaaatcctgatctgcaaggacacctgcctagcttccaacagagcgccttcaaccgtgtcgtgagctcagtctcatcctccccgcggcagactatggattatgacgatgaagagacagattctgacgaggatatcagagagacatatggatatgacatgaaggacacagctagtgtgaagtcatcatctagtctggagccaaacctattttgcgacgaagagattccaatcaagtccgaggaggtggttactcacatgtggaccgctccgtcattttgtgcagagcacgcttactcctcagctagtaaatcatgtagtcagggttcgtcaaccccacggaagcagcccaggaagagtccactcgtcccaagaagccttgagccccccgtgctggagctcagtcccggagctaaagcccaacttgaggaactgatgatggtgggagacttactggaggtgagtctcgatgagacgcagcacatctggcgcatcctccaggcaacccaccctccctccgaggaccggttcctccatataatggaagatgatagcatggaagaaaagccactgaaagtcaagggcaaggatagctctgagaagaagaggaagcggaagcttgagaaggtggagcagttattcggagaaggcaagcagaagtctaaagaactgaagaagatggacaagccaaggaaaaagaagctgaagctaggcgccgacaaaagcaaggaactgaacaagctggccaaaaagctggccaaagaagaggagcgcaagaaaaaaaaggaaaaggccgccgctgccaaggttgagctggtcaaagagtccactgaaaaaaagcgggagaaaaaggtgttggatattccctctaagtacgactggagcggggcggaggaatctgacgacgagaatgctgtctgcgctgcccagaactgccaacggccctgtaaggacaaaggcgtcgtcttcgtaacagaggaggaaaagaacaaaaagtattag

SEQ ID NO: 122883 - DNA, 3150 bp, synthetic construct
  misc_feature 1..3150: note = Description of Artificial Sequence: Synthetic coding sequence
  source 1..3150: mol_type = other DNA
atggcaggcgtgggtccgggaggctatgccgctgagttcgtgccccccccagaatgtccggtgttcgagcctagttgggaggagtttaccgatccactctcctttatcggtcggatacgccctctagcagagaagacaggcatctgcaagattaggccacctaaagactggcaaccacctttcgcgtgtgaggtgaagagttttcgcttcacccctagagtccaaagactaaacgaattggagatcgtggcatctaagggcggttttgaaatggtgacgaaagaaaaaaagtggtccaaagtcggttctcgactaggctacttgccaggtaaagggactggatccctcctgaaaagccactatgagaggatcctctacccctacgagctgttccaaagcggcgtttctctaatgggtgtccaaatgcccaatcttgaccttaaggaaaaagttgaacccgaggtcttatccacagacacccagacttcaccagagcccggaacacggatgaacatcctccccaaaagaactcgccgagtcaaaactcagtccgaatcgggagacgtatccagaaacaccgagcttaaaaaacttcaaattttcggggcaggaccaaaagtagtgggtttggcgatgggaacaaaagataaagaggacgaggttacacgaagaagaaaagtcacaaaccgatctgatgcatttaatatgcagatgcgccagcggaaaggcacactgagcgtcaacttcgttgatctctacgtgtgcatgttttgcggacgcggtaacaatgaggacaaattactcctctgcgacggatgcgatgacagttaccatactttttgcctgatccctccacttccagatgtgccaaaaggggattggaggtgtcccaaatgcgtggccgaagagtgcagcaaacctcgggaagctttcggctttgaacaagcggtgagagagtatacgctgcagtccttcggagaaatggcagataattttaaatcagactacttcaatatgcccgtgcacatggtgcccacagagctagtggaaaaggagttttggagactggtgtcctcaatcgaggaagacgtcatagttgaatacggggctgatatcagctcaaaagatttcggatccggcttccccgttaaggatggccgacggaagatcctacctgaagaagaagaatatgccctctccggctggaacttgaacaatatgccagtgctggaacagtccgttctcgcgcatatcaacgtggacatttccggcatgaaggtcccttggctctacgttggaatgtgcttttcgagtttctgctggcatatcgaagatcactggtcatactcaattaattacctgcactggggggagcccaagacatggtacggagtgcccagtcacgctgccgaacaacttgaagaggtaatgcgagaactggcccctgagttattcgagtctcagccagatctactccatcagctagttactatcatgaatccgaatgtcctcatggagcacggagtgcccgtgtaccggaccaatcaatgcgctggggaatttgtcgtaacatttcctagagcctatcactcgggttttaatcagggctacaattttgcagaggcggtcaacttctgtaccgctgactggctgcctatcggccggcagtgcgttaatcactaccggcggctgcgcagacactgtgtctttagccatgaggaacttatatttaagatggctgccgatccagagtgcttggacgtaggactggctgccatggtctgcaaagagcttaccctcatgacagaagaggagacccgcctaagggagagcgtggtccagatgggcgttcttatgtctgaagaggaagtttttgagctggtgcccgatgacgaacggcaatgcagcgcatgtcggacgacttgctttttaagcgcccttacatgcagctgcaatcctgagaggctggtgtgcctgtaccacccgactgatctatgcccttgcccgatgcagaaaaaatgtcttaggtaccgttatccgttagaagacctgccgagtctgctctacggcgtaaaagtcagggctcagtcttatgatacctgggtgagccgagtaacggaagctctatcagctaatttcaaccataaaaaggacctgatcgagctgagagtgatgctggaagacgccgaagacaggaaataccccgaaaatgacctgttcagaaagctccgcgatgctgtgaaggaggcggagacctgtgccagcgtggcacagttgctcctgtctaagaagcagaagcatagacagagcccggatagtgggaggactcgtaccaagctgactgtagaggagcttaaggcctttgtccagcagctgttctcattgccctgtgtgatctcccaggcccgccaggtcaagaacctcctggatgatgtagaagagtttcatgagagggctcaagaggccatgatggatgaaacccctgattcgagtaaactgcagatgcttatcgacatggggtcatcactgtatgtagagctgccagaactgcccaggctcaagcaggaactacaacaggcccgatggctggatgaggtgcgcctgactctgtcggatccacaacaggtcacactggacgtgatgaagaagctcattgatagcggtgtggggctggccccacatcacgccgtggagaaggccatggcggaactccaagagctcctgaccgtctctgaacgctgggaagagaaggctaaggtgtgtttacaggccaggccgcgacatagcgttgcaagcctggaatcgatcgtcaatgaggccaaaaatatacctgcatttctcccaaacgttctgtctttgaaagaagcacttcagaaggctcgcgaatggacagcgaaggtggaagctatccagtccgggagtaattacgcctatctggaacaactcgaatccctttccgcaaaaggtcgacctattcctgtgagactggaagcgctgccacaggttgagagtcaggtcgctgcagctcgggcatggagagagcgtactggccgaacattcctcaagaaaaattcatctcacaccctgctgcaggttttgtccccaagaacagacattggcgtctacggatccggaaagaatagaaggtag

SEQ ID NO: 122884 - DNA, 5073 bp, synthetic construct
  misc_feature 1..5073: note = Description of Artificial Sequence: Synthetic coding sequence
  source 1..5073: mol_type = other DNA
atggctggagttgggccaggaggatacgcggcagagtttgttcctcctcccgagtgccccgtcttcgagccaagctgggaggagtttacggaccccctgtcgttcatcggcagaatacgtccactcgcagagaagacaggaatttgcaaaataagacctcctaaggactggcaacccccctttgcatgtgaagtcaagtcttttagattcactccacgtgtccagcggctaaatgagctagaggcaatgactcgggtgaggcttgattttctggaccaattggcaaagttttgggagctgcaggggagcaccctgaaaattcctgtggtggagcgcaagatattagatctttacgcattatccaaaattgttgcttccaaaggcggtttcgagatggtgacgaaggaaaaaaagtggagcaaagtgggttctcgtctcggctacctgcccgggaaaggcacggggtctcttctgaagagtcactacgaacgcattctgtatccctacgaactgtttcagagtggcgtcagtcttatgggcgtacagatgccgaatttggatctgaaagaaaaggtcgagcccgaggtcctctctactgatacccaaacgtcaccagaaccaggcaccagaatgaatatcctccccaaaagaacaaggcgcgttaaaactcagagtgagagtggagacgtttctaggaatacagagcttaaaaagttacagatttttggcgccggcccaaaggtggtgggtctagcaatgggaacaaaggataaggaggacgaggtgacccgccgcagaaaggtcacaaataggagtgatgcctttaatatgcagatgcgccagcgcaagggcaccttgagtgtgaatttcgtggatctctacgtgtgtatgttctgcggtagaggcaacaatgaggataaactgctgctctgtgatggatgcgatgattcataccacaccttctgtctcatacccccactgccagacgtacccaagggggactggagatgtccaaaatgtgttgcagaggaatgttctaaaccaagagaagcgttcgggttcgagcaggccgttagagaatacacgctgcagtcctttggggagatggcagacaacttcaagagcgattacttcaatatgccagtgcatatggtgcccacagaactggtggagaaggagttttggagacttgtcagtagtatcgaggaggacgttattgtcgaatacggggccgatatctcgtctaaggatttcggttccggctttcccgtgaaagacggccgacgtaagatccttccagaagaggaggagtacgcactctctggctggaacctcaataacatgcctgtcctagagcagtcagtcctcgcccatatcaatgtcgatattagtggcatgaaggtcccctggctatatgtgggaatgtgctttagctcattttgttggcatatcgaagaccattggtcctacagcataaactatctacactggggagagcctaaaacatggtacggtgtccctagtcatgccgccgaacagctggaagaagtgatgagagagctggcccccgagctattcgagagccagccagatttacttcatcagctggttaccattatgaatcccaatgtgctcatggagcacggagtgccagtgtacaggaccaatcagtgcgcaggcgagtttgtggtcaccttcccccgtgcataccacagcggttttaaccagggttataatttcgccgaagctgtaaacttctgcaccgccgattggctgcccattggtcgccagtgcgttaatcactatagacgactgcgacgtcattgtgtgttctcacacgaggaactgatatttaaaatggcagctgatccagaatgtctggacgtgggcctggcagccatggtgtgtaaggagctgaccctgatgacagaggaggagacacgcctccgcgaaagcgtcgtgcaaatgggggttctgatgagcgaggaagaggtgttcgagctggtgccagacgacgaacgacaatgttctgcatgtcgaaccacttgttttctgagtgccttaacttgcagctgcaatcctgagcggctagtctgtctgtaccatcccacagacctctgtccatgcccaatgcagaagaagtgcttacgatacaggtaccctctcgaggatttacccagcctgttgtacggggtgaaggtgcgcgctcagtcatacgatacatgggttagtagagtgactgaagcactgagcgctaatttcaatcacaagaaagatctcatagaactgcgggttatgctggaggacgccgaggatagaaagtacccggaaaacgacctctttagaaagctcagagacgcggtcaaagaagctgagacttgcgcgagcgttgctcaactactcttaagcaaaaagcagaagcataggcagtcaccggatagtggtagaaccagaaccaaactcactgtcgaagagcttaaagcctttgtgcaacagcttttcagtctgccctgtgttatttctcaagccagacaggtgaaaaaccttctcgatgatgtggaggaattccacgagagggcccaagaggcaatgatggacgagaccccggatagtagtaaattgcagatgctcatagacatgggctcatctctgtacgttgagttaccggaactcccaagactgaaacaggagctccagcaggctcggtggctggacgaagtgaggcttacccttagcgacccacaacaggtcacgctggacgtgatgaaaaaactcattgactccggagtgggtctggctccacatcatgcagtggaaaaagccatggctgagttgcaggagctgctcacagtcagcgagagatgggaggagaaggcaaaggtgtgcctgcaggcaagaccaagacactctgttgccagcctggaatctattgttaacgaagctaaaaacatccccgcatttttacctaatgtgctgtcgctaaaggaggcccttcagaaggcgagagaatggaccgccaaggtggaagccatacaatccgggagcaattatgcttacctggaacagctggagagcctgagcgcgaagggcagaccaatacccgttagactcgaggctctaccccaagtcgagagccaggtggctgccgccagggcgtggcgcgagaggacagggcggacttttctgaaaaaaaacagctcacacaccctccttcaagtgctgagccctaggaccgatattggcgtatatggatctgggaagaatagaaggaaaaaggtgaaggaattaatcgaaaaagagaaagagaaagacttggacctcgagcccctgagcgatcttgaagaggggctcgaggaaactagggacaccgccatggtcgtggccgtctttaaggagagggagcagaaagagatcgaggcgatgcattcgctgagggccgccaacttggccaagatgactatggtcgatagaattgaggaagtgaagttttgtatttgcagaaaaacagcctcaggttttatgctccagtgcgagctctgtaaagactggttccataattcctgcgtgccactgccgaagtcctccagccagaaaaagggctcttcttggcaggcaaaggaggtgaagttcctctgcccgctctgtatgcgctcaagacgcccaaggttggagacaattttgtccttactggtgagcttgcaaaagctgccagttaggcttccagaaggcgaggcactgcaatgcttaaccgagagggccatgtcctggcaggaccgggcccgccaggctttggccacagatgaactcagctcagctcttgccaagttgtccgtgctgtcccagcgaatggtcgaacaagccgcacgcgagaagactgaaaaaatcattagcgctgaactgcaaaaggccgccgcaaaccctgacctgcaaggccacctgccatcattccagcagagcgcatttaacagggtcgtgtcatccgtatccagcagcccgagacagacaatggattacgatgacgaggaaaccgacagcgacgaagatatcagagagacatacggctatgacatgaaagacactgcctcagttaaaagcagttccagtctggaacctaacctgttctgcgacgaagagatccccattaagtcagaagaagttgtgacacacatgtggactgccccttcgttctgtgccgaacatgcatatagttccgcctctaagtcctgcagccaaggaagtagtacaccccggaaacaacctaggaaaagccccttggtgccccgttctctagagcctccagtgttggaattgtctccaggcgcgaaggcccagcttgaagagttaatgatggtcggcgacctgttggaagtctcgctggatgaaacgcaacacatttggagaatccttcaggctacccatcctccttccgaggacaggttccttcacatcatggaggatgactccatggaagagaaaccactgaaagtgaaaggaaaggattcttccgaaaagaagcggaaaagaaaattggagaaagtcgagcaattatttggggaaggcaagcaaaaatctaaggaactgaagaaaatggataagccgaggaagaagaagttaaagctgggcgcggataagtcaaaagaactcaataagctggccaagaagcttgcaaaagaagaagagaggaagaaaaaaaaagaaaaggccgccgcagcgaaagttgagcttgtgaaggagtctacggaaaaaaagagagaaaaaaaagttcttgacatcccttctaagtatgactggtccggtgcagaggaaagcgatgatgaaaatgcagtgtgcgcggcacagaattgccagcgcccttgtaaggataaagtggactgggtacagtgcgacggcggatgtgacgaatggttccatcaggtgtgcgtgggagtgtctcctgaaatggccgaaaatgaggactacatatgtattaactgtgcgaagaaacaaggcccagtgagcccaggaccagccccaccccccagctttatcatgagttacaaattgccgatggaagatctcaaggaaactagctag

SEQ ID NO: 122885 - DNA, 3828 bp, synthetic construct
  misc_feature 1..3828: note = Description of Artificial Sequence: Synthetic coding sequence
  source 1..3828: mol_type = other DNA
atggggtttgctcctggcaaggctgtagggagccacatcaggggccattatgaaaggatactgaatccatacaatcttttcctcagcggggatagcctcagatgtttacaaaaacctaacctcacaaccgataccaaggataaggagtataagccccatgatatcccacagcggcagagcgtccagccgtccgagacctgcccccctgcacgacgtgccaaaaggatgcgtgccgaggccatgaatatcaaaatagaaccagaagagaccacggaagccaggacccacaaccttcgaaggaggatgggctgtccaactcctaagtgcgaaaacgaaaaggagatgaaatcctctatcaagcaagagcccattgagaggaaggactatatcgttgaaaacgagaaagagaaaccaaagtcccgctcgaaaaaagctactaatgctgtggatctatacgtgtgcctgctgtgtggtagcggcaatgacgaagatcggctgctactttgtgacggctgcgacgacagctaccacacgttttgcttgattcctccactccatgacgtgcctaagggggattggcgatgccccaaatgcttggctcaagagtgcagcaagcctcaagaggccttcggctttgagcaggctgctagagactataccctcaggacattcggcgaaatggcggatgcattcaagagcgattactttaatatgccagtgcatatggtcccaacagagctcgtagagaaagagttttggcgtctcgtctctactattgaggaagatgtcaccgttgagtacggagcagatattgcctccaaagagtttggctctggatttcctgtaagggacggtaaaatcaagctatcaccagaagaagaagagtatttggactcagggtggaacctgaataacatgcctgttatggaacaatcggttctggcccacattactgccgatatctgcggaatgaagctgccttggctgtatgtgggaatgtgtttcagttccttctgctggcacatcgaggatcattggtcgtactccattaattatttacactggggggagcctaagacctggtatggggttccagggtatgcagctgaacaattggaaaatgttatgaagaagctggctcccgagctgttcgttagccagccagatctactgcaccaattggtgaccataatgaaccccaacacacttatgacacacgaggtgcctgtatatagaactaatcagtgtgccggggaatttgttatcacctttcctcgcgcctaccattcaggctttaatcagggcttcaatttcgccgaggccgtgaacttctgtacggtcgattggctgcctctgggcagacagtgcgtggaacactacagattgctgcatcgctattgcgtttttagccacgatgagatgatatgcaaaatggcctccaaagcagacgtcctcgatgtggttgtcgcttctaccgtgcagaaggacatggctattatgatcgaggatgagaaggctctaagagaaacggtgcgaaagttaggagtcatcgatagcgaaagaatggatttcgagctcctccctgacgacgagaggcagtgtgttaagtgcaagacaacctgtttcatgtcagctataagctgttcatgtaagccaggcctgctggtgtgcttacatcacgtgaaggagttgtgttcatgtccaccatacaagtacaagttgcgctatcgctataccctggatgacttataccccatgatgaatgcattgaagctcagggcggaatcctataacgaatgggccctcaacgtcaacgaagctctggaggccaaaatcaacaaaaagaagagcctggtgtcctttaaggccctcatagaggagtccgagatgaaaaagttccctgataacgacttgctcaggcatctgcgactcgtgacccaagacgctgaaaagtgcgcaagcgtggctcaacagctgcttaatggcaagagacagacaaggtaccgaagtggcgggggcaaatcccagaaccaactcactgtgaatgagctgaggcagtttgttactcagctgtacgccctcccttgtgtgctctcgcagacacctttgcttaaagacctgctcaatagggtagaggactttcagcaacacagccagaaactgctgagcgaggagaccccctccgcagcagaattgcaagatcttttagacgtgtcgttcgaatttgatgtcgaactgccccagttagccgagatgagaattcgtttggagcaggctcgttggcttgaagaagtacagcaagcgtgtttagacccatcaagtttgaccctggacgacatgcgcagactgattgacctcggcgtgggtctcgcaccttactccgcagtagaaaaagccatggcccgcttacaggaactattgaccgtatcggagcactgggatgacaaggccaaatcacttctgaaggctagaccccgacattccctgaatagcctcgccaccgcagtgaaagagatcgaggagattccagcctacctcccaaatggagctgcactcaaggacagcgtgcaaagagcaagggactggctgcaggacgtggagggtctgcaggccggaggacgagtgccggtacttgatacgctaattgagttagttacccggggccgttctatcccagttcatctgaactccctgcctaggttggagaccctagtggcagaggtgcaagcatggaaggagtgtgcagttaacacatttctgaccgaaaactccccatacagcctcctggaagtgctgtgtccacgctgcgatattgggctgctgggcctgaagaggaagcaacggaagctcaaggaaccgctgccaaacggcaaaaaaaagtctaccaagctcgaatctctgtctgatcttgagagggcactcaccgagagcaaggagaccgcttcagctatggccaccctgggagaggccagactccgcgagatggaggcgctgcagtcactgaggctcgctaacgagggtaagctgctttcgccgctccaggacgtggacataaagatctgcctgtgccaaaaggccccggctgccccaatgatccagtgtgagctctgcagggacgcattccacaccagctgtgtggccgtaccctcaatttcgcaaggattgagaatatggctgtgcccccactgcaggcgatctgaaaagccccctctggagaaaattttaccattactcgccagcttacaaaggatcagggtgagacttcctgaaggagacgcactgagatacatgatcgagcggacagttaactggcagcaccgcgcacagcagcttctgtccagtgggaacttgaagttcgtgcaggatagagtggggtcaggactcctgtactcaaggtggcaagcaagtgccggccaagtaagcgatactaacaaagtttcacagccacccggtacaacttcattctccctgccagacgattgggataaccggactagctacctgcacagcccattttcaaccggccgatcctgtatcccgttgcacggagtttctcctgaggtgaatgaactgctaatggaggcgcagctgctccaggtttccctccccgaaatccaggagctatatcaaactttactcgccaagccttcaccagcgcagcagaccgacaggagcagccctgttcgaccctcttctgaaaaaaacgattgttgtcggggaaaaagggatggaatcaactccctggaacgcaagttgaagaggcgcctagaacgtgagggcctgagcagcgaaagatgggagcgcgtcaaaaagatgcggactccctag

SEQ ID NO: 122886 - DNA, 4743 bp, synthetic construct
  misc_feature 1..4743: note = Description of Artificial Sequence: Synthetic coding sequence
  source 1..4743: mol_type = other DNA
atggaagcagccaccactctacaccctgggcccaggcccgccctgcccctaggaggaccggggcccttgggggaatttctgccacccccagaatgtcccgtcttcgaaccatcgtgggaagagttcgcagatccttttgcatttatccataaaattcgccccatcgccgagcagacaggcatttgcaaggtgagacctcccccagattggcaaccacccttcgcgtgcgatgtcgataaactccactttaccccacgaattcagcgcctcaacgaactggaagcccagacaagggtaaagctgaattttctggatcagatagctaagtattgggaacttcagggcagtaccctgaaaatcccccacgtggagaggaaaattctggatctgttccagctcaacaaactcgtcgccgaagaaggcggctttgcagtcgtgtgtaaagacaggaaatggactaaaattgctactaaaatgggctttgcgcccggtaaagcggtggggtctcacattcgggggcactacgaacgaatcttgaacccgtataatctttttctgagtggtgattcactaagatgcctccagaaacccaacctcactacggacactaaagacaaagagtataagccacacgacatcccacagaggcagtctgtgcagccgtcagaaacgtgtcctcctgccaggagggcaaaacgtatgcgcgccgagcggcagagtctcgctgttttgcctcggcttgaatgctcaggggccattctggcccactgtaacctacggctactggactctagcaactcctcagcctctgccagccaagccatgaatatcaaaattgagccggaagaaacaaccgaggctagaacacacaacttacgccgtagaatggggtgtcccacacccaagtgcgaaaacgaaaaggaaatgaaatcaagcatcaaacaagaaccaatcgaaagaaaggattacatagtggagaacgagaaggaaaagccgaaaagccgcagtaagaaagccaccaatgcggttgacctctatgtgtgccttctgtgtggtagtgggaacgatgaagatcgcctcttattatgtgatggatgtgatgatagctaccacaccttctgtctgattcccccgctccacgatgtgcccaaaggtgattggagatgtccaaagtgtctggctcaggaatgttcaaagccacaggaggccttcgggtttgaacaggctgccagagactataccctgagaacttttggggagatggcagatgcctttaaaagtgattattttaacatgccagtgcacatggtccctaccgagctggtcgagaaggagttttggcggttagttagtaccattgaggaggatgtgaccgtagaatatggcgcggatatagcctcaaaggaatttgggtcagggttcccagtgcgagatggtaagatcaagctcagccctgaggaggaggagtacctggacagcggctggaaccttaacaacatgccggtgatggaacagagcgttctcgcgcacataactgcagacatttgcgggatgaagttaccctggctttacgtaggcatgtgtttcagctctttttgttggcatatagaagaccactggtcttattccattaattaccttcactggggtgaacccaagacttggtacggggttccaggatacgctgcagaacaactggagaacgtgatgaagaagctggcaccagagctgttcgtctcacagcccgatctgctgcatcaactggtcactatcatgaaccctaacaccctcatgacccatgaggtacccgtgtaccgaactaaccagtgcgccggggagttcgtgatcacatttcccagggcctaccatagcggcttcaaccaaggttttaatttcgctgaggccgtaaacttttgtaccgtggattggcttcctcttggacgccagtgcgtcgaacactataggctgttacaccgctactgcgtcttttctcatgacgagatgatttgcaaaatggcgtctaaagctgacgtgctcgatgtcgtggttgcctcaacagtacagaaggatatggctatcatgatcgaggacgagaaagccttgcgtgagacagtacgaaaactgggcgtgatcgactccgagcgaatggatttcgagctgctgcctgatgacgaaagacagtgtgtgaagtgtaaaacgacctgcttcatgtccgccatttcctgttcatgcaaacccggactgctagtttgcctccaccatgtgaaggagctttgttcatgtcctccctacaagtataagttgcggtataggtataccttggatgatctataccctatgatgaacgctttgaagctgcgtgcggagtcctataacgaatgggctctgaatgtgaatgaagccttggaagcaaaaattaataaaaagaagtccctggtgtcgtttaaagcattgatcgaagagtcagagatgaagaagttccccgataacgatctactcaggcatctcaggcttgtgacccaagacgcagagaagtgtgcttccgtggctcagcagcttctgaatggcaagcgacagactcgatatcggtctggcggcgggaaaagtcagaaccagcttacagtcaatgagctccgtcagtttgtaacgcagctttatgcactgccttgtgtcttgtcacagacaccattattgaaggatctgctgaatcgcgtggaagactttcagcaacatagccagaaactcctttcggaagaaaccccttctgcggcggagctgcaggatttgcttgatgtgagcttcgagttcgacgtagagcttcctcaattagctgagatgagaatacgcctggaacaggccagatggctggaagaggtccaacaagcatgccttgatccttcgtcccttacccttgatgacatgcggcgcttgattgaccttggggtgggcctcgctccatactccgctgtcgaaaaagccatggcacgactgcaagagttgctcacagtcagtgagcattgggatgacaaagccaagtcactactgaaagctcgcccaagacacagtctcaacagcctggctactgccgtgaaagagatagaggaaatacccgcctatctgccaaatggggcggcattgaaggactccgtgcaaagagccagggattggcttcaggacgtggaaggccttcaggctggtgggagagtccctgtgctggacacgctgattgaattggttacccgtgggcggtccatacctgtgcatctcaattcattaccacggctcgagaccctcgtggcagaggtccaagcctggaaagaatgtgccgtcaatactttcttaaccgagaatagcccatatagcctcttagaggtgctctgcccccgctgcgatatcggcctgctgggtctcaaacgcaaacagcggaagttgaaggagcctctgcccaacggcaagaagaagagtacaaaactggagagtcttagtgacctagagcgggctttaacagagtccaaagagaccgctagcgctatggcaacactgggcgaggctcgcctgcgtgagatggaagccctacagtcactgcgtctggcgaacgaaggtaaactcctaagtcccctccaagatgttgacatcaagatttgtctttgccaaaaggcccctgccgccccaatgattcagtgcgagctgtgcagagatgcattccatacctcatgcgtggccgtgccatccatttcacagggcctgcggatctggttgtgtccacactgtcggcgctcggagaagcctccactggagaagatcttaccattgctagccagccttcaacgcatccgggtccgcctccccgaaggggacgccttaagatacatgatcgaaaggacagttaactggcaacatagagcccaacagctgctctcatcgggaaacctgaagtttgttcaggacagagtgggaagtgggctgctatactccagatggcaggcaagcgccggtcaggtttcagatacgaacaaggtatcgcagcctcctggcaccacctcatttagcttgcccgatgattgggacaaccgcacttcctacctgcactcccctttttcgacgggtcggagctgtatccccctgcacggagtgtctcctgaggtcaacgagctgcttatggaggcccaactgctgcaggtgtccctcccagagatccaggagctatatcagactctgctggcaaagccatcccccgcccaacagaccgaccgttcgagtccagtccgccctagcagtgagaagaacgactgttgcaggggaaaaagggacgggatcaattccctggaacgcaagcttaagcgtcgcctggagcgagaaggacttagcagtgaacgctgggagagggtgaagaaaatgcggacgcctaaaaaaaaaaagattaaactgagtcaccccaaagatatgaacaacttcaagctggaacgagaacgcagttacgaactggtacggtcagcagagactcacagtttgccctccgatacctcctactcagagcaggaagactcagaagatgaggatgcaatctgtcccgctgtgtcctgtctgcaacccgagggcgacgaggtggattgggtgcagtgtgatggtagctgtaaccagtggtttcaccaggtctgtgtcggcgtctcacctgagatggccgaaaaagaggattacatatgcgtgcggtgcacagtgaaggacgctccatctcggaaatag

SEQ ID NO: 122887 - DNA, 4635 bp, synthetic construct
  misc_feature 1..4635: note = Description of Artificial Sequence: Synthetic coding sequence
  source 1..4635: mol_type = other DNA
atggaggctgctaccaccctgcaccctggccctagacccgccctccccctggggggaccggggccccttggagagtttctgcctccacccgagtgcccggttttcgaaccttcatgggaagagtttgccgatccattcgctttcattcacaagattaggccaatcgccgagcagacaggcatctgtaaagtgcgcccgcctcccgattggcagccgccttttgcctgtgatgtcgataaacttcactttactcccaggatccagcggctgaatgaactcgaagctcaaacccgagtgaagctcaactttcttgaccaaatcgctaagtactgggagcttcagggtagcaccctaaagataccccacgtcgagaggaaaattctcgacctgttccaactgaataaactggtggcagaagaggggggtttcgcagtggtgtgtaaggatcgtaagtggactaaaatagcaaccaagatggggttcgcacctggcaaggcagtgggttcccacatccgtggtcactatgagagaattttgaatccatataacctgtttctcagtggtgactctcttcgctgtctgcagaagccgaacttgacaaccgatacaaaggacaaagaatacaagcctcacgatatcccacagcgccagagcgtccaaccatctgagacttgcccacctgcccgacgggctaagcggatgagagctgaggcgatgaacatcaagattgaacctgaggaaaccaccgaagccagaactcacaatcttagacgccgaatgggatgccctaccccgaaatgcgaaaatgaaaaggagatgaagagcagcataaaacaagaaccaatcgagaggaaagattatattgtggaaaatgaaaaggaaaaaccgaagagccggtccaaaaaggcaacaaacgccgtagatctttacgtatgcctactctgcgggtctgggaatgacgaagataggctgttgttgtgcgatggatgtgacgactcgtatcacacattttgcctgattccaccgcttcacgatgtgcccaaaggtgactggcggtgtcctaaatgcctcgcccaagaatgtagtaagccacaggaggcatttgggttcgaacaggccgccagggattacacccttcggactttcggggagatggctgacgcgttcaagtctgattatttcaacatgccagtacatatggtgcctacagaacttgtggagaaggaattctggcgtctggtaagtaccatagaagaggatgtgaccgtggagtacggtgccgatatcgcaagtaaagagttcgggtccggctttcctgttagagacgggaaaatcaagctgagcccagaagaagaagaatatttggactcgggttggaatttgaataacatgccagtgatggagcagtccgtattggctcacatcactgctgatatctgcgggatgaagctgccttggctctatgtgggcatgtgcttcagctccttctgctggcacatagaggaccactggtcttattctattaattaccttcactggggggagcctaagacctggtacggcgtgcctggatatgccgctgagcagctagaaaacgttatgaagaagcttgcccctgagctgtttgtttcccagcctgatctgctccaccaactcgttacgattatgaatcccaatacactcatgactcacgaggtgcctgtctacaggaccaatcagtgtgctggggaattcgtcatcacattcccacgagcctaccacagtgggtttaaccagggattcaatttcgctgaggcagtgaacttttgcactgtggattggctgcctctgggtaggcagtgcgttgagcactaccgactgctgcacaggtattgcgtgttctctcatgatgagatgatttgtaaaatggcgtcaaaagctgatgtgctggatgtggtggtggcatcaaccgtgcagaaggatatggctattatgattgaggatgaaaaggccctgagagaaacagtccgtaaactcggcgtgatcgactcggaaaggatggactttgagctacttccggatgacgaaagacagtgtgtcaaatgtaaaacaacatgtttcatgagcgctatatcctgctcctgtaagcctggactgctggtctgtttacaccatgttaaggagctgtgctcttgccctccttacaagtacaaacttcgatatagatataccctggacgacttatatccaatgatgaatgcattaaaactgagggccgaaagttacaatgagtgggccctaaacgtgaatgaggctctggaggccaagatcaacaagaaaaagagcttagtgagctttaaagctcttatagaggagtcggagatgaagaagttcccagataatgatctgctccgccatctccggttggtgactcaagatgcggagaagtgtgcatctgtggcacagcaactgctaaacggaaaaagacagacccgctaccgttccggcggggggaaatcccagaatcagctgaccgtcaacgaactgagacagttcgtcactcagctgtatgcgctgccctgtgtgcttagtcagacccccttactcaaagacctgctgaatcgcgtggaagacttccagcagcactctcagaaactgttatctgaggaaaccccaagcgccgccgagctccaagacctcctagatgtgtcttttgaatttgacgtggaactgccccagctggccgaaatgaggatccgcctcgagcaagctagatggctggaagaggttcagcaggcttgcctggatcctagcagtctgaccctggatgatatgagacgattaatcgacctcggcgttggtctggcgccttactcagctgtggaaaaagctatggcccgtctccaggaattactaactgtcagcgagcactgggacgacaaggcaaagagtttgctcaaagcccggccaaggcacagccttaattccctggcaactgccgtgaaggaaatcgaggagatcccagcctatctccccaatggcgcagctcttaaagattcggtgcagcgtgcaagggactggctccaggacgtcgaggggctccaggcaggaggcagagtgccagtcctagacactctcattgagcttgttactaggggacgcagcatccccgtccatttaaactcgctgcctcggcttgaaacactagttgctgaggtgcaggcctggaaagaatgcgctgttaacactttcctgacagaaaacagcccatatagtctgctggaagtcctttgtccacgctgcgacattgggctgttgggcctcaaacgcaagcagagaaaactgaaggagcctctgcctaatggtaaaaaaaaatccacaaaactggaatctctaagcgatctggaaagagccctcacggagtcaaaagagactgcctccgctatggcaactctgggcgaggcccggctacgagagatggaagccctgcagagtctaaggctcgctaacgagggcaagctgctctccccactccaggacgtggatatcaagatttgtctatgtcaaaaggccccagcagctccaatgatccagtgcgaactgtgtcgagatgccttccacaccagctgtgttgccgtgcctagtatatcccagggcctacgcatctggctctgccctcactgcagaagaagcgaaaaacctcccctggagaagattctgccactactcgcaagcctgcagagaattagagtgcgattgcctgaaggtgacgctctgagatatatgattgagcggactgtcaactggcagcaccgcgcacagcaattgctgtcatccggcaacctgaagttcgtccaggatagagttggtagcggcctcctctattctcggtggcaagccagcgcaggccaggtatcagatactaacaaagtttctcagcccccaggtaccacaagtttctcccttcctgatgactgggacaacagaaccagctacctccattccccattcagcaccggccggtcctgtattcccctgcatggcgtgtcgcccgaagtgaatgagctgctgatggaagcccagctgcttcaggtgagtttgccggaaattcaggagttgtaccagacactgctggccaaacctagccccgcgcaacagactgaccggagttcccctgtgaggccatctagtgagaagaacgattgctgccggggaaagcgcgatggaattaactctctggagcgcaaactgaaaaggcggctcgagcgagaagggcttagctcagaaagatgggaaagggtgaaaaaaatgaggacccctaaaaagaaaaaaatcaagctatcccaccccaaggatatgaacaactttaaactggaacgcgagaggtcatatgagttggtgcgaagtgcagaaacacactctcttccaagtgatacatcctattccgagcaggaggatagtgaagatgaagatgccatttgcccagccgtctcctgcttgcagcctgaaggcgacgaggtagactgggttcaatgcgatggtagctgtaaccaatggtttcaccaggtctgcgtcggtgtttctcctgaaatggcagaaaaggaggactacatttgcgtacgatgtacagttaaagacgccccatcacgcaagtag

SEQ ID NO: 122888 - DNA, 4161 bp, synthetic construct
  misc_feature 1..4161: note = Description of Artificial Sequence: Synthetic coding sequence
  source 1..4161: mol_type = other DNA
atggggttcgccccaggcaaagccgtgggctcacatattcgcggccactacgaacggatccttaatccctacaacctgttcttgagcggggattcccttaggtgcctccagaaaccgaacctgacaacagacacaaaagacaaggagtataagcctcacgatatcccacagcggcagagcgttcagccaagtgagacttgtccccctgcgcggagagccaagagaatgcgtgcagaagcgatgaatataaaaattgagcccgaggagacaaccgaagcaaggacacacaacttgagacgcagaatgggctgtcctacaccaaaatgtgagaacgaaaaagaaatgaaaagcagcatcaagcaagagccaatcgaacgcaaagactatatcgtagagaacgaaaaggaaaaaccgaaaagcaggtccaagaaggccactaacgccgtggatttgtacgtgtgcctgctctgcggctccggtaacgacgaagatcgcctgttactgtgtgacgggtgcgatgatagctaccacaccttctgtttgatcccccctctgcatgatgtgccgaagggagattggaggtgtccaaagtgcttagctcaggaatgctcgaagccacaggaagcattcggctttgaacaggctgcccgggattacaccctaaggacctttggagaaatggccgacgccttcaagtctgactacttcaatatgcctgtccatatggtacctacagaattggtggagaaggagttttggagacttgtgtcgaccatagaggaagacgtgaccgttgaatatggcgcagatattgccagcaaagagtttgggagtggctttcccgtgcgggatggaaaaatcaagctttctccagaagaggaggagtatctggatagcgggtggaaccttaacaacatgcctgtgatggagcagagcgtgctcgctcacatcacagctgatatatgtgggatgaagctaccatggctttatgtgggcatgtgcttctcatccttttgttggcatattgaggatcattggtcatattctattaactacctgcattggggtgagccaaaaacctggtacggtgttcccggatacgcagcagagcaactagagaacgtcatgaaaaagctggctcccgagcttttcgtctcccagcctgacctcttacaccagcttgttactattatgaacccgaacaccctgatgacccacgaagtgccagtttacagaacaaaccaatgcgccggggaattcgttataactttccctcgtgcataccactcggggttcaatcagggtttcaacttcgcggaggccgtgaacttttgcactgttgactggctgcctctaggccgccagtgtgtggagcactatagattgctgcaccgctactgcgtttttagtcacgatgagatgatatgcaaaatggcaagtaaggccgacgtgcttgacgttgtcgtggcatccaccgtacagaaagatatggcaattatgatagaggacgaaaaggctctgcgggaaacagtgagaaagttgggcgtgattgactctgagcgcatggacttcgagttgcttcccgatgacgagcgccagtgtgtcaaatgtaaaacaacatgttttatgtctgctatctcctgctcctgtaaacctggtctgcttgtttgcctacaccatgtgaaagaactgtgctcctgccccccatacaaatacaagcttagatatcggtataccctggacgatttgtaccccatgatgaatgcgctgaagttgcgtgccgaaagctataacgagtgggccctcaacgtcaacgaggcccttgaggctaaaatcaacaaaaagaaaagcctggtaagttttaaggctctgatagaagagagcgagatgaagaagtttccagacaatgaccttcttaggcacctgaggctggtgacccaggatgctgaaaagtgcgcatctgtcgctcagcagctgttgaatgggaagcggcagaccaggtaccgctctggaggaggcaagtctcaaaaccagctcaccgtgaatgagctgcggcagtttgtcactcaattgtatgctcttccgtgcgtgctgtcgcagacacccttattgaaagacctgctcaatcgtgtcgaggactttcagcagcacagccaaaaactgctgtcagaagagaccccgtccgcggccgagcttcaggatcttttggacgtgagctttgaattcgacgttgagttgcctcagctggctgaaatgcgcatacgtctcgagcaggctcgctggctggaagaggtgcagcaagcttgcctagacccatcctcccttacattggatgacatgaggagactcatcgatcttggagttggcctggcaccatacagtgcagtggagaaggccatggcccgcctccaagaattgctcacagtgtccgaacactgggatgacaaagctaagtcattgctgaaagcgcgcccgcgccactcattgaattccctggcaacagctgtcaaggagattgaagagatccccgcatacttgccaaacggggcagcgctgaaggattcagttcagcgcgcgcgcgactggcttcaagatgtggagggacttcaagcgggagggcgcgtacctgtgctggatactttgatagagttggttacacgcggcagaagcataccggtgcatttaaatagcctcccccgcctggagactctcgttgccgaggtgcaggcctggaaggaatgcgcagtgaacacatttttaaccgagaactccccttatagcttgcttgaagtgctgtgtccacggtgtgatattgggctgttgggtctgaagcgcaaacagcgcaagctgaaggagccgctgccgaacggaaagaagaagtccactaagctcgagagcctgtctgatttggagcgggcactaacagaatccaaggagacagcatccgccatggctactctcggcgaggcccgcctgagggagatggaagcacttcagtcacttcgcctggctaacgagggaaaactcctgagcccgctgcaggatgtcgatatcaagatctgtctatgccaaaaagccccagccgcccctatgatccagtgtgaattatgccgggatgcatttcatacaagttgcgtggcagtgccctccatttcacagggactgcgcatctggctctgtccacactgtcgccgaagcgagaaaccaccgctggaaaaaatactgccgctcctagcttcgctgcagagaatccgggtgcggctgcctgagggcgatgctttaagatacatgattgagaggacagtgaactggcagcatagagcccaacagctactgtcctccgggaatctgaaatttgtgcaggatcgcgtcggatctgggcttctgtatagccgatggcaagctagcgccggtcaggttagcgatactaataaagtgtcccaacccccgggcaccacgtcctttagcctgcccgatgactgggacaacaggacttcctacttgcacagccctttctccacaggcaggtcttgtatcccactgcacggggtgtctccggaagtgaatgagcttctaatggaggctcaactcttacaggtgtcgttgcctgagatccaagagttgtaccagaccctgttggccaaaccatcccccgctcagcagactgatagaagttcacctgtacgcccaagctcagagaaaaatgattgttgtcgaggcaaacgagacggtatcaacagccttgaaagaaaactgaagcggaggctggagcgagagggcctgtcttctgaaagatgggagagggtgaaaaaaatgcgaacccctaagaaaaaaaaaattaagctgtctcatcccaaggatatgaacaatttcaagctggaacgcgaacgaagttatgagctggtccgttctgcagagactcacagtctgccctctgatacatcctattctgaacaggaggacagtgaggacgaagatgcaatttgccccgccgttagctgcctacagcctgagggggacgaagtcgattgggttcaatgtgatggaagctgtaatcagtggtttcatcaggtgtgtgtcggggtgagccccgaaatggccgagaaagaagactatatatgtgtccggtgcacagtgaaggacgcaccctcccgaaagtag

SEQ ID NO: 122889 - DNA, 933 bp, synthetic construct
  misc_feature 1..933: note = Description of Artificial Sequence: Synthetic coding sequence
  source 1..933: mol_type = other DNA
atgatctgcaagatggcctctaaggctgacgtcctggatgttgtagtcgcctccaccgtacagaaagacatggcaatcatgatcgaagacgaaaaggccctaagagaaacggttaggaagctcggtgttatcgacagtgaacggatggactttgaactcctgcccgacgatgagagacagtgtgtcaaatgtaagacgacttgtttcatgagcgccattagttgcagttgtaaacctggcctcttggtgtgcctgcaccacgtgaaagagctctgctcctgcccgccctataaatacaagttgagatatcgctacacactcgatgacctctacccaatgatgaatgctctaaaactgcgcgctgagtcctacaatgagtgggcgcttaatgtcaacgaagctctggaggccaagattaataaaaaaaagtcccttgttagttttaaagccctgattgaggaaagcgagatgaagaagtttccagacaacgaccttctgcgacacctgcggctggtcacgcaggacgccgaaaagtgcgccagcgtcgcacagcagcttctgaacggtaagcggcagacacgatatcgatctggcggcgggaagagtcagaatcagctcaccgtgaacgagctgcgacaattcgtcacacagctgtatgccctaccctgcgtccttagccagaccccattattaaaagaccttctaaaccgcgtggaagacttccagcagcactctcagaagcttctgtctgaggagaccccttcagctgccgaactgcaggacttgctcgatgtttcttttgaattcgacgtggagctcccccagctggcagagatgcgtatccgtctggaacaggcgagatggctggaagaggtgcaacaggcatgcctcgatccctcatcattgaccctggacgatatgcgggtcagctag

SEQ ID NO: 122890 - DNA, 4674 bp, synthetic construct
  misc_feature 1..4674: note = Description of Artificial Sequence: Synthetic coding sequence
  source 1..4674: mol_type = other DNA
atggagcccggttcagatgactttctgcccccacccgagtgtcccgtatttgagccatcatgggcagagtttcgggaccccttgggctatatcgctaagattcggcctatcgccgaaaaaagtgggatttgcaagatcaggccaccagctgactggcagccaccgttcgccgtggaggtggataatttccgctttactccgagaattcagagattgaatgagcttgaagctcaaactagggtgaagctcaactacctagaccagatcgccaagttttgggagatacagggctcaagcctcaagatccccaatgtggagcgcaggattctggacctgtattccctgagtaagatagttgttgaagagggcggctacgaggcaatctgtaaggaccgaagatgggctcgggtggcacaacgcttaaattaccccccagggaaaaatattggatccttgttgcggagccactacgaacgcatagtctacccatatgaaatgtatcagagcggagcaaatctagtgcagtgtaatacgaggccattcgacaacgaggaaaaagacaaagagtataaaccgcactccattccgcttcgacaaagcgtccaaccgtctaagttcaactcctacgggcggagagccaagcgcctccagcccgatccggaacctacagaggaagatatcgagaagaaccccgaacttaagaagctccagatctatggcgcaggcccgaaaatgatggggctggggctgatggcaaaggataagacactccggaagaaggacaaggaagggcccgagtgtcctccaacagtagtggttaaggaggagctcggcggggacgtgaaagtcgagtctacctcacccaagacctttctggaatctaaagaggagttgtcccatagtccagaaccatgtactaagatgaccatgcggctacgtcgcaaccacagcaatgcacaatttatcgagtcctacgtgtgcaggatgtgctctagaggcgacgaggatgataagctgcttttatgcgacggttgcgacgataactatcatatcttctgcttattgcctcctcttccagagatccccaaaggcgtatggcgctgtccaaaatgcgtgatggcagagtgcaagaggcctcccgaggccttcgggtttgagcaggctactagggagtacaccctgcagagctttggggagatggccgactcttttaaagccgactattttaacatgcctgtccatatggttcctactgaacttgtcgagaaggaattttggaggctagtcaattcaatcgaagaagatgtgactgtggagtacggcgccgacatccactcaaaagagttcggctccggcttccctgtatccgacagcaagcgacatcttaccccggaggaagaagaatatgcgacctcaggttggaacctgaatgtcatgcccgtgctcgaacagtccgttctctgccatattaatgcagacatctcaggaatgaaggtgccttggctgtatgtggggatggtgtttagcgccttttgttggcatatcgaggaccattggtcttactctattaactatcttcattggggcgagcctaaaacctggtacggtgtccctagtctggctgcagaacacttggaggaggttatgaaaaagcttaccccagagttatttgacagtcaacctgacctcctgcatcaactggtgaccctgatgaacccaaatacactgatgagccatggagtcccagttgttagaaccaatcaatgtgccggtgagttcgtgattacgtttccccgtgcttatcacagtggctttaaccagggttacaatttcgcggaggcagttaacttctgtaccgcggactggctcccagccggtaggcagtgcatagaacactatagacggctaagacgatactgcgtcttcagccacgaagaattaatctgcaaaatggctgcctgccctgagaaacttgaccttaatttggccgctgcggtgcataaggagatgttcataatggtacaggaagaacggagactcaggaaggctcttctggaaaagggaatcactgaggcagagagagaagcttttgagctcttacctgatgatgaaaggcagtgtatcaagtgtaaaaccacatgttttctctccgcacttgcctgctacgactgtcccgatggcctggtgtgcctgtcgcacatcaatgatctctgtaagtgttctagctcgagacagtacttgaggtacaggtacacccttgatgaactgcctgccatgctgcacaaactcaaagtcagggccgagagctttgacacctgggcaaataaagtgcgcgtggcgcttgaagtcgaggacggacgaaagcggagcctcgaagagctgcgagcccttgagtcggaggcccgtgaaaggagattccctaacagtgagctgttacagcagctaaagaattgtttatctgaagccgaggcttgcgtctctcgggccttgggcctggtgtcaggtcaggaggcaggcccacacagggtcgctggactgcaaatgaccctaacggagctcagggcattcctggatcaaatgaataatctcccatgcgccatgcaccaaatcggagatgttaagggcgtgctcgagcaggtggaggcgtaccaggcagaagcccgagaagccctcgcatcactgcccagtagtcccgggctccttcagtctctgttggaacggggacgacagctaggcgttgaagtgcccgaggcccagcagttgcagcgtcaggtggaacaggctaggtggcttgatgaagttaaaagaaccctagctccttccgcgaggcgcggcactcttgctgtaatgcggggactgctggtcgctggcgcttctgtagcaccatccccggctgtcgacaaggctcaggcagagctccaagagctgctgactattgccgaaagatgggaagagaaggcgcacctgtgtcttgaggccagacagaagcatcctccggctacactggaagcgatcattcgcgaagcagaaaacatccccgtgcatttgccaaatatacaggccttaaaagaagcactggccaaggcccgggcctggattgccgacgttgacgagattcagaatggcgatcattacccgtgcttagatgatcttgaggggctggtcgccgtgggccgtgacctgcctgtgggcctggaagagctgcgacaactcgaactccaggttctgacggcccatagctggcgggagaaggccagtaagacatttttaaagaagaattcatgttatacgctgctggaggtgttatgtccatgcgcagatgcaggttccgactccactaagaggagcagatggatggaaaaagagctggggctgtacaagagtgatacagagctactgggactgagcgcccaggacctaagagatccggggagcgttatcgtcgctttcaaagaaggtgaacaaaaggaaaaggagggaatcctgcagttgagaaggacaaattctgccaaaccttcccctctggcatcgtcctcaaccgcttcgagcacgacatctatttgtgtctgtggccaggtcctcgctggggcaggcgcactgcagtgcgacttatgccaggattggttccatggacgatgcgttagcgtaccacgattgctttcttccccacgcccaaaccccacgagctctcccctgctggcgtggtgggagtgggataccaaatttttgtgtccgctttgcatgagatcacggcggccccgcctcgagactatccttgcccttctggtggccctgcagcgcctccctgtgcgcctgcccgaaggtgaggccctgcagtgtctcaccgaaagagcaatcagctggcaggggcgagcaaggcaggcattagcctccgaggacgtgacggcgctgttgggcaggctggccgaacttcgacagaggttacaggccgaacctaggcccgaagagcccccgaattaccccgctgccccggcgagcgatcctctgagggagggctccggaaaggatatgccgaaagttcaaggactgctcgagaatggggatagcgtcaccagccccgaaaaggtggcacctgaggaaggctccgaccttgagttattgagttccttactgccccagctaactggaccagtgttagaactgcctgaggctaccagagctccactcgaagagctcatgatggaaggcgatctgctggaggtgactttagacgaaaatcactctatctggcagctgttacaggccggtcaaccgcccgatctcgaacgcattagaaccttgctggaactcgagaaagccgaaagacatggatctcgggcccgggggagagcccttgaaaggcgtcggcgacgcaaggtggataggggtggcgaaggtgacgaccccgcccgcgaagagctggagcctaaacgagtgcggtcaagtggtccagaggccgaagaggtgcaagaagaggaagaactagaggaggagacgggcggtgagggaccacctgcacctattccaacaaccggctctccaagcacgcaggagaatcagaacggactagagccagccgaaggtacgacctcgggcccaagcgctccttttagcaccctgactcctcgactacacctgccctgtcctcaacagccacctcagcagcagctgtag

SEQ ID NO: 122891 - DNA, 4551 bp, synthetic construct
  misc_feature 1..4551: note = Description of Artificial Sequence: Synthetic coding sequence
  source 1..4551: mol_type = other DNA
atggagcctgggtctgatgattttctgcccccaccagaatgcccagtcttcgaaccaagctgggccgaatttcgagatcccctaggatatatcgcaaaaatcagacctattgctgagaagtcaggcatctgtaagatacgccctccagccgactggcagccccctttcgccgtggaagtagacaatttccggttcacccctcggatccaacggttaaacgagttagaaattgtagtggaagagggcggatatgaggccatttgcaaagatagacggtgggctcgcgtggctcagcggctgaactacccaccaggcaagaacatcgggagcctgctccgctctcactatgagcggatcgtgtatccatatgagatgtatcagagcggtgccaaccttgtacagtgtaacacaagaccgttcgacaacgaagaaaaagacaaagagtataaaccccacagtatccccctgaggcagtctgtgcagcccagcaagttcaacagttatgggcggcgcgccaagcggctgcaacctgatcctgagcccacagaagaagacattgagaagaatccggagctcaaaaaactgcaaatctatggggccggacctaagatgatgggactggggctcatggccaaagacaagacactccgaaaaaaagacaaggaaggtcccgagtgtccccctacagtcgtcgtcaaagaggagctggggggggacgtcaaagtcgagtccacgagcccaaaaacctttctcgagtcaaaggaggagctgtcccacagtcctgagccttgtacgaagatgacgatgaggctcaggagaaaccacagcaacgctcagttcattgagagctatgtatgccgaatgtgttctcgcggcgacgaggacgataagctgctcctgtgcgacggatgtgatgacaattaccacatcttttgcttactgccccctcttccagagattcccaagggcgtttggagatgtccaaaatgcgtgatggccgagtgcaaacgtcccccggaagcattcgggttcgagcaggccacaagagagtacacgttgcaaagctttggggaaatggcagactctttcaaggctgactacttcaatatgccagtccatatggtgcccaccgaattagttgaaaaagaattctggcgactagtcaacagtatcgaagaggatgtgaccgtggaatatggcgcagacatacatagcaaagaattcggctcaggctttcctgtctctgatagcaagcggcacctcacacctgaggaggaagagtatgcaacaagcgggtggaacctaaacgtgatgcccgtccttgagcagtcagtgctgtgccacataaatgccgacatctcaggtatgaaggtgccgtggttatacgtggggatggtcttttctgccttttgttggcacattgaagaccattggagctattctattaactacctccactggggcgagcctaagacctggtacggcgtccctagtctggccgcggagcacctggaggaggtgatgaagaaattaacacccgagctcttcgattcccagcccgacctcttgcatcagctcgtgactttaatgaaccctaacacattgatgtcccacggcgttcccgttgtgcgaacaaatcagtgcgccggagagttcgtcataacatttccacgcgcttatcacagcgggtttaaccaaggttataacttcgcagaggcagtaaatttttgtacagccgattggctgccagccgggagacagtgtatcgagcattaccggcgattgaggaggtactgtgtcttctcccacgaagagctgatctgtaagatggcggcctgcccagagaagctagacctcaacctggcagccgctgtgcacaaggagatgtttattatggttcaggaagagcggaggcttagaaaggctctgctggagaagggcatcacagaagcagagagggaagccttcgagctcttgcccgacgacgaacgtcaatgcatcaagtgtaagacaacttgctttctgagcgcactcgcctgctacgactgtcccgatggactggtgtgcttgtcccatatcaatgatctgtgcaagtgttcctcatctcggcaatacctgcgttaccgctacactttggatgagttacctgcaatgctgcataagctgaaagtgagggctgagtccttcgacacatgggcaaataaggtcagagtagcactggaggttgaagatgggcgcaaaaggtccctggaagagctgagagctctcgaaagcgaggccagagagcggcgattccctaattctgagcttctccaacaactgaagaattgcctgtctgaagctgaggcatgtgtgtcccgcgctctgggacttgtgtccgggcaggaagcagggcctcacagagttgccggactacagatgacgttaacagaattgcgcgcctttctggaccagatgaataatcttccatgtgcaatgcaccagatcggagacgtgaagggagtgttggaacaagtggaggcctaccaagccgaagctcgagaagccctggccagtctcccatccagtccgggattgctccagtcactgcttgagagaggcagacagctgggggtagaggtgccagaggcccaacagcttcagcgacaagtagaacaggctcgctggttggatgaggttaagcgtacccttgcaccaagtgcaaggcgcgggactttggcagtgatgcgcggattattggtggccggcgccagtgttgccccgagcccagccgtggacaaagctcaggccgaactccaagaacttcttacaatcgctgagaggtgggaggaaaaggctcacctgtgcctggaagccaggcagaaacacccccctgcgactctggaggctatcatccgcgaagccgagaatatacctgttcacctaccgaacatccaggccctcaaggaagctttagctaaggcccgggcctggatcgccgatgtagatgaaatccaaaatggcgaccattacccttgcttggacgacctggagggcctcgtcgctgtgggccgtgatttgcctgttggactcgaagagctgaggcagctggagttgcaggtcctaaccgctcacagttggcgggagaaagcatctaaaacgtttcttaaaaaaaatagttgctatacgcttctggaagtgttgtgcccatgcgctgatgcaggctcagactccaccaagcggtcacgctggatggagaaagaactgggactgtacaaaagcgacaccgagttattgggacttagcgcacaggatctgagggatcccggtagtgtgatcgtggccttcaaggaaggggagcagaaggagaaagagggaattctgcagttaaggcgcacaaatagtgccaaaccgagtcctctggcctctagctctacagcatcctccacgacatctatctgcgtttgcggccaggttctggcaggagcaggagccctccaatgcgatctttgccaggactggttccatggcaggtgtgtctcagtgcctcggctactgtcaagcccaaggcctaaccccacctctagtcctttactggcctggtgggaatgggatacaaagtttttgtgcccattgtgtatgcgatccaggaggccccggctggaaactatactcgcactgttggttgctctgcagcgtctgcctgtgcggcttccagaaggggaggctctacagtgtctgaccgaaagggctatcagctggcaggggcgggcccgacaggccctggcttctgaggacgtgaccgctctcctcggacggcttgctgagttgcgtcagcggttgcaagcggaacctcggccggaagaaccccctaactatcccgccgcaccggcttcagacccgcttcgggaggggtcagggaaagatatgcccaaagttcagggtctgcttgagaacggtgatagcgtcaccagccccgagaaggtcgccccagaggagggttctgatttagagctcctgagcagcctgctacctcagctaacagggcccgtgctcgagctgccagaggccacgagagctcctttggaggagctcatgatggagggtgatctgttagaggtgacactcgacgagaatcacagcatttggcaacttctgcaagcaggccagcctccagaccttgaaagaatcagaaccctcctggaactggaaaaggctgaaagacatggttcccgggcccggggcagggcattagagagaagacgcagaaggaaagtggatcgggggggagaaggcgacgatcccgcccgagaggaactcgagcctaaaagggtgcggagctcaggcccagaggctgaggaggtacaagaagaagaggagttggaagaagaaaccggcggtgagggtcccccagcccccattccaacaactggctcgccaagtacacaggaaaaccagaatggactggagcccgcagaaggcaccacctcaggcccttctgccccattttccaccctgacgcctcggttgcacctgccatgtccacagcagcccccacaacaacagctctag

SEQ ID NO: 122892 - DNA, 4683 bp, synthetic construct
  misc_feature 1..4683: note = Description of Artificial Sequence: Synthetic coding sequence
  source 1..4683: mol_type = other DNA
atggaacccggatccgatgactttctccctcctccagagtgtccagtgtttgaaccgagctgggcggagttcagagatccactgggttatatcgccaaaattagaccaattgcagaaaaatccgggatctgtaaaatacggcctcctgctgactggcagcccccatttgctgtggaggtcgataattttcgatttaccccaaggattcagcggttgaacgagttagaggctcagacgagagttaagctgaattacctggatcaaatcgcaaagttctgggagatccagggaagttctcttaagatccccaatgttgagcgcagaatcctcgacttatattccctcagcaagatagtggtggaggagggaggctatgaggccatttgcaaggatcggcggtgggctcgagtggcccagcgcctcaattatcctcccgggaagaacattgggagtttacttaggtcccactatgaaaggatcgtgtacccttacgagatgtaccagagtggtgcgaatctggtgcaatgtaacactagacctttcgacaacgaggaaaaggacaaagaatacaagccacactcaatcccgctgcggcagagtgtccagccttctaagttcaattcgtacgggcgaagagcaaaacggctgcaaccagatcctgaacctacagaagaagatatcgagaaaaatccagagcttaagaagcttcagatatatggcgccggccccaagatgatgggtctgggactcatggccaaggataaaaccctgagaaaaaaggacaaagagggacctgagtgtccccctacagtggttgtcaaggaggagctcgggggagacgttaaagtcgaatctacctccccaaaaacattcctggagtccaaagaggagctgagccatagcccggagccttgcactaagatgaccatgcgcttgcgtaggaaccacagtaacgcgcagttcatcgagtcttacgtctgccggatgtgctctagaggcgatgaggacgacaaactgcttttgtgtgatgggtgcgatgacaattaccacatcttctgcctccttcctccactacctgagatccccaaaggtgtgtggcgctgccctaagtgtgtgatggctgagtgcaaacgaccacctgaagcgtttggtttcgaacaggctacgcgagaatatacactccagagcttcggagagatggccgactcgttcaaggcggattactttaatatgccggtccacatggtccctaccgagctcgtagaaaaggagttttggagactggtcaattctattgaggaagatgtgaccgttgagtacggggcagatatccactcaaaagagttcgggtctggattccccgtatccgattcaaagcgacaccttactccagaggaagaagaatatgccacatcaggatggaacctgaacgtgatgcctgtgctggaacaatcagtgctctgtcacataaatgctgatatttcaggcatgaaggtgccctggctctacgtgggcatggtgttctctgctttttgttggcacatcgaggaccactggagctattccatcaattatttgcattggggagaacctaaaacatggtacggtgtgccttctctggccgctgaacacctcgaggaggtgatgaagaaacttaccccggagttattcgatagtcagccagacctcctgcatcagctcgtgacattaatgaatccgaatactttgatgagccatggggtccccgtagtgaggactaaccagtgtgccggtgaatttgtaattacctttcccagggcatatcacagcggatttaatcagggctataactttgcggaagctgtcaatttttgcaccgccgactggcttccggccggtcgtcagtgcatcgagcactatagacggttgagacgctactgcgtgttcagtcacgaagagttgatttgtaaaatggctgcttgtcccgagaaactggatctgaatctggccgccgccgtccacaaggagatgtttataatggttcaagaggaaagaagactaagaaaagcgctcctggagaagggcattacagaggctgagcgggaagcctttgaattgctccctgacgacgagagacagtgtattaagtgcaaaaccacatgctttctatccgcactggcctgttatgactgcccagatgggttggtttgtctgtctcatatcaatgatctgtgcaaatgcagttcctcaagacaatacctgcgctaccgctacaccctagatgaactgccagcaatgcttcacaagttgaaggtgagggctgagagtttcgatacctgggcaaacaaagtgcgcgtggccctcgaggtggaagacgggcgaaagcgctcacttgaagagctccgggctttggagtcagaggccagggaacggcgctttcccaactccgagctactccagcagttgaaaaactgcttatctgaggctgaggcctgtgtatcccgggcactgggtctcgtgtccgggcaggaggccggacctcatcgagttgccggtttacaaatgacactgacggagcttcgtgcgttccttgaccaaatgaacaatctcccttgcgctatgcatcaaatcggcgatgtgaagggggtactggagcaggtggaagcctatcaggcagaagcccgggaggccctggcctctctgccttctagcccgggccttctgcagagcttactggagaggggccgacaattaggtgtggaagtgcccgaggcacagcagctgcagagacaagtggagcaggcgcgatggctcgatgaggtgaaaaggacactggcgccctctgctagacgaggcacgcttgctgtgatgcgcggactgctggttgccggggcctctgtggcgccgtcgcctgccgttgacaaagcccaggcggaactacaagagttattaacaattgcagaacgctgggaggagaaggcacatctttgcctggaggctaggcagaagcaccctccggccaccctcgaagcaattatcagagaagcagagaatatccctgtacacctacccaacattcaggccttgaaggaggctctcgcaaaggctagagcgtggattgccgatgtggacgaaatacagaacggcgatcactatccatgcctggacgacctggagggcctggtggctgtcggtcgcgatctgccagtggggctggaggagcttaggcagttggagttgcaggtcctcaccgcccatagctggcgggagaaggcatccaagaccttcctgaagaagaactcgtgttacaccttactcgaggtactgtgcccttgtgcagatgcgggttctgacagtaccaaacggtcaaggtggatggagaaggagttggggctgtataagagcgacacagaacttctgggcttgtcagctcaggacctccgggacccaggtagcgtcattgttgcatttaaggagggggaacagaaggagaaggagggtatcctgcagctgcgcagaacgaattcggcgaagccaagcccactggcctctagtagcactgcgtccagcacaacttcaatttgcgtatgcggccaagtcttggcgggggctggtgctctccagtgtgacttgtgtcaggattggtttcatggccggtgcgtgtctgttcctaggcttcttagttctccacgtcccaatccaaccagtagcccactcttagcttggtgggagtgggacactaaatttctgtgccctctttgcatgagatctagaagaccccggttggagacaatcctggccctcttggtagccctgcagcgccttcctgtgaggttgcccgagggagaggccctgcagtgcttaactgagcgcgcaataagctggcagggacgagcccgacaggccttggcgtcggaggacgtcacagccctcttaggccgcctggccgagttgcgccaaagactgcaggcggagccaagacctgaagaacctcccaattacccggctgcgcctgctagtgatccactcagagagggaagtggaaaagatatgccaaaagtacagggcctgctggagaatggggacagcgtcactagcccagaaaaggtggctcccgaggaaggctcaggcaagcgagatctggagctcctctcttccctgctgcctcagctgaccggtcccgtcctagaactgcccgaggctactagagcacctcttgaagaattgatgatggaaggtgacctgctcgaggtgaccctcgacgagaatcattcaatttggcaactcctccaagccggccaaccccccgacttagaacggataagaaccctgttggaactggagaaagcagaacgtcatggatccagagctagaggaagagcattggaacgccgacggcgacggaaagtggatagaggaggagagggtgacgatccggcaagagaagagctggagccaaagcgggtgcgatcttcaggccccgaggctgaggaagtacaggaggaggaagagcttgaggaggagacgggcggggagggacctccagctccaatccccacaacaggttctcctagtactcaggagaaccagaacgggttagaaccagctgaggggacaacctcaggacccagcgcccctttttctaccctgacgccccgcttgcacttgccttgtccgcagcagccgccacagcagcagctgtag

SEQ ID NO: 122893 - DNA, 4680 bp, synthetic construct
  misc_feature 1..4680: note = Description of Artificial Sequence: Synthetic coding sequence
  source 1..4680: mol_type = other DNA
atggagcctgggtctgatgattttctcccccccccagaatgtcctgtgttcgaaccttcgtgggccgagttcagggatcctttgggatacatcgcgaaaatacggccaattgcggagaaaagcgggatctgtaagattagacccccagctgattggcaacctccatttgctgtcgaggtagacaactttagatttactccccgaatccagcgactgaacgagctggaagcccagacccgagtcaaattaaactacttggatcaaatcgccaagttttgggaaattcaaggctcttctctcaagatccctaatgtcgaacgcagaatactggacttgtacagcctcagtaagattgtggtcgaggaaggggggtacgaggccatttgcaaggatcgccgatgggccagagtggctcaacgcctgaactacccgccgggaaaaaacatcggctccctcctgcgctcccattacgagcggatagtgtacccatacgagatgtatcaaagcggggccaacctggtgtgcaacaccaggccatttgacaacgaagaaaaggataaggagtataaaccacatagcattcccctccgccagtctgtccagccttcgaaatttaactcctacggtcgtcgcgccaagagattgcagcccgacccggagccaacagaagaagatattgagaagaacccggaattaaagaaactgcagatctacggggccggaccaaagatgatgggcctgggcctaatggctaaggataaaaccctgcgtaagaaggataaggaaggacccgaatgcccacccaccgtggtggtgaaggaggaattgggtggtgatgtgaaagttgagagtaccagtcctaagaccttcctagagtccaaggaagagctgagtcattcacctgaaccatgtaccaaaatgactatgaggctgcggcgcaatcactctaatgcacagtttatagagagctatgtctgtagaatgtgcagcaggggagatgaagatgacaagctcctcttgtgtgacggttgtgatgacaattaccatatcttttgtctactgcccccgctgcccgagattcccaagggcgtgtggaggtgcccgaagtgcgtgatggctgagtgcaaaagaccaccagaggccttcgggtttgaacaggccacaagagaatatacgctacaatccttcggtgagatggccgacagcttcaaggccgactacttcaacatgcccgttcatatggtgcccaccgaattagttgagaaggaattttggagactggtgaactccattgaggaagacgtcactgtcgagtatggcgctgatattcacagcaaagagtttggcagcggatttccggtttccgacagcaagcgtcatctcacgcctgaggaggaggagtacgctacatccgggtggaacttaaacgtcatgccagttctggagcagtcagtcctctgtcatataaacgccgatattagcgggatgaaggtgccttggctgtatgtcggaatggttttctcggcattctgttggcacatcgaagatcactggtcttatagcatcaattatctgcactggggtgagccaaagacctggtatggagtcccaagtcttgctgctgaacacctggaggaagtcatgaagaaattaacacccgaattattcgactctcagcctgacctgctccaccaactcgtcacacttatgaatcctaataccctgatgtcgcacggagtgccagtagttcgtaccaatcaatgtgccggtgaatttgtgatcactttccccagggcctaccactcaggattcaatcaggggtataatttcgcagaggccgtgaacttttgcaccgccgattggctgccagccgggcgacagtgcatcgaacactacagacgcctgcggaggtactgcgtgttttcccacgaggaactcatctgcaagatggccgcgtgtccagaaaagctggatttaaatctggcagccgccgtacacaaagaaatgttcatcatggtccaggaagaacgcagacttaggaaagccctgttagagaaagggataaccgaggccgaacgggaagcgttcgaactactgcctgatgatgaacgccagtgtatcaagtgcaagactacatgtttcctaagcgctctggcttgttatgactgcccagatggcctggtgtgccttagccatattaatgacctatgtaaatgcagtagctccaggcagtatttgcgataccgatataccttagatgagctgccggccatgctgcacaagttaaaggtcagagctgagtcttttgacacttgggccaataaagtgagggttgccttggaggtggaagatggaagaaagagaagtcttgaagagttgcgagcgttggagagtgaggctcgggaaagaaggtttcccaacagtgaactgctgcagcagctcaaaaattgtctgagcgaggctgaggcatgcgtttcgcgggctttgggactcgtgtccggtcaggaggctgggccacacagggtggccggactgcagatgaccctgactgagctgagagcatttctggatcagatgaacaacttgccctgcgcaatgcaccagatcggcgatgtgaagggggtcttggagcaggtggaggcataccaggcggaagcacgagaagccctggcctccctgccttcatcccctggacttcttcagagcctgttggaaagagggcggcagctgggtgttgaagtgccggaagcccaacagctgcagcgccaggttgagcaggcacggtggcttgatgaagtcaagcgtactctcgctcccagcgccaggcggggaactttagcagtcatgagaggattgttggtagccggtgccagcgtggctcctagccccgccgtagacaaggcgcaggccgaactccaggaactcttgaccatcgccgagcgctgggaggagaaagcccatctgtgccttgaggcccggcaaaagcacccaccggccaccctggaagcaattatcagggaggcggagaacatccccgtacacctacctaacatacaggctctgaaagaggctctggcaaaggcccgggcgtggattgcagatgtggacgagatacaaaatggcgaccactacccgtgtttggacgatctagaggggctcgtagctgtgggccgcgacttgccggtgggtctggaggagctgcggcagcttgagttacaggtgctaaccgctcacagctggcgggagaaagctagtaagacctttctgaaaaaaaactcttgctacaccctgctggaagtcctctgtccgtgtgccgacgcgggatccgactccacaaaacgctcgcgctggatggagaaggagctcgggctttataagagcgataccgaactcctaggtttaagtgcccaggatttgcgcgaccctgggagtgtgattgtagccttcaaggagggcgagcagaaggagaaggaaggcattttacagctccggcgaacaaatagtgctaaaccatccccactggcttcgagttccactgcctccagcaccacttccatctgcgtgtgcggacaagtactagctggggccggcgcccttcagtgtgatctgtgccaagattggtttcacggccggtgtgtaagcgttccccgcttactgagtagcccgcgaccaaatcccacgtcatctccactgctggcttggtgggagtgggatacgaagttcctttgcccgctgtgcatgcggtccagacggcctaggttagagacgatactcgcactcctcgtagctctccagcgtcttcccgttagactcccagagggtgaagcattacagtgtctgacagagagagcgatcagttggcagggacgcgccaggcaggcacttgcatccgaggacgtgacagctctcctgggcagacttgccgagttacgacagcggctgcaggcagagcccaggcccgaggagccccccaattacccggccgccccagcaagcgacccactgagggagggatctggaaaagacatgccgaaagtgcaggggctgttagagaatggtgattccgtcaccagtcccgaaaaggtggctccggaggaggggtctggtaagagggacctcgagctgctgagtagtctcctgccccaactcaccggacctgtcctggaactaccggaggctactagagcccccctcgaagagctgatgatggaaggagatttgcttgaggtgaccctggacgaaaatcactccatttggcagttactgcaggccgggcagccacccgacctggaaaggatcagaaccttactggaactcgaaaaggccgaaaggcacggaagccgcgctcgaggcagggcactggagagaagacggaggcgaaaagttgaccgaggaggagaaggggacgatcctgctcgggaagaactggagcctaagcgtgtgcgttctagcgggcctgaagctgaagaagtgcaggaagaagaagaactagaggaagagactggcggggagggtccaccagcacccatccccaccacaggatcccctagcacccaagaaaaccagaacggactggaacccgcagagggtacgaccagtggaccatctgcccccttcagcacgctaactccccggctgcacctgccgtgtccacagcagcccccacagcagcagttatag

SEQ ID NO: 122894 - DNA, 4140 bp, synthetic construct
  misc_feature 1..4140: note = Description of Artificial Sequence: Synthetic coding sequence
  source 1..4140: mol_type = other DNA
atggaaccagggtccgatgactttctgcctccccctgagtgcccagtgttcgaacctagttgggcagaatttcgtgatcctctgggctatatcgctaaaatccgtcctatcgccgagaagagtggcatatgtaaaattcgcccccccgctatagttgtggaagagggtggctatgaggctatttgtaaagatcggagatgggcacgggtcgctcagcgtctgaattatcctcccggaaagaatatcgggtcactcttacgaagtcactacgaaaggatcgtctacccgtatgaaatgtaccaatcaggggccaacttggtccagtgtaacactcgcccctttgataacgaggaaaaagataaagagtataagccccacagcattccgttgcgccagtccgtgcagccgtctaaattcaactcatacggaaggagggctaagaggctccagccagaccctgaacctacggaggaggacattgagaagaaccccgaactgaaaaagctgcagatatacggtgctggccccaagatgatgggcttgggactgatggcaaaggataagaccctcaggaagaaggataaagaaggacctgaatgccctcctacagtcgttgtaaaggaagagctgggcggagatgtaaaggtggaaagtacgagtcccaagacatttctggaatccaaggaagagctctctcattccccagagccatgcaccaagatgacgatgcgtttaaggaggaaccactcaaacgctcagttcatagagagttatgtttgccgtatgtgctcccgaggcgatgaagacgacaaactgctgctgtgtgacggttgtgacgataactatcatattttttgtttattgcctccactgcccgagatccccaaaggagtatggagatgtcccaaatgcgtcatggccgagtgcaaacgtcccccggaggcctttggtttcgagcaggccacaagagaatataccctccagagcttcggtgaaatggctgacagtttcaaggcagactacttcaacatgcctgtgcacatggtgccaaccgagttagttgagaaggaattctggagactggtcaatagcattgaagaagacgtgacagtagagtatggagcggatattcacagcaaggagttcggaagcgggtttcccgtaagcgatagtaagcgtcacttaactcccgaggaggaagaatatgccacctccggatggaacttgaacgtgatgcctgtgctggagcagagtgtactgtgccatattaacgcggatatttccgggatgaaggtgccatggctttacgtgggcatggtgttctcagccttttgttggcatattgaggaccactggagctactccattaactatctgcactggggcgagccaaagacctggtacggggtaccttccctcgccgccgagcaccttgaagaagtgatgaagaagcttacccctgaactttttgacagtcagccggacctgctgcaccagctggttaccctcatgaatcctaacacactgatgagccacggcgtgcccgtcgtcaggactaatcagtgcgcaggcgaatttgtcatcacgtttcctagagcctatcattccggcttcaatcagggttataatttcgctgaggccgtgaatttttgtacagccgactggcttccagcgggaaggcagtgcattgagcattataggcgccttcgacggtactgcgtcttcagtcatgaggaactgatttgtaaaatggcggcctgcccggagaagctcgatctgaacctagcagctgcagtacacaaggagatgttcatcatggtgcaagaggagcgacggctgcgaaaggccctgttggaaaaaggtatcactgaggcagaaagggaagcctttgaactgctgccggatgacgagcgacagtgcattaagtgtaagacaacatgctttctctcagcactcgcatgctacgattgtccggatgggctcgtttgtctctcccatatcaatgacctgtgtaagtgcagcagcagcagacagtacctacgctatagatataccttagacgagctcccggcgatgctccataagctgaaagttcgggccgagtcatttgatacttgggcgaacaaggtgcgggtggcgctggaagtggaggacggaagaaagcgtagcctcgaggaactccgggccctagagtccgaggcaagagagcggcggttcccaaatagtgaacttctgcagcagttgaagaactgtttgtccgaagccgaagcttgcgtcagccgcgctttgggcttggtgtccgggcaggaggccggccctcatcgggtggcaggactgcagatgactctgactgagctaagagccttcttggatcagatgaataatctgccatgcgcaatgcatcagataggcgatgttaagggagttctcgagcaggttgaggcatatcaggccgaggcccgtgaggctctcgcctctctcccatcatccccgggcctgctccagagcctgctagagaggggtcgacagctcggcgtagaggtgcccgaagcacagcagctgcagcgccaggtggaacaagcccgctggctcgatgaagtaaagcgcacactggccccaagcgctcgtcgggggacactggctgtcatgaggggactgctggtggcaggagctagcgtcgctcccagtccggccgtggataaagctcaggcagagttgcaagagttacttaccatagccgaaagatgggaagagaaggcccatctttgcctggaggctcggcagaaacacccccccgccacgctggaggctattatccgggaagccgagaatatccccgtccatctgccaaacatccaggccctgaaagaggccctcgcaaaggcccgtgcttggatcgccgatgttgacgagatccagaatggagatcattatccttgtctcgacgaccttgaaggccttgtggccgtaggtcgtgatctgccggttggactggaagagctgcggcagctggagctgcaagtgcttactgctcacagctggcgcgagaaggcaagcaagacctttctgaaaaaaaactcatgctacacactccttgaagtgctgtgtccttgcgcggacgcggggtctgacagcacaaagcgatctagatggatggaaaaggagctcgggctgtacaagtccgacaccgaactgctaggactgtccgctcaggatctccgggaccctgggagcgtgatcgtggcctttaaagaaggcgaacagaaggagaaagaaggcatactccagttgcggaggactaattccgccaagccatctccgttagccagctcaagtaccgcctccagcacgacatcaatttgcgtgtgcgggcaggtcttggctggagctggggctctgcagtgcgatctgtgccaggattggttccacggacggtgcgtgagcgtgccacgtctacttagctcccctaggccgaatccaacttccagtccactactggcctggtgggagtgggacacgaagttcctgtgccccctgtgcatgagatctagaagacctaggttggagactatcctagcactcctggtggcactacagcgcctgccagtccgtctcccagaaggcgaggccttgcagtgcttgaccgagcgtgccatctcttggcaggggcgagcccgtcaggctctagccagtgaagacgtcacagcactcttagggcggcttgccgagcttagacagcgattgcaggcagagccacggccagaggaaccgcctaactacccagcagcacccgcaagtgacccgctgagggaaggctcaggcaaagatatgccaaaagtccagggtctgttggagaacggtgactcagtgaccagtcctgaaaaggtcgcccctgaggaaggctcagacctggaactcctctcatccttgttgcctcagctgacgggcccagtgctagagctccccgaagccactagagcccccttggaggagcttatgatggaaggtgacctgttagaagttacccttgatgagaaccactctatccctgaatctttggatttttgtattcttaccccgcgttactgctctgatctcagctcctgggggcccgctccaggagtcttccctccttggtag

SEQ ID NO: 122895 - DNA, 4620 bp, synthetic construct
  misc_feature 1..4620: note = Description of Artificial Sequence: Synthetic coding sequence
  source 1..4620: mol_type = other DNA
atggaacctggctgtgacgagttccttcctccccctgagtgcccggtctttgaaccctcctgggccgaattccaagacccactgggttatattgccaaaatacgccccatcgccgagaaatccggtatatgtaagattagaccccccgccgattggcagcctccctttgccgtcgaagtcgataactttcggtttaccccacgcgttcagaggctcaacgagttagaggctcaaactcgcgtgaagctgaattacctggatcagattgcgaaattctgggagatccagggatcttcactgaaaatccctaatgtggagcggaaaatacttgatttgtattcgctgtctaagatcgtgattgaggagggaggctatgaggcaatatgtaaagaccgccggtgggcgagagttgctcaacgtctccattacccccccggcaagaacatcgggtctctactgagatcccactacgaacggatcatatacccctatgagatgtttcagagcggcgcgaaccacgttcagtgtaatactcatccattcgataacgaggtgaaggataaggagtataagcctcattccattcccctgaggcaaagcgtacaaccttccaaattcagttcctatagtagacgggccaaaagattgcagccagaccctgaacctaccgaggaagacatagagaaacaccccgagctgaagaaactccagatttacggtcccggtccaaagatgatgggactggggctgatggccaaagataaggataagacagttcacaaaaaagttacctgtccaccaacagtgactgtcaaggacgagcagagcggcggaggtaacgtttcttccaccctgctgaaacaacaccttagcctagagccgtgcactaaaaccactatgcagctgagaaagaatcattccagcgcacagtttatcgacagctacatctgccaagtttgctcgagaggcgatgaagacgataaactgttgttttgtgacggctgtgacgataattaccatatcttctgcctgctcccccccctgcccgagattcctagggggatttggcgctgtccaaaatgtattctggccgagtgtaaacaaccacctgaagcatttggattcgaacaggccacacaggagtattccctgcaatcgtttggagaaatggctgactctttcaaatctgactacttcaatatgcccgtccacatggtacctacggaactggtggaaaaagaattctggaggcttgtctccagtatcgaggaggacgtgaccgtcgaatatggagccgatatccactctaaagagttcggcagcggatttcccgtgagcaatagtaagcagaacctgagccctgaggagaaggagtacgcaacatcgggatggaatctgaatgtcatgcctgtgctggaccagtcagtgctgtgccatatcaacgctgacatcagtggaatgaaggtcccctggctgtacgtaggcatggtgttttcagccttttgttggcatatcgaggatcactggtcttacagcatcaattatcttcattggggcgagcctaaaacttggtatggagtgccgtctctcgccgcagagcatttggaagaggttatgaagatgctgaccccggagctgtttgattcacagcccgacctcctgcatcaactcgtgaccctgatgaatcccaacactctcatgtcccatggagttccagtcgtgcgaactaaccaatgcgccggcgagttcgtgattactttccctcgggcataccatagcggtttcaaccagggttacaatttcgcagaagccgtaaacttttgtacagccgactggctgccagctggacggcagtgcattgaacattacagacgcttgagacgctactgtgtcttcagccacgaggagttgatctgtaaaatggcagcttttccggaaaccctggacctgaacctggccgttgccgtgcacaaggagatgttcataatggtgcaggaggaaaggaggctccgaaaagccctgcttgagaagggggtaaccgaggccgagcgtgaggcgttcgagctgctgcccgacgatgaaaggcaatgcatcaaatgcaagactacttgttttctcagcgctctggcctgctatgattgccccgacgggctggtttgcctctcccatatcaacgatctttgcaaatgttccagcagtaggcagtatttgcgctaccggtacaccctcgatgaacttccgaccatgctccataagctaaaaattcgggccgagagttttgatacatgggccaacaaagtccgcgtcgcattggaagtcgaagatggtcgaaagaggagttttgaagaactccgggcactggaaagcgaagcccgggaacgccgatttccaaatagcgagctgctgcagcggctgaaaaattgcttgtctgaggtagaggcttgtattgcccaggtgcttggcttggtttctgggcaggttgcgcgcatggacacccctcaattgaccctgaccgagctcagggtgctgcttgaacaaatgggatccctcccctgcgccatgcaccagattggcgatgtcaaggacgtgctcgagcaggtcgaggcctaccaggctgaagcccgggaggcgctggccacactcccctcatcccctggactgcttcgctctcttctggagcggggacaacagctcggagtggaggttcctgaagctcatcagttgcagcagcaagtcgaacaggcacaatggttggacgaggtgaaacaggcacttgccccaagtgcccacagaggctccctcgtgatcatgcagggcctgctcgttatgggagctaagatcgcctcttcaccctctgtagataaagctcgagccgaactacaagaattgttaacgatcgcagaaaggtgggaggaaaaagctcacttttgcctggaggcacggcagaagcatccccccgcgacacttgaggccattataagagagaccgaaaatatacccgtacacctcccaaatattcaagcactcaaggaggcactgacaaaagctcaggcctggattgctgatgtcgatgaaatccagaacggggatcactacccatgccttgatgatctggaagggctagtcgccgtcgggcgcgacctgcctgtggggcttgaagaactgagacagctggagctgcaggttcttacggcacatagttggagggaaaaggcttccaaaacgttcctgaagaagaatagttgttatactctgctggaggtgctatgtccctgtgccgatgcgggatcagacagcaccaagaggtcgagatggatggagaaggctctcggcctgtatcagtgtgataccgaactgctgggcctgagcgcacaagatctccgtgacccagggtcagtgatcgtagcgttcaaggagggtgaacagaaagaaaaggaggggatcctacaactgagacgtaccaatagcgccaagcctagtccactggctccctccctgatggcctcttctccaacctcaatctgtgtgtgtggacaggtgccagccggcgttggagtcctgcagtgcgacctgtgccaggactggtttcacggacaatgcgtaagtgtgcctcacctgcttactagtccaaagccaagtctcacctccagtcctctgttagcctggtgggagtgggacacgaagttcctgtgtcccctgtgtatgagatctagaaggccacggttggaaactatccttgccctgttggtcgcattacagcggctgccagtgcgcctccctgaaggggaagccttacagtgcctgaccgagcgggctataggttggcaagatagggcccgcaaagccttggcgagcgaggatgtgactgctttactgagacagctggcagagctacggcagcagctgcaggctaagccacgacctgaggaggcatctgtctatacttctgcaactgcatgtgatcccattcgggaaggctctggtaacaatatctcaaaggtacaaggattgctggaaaatggagacagcgtgacatccccggagaatatggcccctggcaaaggcagcgacctggaactgctgagtagcctgctccctcagttgactggaccggtgctcgaacttccggaggctattcgcgcacccttggaggagctaatgatggaaggagacttgcttgaggttacgttagacgaaaatcattctatctggcaactgcttcaggctgggcagccaccagacctcgaccggattcgtactctgctggagctcgaaaaattcgagcatcagggcagtagaaccaggagcagagctttggaaagacggagaaggcgccagaaggtggatcaggggagaaacgtggaaaacctggtccaacaggagttgcaatcaaagcgggcaagaagctctgggattatgtcccaggtggggcgcgaagaagagcattaccaggagaaggccgacagagaaaatatgttcctgaccccctctactgatcacagccctttcctgaagggcaaccagaactcactccaacacaaagattccggatcaagtgcggcatgtccctccttgatgccactgctgcagctgtcctattcggatgagcaacaactttag

SEQ ID NO: 122896 - DNA, 4449 bp, synthetic construct
  misc_feature 1..4449: note = Description of Artificial Sequence: Synthetic coding sequence
  source 1..4449: mol_type = other DNA
atggaacccggatgtgacgaattcctgcccccccctgagtgccctgtgttcgagccaagctgggcagagtttcaagacccgctgggttacatcgccaagatccgtcccatagcagaaaagtccgggatctgcaaaattagacctcccgctgattggcagccacccttcgcagtggaagtcgataattttagattcacgccccgtgttcagcgacttaatgagttagaggcacagacaagagttaaactcaattatctagaccagatcgccaaattctgggagatacagggctcaagcctcaagatccccaacgtggagaggaaaatcctagatttatactcactgagcaagcaatgtaatacgcacccatttgataacgaagtaaaagacaaggagtacaaaccgcatagcattcccctgcgccagtcggtgcagcccagcaagttcagtagctactctcgtcgggctaagcggttgcagcctgaccccgagcctacagaggaggacatagagaagcatccagaactaaaaaaactccagatttacggcccaggccccaaaatgatgggtctggggttgatggcaaaggacaaggacaaaactgtccacaagaaagtaacttgccctcccaccgtgacagtcaaggacgagcagtccggaggcggaaacgtgtcatccacccttctcaagcagcacctttccttggaaccttgtactaaaaccaccatgcagcttcgaaaaaaccactcctcagcacaatttatagattcatacatctgccaggtgtgctcgcgcggggatgaggacgataagctgcttttctgcgacggatgcgatgacaattaccatatcttttgcctgcttcccccattacccgaaatcccacgcggaatttggcgttgcccaaagtgtatcctcgccgagtgcaaacagccccctgaagccttcggttttgaacaggccacccaggagtattcattgcagtcttttggagaaatggctgacagttttaaaagtgattacttcaacatgccggtccatatggtgccaacagagttggtcgaaaaagagttttggaggctcgtgtcatctattgaggaagatgttacagtcgaatacggcgcagacatccatagcaaggaattcgggtccgggtttccggtgtcgaatagtaaacagaacctgagtcctgaggagaaagagtatgctaccagtggatggaacttgaatgtgatgcccgtgttagatcagagtgttctgtgtcatattaacgctgacatcagcgggatgaaggtgccctggctgtatgtcggaatggtcttctctgcattctgctggcacatcgaggatcattggagctactccatcaactacctacattggggggaacccaaaacctggtacggcgtgcctagcctcgccgcagaacacctcgaagaggttatgaagatgttaacccccgagctgtttgactcccagcccgatctactgcaccaactggtcacactcatgaatccaaacacacttatgtcgcacggtgtgcccgttgtgcgtacaaatcagtgtgctggggaattcgtgatcacattcccaagggcctaccacagcggttttaatcaggggtataatttcgctgaagctgtgaatttctgtaccgcagattggctgccagcaggcagacagtgcatcgaacactaccgtaggctgcgcaggtactgtgtgtttagccatgaggaacttatctgtaagatggctgcattccctgagaccctggatctgaacctggcagtcgctgtgcacaaggagatgtttattatggtacaggaagaacgtcggctgaggaaagccttactcgaaaagggcgtcaccgaggctgagcgagaagccttcgagctcttgcccgacgatgagcgccaatgtattaagtgtaaaacaacatgctttcttagcgctctcgcttgctatgattgcccagacgggctggtttgcttgtctcacatcaacgatctgtgcaagtgtagctcttcccggcagtaccttaggtatcgctataccctcgacgagctgcctactatgctgcacaagcttaaaatcagggcagagtccttcgatacgtgggcaaataaggtgagggtggcactcgaagttgaggatggcagaaaaagatcctttgaagaactacgggccctggagagcgaagccagagaaagacgctttcctaatagcgagctactccagcggctcaagaattgtctgagtgaagtggaagcatgcatcgcccaggtcctcgggctcgtgagcggtcaagtggcaagaatggacactcctcagctgactctgaccgagcttcgcgtcttactggagcagatgggaagcctgccttgtgccatgcatcagatcggagatgtaaaagatgtcctggaacaggtggaggcatatcaggctgaggcgcgcgaggcactcgccactcttccgagcagtccaggcctgttgcggtctctcctggagagagggcagcaactgggcgtcgaggtgccggaggctcatcagctgcaacagcaggtggagcaagcccagtggctggatgaggtaaagcaggcgctcgcgccttccgcacacaggggaagtttggtgataatgcaaggcttactagtcatgggggcaaagatcgcaagttctccctctgtagataaagcccgggccgaactgcaggagctgctgactatagctgaacgctgggaggaaaaggctcatttttgcttggaagcacgacagaagcatcctcctgcaaccctggaggccataatacgtgagactgaaaacatacccgttcacctgcctaatatacaggccctcaaggaggccctaacgaaggcgcaagcgtggatcgctgatgtggacgagatccagaatggagaccattatccatgcttggacgatctcgaaggcttggtagccgtggggagagaccttcctgtgggtctggaggagctccgccagctggagcttcaagtgctgactgcccactcatggcgcgagaaagcaagcaagacctttttgaaaaaaaattcctgctacaccctgctggaggtgctctgtccttgtgcagatgccgggagcgacagtaccaagcgtagtcgctggatggagaaagcactaggattatatcagtgtgacactgagctgctgggcttaagcgctcaggatctccgggatcctgggagcgttatcgtagccttcaaggagggtgaacaaaaagaaaaagagggaatcctacagctgcgccggactaactccgctaaaccatctccacttgcaccatctttgatggctagctccccgacttcaatatgtgtgtgcggccaggttccggctggggttggggtgctccagtgtgacctgtgccaggattggttccacggccagtgcgtgagcgtgcctcacttactgaccagccctaagccttccctcacgagttctcccctgctggcttggtgggagtgggacacaaagttcctgtgccctctgtgcatgcggagcaggcgacctagactggagacaatccttgccttgctcgttgctctgcagagacttcccgtccgtctccctgaaggagaagcactccagtgcctcacagaaagagcaatcggctggcaagatagagcacgcaaagcccttgccagcgaggacgtgactgccctactgcgccaactggccgaactgaggcagcagctgcaggcaaagccacgccccgaagaggctagcgtctacacgtcagccacagcttgtgacccgataagagaaggcagtgggaataatattagtaaggtgcaggggctcctcgagaatggagatagcgtaactagccccgagaacatggcaccaggcaagggtagcgatcttgaactgctgagcagcctcctgccccagctcaccggtcccgtgctggagctgcccgaggctatacgggccccactggaagagctgatgatggaaggtgaccttctggaagtgactctcgatgagaatcattcaatatggcaactactgcaggccggccagccccccgatctcgataggattcgcacactgctggaattggaaaagtttgagcatcagggctcgagaacaagatcccgggccctcgaacgcaggcgcaggcgacagaaggttgatcagggcaggaatgtggagaatctggtgcagcaggaacttcagagtaaaagggcgagaagcagtggcattatgtctcaggttggacgcgaggaagagcattatcaagaaaaggctgatagggaaaacatgttcctgacgccaagtaccgatcattctccatttttgaaaggaaatcagaactccttgcagcacaaagactctggttcttccgccgcatgccccagtctgatgcctttgctgcagctttcgtatagtgatgaacaacagctgtag

SEQ ID NO: 122897 - DNA, 882 bp, synthetic construct
  misc_feature 1..882: note = Description of Artificial Sequence: Synthetic coding sequence
  source 1..882: mol_type = other DNA
ctacccaacattcaggcattgaaggaagccctgactaaagcccaggcctggatcgccgacgtggacgaaatacagaacggcgaccactatccttgtcttgacgacctggagggactggtggcagtgggcagagatcttcccgttggcctggaggaattaagacagctcgagttgcaagtcctatgcccctgcgcagacgccggaagcgactctacaaaacgcagccggtggatggagaaagccctgggactttaccagtgcgatacagagctgctgggtttatctgcacaagacctcagagaccctggctctgtgatcgtagccttcaaggaaggcgagcaaaaggagaaggaaggaattcttcaactcaggcgcaccaatagcgccaagccttcaccgctcgcccctagcctcatggcttccagtccaacttctatctgtgtttgcggccaggttcctgccggcgtgggggttctacagtgtgacttatgtcaagactggttccatggccagtgtgtgagcgtgcctcatctacttacttccccgaaaccaagcctgacaagctcacccctgctggcctggtgggagtgggataccaagtttctgtgcccgctgtgtatgagatctcgcaggccccgcctggaaaccatcctggccctcctcgtggctctgcaacggctgccagtgcgcttgcccgaaggtgaggccttacagtgcctcaccgaacgcgcaattggctggcaagatcgcgctcgcaaggcactagcatcggaggacgtcaccgccctgctgaggcaactggccgagctgaggcagcagctgcaggccaaacctaggcccgaggaggccagcgtatacacgtccgcaacggcgtgtgattag

SEQ ID NO: 122898 - DNA, 4431 bp, synthetic construct
  misc_feature 1..4431: note = Description of Artificial Sequence: Synthetic coding sequence
  source 1..4431: mol_type = other DNA
atggaacccggttgcgacgaatttctccctcctcctgagtgccctgtgttcgagccatcttgggccgaattccaagatcccctcggctacatcgcgaagattcgccccatcgccgagaagagtgggatctgtaagatcaggccaccagcagattggcagccccccttcgccgttgaagtggacaattttagatttacccccagggtgcagcgattaaatgagctcgaaatcgtcattgaagagggggggtacgaggcaatctgtaaggaccgcaggtgggccagggtagcacaacggttgcattatcccccaggcaagaacataggctctctgcttcgctcgcattacgagcggatcatctatccatacgaaatgtttcagagcggagcaaaccatgtacaatgtaacacccacccattcgacaatgaggtcaaggacaaggagtacaaaccccactccataccgctccgccaatctgtacaacccagcaaattctcgagttactctcggagagcaaagagactgcagcctgatccggaaccaactgaggaggacattgaaaaacatcccgagctaaagaaactgcaaatttatggccccgggcccaaaatgatgggactcggactgatggcaaaggataaggacaaaactgtgcataagaaggtgacttgccctcccacagttacagttaaggacgagcagtctggtggcggaaatgtgtctagtactctcctgaagcagcacctgagcctcgaaccatgcaccaaaacaaccatgcagttgagaaaaaatcacagctcagcccaatttatcgactcttacatttgccaggtttgttctagaggtgatgaggatgataaattgctgttctgcgacggatgcgatgacaactaccacatattttgtctcctcccacctctccccgagattcctcggggaatctggagatgccctaagtgtattctggccgagtgcaaacagcctcccgaggccttcgggtttgagcaggccactcaggagtactccttgcagtctttcggggagatggccgactcctttaaatccgactattttaacatgcccgtgcatatggtgccaactgagctggtagagaaggagttttggaggcttgtgtcaagcatcgaagaagacgtaacagtggaatacggagccgacatccactccaaggaattcggctcaggctttccagtgagtaactctaaacagaacctctccccagaggaaaaagagtacgccacatcaggttggaatctgaacgtcatgcctgttctcgatcagtcagttttatgtcacattaacgccgacatttctggcatgaaggtcccttggctgtacgtgggcatggtgttcagcgcattttgctggcatattgaggatcattggtcatacagcataaattacctgcactggggagaacctaagacatggtatggagtgccaagtcttgccgcagaacacctggaggaggtcatgaagatgctaacccctgagctcttcgattcacaacccgaccttcttcatcagctggttaccctcatgaatccaaatactctgatgtcccacggcgtgcctgttgtgagaacaaatcagtgcgctggagaattcgttattacgtttcctagagcatatcactcgggcttcaaccagggttataactttgccgaagctgtgaatttttgcacagctgactggctccctgccggtcgacagtgcatcgaacactatcgcagactccggagatattgtgtattttctcatgaagaattaatctgcaaaatggcagcatttcctgagacgctcgatctgaacctggcggtcgcagtgcataaggaaatgttcatcatggtgcaggaagaaagacggttacgcaaagcacttctggagaaaggcgtgacagaagctgagcgcgaggcattcgaactgctccccgacgacgagcggcagtgcatcaagtgcaagactacttgcttcctttctgcacttgcatgctacgattgtccggacgggctcgtctgcctctctcacattaacgatttgtgtaagtgttcctcatccagacaatacctgcgttatagatatactctcgatgaactgccaactatgcttcacaaattgaagattcgcgccgaaagtttcgacacctgggccaacaaggtgcgtgtggccctggaggtcgaggatggccggaagcgctcattcgaagagctgcgagcgctggagagtgaggcacgcgagcggagattccctaatagcgaactcctccagcgcctgaagaattgcctttccgaagtggaagcttgtattgcccaggttcttgggctcgtgagtggccaggtggcgcgcatggacaccccccagttgactctcacagaactgcgggtactgcttgagcagatgggttccttaccttgcgccatgcatcagatcggtgacgtgaaagatgtattggagcaagttgaagcgtaccaggctgaggcgcgggaagctctcgcaacattaccaagctcacctgggttacttagatcactgcttgagcgcgggcagcagctgggcgttgaagtcccagaggcacaccaactgcagcagcaggtggagcaagcacagtggctcgatgaggttaagcaggccctagcaccatctgctcaccgaggttctctggtgataatgcaagggcttctcgtcatgggagccaagattgccagctccccaagcgttgataaggctagggcggagctacaggaactgcttactatagccgagcggtgggaggaaaaagcgcatttttgcttggaggcccgacagaagcatccgcctgcaactctggaggccataatccgagaaaccgaaaatattcccgttcaccttcccaatatccaggctctaaaggaagccctcaccaaggcacaggcctggatagccgatgtcgacgagatccagaatggagaccattatccttgtttagacgacttggagggcctggttgcggtcggcagagatttgccagtcggcctagaagagctcaggcagttagagctccaagtgcttaccgcacactcctggcgcgaaaaggcttctaagactttcctcaaaaagaactcatgttatacactattagaggtcctctgcccgtgtgccgacgccggctccgattccacaaagcgcagcaggtggatggaaaaagctctcgggctgtaccagtgtgacactgagctgctgggtctgagcgcccaggacttgagagatcccggctctgtgatcgtggccttcaaagagggagaacaaaaagagaaagaaggaatcctccaactgcgtcgcacaaacagtgcaaagccaagccctctggccccctcactgatggcttcatcccctacgagcatctgcgtgtgcggccaggtgcccgccggtgtaggagtgctgcagtgtgatctgtgtcaggactggttccatgggcagtgcgttagcgtccctcacctcttaaccagcccaaagccatcactgacctcttcgccactgcttgcatggtgggaatgggacactaaattcctgtgccctctgtgtatgcgctcacgacggccccgactggagaccatcctggctttgcttgtggccctccagcgcctgcctgtgagactgccagagggggaagctctgcagtgcctcacagagcgggccatcgggtggcaggatagagcacggaaggctcttgcttcagaagatgtgactgcactattacggcagttagcggagttgagacagcagctccaggctaaaccaaggcctgaagaggcgagcgtttacacgtcagccaccgcgtgtgacccgattcgggaaggctcaggtaataatatctctaaggtccaaggattattggaaaatggggactcggtaacatcacctgagaacatggcccccgggaaaggttccgacctggagctgttgtcctcgctactgccccagctgactggcccagtgctcgaactgccagaggcgatcagggcacccttagaggaactcatgatggagggcgaccttctggaagttacgctcgacgagaaccattccatatggcagctgctgcaggccggacagcctcccgacctggacagaatcaggaccctgctggaattggaaaaatttgagcaccagggcagccgcacccggtccagagccttagagagaagacgccggcgccaaaaggtcgatcagggtagaaatgtcgagaacctggtgcagcaagaactgcagtcgaagagagctaggtcgtctgggattatgtcacaggtgggacgagaagaggagcactaccaggaaaaagcagatcgcgagaacatgttcctgacgccttccaccgaccatagtccatttctaaagggtaatcagaatagccttcaacataaggactctggatag

SEQ ID NO: 122899 - DNA, 1278 bp, synthetic construct
  misc_feature 1..1278: note = Description of Artificial Sequence: Synthetic coding sequence
  source 1..1278: mol_type = other DNA
atggaacctggctgcgatgagttcctcccacctcctgagtgtccagtatttgagccgtcctgggcggagtttcaggaccccctcgggtacatagcaaagattaggccaatcgccgagaaaagcgggatttgcaagataagaccaccggccgactggcagccaccttttgcagtggaagttgacaacttccgcttcaccccccgggtacagcgtctgaacgagctagaggcccagacccgggtgaaactaaactacctggaccagatcgccaaattctgggagattcagggaagcagcttgaagattccgaatgtggagaggaagatactcgatctttacagtctgtccaaaatcgtgatagaggaaggtgggtatgaagccatctgcaaggatcgtagatgggcacgtgtcgcgcaacgtctccactatccaccgggaaaaaatattggctcgctactgcgctcccattatgaacgcatcatctatccgtacgaaatgttccagtctggagctaaccatgtgcctgaaccaaccgaggaggacatagagaaacaccccgagctgaagaagctgcaaatttacggaccaggcccaaagatgatgggactgggactgatggctaaagacaaggataaaaccgtgcataagaaggtaacctgtccacctactgtgactgtgaaagacgaacaatcgggtggggggaatgtgagctctactctgctaaaacaacacctttcgctagagccttgtactaaaacgaccatgcagctcaggaagaaccattcaagcgcccagtttattgattcatacatttgtcaggtgtgctcccgtggggacgaagatgataagctccttttctgcgatgggtgtgatgacaattaccacatcttctgcttgctacctcctctacccgagatccctcgcggcatctggcggtgccctaagtgtattctggctgaatgtaaacagccacccgaggccttcggctttgagcaggccacccaggaatattccttgcagtcctttggggaaatggctgacagcttcaagtcggactatttcaacatgcccgttcacatggtaccaacggaactggtcgagaaggagttctggcgacttgtaagttccattgaagaggatgtgaccgtagagtacggagctgatatccactccaaggaattcggcagtggcttcccagtaagcaactcaaagcagaatctgagtccagaggagaaagagtacgccacttcaggatggaacctgaacgtcatgccctag

SEQ ID NO: 122900 - DNA, 2667 bp, synthetic construct
  misc_feature 1..2667: note = Description of Artificial Sequence: Synthetic coding sequence
  source 1..2667: mol_type = other DNA
atggagcctggatgcgatgagtttctgcctcccccagagtgccccgtgttcgaacctagctgggcagagttccaagatcccctgggctacatcgccaaaatccgccccattgcagagaagtcaggcatctgtaaaatcagaccacctgccgactggcagccaccgtttgcggtcgaagtggataactttaggtttacccccagggtgcaacgactcaacgagctggaagcccaaacccgcgtgaagctaaactacctggatcagatagctaagttctgggagattcagggaagcagtcttaagatccccaatgttgagcggaagattctggatttgtacagcctgtctaagatcgtgattgaggagggaggttacgaggcaatctgcaaagatcggaggtgggcacgagtcgcccaacgcctccactatccccctgggaaaaacatagggtcactgttgcggtcacattatgagagaattatttatccctacgagatgttccagagcggagctaatcatgttcaatgcaacacccaccccttcgataacgaggtgaaagacaaggagtacaagccccatagcataccgttacggcaaagtgtgcagcccagcaagttttctagctactccaggcgagccaaacgcctgcagccagaccccgagcctactgaggaggacattgagaagcacccagagctgaagaagctgcaaatttacgggcccggccccaaaatgatgggtctgggtttaatggctaaagacaaggataagaccgtgcacaagaaggtgacctgcccccccaccgttacagtgaaagacgagcagagtggtggggggaatgtttcatccaccctgctgaagcagcacctctctctggagccttgtactaaaacgaccatgcagttaagaaagaaccactctagcgcacaatttatcgactcatatatttgtcaggtgtgctcgcgcggtgacgaggacgacaagcttttgttttgcgacggctgtgatgataattaccacattttttgcttgttaccccctctcccagagattccacggggcatctggcgctgtcctaagtgcatcctggcagaatgcaaacagccgccggaggcattcggattcgagcaagcaacccaagagtacagcttgcaatcgtttggcgagatggcggactcgtttaagagcgactacttcaacatgcccgtgcacatggtgcccaccgagctggtggagaaagaattttggcgcctcgtctcttccatcgaggaggacgtcaccgtcgagtatggcgcagatatccactctaaggaatttggatcaggatttcccgtgtccaatagcaaacaaaatctgagccccgaagagaaagagtatgctacttctggctggaatttgaatgtaatgcctgtgctggaccagagcgtgctatgtcacatcaacgccgacatctccggtatgaaagttccatggctgtatgtcggtatggttttctctgccttctgttggcatatcgaggatcactggtcctacagtataaactaccttcactggggggagcccaaaacctggtatggcgtgccaagcctggccgcggagcatttagaggaggtgatgaagatgctgaccccagaactgtttgactcccagcccgatctcctgcatcaattggtcaccctgatgaaccctaacacactcatgtcccatggcgtgccggttgttagaaccaaccagtgtgccggcgagttcgtgattacctttccacgagcctatcatagtggatttaatcagggatacaattttgccgaggccgtcaatttttgcacggctgattggctgcctgctgggagacagtgcattgagcattatagacgccttcgccggtattgcgtgttttcccatgaagagttgatttgtaagatggccgccttccccgagactctcgatttaaacctggcagtggctgttcacaaggaaatgttcatcatggtgcaggaggagcgcagactgcgtaaggctctgctggagaagggcgtgacagaagcagaacgagaggcctttgagctcctgccagatgatgagcggcaatgcatcaagtgcaaaaccacttgctttctatcagccttagcctgttacgattgcccagacgggctggtttgtctctcccacatcaacgacctttgcaaatgttcttcttccagacagtatctgagataccggtacacgctcgatgagctgccaacgatgctgcacaagctcaagattagggccgagtcttttgacacctgggctaacaaggtcagagtggcgttggaggttgaggatggacgaaagagaagcttcgaggaattgcgggctctggaaagcgaagccagagagaggaggtttccaaactcagagcttctacaacgattaaagaattgtctcagtgaggtggaagcatgtatcgcacaggttttaggtttggtgagcggccaggttgcccgcatggatacacctcagctgacgctaacggagctgagggtccttctcgaacagatgggatccctgccatgcgcaatgcaccagatcggcgacgtaaaggtgttaagctggaagtggaggaggtatgttttcccataccatttatgcgtgtatagcatgcaggggaacatcctacccgactag

SEQ ID NO: 122901 - DNA, 4713 bp, synthetic construct
  misc_feature 1..4713: note = Description of Artificial Sequence: Synthetic coding sequence
  source 1..4713: mol_type = other DNA
atggaacccggttgcgacgagttccttccccctcctgaatgcccagtttttgagcccagctgggctgagtttcaggatcctctgggctacattgccaagattagaccaattgctgagaaaagcggaatctgcaagatccggccccctgcagattggcagcctcccttcgcagtggaggtcgacaacttcagatttacccctagagttcagcgtcttaatgaattagaagcacagacacgcgtgaagttgaactatctggaccaaattgccaagttctgggagatccagggatccagtctcaagattccaaacgtcgaaagaaaaatcttagacctgtacagcctgtctaagattgtaattgaggaaggcggatacgaggccatctgcaaggatagaagatgggccagagttgcccaacgactgcactaccccccggggaaaaatataggatctctcctcaggagccattatgaacgcattatctatccatacgagatgttccaaagcggggctaatcatgtacagtgcaacactcatcccttcgacaacgaggttaaagacaaggagtataagccccactcaattcccttgaggcaaagtgtgcagcccagcaagtttagttcctactcaaggcgggctaagcggctccagccagaccctgaacccacagaggaggacatcgaaaagcatccagagctgaaaaagctacaaatctacggccctgggccgaaaatgatgggactcggactcatggccaaggataaagacaagacggttcacaaaaaggtgacctgcccccctaccgtgaccgtgaaagatgaacagagtggcggggggaacgtcagctccacgctgctgaagcagcacctcagcctggagccctgcacaaagaccacaatgcagctgaggaagaatcattccagcgcacagttcatcgatagctatatctgccaggtgtgttccaggggggatgaggacgacaagttgctgttctgcgatggctgcgacgataactatcacatcttctgcctgctgcctccactcccggagatccctagaggcatctggcgctgtccaaaatgcattctcgcggaatgtaaacaacccccagaggccttcggctttgagcaggctactcaggaatactcattgcagagctttggtgagatggccgattcatttaaatccgattacttcaacatgccagttcacatggttccaacagaactggtagaaaaggaattctggaggctggtctcgtctattgaggaagatgtgacggtggagtacggcgcagatatccatagcaaggagtttggaagcgggttcccagtgtcaaattctaaacagaacttgtctcccgaagaaaagagacagtcactcacagtcctgaccaggctgataagctcgttttgggcacaggctgtcctgccaccatggcccccgaaagtactggggctccaggagtacgcaacctcgggctggaatcttaacgtgatgccggtccttgaccagtctgtgttatgccatatcaatgctgatatttctggcatgaaggttccatggctgtatgtcggcatggtgttcagcgcattttgctggcatattgaagaccattggtcttacagcatcaactacctgcattggggagaacctaaaacctggtatggcgtgccctcgctggctgcagagcacctagaggaagtgatgaaaatgctcactcctgagctgttcgactcccaacccgacctactccaccagctggtcaccctgatgaatcccaacaccctcatgtctcatggcgtccctgtcgtccgaactaatcagtgcgcaggagagtttgtgataacattcccaagagcttatcactcagggttcaaccagggttacaactttgcagaggccgttaacttctgtacggccgattggctgccagcgggtcggcagtgcatagaacattacaggcggctgcggcgatattgcgtgttcagtcatgaagaactgatctgcaagatggccgctttccctgaaacgctagacctaaaccttgctgtggcggtgcataaagagatgttcattatggttcaggaagaacgccgcctccgcaaagcactgctggaaaagggggtcaccgaggctgagagggaagcctttgagctcttgcccgacgatgagcgccagtgcattaaatgtaagacaacttgttttctgtcggccttggcatgctacgactgtccggatgggctggtatgcctgtcacatatcaatgatttatgcaagtgtagcagctctagacagtacctcagatatagatatactctggacgaacttcccacaatgttacacaaactgaaaatccgcgcagaaagctttgacacgtgggctaacaaggtcagggtcgccctggaagtggaagatggacgcaagaggagcttcgaggagctgcgggccctggaatcagaggcgcgtgagcggcgcttcccaaactctgagctcctacaaagactgaagaactgtttgagcgaggtggaggcctgtattgcccaagtcctggggctggtgtcaggacaggtcgcaaggatggataccccccagctgacactgaccgagctccgcgtgctcctcgagcagatgggatctttaccctgcgcaatgcatcagatcggtgatgtgaaagacgtgcttgaacaagtagaggcctaccaggctgaggccagggaagctctagccactctgcccagcagtccgggacttctccgttcattgctcgaacgggggcagcagttgggggtggaggttcctgaggcgcatcagttgcagcaacaggtggagcaagcccaatggttagatgaggtaaaacaggctctagcccccagcgcacaccgaggatccctagtgataatgcagggactcctggtcatgggcgcaaaaattgctagctctccatccgtagacaaggccagagcggagctgcaggagctcctcactatagcagagaggtgggaagaaaaggctcatttctgtctggaggcccgtcagaagcacccaccagcaacccttgaggcaatcatccgcgagacagaaaatattccagtacatctgccaaacattcaagcactgaaagaggccctcaccaaggctcaggcatggatagctgacgtagatgagatccaaaacggggatcattatccctgcttggacgatctggagggactggtggctgtggggagagatctcccagtgggccttgaggagctgcgccaactggaactgcaggtgttaacagcccattcatggagagagaaggcatcaaaaacctttcttaaaaagaattcttgttacacgctccttgaggtgctctgcccttgtgcagatgctggaagcgacagcaccaagcgcagcagatggatggaaaaggctttagggctgtaccaatgcgacacagagctcctgggactctccgcccaggatcttcgcgatccagggagcgtcattgtggccttcaaagagggagagcagaaagagaaagaagggatcctgcagctgcgtaggacgaatagcgccaagccctccccccttgctcctagcctcatggcttcatcgccaacgtctatctgtgtgtgtgggcaagttcccgctggggtcggcgtcttacagtgtgatttgtgccaggactggttccatggccagtgtgtgagtgtcccgcaccttctcacatcaccaaagccaagtctgacgtctagccccctcctagcatggtgggagtgggacacaaagttcctgtgtcctttgtgcatgaggtcaaggagacctagacttgaaacgatccttgccttactggtcgccttacagagacttcccgtgcgactgccagagggagaggcattacagtgccttactgagcgcgcaattggctggcaggacagagcaagaaaagccctcgcttcggaggacgtgacagctcttctcaggcagctcgccgagctcagacaacagctgcaggctaagccaaggcccgaggaagcaagtgtgtacacttccgccaccgcctgtgatccaattcgcgaggggtcaggtaataacatatccaaggtccaggggctgctcgagaacggggactctgttacgtctcctgagaacatggcccctggtaagggctctgatctcgagctgctttcctcactcttgccccagctgactggtcctgtacttgaactccccgaggcaatcagggcccctctggaggagctgatgatggaaggggatctcctggaagtcacacttgacgagaatcactccatctggcagctgctgcaggccggacaacctcccgacctggatcgtataaggacactgctggagctggagaagttcgaacaccagggaagccgcacgcgtagtagagcgctcgagcggcgccgcaggcggcagaaggtagatcaggggcggaacgttgaaaatctggtgcagcaggaactccagagtaagcgagcccgcagtagcggtatcatgtcacaagtgggtagagaagaggagcattaccaagagaaagccgacagggagaacatgtttttaacaccttcaacagaccattcaccattcctcaagggcaatcagaattcccttcagcacaaagatagtgggtcttctgctgcctgtccctccttgatgccacttcttcagctgtcatactccgatgaacagcaactgtag

SEQ ID NO: 122902 - DNA, 3297 bp, synthetic construct
  misc_feature 1..3297: note = Description of Artificial Sequence: Synthetic coding sequence
  source 1..3297: mol_type = other DNA
atggatctgggcaccctttacgagtcttgtaaccaaccacaggacgcaatcaagtgctatctcaatgctactcgaagtaaatcatgttcaaatacgtcagcgctggccgcgaggataaagtacctccaggcacagttatgcaacctaccccagggttcactgcagaataagaccaaacttttgccctcaatagaagaagcttggtctttacccatccctgccgagttgacttctaggcagggcgctatgaacacagcgcaacaggcttgcaaaccacatcatccaaacacagaacccgtcctcggactgtctcagacccctatttcccaacaaagcctgccattgcacatgattcccagctcccaggtcgacgacttgtctagccccgccaaaagaaagagaacgtcaagtccaacgaaaaatacaagtgataattggtccggaggccacgccgtaagccatccccccgtgcagcagcaggcccattcgtggtgcctgacacctcagaaactgcagcacctggaacagctccgcgcaaacagaaataacctcaaccccgcacagaagcttatgctggaacaattggaatcccagtttgtgctcatgcagcagcatcagatgaggcctaccggggtggctcaggttagatctacaggaatacccaatggccccaccgcagatagtagtctcccaactaatagtgtgtcaggccaacagccacaactggcgctgacaagggttccaagtgtttcacagcccggtgttcgcccagcctgccctggtcagcccctcgccaacggccccttttccgctggccacgtaccatgcagcacaagcaggacattaggaagtaccgacactatcttgatcggaaacaaccacatcactgggtccggctcaaatggcaacgtcccgtacctgcagcgtaatgccctcaccttgccacacaaccgtaccaacttgacatcctctgccgaggaaccctggaagaaccagctatctaactccactcagggcctacataagggacaatcctcccactctgccggacccaacggtgagaggccactgagttcaactggcccttcgcaacatctgcaggcagccggctctggaattcaaaatcagaacggacatcccactctgccatcgaactccgtgacccagggagccgctcttaatcatctctcctcccatacagctaccagtggaggtcaacagggcatcacactgaccaaagaatctaagccttcaggcaacatcctgactgttcccgagacttcgcgacatacgggcgagacacccaactccactgcctctgtcgaggggttgcctaaccacgtccaccaaatgacagctgatgccgtctgctctccatcccacggcgactctaagagtccaggattactgagttctgacaacccccagttatcggccctgttgatgggcaaggctaataacaatgtggggactggcacatgcgacaaagtaaataacatccacccggctgtgcatactaagacggataattccgtcgcttcctcgccctcttcagctatttccacggccactccctcccccaagtccaccgagcaaacgactactaacagtgtcacttctctgaactccccccacagcggactgcatactataaacggtgagggcatggaggagagccagagtcccatgaagacagatcttcttctcgtgaatcacaagccctcccctcagatcatcccgtctatgagcgtaagcatctaccccagttcagctgaagtattaaaggcctgtcgcaatctgggcaaaaatggcctttctaactcaagcatactgctggataagtgtcctcctcctcggcccccatcatcgccttatccacccctcccaaaagataaactgaacccaccaacgccatccatatatctggagaataagcgggacgcgttctttcctcccctgcatcagttctgtaccaatccaaataaccccgtcactgtgattcggggcttggccggggcgctcaagctcgacttgggactgttctctaccaaaaccctggtggaagcaaataatgagcatatggtggaggtccggacccagctcctccagcccgctgacgaaaactgggaccccacagggacaaagaagatatggcattgcgaaagcaaccgcagtcatactacaattgccaaatatgcgcagtaccaggcttcttccttccaggaaagtctgagggaggagaatgaaaagcgatcccatcacaaagatcacagcgactcagagtcaacctctagcgataattctgggagaaggcgcaaaggtccatttaaaaccatcaagttcggaaccaacatagatctcagtgatgataagaaatggaagctgcagctgcacgagctcactaagctgcccgcctttgttcgggtggtgtccgctggcaatctgctgagccacgtgggacacaccatcctcggtatgaacacggtgcagttgtacatgaaggtacctgggtctcgcactccaggtcatcaagagaataacaatttttgctccgtgaatatcaacatcggccccggcgattgcgaatggttcgtcgttcctgaaggctattggggggtcctgaatgacttttgtgagaagaacaacttgaatttcttgatgggaagttggtggccaaacctggaggatctttacgaggcaaacgtaccggtatatcggtttatccagagacctggcgatctagtgtggattaacgctgggacggttcactgggttcaggctataggctggtgcaacaatattgcgtggaatgtcggccctctaactgcttgccagtataagctcgccgtagagcggtatgagtggaataagttgcaatctgtcaagtcgattgtgcctatggtccatctttcttggaacatggcccgaaatattaaagtgtcggaccccaagttgttcgaaatgattaaatattgtctccttcgtacactaaaacagtgccagacactgcgcgaggctctcattgcagcagggaaagagatcatatggcacggcagaaccaaggaagagcctgcccactattgttcgatatgcgaagtggaggtttttgacctcctcttcgttaccaacgagtccaactcccgcaaaacctatatagtacattgtcaggattgtgctcggaaaacctccgggaacctggagaattttgtggtcctggagcaatacaagatggaagaccttatgcaggtgtacgatcaattcaccttggcaccgccactcccttcagctagtagctag

SEQ ID NO: 122903 - DNA, 4206 bp, synthetic construct
  misc_feature 1..4206: note = Description of Artificial Sequence: Synthetic coding sequence
  source 1..4206: mol_type = other DNA
atgaaatcctgcggtgtgtccctggcaaccgccgcggcagctgcagctgcctttggggatgaggagaaaaagatggccgcagggaaggcttcaggtgagagcgaagaggcttcaccatcactgaccgcagaagagcgagaggcccttggaggcctggacagcagactgttcgggttcgtccggttccatgaggacggcgcccgcactaaagcgctgctgggaaaagcggtgcggtgttacgaaagccttatcctcaaagccgagggtaaggtcgagagtgactttttttgccagttagggcattttaaccttttgctggaagattatccaaaagctctgtccgcataccagcgttattattctctgcaatctgattactggaagaatgctgcgtttctgtatggtctaggactcgtctatttccactataatgccttccaatgggctattaaggcctttcaagaagtgctgtatgtggatccaagtttctgccgggccaaagagatccacctccgcctcggtctgatgtttaaggtaaataccgattacgaatctagcttgaaacacttccagctggccctggtcgattgcaatccttgcactctttccaacgccgagatccagtttcacatagctcacctctacgaaacacagcggaagtatcatagcgcgaaggaggcgtacgaacagcttctccagaccgagaatctgtccgcgcaggtcaaagccaccgttctgcaacagttggggtggatgcatcacaccgttgatctactcggcgataaagcaactaaggaaagttatgccatccaatatttacagaagtcattagaggcagacccgaactccggccagtcatggtactttctaggccgctgttattcatctattggaaaggtccaagacgcttttatctcctacaggcagtccattgacaaatcagaggcaagcgcggacacctggtgctcaatcggcgttctttaccagcagcagaatcagcctatggatgcactccaggcttacatttgcgccgtgcaactggatcatggacacgccgccgcatggatggatttgggcactctctatgagagttgcaatcagccgcaggacgccattaagtgttacttaaatgccactcggtccaaatcgtgctccaacacatccgcacttgcggcaagaattaaatacctccaggcccagctttgcaatctaccccagggtagcttgcagaacaaaaccaaacttctgccaagtatcgaagaagcatggtccttgcctattcctgccgaactgacttcccggcaaggtgcgatgaacacggcccagcagaacacaagcgacaattggtctggaggacacgccgtctcacaccctcctgtgcagcagcaagcccactcatggtgtctaacaccacagaagttgcaacacctcgaacagctgcgggcaaacaggaataatttgaatccggctcagaagctgatgttagaacagttggagtcacagtttgtgctcatgcagcagcaccagatgcggccaacaggcgttgcgcaggtaaggtcaactggaattccaaacgggcctacagctgattccagtttgccaacaaactccgtgagtggacagcagccccagctggcgctgacccgagtgccttctgtgtctcagccgggtgtccgtcccgcctgtcccgggcagccattggcgaatggtcccttttcagccggccatgtgccgtgcagtacatcgcgcacgttaggaagcaccgacaccattttaataggcaacaatcatatcaccgggtcagggtccaatggaaacgtcccatacctacagcgaaatgccttaactctccctcacaaccgtactaatctgacaagctctgctgaagagccttggaaaaatcagctgtctaattctacacaaggcctgcataaaggtcaaagctctcactcggctggtcctaacggggaaaggcctctcagttctaccggtccatcccaacacctgcaggcagccgggagcgggattcagaatcagaatggacaccctactctcccttccaactccgttactcaaggtgccgccctcaaccacctgagcagccatacagcgacgtccgggggacagcaagggatcactctcaccaaagagagtaagccttccggcaacattcttacagttcccgaaacatccaggcacacgggtgagactcctaacagtacagcaagcgtcgaggggctgccaaatcacgtccaccagatgaccgccgatgccgtctgctcacccagccacggggattccaaatctccggggttactaagctctgataacccgcaactcagtgcactcctaatgggcaaagccaataataacgtagggaccgggacttgcgacaaggttaacaatatccacccggctgtgcacaccaaaacagataactcggtagcttccagccccagctccgctatcagcacggcgactccctccccaaagtctaccgagcagactaccactaactcagtcaccagtttaaacagcccccattcaggtctgcataccatcaacggtgagggcatggaggaatctcagtcccctatgaagacagacctcctgctggttaatcacaaacctagcccacagattatcccgtccatgagtgtgtccatttacccctctagcgcagaggttcttaaagcatgcaggaatctgggtaagaacggtctttcaaatagctccattcttttggataagtgtcccccacctaggcccccaagtagtccctaccctccgttgcccaaggacaagctcaaccctccaactccatccatctacttggaaaacaaacgcgacgcattttttccacctctacatcagttttgcactaatccaaacaacccagtgacagtgattagaggtctggctggagcacttaaacttgatctcgggcttttttctactaaaaccctcgtagaggccaataatgagcacatggtggaggtgcgcacacaactgcttcaaccagctgacgagaactgggaccctaccgggaccaagaaaatttggcattgcgaaagcaacagaagccatacaactattgccaaatacgctcaataccaagcgagttccttccaggaatcactgagagaagagaatgagaaacggtcccaccacaaagatcacagcgacagcgagagtacctcctccgacaacagcggacgcagacgaaagggcccctttaaaactatcaagtttggcacaaatattgacttatctgacgacaagaagtggaagctccaattgcatgagcttacaaaactgcctgcctttgtgcgggtagtgtccgctggaaatcttctgtcacacgtggggcacactattcttggcatgaatacagtgcagttgtacatgaaagtgcctggaagccgcacacctggtcatcaggaaaataacaacttctgttcagttaatattaacattggccccggcgactgcgagtggtttgtagtccctgagggatattggggcgtcctgaacgacttttgtgagaaaaataacctcaatttcctgatggggtcttggtggcccaatctcgaggatctctacgaagcaaacgtgcccgtgtatcgttttattcagaggccaggcgacttagtttggatcaacgctggaaccgtccattgggtccaggctatcggttggtgcaacaatatagcgtggaacgtgggacccctcactgcctgtcaatacaaactagcagtcgaacgctacgaatggaataagctgcagtcagtaaagtctatcgttccaatggtccacctgagttggaatatggcgcggaacatcaaggtctctgatcccaagctattcgagatgatcaaatattgtttgctgcgcaccctgaagcagtgccaaacactgcgcgaggcccttatcgctgctggaaaagaaatcatttggcacgggagaactaaggaagagccggcccattattgtagtatctgcgaagttgaggtcttcgatctgctgtttgtgacaaacgagagtaacagtagaaaaacctacatcgttcactgccaggattgcgcccggaagacatctgggaatctggaaaactttgtggtcttggagcaatacaagatggaagacttaatgcaagtatatgaccaattcactctggcacctccactgccctcagcgtcctcttag

SEQ ID NO: 122904 - DNA, 4227 bp, synthetic construct
  misc_feature 1..4227: note = Description of Artificial Sequence: Synthetic coding sequence
  source 1..4227: mol_type = other DNA
atgaagtcttgtggagtctcactagctaccgccgctgctgcagctgccgcttttggcgacgaagaaaagaagatggcagcaggtaaggctagcggagagtcagaggaagcatcgcccagcctgaccgccgaggagcgcgaggccttaggcggcttagacagccggctctttgggttcgtcaggtttcacgaggacggggctagaactaaagctctgttaggcaaagcggtcagatgctatgagtcgctgattctgaaagctgagggcaaggttgaatcagacttcttctgccaattgggccattttaacctgctattggaagattatcccaaggccctgtctgcctatcagcgctactactccctccaaagtgactactggaaaaacgcagcctttttgtatggcctgggattagtgtattttcactacaacgcctttcaatgggccatcaaggcatttcaagaggtgttgtacgtcgatcccagcttctgtcgagcgaaagaaattcatcttagactcgggctgatgttcaaggtgaacacagactacgaaagcagcctgaaacactttcagctggcactggtcgattgcaatccttgtacactgagcaacgcggagatccagtttcacatcgcacacttgtatgagacacagagaaaatatcactcagctaaggaggcttatgaacagctcctccagacggagaacctcagcgcacaagtgaaggccacagtactgcagcagttagggtggatgcaccacaccgtcgatctactcggtgataaagccacaaaagaaagctacgccatccagtatttacagaaaagtcttgaggctgaccctaattctgggcaaagttggtactttctgggcaggtgttacagttctattggcaaggtgcaagacgcatttatctcgtaccgacagagtattgacaaaagcgaggccagcgctgacacgtggtgcagcatcggagtgctgtatcagcagcagaaccagccgatggatgcgcttcaggcctacatttgtgcagttcagcttgatcatggtcatgccgccgcctggatggacctcgggaccttgtatgagtcctgcaaccagccccaggacgcaatcaagtgctacctaaatgctacaaggtccaagtcttgtagtaatacaagcgcattagctgcgcgcatcaaatacttacaggcgtgcaagcctcatcacccaaacactgaaccagtgcttggcctcagccaaacccctatcagtcagcaatctcttcccctccacatgattcctagcagtcaggtcgacgatctttctagtcctgcaaagcggaagcggacatcgagccctacaaaaaatacctcggataattggtctggaggtcacgctgtgagccacccacctgtccagcagcaggcgcatagctggtgcctgacaccacagaaactccagcatctggagcaactgcgggcgaatcgtaacaatctgaaccctgcccaaaaactgatgctagagcagttggaatcgcaattcgtgctgatgcagcagcaccaaatgcgacctacaggtgtcgcccaggtgaggtcgaccggcatccctaatggaccaacggcagattcctccctgccgacaaactcggtgtcaggccagcagccccagctcgcgctaactagagtaccttccgtgtctcagcccggtgtgcgcccagcatgtccggggcagcccttagccaatggaccgttctccgctggacacgtaccgtgctcgacttcgagaactctgggttcgaccgataccatcttaataggtaataaccatatcacagggtcaggatccaacggcaacgtgccctatctccaaagaaacgccctcactctgccccacaatcggacaaacctgacgagctccgctgaagagccctggaaaaaccagctgagcaacagtacccagggcctgcataaagggcagtccagccatagcgcaggccccaacggggagcgtcccctttcctctacaggacccagccagcaccttcaggcggccgggagcggtatccagaaccagaatggtcaccctactctccctagcaatagcgtgacacaaggggcagctctgaaccatctgtcctctcatacagccacctccggaggccagcaggggatcacactgactaaagagagcaagccatctggtaatatcctgactgtccccgagacatcccggcacaccggggaaacgcctaattcaactgcgtccgtcgagggcttgcctaaccacgtgcaccagatgactgcagacgccgtttgcagtccctcacacggcgattctaagtcaccaggcctgttgtcctcagataacccacagctgtctgccctccttatgggcaaggcaaataacaatgtgggaaccggaacttgcgacaaagttaacaacatccaccctgcggtccacaccaagactgataactctgtggcctcctcgccaagttccgccatttctacggctacgcctagccctaagtccactgagcaaaccaccactaattccgtgacaagtctcaattctccccactcgggtctgcataccatcaacggagagggaatggaagagagtcagtcaccaatgaagacggatttgctgctcgttaaccacaagccctccccacagattataccatctatgagcgtgagtatctatccgagttccgccgaggttttgaaagcttgcaggaatctgggcaagaatggcttaagcaactcatctatcctcctcgacaagtgccctccccctagacctccaagcagcccatatcctccgctgcctaaagacaaactgaatcctccgaccccctcaatttatttggaaaacaagcgtgacgctttctttccgcctctccaccagttttgtaccaatcccaacaatcccgtaaccgtgatacgaggcctggccggcgcccttaagctggatctcgggctcttcagcacaaaaacactcgtcgaagccaataacgagcacatggtagaggtgcgcacccagctgctgcagcctgccgatgaaaactgggatccaactggcactaaaaaaatctggcattgcgaaagcaatcggtcccacacaactatcgcaaagtacgcacaataccaggccagctcctttcaagagagtctccgcgaggagaatgagaagcggagccaccataaagatcattccgactccgaatctacgtcttctgataatagcggcagaagacgtaaagggcctttcaagacaattaaattcggcacgaacatcgacttatctgatgacaagaagtggaaactgcagctccacgagctgactaaactacccgccttcgtgagagtggtgtcagcaggaaatttgctgtctcacgttggacacacaattctcggcatgaacacagtgcagctgtatatgaaggtgcctggatccaggactccaggacaccaagaaaataataacttctgcagcgtgaacattaatatcggacccggcgactgcgagtggtttgtggtgccagaggggtattggggcgtgctgaatgacttttgcgaaaaaaacaacctgaacttcctgatgggttcttggtggcccaatctggaggatctgtatgaggccaatgtcccagtttacagatttattcagcggccgggcgatttggtctggatcaatgcgggcactgtgcactgggtccaagccattggctggtgcaataatattgcgtggaatgtggggccgctcacagcctgtcaatacaagctggccgttgaacgatatgaatggaacaagctccagtcagtaaaaagcatagtcccaatggttcatttaagctggaacatggcccgtaacatcaaagtatctgacccaaagttattcgaaatgatcaaatattgcctactcagaacattgaagcaatgccagactctccgggaagccctgatcgcagcaggcaaggagatcatatggcacggccgaactaaggaagagcctgcccattattgttccatatgtgaagttgaggtgttcgacctgctgttcgtgaccaatgagtcgaatagtcgtaagacttacatagtacactgtcaggactgcgcacggaagacaagtggtaacctggagaactttgtggtgctggagcagtacaagatggaggacctgatgcaggtttatgaccagttcacactggctcctcccctcccttccgcctccagttag

SEQ ID NO: 122905 - DNA, 3000 bp, synthetic construct
  misc_feature 1..3000: note = Description of Artificial Sequence: Synthetic coding sequence
  source 1..3000: mol_type = other DNA
tgaggcaccctctatgagagttgtaaccagcctcaagacgccattaagtgctacctgaatgcaactagatctaagtcttgtagcaacacgagcgcactggctgctaggataaagtatctgcagaatacaagtgacaattggtcaggaggacatgcagtgagccacccacctgtccagcagcaagcccactcttggtgcctgactcctcaaaaacttcagcatcttgagcaattgcgggcaaaccgaaataacttgaacccagcccagaagctcatgcttgaacagctggagtctcagtttgtcctgatgcagcagcatcagatgcggccgacaggggtggcccaggtccgctcaaccggcattcctaacggcccgactgcagattcctcccttcctaccaacagcgtctcgggccaacagccccaactggcactcacacgtgtcccaagcgtctcacaacccggggtgcggcccgcctgcccggggcaacccctcgccaatggacctttttcagcaggtcatgttccatgttccacctccaggactctaggcagcactgacacaattctaatcgggaacaaccatatcaccggaagtgggtccaacggcaacgtcccttatctgcaacggaacgcactgactctgccccacaatcggaccaacctcacgagctcagcggaggagccatggaaaaatcagttaagtaactcaactcagggcctgcacaagggccagtcttcccattctgcaggcccaaatggcgagcgaccattgtcatcaacaggtccctcgcaacatcttcaggcagcaggaagcggcatccagaaccagaatgggcaccccaccttaccttccaatagtgtgacacaaggggccgcactgaaccacctgtcgtctcataccgctaccagcggcggtcaacagggaatcacactgacaaaagaaagcaagcctagtggaaatattctgaccgtgcccgaaacttcaagacataccggcgaaacccccaactctacagcctctgtggaaggactcccaaatcacgtgcatcaaatgactgcggatgccgtgtgctctccttcacacggtgacagcaagagccctgggctgctgtccagcgacaacccacagctttcggctctactgatggggaaagctaataacaatgtgggaacgggcacctgtgacaaggtgaacaatatccatccagctgtccacactaagacggacaattccgtcgctagctcgccttccagcgccatatcgacggctacaccctcgcctaaaagcacagagcagacaacgaccaattccgtcacctcactaaactccccccactctggactacatacgattaacggggaaggaatggaagaatcccaatcccccatgaagacagacctccttctggtcaaccataagccaagtccacagatcattccatctatgtctgtcagtatctatccctcctcagctgaggtgctcaaagcctgccgcaatctgggtaagaatggcttgagcaattcttctattctgttggataagtgcccacctccccgccctccttcaagcccctatccaccattgccaaaggataaacttaaccctcctaccccctctatttacctcgaaaacaaaagagacgccttttttcctccactgcatcagttctgcaccaatccaaataatccagtgaccgttatcaggggtctggcaggggctctgaagctcgacctgggcctgttctctaccaagacccttgtggaagcgaacaatgaacacatggtggaggtccggacccaactattgcagcctgccgacgaaaactgggatcctacagggaccaaaaagatatggcattgtgaaagcaatcgctcacacactaccatcgccaaatatgcccaataccaagcatccagcttccaggagtccctgcgtgaagagaacgagaagcgatcgcaccataaggaccactccgacagtgaatcaacctccagtgacaatagtgggcgccgcagaaagggaccattcaagaccatcaaatttggtaccaacatcgatctaagtgatgataagaaatggaaactacagctgcatgagctgaccaagctcccagcctttgtgagggtcgtttctgcaggcaatttgcttagccatgttgggcacacaattttggggatgaacactgtccaactgtatatgaaggtgccaggttcacgcactcctggtcatcaggaaaacaataatttctgctcagtcaatattaacatcggacctggggattgcgagtggtttgtcgtgcctgagggttactggggcgtactcaacgatttctgtgaaaagaataatctaaatttcctcatgggctcctggtggcccaacctggaagacctttacgaagcaaatgttcccgtttaccggtttattcagcgccctggagatctggtgtggattaacgctgggacggttcattgggttcaagccatcgggtggtgcaataatatcgcctggaatgtggggccattgactgcttgtcagtataaactggcagttgagcggtatgagtggaacaaactgcagtctgtgaagagtatcgttccgatggtacacctgagttggaatatggcccgtaatattaaagtgagtgatcctaagctgttcgagatgattaagtactgtctcctccgcacgttgaagcagtgtcaaaccctcagggaggcgctgattgcagctggaaaagagataatatggcatggtaggaccaaggaagagccagcccactactgttcaatctgtgaggtggaggttttcgacctgctcttcgtgacaaatgagagtaatagtaggaaaacttacatcgtgcactgccaggattgcgccaggaagacctccggaaaccttgagaactttgtggtgctggaacaatataaaatggaggatctgatgcaggtgtatgaccagttcacactggccccaccattgccctcagcctccagttag

SEQ ID NO: 122906 - DNA, 486 bp, synthetic construct
  misc_feature 1..486: note = Description of Artificial Sequence: Synthetic coding sequence
  source 1..486: mol_type = other DNA
taggcgaggaatatcaaggtgagtgatcccaaactgtttgagatgattaagatcttttcgctgtcccccaactttcgagccgagaagtgcctgagagatcatctggtgcagcctctcagaagcaatggggagcctgagcccctgagatttacgggcgaatactgccttctgagaacactgaagcagtgccagaccctgcgagaagcgctgattgcagccggaaaggaaattatttggcacggcagaactaaagaggagccggcccactattgctcaatctgcgaggtggaggtgtttgacctgttgttcgtgaccaacgaatccaactcccggaaaacatatattgtccattgtcaagattgcgcacgcaagacttctggaaaccttgaaaactttgtggtgttggagcagtacaagatggaggacctgatgcaggtctacgaccagttcacactggccccacccttaccttcggcctcgagttag

SEQ ID NO: 122907 - DNA, 3135 bp, synthetic construct
  misc_feature 1..3135: note = Description of Artificial Sequence: Synthetic coding sequence
  source 1..3135: mol_type = other DNA
tagaacaaaactaagcttctcccctcgatcgaagaggcttggagcctgcctatacctgccgagttgacctcgaggcaaggagccatgaatacggcacagcaggcctgcaagccgcatcacccgaacactgaaccggtgctgggactctctcaaacgccgatctcacagcaaagcttgcccttgcacatgatcccctcaagccaggtggacgaccttagttctccggcgaagcgcaaaagaactagcagtccaacgaaaaatacgagcgataattggtcgggtggacacgccgtcagtcatcccccagttcagcagcaagctcactcgtggtgtctgacccctcagaagttgcagcatctcgagcagttgagagcaaaccggaataatctcaatccagcacagaaactgatgctggagcaactggaatcacagttcgtccttatgcagcaacatcagatgcgcccaactggggtcgctcaggttaggagtaccggcatccctaacggccccactgccgatagtagcctccctacgaattcagtgagcggccaacagcctcaattagctctgacccgggtgccaagtgtcagtcagcctggcgttcggccagcctgtccaggacagcccctcgcaaatggaccgttttccgcaggccatgtcccatgctcaacctcccggacactgggatccactgacacaattctcataggtaataatcacatcaccggttctgggagcaatggaaatgtcccatacctgcaacgcaatgccctgactctgccccacaacaggaccaacttgacatcaagcgccgaggaaccttggaaaaatcagcttagtaacagcactcagggtttgcacaaaggacaatcgtcccattcagccggtcccaacggtgaacgccccttatcatctaccggtccatcacagcaccttcaagctgctggcagcggcatacagaaccaaaacggacaccctacattaccaagcaactccgttactcaaggggccgctctgaatcacctttcaagtcatacagccaccagtggtggacagcaagggatcacgctgacaaaggagagcaaaccgtccggcaacattctcactgtaccagagaccagcaggcacacaggagagacaccgaatagtactgctagtgtggagggcttaccaaatcacgtccaccaaatgacagcggatgctgtctgcagcccctctcatggcgattctaaatctccaggtctgctctcatctgacaaccctcagttgtctgctctgcttatggggaaagctaataacaatgtaggcactggcacttgcgacaaggtgaataacatacatcccgccgtccacacaaagaccgataactctgtggcaagctccccgtcatcggccatttccaccgccacaccctctccaaagagcacagagcaaacgaccactaattccgtaacctccctcaacagcccccatagtgggctgcatacaataaacggcgagggcatggaggagagtcagtccccgatgaaaaccgatcttctgctggtgaaccacaagcctagtccccagatcatcccctcaatgagcgtctccatatatccatccagcgcagaggtgcttaaggcatgtaggaacctcggtaaaaacggtctgagtaattcatccatactcttagataagtgcccacccccacgccccccttcaagtccttatccccccctgccaaaggataagctgaatcccccaacgcccagcatctacctcgaaaataagcgggacgcctttttcccacccctgcaccaattttgcactaatccgaataaccccgtaacagtcatacgaggcctggccggagcccttaagctggacctgggtttgttttcaaccaagactctggtggaggcaaacaatgagcatatggtggaggtgcgaacccagctcctccagcccgccgacgagaattgggaccccacaggcactaagaagatctggcattgcgaaagtaatcggtctcacaccaccatcgccaagtacgctcagtatcaagccagctcattccaggagtccctgagagaggaaaatgaaaaacgctcccaccataaagaccactccgactcagaaagcacaagctccgacaattccggccgcaggcgtaaggggccctttaagacaatcaaatttgggacgaacattgacctttctgacgacaaaaaatggaagctgcagctgcatgagctcactaagttaccagcattcgtgagagtggtgagtgccggcaatctattgtcccatgtgggccatacgatcctggggatgaacaccgtccagttgtacatgaaagtgccagggtctcgtacccccggacatcaggaaaacaacaacttctgtagcgttaacattaatatagggccaggagactgcgaatggttcgtagtccctgagggttactggggggtgctaaacgacttctgtgaaaagaacaacttgaacttcctcatgggatcatggtggcccaacttggaggacctgtatgaggctaatgtgccggtgtatagattcattcaacgccccggcgacctggtctggattaacgctggaacagttcactgggtgcaggcaatcggctggtgtaacaacatcgcttggaatgtgggtcctttaactgcctgccagtataaattggccgtggaaaggtacgaatggaacaagttacagtcagtgaagtcaattgtgcccatggtccatctctcatggaatatggcacgcaacattaaggtatccgacccaaaactgtttgagatgatcaagtactgccttttacgcacacttaagcaatgtcagacattgagagaggccctgatcgcagccggaaaggaaatcatctggcatggccgcaccaaagaggaaccagcccattattgctcaatctgcgaggtggaggtcttcgatcttcttttcgttactaacgagagcaacagccgtaagacctacatcgttcattgtcaggattgcgctcgcaagacctccggaaacctggaaaacttcgttgtgctggagcaatataagatggaggacctcatgcaggtgtatgatcagtttacactggcacctccactgccatccgcctcttcctag

SEQ ID NO: 122908 - DNA, 675 bp, synthetic construct
  misc_feature 1..675: note = Description of Artificial Sequence: Synthetic coding sequence
  source 1..675: mol_type = other DNA
taacttcaggcgtacatttgtgccgtgcaattagaccacggccatgccgccgcttggatggacttagggacactttatgaatcttgcaatcagcctcaggacgccattaaatgctaccttaacgccacaaggtccaagagttgcagtaatacctccgccctcgccgcaaggatcaaatacctacaggcccagctgtgtaatttgccccagggctcattgcagaataagaccaagctgctgccgtctattgaggaagcctggagcttgcccattcctgcagaacttaccagcaggcagggcgcaatgaatacagctcagcaaaacactagcgataactggtctgggggacatgctgtgagccatccacccgtacaacaacaagcccacagctggtgcctgacccctcagaagttacagatgcgccctactggagtggcgcaggttcggtcaactgggatccccaacgggccaactgccgattcttccctccctaccaacagcgtatctgggcagcagccccaattagccctgactcgggtcccgagcgttagtcagcctggagtgcgccccgcttgtcccggccagccgttggccaacggaccgttttccgcagggcatgtgccctgcagcactagtcggactttgggctcaaccgacaccattctgattggctag

SEQ ID NO: 122909 - DNA, 516 bp, synthetic construct
  misc_feature 1..516: note = Description of Artificial Sequence: Synthetic coding sequence
  source 1..516: mol_type = other DNA
tcgctccagaataagacaaagttgcttccttctattgaggaggcttggtctctccccattcccgccgaactgacttctcggcagggggctatgaacactgctcagcaaaatacttccgataattggtcaggcggccacgccgtaagtcatcctccggtgcagcagcaggcccattcttggtgtctgacgccgcagaaactgcagcacctggagcagctgagagccaatcgaaacaatcttaatcctgcccagaagcttatgttagagcagctcgagtctcagttcgtgctgatgcaacaacaccagatgcgtcccaccggcgtggcacaggtgagatccacagggatccccaatggccccacagccgactcaagcttaccaacgaattccgtgagtggccaacagccacaactggccttgacgcgggtgccgagcgtgagccagcccggggtccgcccagcttgccctggacagcccctggccaacggacccttctgccgaccatgctccctctag

SEQ ID NO: 122910 - DNA, 4071 bp, synthetic construct
  misc_feature 1..4071: note = Description of Artificial Sequence: Synthetic coding sequence
  source 1..4071: mol_type = other DNA
atgaagtcctgcggggtcagcctggccacagcagcagccgccgccgccgcgttcggcgatgaggagaaaaagatggcagcgggaaaggcttccggtgaatctgaagaggcctctccttcgttaacagcggaagagcgtgaagcgctgggaggactggactccagactgtttggcttcgttaggtttcacgaggacggggcgagaacaaaagcgctgctaggaaaagctgtgcggtgctacgagagcctgatccttaaagcagagggcaaagtagaatctgatttcttctgccagttgggacacttcaacctgctcctggaggactatccaaaggccctgtcagcctaccagcgttactattctctgcagagcgactactggaaaaatgctgcttttctgtacggcctgggactggtatacttccattataatgctttccagtgggcgattaaagcgttccaggaagtcctgtacgtggacccgtctttctgtcgtgcaaaagagatccatctccgtttaggactcatgtttaaggttaacacggattacgagagcagccttaaacacttccaactggctttagttgattgtaatccttgtaccttgtctaacgccgagatccagtttcatatcgcccacctgtatgagacacaacgaaaatatcactctgccaaggaagcatacgaacagctgctccagacggagaatctgagcgcacaagttaaggccacagtgcttcagcagcttggctggatgcaccacacagtagatctccttggggacaaggccactaaagagtcctacgcaatccagtatctccagaaatctctggaggctgaccccaactcaggccagagttggtatttcctcgggcgctgctattcttcaatcgggaaagtgcaggatgcgttcatatcttatcggcagtccatcgacaaaagcgaggcctccgccgatacatggtgctcaatcggggtgctttaccagcaacagaaccagcctatggatgccctacaagcctacatatgtgccgtgcagttagaccatggacacgcggcggcctggatggatctgggcactctgtatgagagttgcaaccagcctcaagacgctataaagtgctatctgaacgctacacgctcaaaatcctgctccaataccagtgccctagctgctcggattaaatacctgcaaaacacctccgacaattggagcggtggccacgccgtctctcatccacccgtacaacaacaagcacattcatggtgtctgacgccccagaagttacaacatctagaacagctacgcgccaataggaacaacctgaatcccgctcagaagctgatgctggagcagctggagtctcagttcgtcctgatgcaacagcatcaaatgagacccacgggcgttgctcaggtccggtcaaccgggattcctaatggtccaactgctgattcttctctgcccacaaatagcgtgtccggccagcagccacagctcgcactgacaagggtgccctcagtgtcgcagcccggggtacggccggcatgccccggacagcctctggctaacgggccattctccgccgggcacgttccctgtagtactagcagaactctagggagtaccgacacaatactgataggtaataatcatattaccggtagcgggtcgaatggaaatgttccgtacctccagcgcaacgcgctcaccctcccacacaacagaaccaacctgacctcctccgcggaggaaccatggaaaaaccagttgagcaattctacccagggtctgcacaaggggcagagctcgcatagcgccggccctaacggggaaagacccttgtctagcactggcccctctcagcatctgcaggcagccggtagcggaatccagaatcagaatgggcatcccacgctgcccagcaactctgttacacagggtgcagctctgaaccacctatccagccataccgctacctctggagggcagcaggggattacgctgaccaaagagtccaaaccttccggcaatatattgacagttccggagacgagtcgacacaccggagaaacaccaaattccaccgcatcagtggaggggctgcccaaccacgtgcatcagatgacagcggacgcggtctgctcaccctcacatggcgatagcaagtcacctggtctgctgagctccgacaaccctcagctgagcgcattactaatgggtaaggccaacaataacgtgggtaccgggacctgcgacaaggtaaacaacatccaccccgcagtgcataccaagaccgataactctgtcgctagctccccatcttctgccatttctactgccaccccttcccctaagtccacggagcagacgaccactaattccgttacatccctaaacagccctcactctggactgcacacaattaatggagagggcatggaggaatctcagtcaccgatgaaaacagacctcctccttgtgaatcataaaccctcgcctcagattatcccctccatgtcggtatctatttacccgtcctcagccgaggtactgaaggcatgcaggaatcttggtaaaaacggcttgtccaattcctctatactgctggataagtgcccacctccaagacctccaagctccccataccctccattgccaaaggataaactgaatccccctaccccgtctatctatctggagaacaaacgggacgccttttttcctcctctccatcagttctgtacaaaccctaataaccccgtgactgtgatacgtggactggcaggcgcgctcaagttagatctcggtctcttctccacaaagacgttggtcgaggcaaataatgagcacatggtggaggtacggactcagctgctgcagccagcggacgagaactgggaccccaccggtactaagaaaatctggcactgcgaaagcaacagaagccatactaccatcgctaagtatgctcagtaccaagccagcagcttccaggaaagcctgcgcgaggaaaatgaaaaacggagtcatcacaaagatcactcagattcagaatccacgtcctccgataattctggaaggcggagaaaggggccatttaaaactattaagtttggaactaacattgatttgtctgatgacaagaagtggaaattacagttgcacgaactcacgaaactgcctgctttcgtccgggtggtgtctgctggcaacctcctaagtcatgtgggccacacaatcttgggtatgaacacagttcagctttatatgaaagtgccaggttcccggacgccaggtcatcaggagaacaataatttttgctctgtgaatatcaacatcggcccaggcgactgtgagtggtttgtggttccagaaggatactggggcgtcctcaacgacttctgtgagaagaataatctaaacttcctgatgggttcctggtggccaaacctggaggatctttatgaagctaatgtgccggtgtaccggtttatccaaaggcctggcgatttggtctggatcaacgcaggaaccgtgcactgggttcaggctatcgggtggtgtaataatatcgcatggaatgtcggacctctcacggcctgtcaatataagctggcagtggagagatatgaatggaataagctccagtctgtaaagtccattgttccaatggtgcacctgagttggaatatggcccggaatattaaggtgtctgatccaaagctcttcgaaatgattaagtactgtctgctgaggaccctgaagcagtgccagacccttagggaggcgctcatcgcagctggaaaggagatcatttggcacggcaggaccaaggaagaaccagcccattactgctcaatttgcgaggttgaggtttttgaccttctgtttgtgacaaatgaaagcaattcccggaagacgtacatagtgcactgtcaggactgcgcgcgtaaaaccagcggtaaccttgagaattttgtagtgttggaacagtacaagatggaggacctgatgcaggtgtacgaccagtttactctggctcctcctctcccctccgcctccagctag

SEQ ID NO: 122911 - DNA, 675 bp, synthetic construct
  misc_feature 1..675: note = Description of Artificial Sequence: Synthetic coding sequence
  source 1..675: mol_type = other DNA
atgaagagttgtggggtgtcactcgcgaccgctgccgctgcagcagccgccttcggcgatgaagagaaaaagatggctgcggggaaggcttctggtgaaagtgaggaagcgtcccctagtctgaccgccgaagaacgtgaagccctgggaggtctggatagccgcttatttggtttcgtccgatttcacgaggatggagccagaacaaaggccctactggggaaggcggtgaggtgctatgagtctttgattctgaaggcagagggaaaggtggagtccgacttcttctgccaactggggcacttcaatctcttgctcgaagactatcctaaagccctcagcgcatatcagaggtattactccctgcagagtgactactggaagaatgcagcctttctgtacgggttaggcctggtttattttcactacaatgcctttcaatgggcaattaaggcgtttcaggaggtattgtatgttgacccaagtttctgccgtgcgaaggaaatccacttacgccttgggctgatgtttaaagtcaacaccgattatgaaagttccctgaaacacttccagctggcgctggtagattgcaatccatgcactttgtccaatgctgaaatccaattccacattgcgcacctgtacgagactcaggtgggctgtattaccctctag

SEQ ID NO: 122912 - DNA, 3969 bp, synthetic construct
  misc_feature 1..3969: note = Description of Artificial Sequence: Synthetic coding sequence
  source 1..3969: mol_type = other DNA
atgaagagctgcggagtttccctggcgaccgccgctgccgccgccgccgccttcggtgatgaagaaaaaaaaatggcagctggaaaagcctcaggagagtccgaggaagcatctcccagcctaaccgctgaagagagggaggcattgggtggactggattctagactatttggatttgtccggtttcacgaggacggggcccgcactaaggccttactgggtaaagctgtgcgatgctatgagagcctgatcctcaaggcagagggaaaggtggagtccgatttcttctgccagctcggtcatttcaacctacttctggaggattatccaaaagccctcagcgcataccagcgctactatagtcttcagtcggattattggaagaatgctgcgttcctgtatggcctgggtctggtctacttccattataatgccttccaatgggccattaaagcctttcaggaggtactctacgtcgatccatctttttgccgcgccaaggagatacacctacgactcgggctcatgtttaaggttaatacggattatgaaagctcgctgaagcactttcagctggcactggtagactgcaacccctgcaccttatctaatgccgaaatacagtttcatatcgcccacttgtacgagactcagcgtaagtatcattccgccaaggaagcctacgaacagttgttgcagactgaaaacttaagtgcccaggtgaaggctacagtcctacagcagctcgggtggatgcatcacactgttgatttgcttggcgacaaggctactaaagaatcctatgctattcagtatttgcagaagagcctcgaagcagatccgaactctggacagagctggtatttcctggggcgatgttattcctccattgggaaagtgcaggatgcctttatatcctataggcagtctattgacaagtctgaggccagtgccgacacatggtgtagtatcggtgtgctgtaccaacagcagaatcaacctatggacgcgctgcaggcttacatctgtgcagtccaactagatcatgggcatgctgctgcttggatggatctgggaaccctctatgagtcatgcaatcagccacaggacgccatcaagtgctacctgaacgctactcgtagcaagtcttgttccaatacctctgcactcgccgcccgcattaaatacctccaaaacacgtccgataattggagtggtggacacgccgtatcacatcctcccgtgcagcagcaagcgcactcttggtgcctcacgccccagaaacttcagatgcgcccaaccggcgtggcccaagtacggagcacaggtatcccgaatggacccaccgccgacagcagtctgcctactaacagcgtcagcggacagcaacctcagctggctttaacccgcgtacccagcgtgagccagcctggggtgcgtcctgcatgccctggacagcctctagcaaatggaccattttccgctggccatgtgccatgctcaacctcacggacactggggagcactgatacaattctgatagggaacaatcacattacgggtagcggctcgaacgggaacgtcccttaccttcaacggaatgccctcacactgcctcacaatcggacgaacctgacgtcctccgctgaggagccatggaagaaccaactatcgaatagcacccagggactccacaagggacagtctagccacagtgctggtcctaacggcgaacgacccctctcatcgacaggtccgtcccagcatttacaggcagcaggttcaggtattcagaaccagaatggtcatcccactctgccatcaaattctgtcactcagggcgccgcacttaaccacttgtcaagccacacagccacttccggcggccagcaaggcatcaccctcactaaagagtccaaaccttccggcaatatactcaccgtccctgagacttccagacacacaggcgaaacacctaacagcaccgcctctgtggagggccttcccaaccatgttcaccagatgaccgccgacgcggtgtgctcgccctcccacggagactctaagtcacccgggctcctcagctcagataacccccagctgtccgccctcctcatgggcaaagccaacaataatgtgggcacaggtacatgcgataaggtcaataatatccaccctgccgtccacaccaaaaccgataatagcgtggcctcatctccatcctccgcaatcagcacagccacaccatccccgaagagcaccgagcagacaaccactaatagcgtcacaagtttgaattctccccactccggtctgcatactatcaacggcgagggaatggaagaaagccagagccccatgaagaccgatctcctcctagtgaatcacaaaccgagccctcagattatcccatccatgagcgtcagcatctaccccagttccgccgaggtcttgaaagcatgtagaaatctgggcaaaaacggtctgagcaactctagtattctactcgacaaatgtcccccacccaggcctccctcttcaccttatccccctctgccaaaggataaactgaatcccccaaccccgagtatatatctggaaaataagagagacgcatttttccctccactgcaccagttttgcaccaatcccaataatcccgtgaccgtcattagaggtctcgccggagccttgaagctagatttgggactgttcagcactaagaccctagtggaagcgaataacgaacacatggtggaagtgcgcacacagttgctgcaacctgccgatgagaattgggaccccactggaacaaagaaaatctggcactgtgaatctaacaggagtcatactactatagctaaatacgcacagtatcaggcgtcttcctttcaagagtccttgcgggaggagaatgagaagaggtctcaccataaggaccatagcgactccgagtctacgagctctgacaacagcgggcgacgccgcaaaggacccttcaagaccattaaattcgggaccaacattgacctttcagatgacaaaaagtggaagctacaattacacgagctgacaaaacttccagccttcgtccgcgtcgtgtccgccgggaatcttctaagccacgtggggcacacgatcctaggtatgaacaccgtgcagctgtacatgaaagtcccaggtagtagaacacccgggcaccaggaaaataataatttctgcagcgtgaatatcaacattggcccaggggattgcgagtggttcgttgtgcccgagggttattggggtgtgctgaatgacttttgtgaaaagaataatctgaactttttgatgggttcgtggtggcctaacctggaggatctgtatgaagccaatgtccccgtctacagatttatacagcgaccaggtgacttggtatggattaatgccggcacagtgcactgggtccaagcaattgggtggtgtaataatatcgcctggaatgtgggccctctcacagcctgtcagtacaaactggccgttgagagatatgagtggaacaagctgcaaagcgtcaagtctattgtccccatggtgcacctttcctggaatatggccagaaatataaaagtcagcgatccaaaacttttcgaaatgatcaaatactgcctgctgcgaactctgaaacagtgccagaccctccgggaggctctgatagctgccggtaaagaaattatatggcatggacgcaccaaggaagagcctgctcactactgtagcatctgtgaggtagaggtgtttgacctcctgtttgtgacaaatgagagcaacagtaggaagacctatatcgtgcattgtcaggattgtgctcgaaagacttccggcaacctggagaattttgtcgtgttggaacagtataagatggaagacttaatgcaggtgtacgaccagttcactttggcacctccgctcccatcggcatcatcctag

SEQ ID NO: 122913 - DNA, 5049 bp, synthetic construct
  misc_feature 1..5049: note = Description of Artificial Sequence: Synthetic coding sequence
  source 1..5049: mol_type = other DNA
atgcatcgggccgtggatcctcctggagcgagggcggctagggaggccttcgcattaggcggactgtcttgtgcaggggcttggagtagttgcccgcctcaccctccgcctaggtcagcttggctgccaggtggaaggtgttccgcttcaattggccagcccccactccctgcccccctgcccccttcccatggctccagcagcggccatcccagcaagccttactacgcccccggggcacctacccccaggcccctgcatgggaaactggagtctttacatggatgtgttcaagctctcctccgcgagccggcccagcctgggttatgggagcagcttgggcaattatacgagagcgagcacgattcggaggaggctactagatgttaccactctgccctgaggtacggaggcagcttcgcagagttaggtcctagaattggccgccttcagcaggctcagctgtggaacttccataccggatcctgccagcaccgtgctaaagtgcttccaccattagagcaagtctggaacctcttgcatctggagcacaagcgtaactacggggctaaaagaggaggccctccagtgaagcgtgctgccgagccccccgtcgtacagcccgtgccgccagccgctcttagcggaccgtccggggaggaaggattgtcccctggaggcaaacgcaggaggggttgtaattctgaacagacaggcctgcccccggggctacctttgccgccccctccactccccccaccgcctccccctccccctcctcctcccccgcctctacccggactggcaacaagccctccgttccagctgaccaaacccggtctatggagcactctgcatggtgacgcttggggcccagaacggaagggatctgccccaccagagcgccaggagcagcgccactcactgccccacccctatccttaccccgctccagcatacacggcacaccctccaggccatcgtctggtccctgcagctccccccggacctggtccccgccctcccggggccgaatcccatgggtgtctgcctgcaactagaccccccgggtccgatctgagagaatcacgcgttcaacggtctagaatggattcctctgtttctcctgcggcaaccaccgcttgtgtaccctacgcaccgtctagacctcccggactgcccgggaccaccaccagttcatcatctagttcttcctcgaatacgggactgcggggggttgagcccaacccaggaatacccggtgccgatcactatcagacacctgcactggaagtgagtcaccatgggcgactggggccatcagcccacagttcacggaagcccttcttgggcgcccccgcggcaaccccccacctgtccctcccacccgggccaagttcacccccccctcccccctgtcctcggcttttgaggccgcctccccctccagcctggctcaaaggaccggcgtgcagggccgctcgcgaagatggtgaaattttagaggaactcttttttggcaccgagggcccaccccgacctgctcccccccccctgcctcacagggaggggtttctcggacctcctgcttcacgcttcagcgttgggacacaggattctcacaccccccctaccccgccaacacccacaacctcttcttctaattccaattcaggcagccattcttcatctcctgccggacccgtaagtttcccccctcccccctacctcgcacgctccattgaccccctaccccgccccccttcgccagcacagaaccctcaggaccctcctcttgtacctctcacactcgctttacctccagccccccctagctcctgccaccagaacacatccgggtccttccgtcggcctgagtccccacgacccagggtgtcattcccaaaaacccctgaagtggggccaggccctcctcctggccctctgagtaaagcccctcagcctgtaccccccggagtgggagaactcccagcccgggggccccgcctgttcgatttcccaccaactccactcgaagatcagttcgaagagccagccgagtttaaaatcctgcccgacgggttggccaatattatgaaaatgctcgacgaatccatccggaaagaggaggagcagcaacagcacgaagctggagtggcacctcagccaccccttaaagaacccttcgcgtctctccagagcccttttcctaccgatacagcacccacaacaaccgcaccagctgtggcggtgacgaccacgactacaactacaactacgactacagcgactcaggaagaggagaaaaagccccctcctgccctgccacctcctcctcctttagccaaattcccacctccatcccagccccaacctcccccacctcctccgcctagcccagcctcccttctgaaaagcctagcaagcgtcttggaaggtcagaagtactgttaccgcggcaccggcgctgctgtgtctactcgtcctggcccactgccaactacacagtatagccctggcccaccctctggcgcgaccgccttacctcctacttccgccgctccatccgcccagggctcaccacaaccaagcgctagttcctcaagccagttctcaacatctggtggcccatgggctagagagcggcgtgccggtgaggaacccgtacctgggcccatgaccccgacgcaaccgcccccgccacttagcctgcccccagctcggtctgaatcagaggtgctagaagagatctctagagcatgtgagactctggtggagagagtgggacgctctgccaccgatcctgccgatccggtcgatactgccgagccagccgattctgggaccgaaaggcttctccctccagcccaggcgaaagaagaggctggaggagtagcagccgtgtcgggcagctgcaagcggcgtcagaaggagcaccagaaggagcaccgccgacataggcgagcctgcaaggactctgtggggcgaagacctcgggaaggtcgtgctaaggcaaaagccaaggtgcccaaagaaaagagcagacgcgtattgggcaatctcgacctgcaatcagaggagattcagggacgggaaaaaagccgccccgaccttggtggagcgtcaaaagcaaagcctccaaccgcccctgcaccccccagcgccccggcgccttccgctcagcccacacctccttcagcttctgtgccggggaaaaaggctagggaagaggctcccggtccaccaggagtgtcccgggctgatatgcttaagctgcgaagtttgtctgaaggtccacctaaagaactgaaaattcgcctaataaaggtggagtcgggagacaaagagactttcatcgcttctgaagttgaggaacgacgcctgagaatggcagaccttacgatcagccattgcgccgccgacgtggtgagagcctccaggaatgctaaggtgaagggaaagttccgagaatcgtatctctcacctgctcagtctgtaaagcctaaaatcaacacggaggagaagctgccaagagagaaactgaaccccccaaccccgagtatctatctcgaatcgaagcgcgatgctttttcccctgtgttactgcagttctgtactgacccccgtaacccgataaccgttattcgcggtctagcaggcagtctgcggctcaacctaggactgttttctactaagacattggtggaagctagtggcgaacacaccgtagaggtcaggacccaggtccaacagccctctgatgaaaattgggacctgacgggaacacgccagatctggccttgtgagagcagtcgcagccacacgaccatcgcgaaatacgctcagtatcaggcttcaagtttccaggagagcttgcaggaagaaaaagagagcgaggacgaggagtcagaggagccagactcaacaactgggacacctccttcctcagcacccgacccaaaaaaccatcatattataaaatttgggaccaatatcgatttatcagacgcaaagagatggaagccccagctgcaagagctcctaaaattgcccgcattcatgcgggttaccagcaccgggaacatgctgtcgcatgtgggtcatactatactcggaatgaacacagtccagctttacatgaaagtccccggtagcagaacccctggtcatcaggaaaacaacaatttctgcagtgtaaacatcaatatcggccccggcgattgcgagtggttcgcggtccacgagcactattgggagaccataagcgctttttgcgatagacacggggttgattatcttactgggtcgtggtggcctatcttagatgacctgtacgcctcaaatattcccgtgtatcgattcgtacagagacccggagacctggtgtggatcaacgccggcactgtccattgggtgcaggccaccgggtggtgcaacaacatcgcttggaatgtcgggccgttaaccgcctaccaataccagctggctttagagcgctatgagtggaacgaggtgaagaatgtgaagagcatcgtgccaatgattcatgtctcttggaatgtggccaggaccgtcaaaattagcgacccggatctcttcaagatgattaaattttgtttgcttcagagtatgaagcactgtcaggtgcagcgggaatctctggtgcgggcaggaaagaaaattgcctaccaaggtcgagtcaaggacgagcctgcatactactgtaatgagtgtgacgtcgaagtgttcaatattttgtttgtcacctctgagaacggtagccgaaacacttatcttgtacactgtgaaggctgcgcacgacgacgatcagccggcctgcaaggggtggtggtcctcgagcaatacaggaccgaagaactggcgcaggcctacgatgcttttacactcgttcgcgctcgtagggctagaggtcagagaaggcgggccttagggcaagccgccggaacaggttttggttctcctgctgccccgttccctgagccaccgcccgcattctctccacaagccccggcaagcacctcaaggtag

SEQ ID NO: 122914 - DNA, 4932 bp, synthetic construct
  misc_feature 1..4932: note = Description of Artificial Sequence: Synthetic coding sequence
  source 1..4932: mol_type = other DNA
atgcacagggctgtggatccacccggggcccgagccgccagagaggcctttgcactcgggggtctctcatgcgcgggggcgtggtccagctgtccaccccaccctccgcctcgctccgcttggctgccgggcggcagatgctccgcttccatcgggcagcccccgcttccagccccacttcccccctcccatgggagctcatcaggacacccaagtaaaccctattatgcacccggagcacccaccccccgccctctgcacggaaagctggaatctttacacggttgcgttcaggccctgctgagggaacctgcacagccaggcctctgggagcagttgggacagctgtatgagtctgagcacgatagcgaggaagccacacgatgctaccacagtgcgctgcggtatggggggtcattcgccgaactggggcccagaattggacggctgcagcaagcccaactgtggaacttccacactggatcctgtcagcatcgcgctaaggtcctgcctcctttggaacaggtgtggaacctcttgcatttagaacacaaaagaaactatggcgcaaagaggggaggcccacccgtcaagcgcgctgctgaacctccagtggtacagccagtcccccccgcagcactcagtggaccctcgggcgaagagggcttgtcccctgggggcaagagaagacgcggatgcaactctgagcagaccggtctgccacccggtctacccctgccaccaccaccactgcctcccccgcctccgccaccacctccgcctcccccgcctctgcctggattagcaaccagtcctccctttcagttgacgaagcctgggctgtggtcaaccttgcacggcgacgcctggggacctgagcgaaagggaagtgctccgccggaaagacaggaacagaggcatagcctcccgcacccctatccatacccagccccggcttacacagcccacccgccaggtcatcgcctagtccccgccgcaccgcctggcccgggcccccgtcctcccggtgccgaatcccatgggtgcctgcctgccacgcgaccaccaggcagcgacctgcgagaatctagagtgcagcggagcagaatggattcaagtgtaagccctgccgctacaactgcctgcgtgccatacgccccatctcgtccaccaggcctgcccggaacgacaacgagcagttcttctagcagctccagcaacacaggcttgcggggcgttgagccaaaccctggtatacctggcgccgaccactaccaaacccctgcattggaggtctctcaccatgggagactgggtccgtccgctcattcttcccggaagcctttcttaggagcccccgctgcgaccccccacctctcccttccacctggcccctcttcccctccaccaccaccttgtccccggctgttacgccctcctccaccaccagcatggttaaagggtcccgcttgccgcgcagcccgagaggacggcgagattctagaggagctgtttttcggtacggaaggcccaccacggccagcccctcctcctctgcctcatagagaaggattcctgggtccccccgccagtcgattcagcgtaggaacacaggacagtcacaccccgccaaccccacctactcccaccacctcctcaagcaattctaattccggctcccattcctcttcacctgctgggcctgttagcttcccgccccccccatacctggcccgcagcatcgaccccctgcctcggcccccctctccggctcagaacccccaggacccccctctggtacctttgaccctggcgttgccgcctgctccaccatcgtcttgtcatcaaaatacatccggatctttccggcgccccgaatcccctcggcccagagtgtcgttccccaagacaccagaggtcggccccggccctccaccaggacctttgtccaaggcgccacagcccgtcccccctggagtcggcgagttgccagctaggggcccccgcctctttgactttcccccaaccccgctggaagatcagttcgaggagcctgctgagtttaagatcttgccggatggacttgcaaacattatgaaaatgctggacgagtccattcggaaagaggaggagcagcaacaacatgaggctggagtagcaccccaacccccgctgaaggaaccttttgcttcactccagtctcccttccccacagacacagctcccactaccactgcacccgccgtggccgttacaaccactactacaaccactactaccacaacagcgacccaggaggaggagaaaaaaccccctcccgctctgcccccacctccgcctctggctaagttccctccaccatcccagccgcagccgccccctccccccccaccttcccctgcttccttgctgaagtcactcgcatccgtgcttgaggggcagaaatattgttacaggggtacaggggcagccgtgagtactcgccctgggccattgcccaccacacagtatagccctggtcctcctagcggagctactgccctgccaccaactagcgccgccccttcagctcaagggtcgccgcagcccagtgctagtagcagttcccaatttagtacctcagggggtccgtgggcgcgagagaggcgcgcaggcgaggagcccgtgccagggcctatgacccctacccagcctccgccaccgctgtcgctgccaccagctaggtcagaaagcgaggtattagaggaaattagtcgagcttgtgagaccttggtagagcgcgtgggcagaagcgcaacagaccccgctgatcctgtcgatacagccgagcccgccgactccgggaccgaaaggcttctcccgcccgctcaagcgaaagaggaggctggcggggtggcagcggtaagcggctcctgtaaacgtagacaaaaggaacatcagaaggaacatcgcagacacagaagggcttgcaaagattcagtgggcaggagacctcgggaggggcgcgcgaaggcaaaggccaaagtccccaaggagaagtcacgcagggtgctagggaatctggatttacaaagcgaggagatccagggtcgcgaaaaatcccgcccagacttaggaggtgcttccaaggcgaaaccacctactgcccccgctccaccatccgctcctgccccaagtgcacaacccacccctcctagcgccagcgttcctggcaagaaggctcgagaagaggcgccagggccccccggcgtgtcccgggctgatatgctgaaactgcgatccctcagcgagggaccccctaaggagctcaaaattagattgatcaaagtggagagcggggataaagaaacctttatcgcctcagaagtcgaagagcggaggcttcgaatggccgatctcaccataagtcactgtgccgcagacgtggttagggcttcccgcaatgcaaaggtgaaggggaagtttcgcgaatcttacctatcgcccgcccagagcgttaagcctaagattaacacagaggaaaagcttcctcgtgagaagctcaatccccctacaccgagtatttatctggagtctaagcgcgatgcttttagtccggtgttactccaattctgcaccgacccgcgaaatcccataacagtgattcggggccttgctggcagtctgcgcctaaatctgggactcttcagcactaaaacactggtagaagcgtctggtgaacacacggtcgaggtaaggacccaggtgcaacagccttccgacgaaaattgggacttaacaggcaccagacagatttggccctgtgagtcttccaggtcccacaccaccattgcgaagtatgcacagtaccaggccagttcattccaggagtctttgcaggaagaaaaagaatctgaggatgaggagtctgaagaacctgattctacaacaggtacacctccctcctccgctccagaccccaagaaccatcacattattaaattcgggactaatattgacctgtccgatgccaaaaggtggaagccccagctacaggaactgctcaaactcccggcttttatgagggtgacctcaactggtaatatgctaagccacgttggccatactatactgggaatgaatacggtccagttgtatatgaaggttcccggttccagaactccgggtcaccaggagaacaataatttttgtagtgtgaacattaatatagggccaggggactgcgagtggtttgctgtccacgagcactattgggagactatttctgctttttgtgaccgccacggagtggactatctcactgggagctggtggcccattctcgatgacctgtacgcaagcaacatccctgtctaccggtttgtacagcggccaggagatttggtatggatcaacgcaggtaccgtgcactgggtccaggctactggttggtgcaataatatcgcctggaacgtgggcccacttacagcttaccagtaccagctggcgctggagaggtatgagtggaatgaggtgaagaacgtgaagagcatcgtacctatgatccacgtgtcgtggaatgtggccaggactgtgaagatctccgacccggacttattcaaaatgattaaattttgtctgttacagagcatgaagcactgccaggtccaacgcgaaagcctggtcagagccgggaagaaaattgcttaccagggccgggtgaaggacgaacccgcctactattgtaacgagtgtgacgtagaagtttttaatattctcttcgttactagtgagaacggctcccgtaacacttatctggtacactgcgaagggtgtgcccgccgccgatctgctggtctacagggtgtggtggtgttggaacagtatcgcaccgaggagctggcccaggcatatgatgctttcactctggctcctgcaagcacttccagatag

SEQ ID NO: 122915 - DNA, 1245 bp, synthetic construct
  misc_feature 1..1245: note = Description of Artificial Sequence: Synthetic coding sequence
  source 1..1245: mol_type = other DNA
atgcatagtagaggacgggaaatcgtggtgcttctgaacccttggtctattaatgaggcagtcagctcatattgcacatattttattaaacaggacagtaaatccttcggtatcatggtgtcttggaaaggaatttatttcattttgactctgttttgggggagcttttttggctctatctttatgctgtcgcctttcctccccctcatgtttgtaaatccttcctggtatcgttggattaacaacaggctggtcgccacctggctgaccttacccgtggcccttctggagacaatgttcggcgtcaaagtcatcattactggagacgcctttgtgcccggggaacgctccgtcattattatgaatcaccgaaccagaatggattggatgttcctgtggaactgtctgatgaggtacagttacttacgcctggagaagatctgcctgaaggcctctctgaaaggcgtgccaggtttcgggtgggcaatgcaggctgctgcctacatcttcattcacagaaagtggaaagacgataaatcccactttgaggatatgattgactatttttgtgatattcatgagccgctccagctactaatcttccctgaaggaactgacttgaccgagaattcgaaatcgaggtctaacgcttttgccgagaagaatgggctccaaaagtatgagtacgtgcttcaccccaggaccacaggcttcacctttgtcgttgataggctgcgggaaggaaaaaacttggacgctgtgcatgacattaccgtggcctacccacacaatattccgcagagcgagaaacatctgctgcaaggagacttcccgagggagattcatttccacgtacatcgatatcctattgatactctcccaacaagcaaagaggatttgcagctgtggtgtcacaagcggtgggaggaaaaggaggaacgcctgcggtccttttaccagggagagaagaacttttacttcactggtcaaagcgttattccaccgtgcaagtccgaactacgtgtgttggtggtaaaactgctgtctattctgtactggacacttttttctcctgccatgtgtctgctgatctacttatacagcctggtgaagtggtactttatcatcacaatagtgatattcgtgcttcaggagcgcatatttggtggcctagagatcatcgaactggcctgctaccggctgctgcacaagcaaccacatcttaattcgaagaagaatgaatag

SEQ ID NO: 122916 - DNA, 927 bp, synthetic construct
  misc_feature 1..927: note = Description of Artificial Sequence: Synthetic coding sequence
  source 1..927: mol_type = other DNA
atgcactcccggggcagagaaatcgtggtcctgctgaatccgtggtcgatcaatgaagcagtctcctcttactgcacctacttcatcaagcaggactccaagtcattcggaatcatggtttcatggaagggcatatattttattctgaccctcttctgggggtccttttttggcagtatctttatgctgtccccctttcttccactcatgtttgtgaatccctcctggtatcgttggatcaacaataggcttgtcgccacctggcttaccctgccagttgctttattagagacaatgttcggcgtgaaagtcattataaccggtgacgctttcgtacccggcgaaaggtccgtcatcatcatgaaccaccgcacccgtatggactggatgtttctctggaactgcttgatgaggtattcatacctgagactcgagaagatctgcttgaaggcgtccttgaagggggtaccgggtttcggatgggccatgcaggctgcagcgtatatcttcatccatcgcaagtggaaagacgataagagccactttgaggacatgatagactacttctgcgacatccatgaacccctacaactcctaatcttccccgaggggactgatttgacagagaactcaaagagccggagtaatgcttttgccgagaagaatggtctccagaagtatgagtatgtcctccaccctcggaccactggtttcacctttgttgtggataggctcagagaggggcggcgtcagtcagaaggatctaaaggaccgctccagggagagctgcagatcactgcccagggaaaccaacgcggtcacaaacagatggagaaacattcaatgctgatggactggaagaaccagtaccgagagatcggccatacagcccaatccaacttgcagattcagtgttactcacattag

SEQ ID NO: 122917 - DNA, 927 bp, synthetic construct
  misc_feature 1..927: note = Description of Artificial Sequence: Synthetic coding sequence
  source 1..927: mol_type = other DNA
atgcattcccgcggtcgggaaatcgtggttctcctcaacccttggagcatcaacgaggcagtttcctcatactgcacatactttattaaacaggattccaaatcatttggcatcatggtgtcctggaagggaatttatttcatcttgactcttttttgggggagctttttcgggtccattttcatgctgtcccccttccttccccttatgtttgtgaacccatcctggtatcggtggatcaataaccggctagtggccacctggctgaccctgcctgtggcattgcttgagactatgtttggcgttaaagtgatcatcacaggggacgcatttgtgccaggcgagcggtctgtaatcattatgaatcacagaactagaatggactggatgttcctctggaactgtctaatgaggtactcctatctgagacttgaaaagatctgtcttaaggcatctctcaagggggtgcctggatttgggtgggccatgcaggcagccgcctacatctttatccaccggaagtggaaggacgataagtcacacttcgaggatatgattgactacttctgtgacattcatgagcctttgcagttgttgattttccctgagggcaccgatctcaccgaaaactctaagagtcgaagtaacgcctttgcagaaaaaaacggactgcaaaagtacgaatatgtcctccaccctcgcacgactggattcacctttgtggtggaccgcctccgggagggccgacggcagtctgaaggcagtaaggggcctctccagggagagctacagatcaccgcacaggggaaccagcgggggcataagcaaatggaaaaacactcaatgcttatggactggaagaatcagtaccgcgagatcggccacacggcccaatcaaatctgcagattcaatgctatagccactag

SEQ ID NO: 122918 - DNA, 1131 bp, synthetic construct
  misc_feature 1..1131: note = Description of Artificial Sequence: Synthetic coding sequence
  source 1..1131: mol_type = other DNA
atggtatcttggaaaggcatttacttcatcttaacattattttgggggagtttcttcggaagcatattcatgttatcacccttcctgccactgatgttcgtcaacccctcttggtatcgatggattaataatcgtctggtggccacatggttgacactccctgtcgctctcctcgagacaatgtttggcgttaaggtgatcataactggcgacgcgtttgttcccggggaaagatcggtcatcatcatgaaccaccgtaccagaatggattggatgttcctctggaactgtttgatgcgctactcctatctgaggctggagaagatttgcctcaaggctagcctcaagggagttcctggattcggctgggccatgcaggctgccgcctacatttttatacatcgaaagtggaaggacgataaatcccacttcgaagacatgatcgattacttctgtgatattcacgaacccttacagctgctcatcttccctgaaggcaccgacctgactgagaactcaaaatctagatccaatgccttcgctgagaagaacggactgcaaaaatatgagtacgtcctgcacccgcggaccacagggtttacattcgtagtggaccggttacgggaaggcaaaaacttggatgccgtacatgacataacggtcgcatacccccataacattcctcaatcagagaaacatctgctgcagggcgacttcccccgagagatccactttcatgttcaccgctatccaattgacactctccccacgagcaaggaggacttgcaactgtggtgtcacaagagatgggaggaaaaggaggaacgactgaggtctttctatcagggggaaaagaatttttacttcactgggcagtccgtgatccccccatgcaagtcagagctgcgggttttggtggtgaagcttctgtctatcctctactggaccctcttcagccctgcaatgtgcctgctcatatacctctattccctcgtgaaatggtactttataataaccattgtaatatttgtgctgcaggaaagaatcttcggtggtcttgaaattatagagttagcctgttacagacttcttcataaacagccgcaccttaatagtaaaaaaaacgagtag

SEQ ID NO: 122919 - DNA, 993 bp, synthetic construct
  misc_feature 1..993: note = Description of Artificial Sequence: Synthetic coding sequence
  source 1..993: mol_type = other DNA
atggtctcctggaagggcatttactttatcctcaccctcttttggggtagctttttcggtagtatttttatgttaagcccattcttgccactgatgttcgttaacccatcctggtacaggtggatcaacaacagactcgttgcgacatggctgactttgccggtagctctcctcgaaacaatgttcggagtcaaagtgatcattacaggggacgcttttgttcctggagagcgctccgtgattattatgaaccatcggacccgaatggattggatgtttttgtggaattgtcttatgagatatagttacctccgccttgaaaagatttgtctgaaggcatctctcaaaggtgtgccaggatttggttgggctatgcaagctgcggcgtatatctttattcatcggaagtggaaggacgataagagccatttcgaggacatgattgactatttctgtgacatacatgagccactccaactgctcatttttccagaggggacggatctaaccgaaaacagcaagagccgcagcaacgcatttgccgagaaaaatggactccagaagtacgaatacgtactgcacccccgaactaccggatttacttttgtggtggaccgccttcgcgaggggaaaaacctggatgctgttcacgatattacagtggcatacccccataacattccccagagtgaaaagcatctgttgcagggcgacttccctcgggagattcacttccacgtacaccggtaccccatcgacacacttcctacgtctaaggaagatttgcagctctggtgtcataaaagatgggaagagaaggaggaaagactcagaagtttctatcagggagagaaaaatttctacttcacaggtcagtcggtgatacctccctgcaaatccgagctgcgggtcctcgtggttaaactgtatactgtcttggaccctgtacagccatgcaacgtgccaacacacatcttcgtgcagtcctgctag

SEQ ID NO: 122920 - DNA, 462 bp, synthetic construct
  misc_feature 1..462: note = Description of Artificial Sequence: Synthetic coding sequence
  source 1..462: mol_type = other DNA
atgcattccagagggagggaaatcgttgtccttctgaatccctggagtattaatgaggccgtgagtagttactgcacgtactttatcaaacaggattccaagtctttcggaatcatggtctcttggaaaggaatttacttcatattgacactgttttggggctctttttttgggagcatatttatgctttctccattcttgcccctgatgtttgtaaatccatcttggtacaggtggatcaataatcggctggtagctacctggttgacgctacccgtagcgctactggagaccatgtttggagtgaaggtgataattacaggagatgctttcgtgcccggagagagaagcgtcattattatgaaccatcgaacaaggatggattggatgttcctgtggaattgcctgatgcggtacagctacctccggctggagaaaatttgtctgaaggcaagcctttag

SEQ ID NO: 122921 - DNA, 1131 bp, synthetic construct
  misc_feature 1..1131: note = Description of Artificial Sequence: Synthetic coding sequence
  source 1..1131: mol_type = other DNA
atggtgtcctggaaaggaatttactttatccttaccttgttttgggggtccttcttcggctccatcttcatgctctctccttttctcccgctaatgttcgtgaatccctcctggtataggtggattaacaaccgcttagtggcgacatggctgactctgcctgtggcgctgctagaaactatgttcggtgtgaaagtcataattactggagacgcattcgttcctggagaacgttctgtcattattatgaaccaccggactaggatggactggatgttcctctggaactgcctgatgaggtattcctacctgaggctggagaagatttgcttgaaagcctctcttaagggcgttcctgggttcggctgggccatgcaggcagctgcctacatattcatccaccgcaagtggaaggacgacaagagccacttcgaggatatgatcgactacttttgcgatattcatgaacccttgcagctactgatttttccggaaggcactgatctgaccgagaattcaaagtcaaggtctaacgcctttgccgagaagaacggcctacagaaatatgaatacgtactccatccccggaccaccggctttacttttgtggtggataggcttcgggagggcaaaaatctggacgccgtccacgacatcaccgtggcgtatccacataatattcctcaaagtgaaaagcaccttctccagggggatttcccccgggaaattcatttccatgtgcacaggtaccctatcgatacgctacccacttccaaagaggatctccagctctggtgccataaacgctgggaggagaaagaagagcgacttagaagtttctatcaaggtgagaaaaatttctactttaccgggcagtcagtgatccctccctgcaaaagcgaactgcgagtgctcgtggtgaaactgctttccattctctactggaccctcttttctcccgctatgtgtctcctgatttacctgtacagcctggtaaagtggtacttcatcattactattgtaatttttgtgttgcaagaacggatctttggtggactggaaatcattgagcttgcttgttacaggctattgcataaacagccgcacctgaatagtaagaagaacgagtag

SEQ ID NO: 122922 - DNA, 1095 bp, synthetic construct
  misc_feature 1..1095: note = Description of Artificial Sequence: Synthetic coding sequence
  source 1..1095: mol_type = other DNA
atggccgctatatcgacatcaatccccgtgatatctcagcctcagttcaccgctatgaatgaaccccaatgtttctacaatgagagtattgcctttttctataatcgcagcggaaaacatctggctacagaatggaacactgtgagcaagctggtcatggggctcgggatcacagtttgcatcttcattatgttggccaatttacttgtgatggtcgccatctatgtcaatcgacggtttcacttccccatttactatctgatggctaatcttgcggccgctgacttttttgcgggccttgcctatttctacctgatgtttaatactgggcctaatacccggcgtctcaccgtgagtacctggctcctgcgtcaaggactgattgatacatcactgactgcttccgtagccaatctgctggcaatcgcaatcgagagacacataactgtctttagaatgcagttgcacacccgaatgagcaatcgcagggttgtggtcgtcattgtggttatctggactatggccattgtgatgggtgcaatcccatcagtcggctggaactgtatctgcgacatcgaaaactgcagtaatatggctccactgtactccgacagttatctcgtgttctgggcgatcttcaatctggtgaccttcgttgtgatggtggtgctgtacgcccatatcttcggctatgttaggcagagaaccatgagaatgagcagacactcttcgggccccaggaggaaccgcgacaccatgatgagccttctcaagactgtggttatcgtcctgggagcttttattatttgttggacacctgggctcgtactgttgcttctcgacgtgtgctgcccacaatgcgatgtcctggcttacgagaaattttttctgttactggcggaattcaacagcgccatgaatcctatcatctattcctacagagacaaagaaatgtcggccactttccggcagatactttgctgtcagagatcagaaaatcctaccgggcctacagaaggttcggataggagcgcatcatcactaaatcacacaatcttagccggcgtgcatagtaatgatcattctgttgtctag

SEQ ID NO: 122923 - DNA, 1095 bp, synthetic construct
  misc_feature 1..1095: note = Description of Artificial Sequence: Synthetic coding sequence
  source 1..1095: mol_type = other DNA
atggccgctatctcgaccagcatcccagtgatcagccagccacaattcaccgcaatgaatgagccgcaatgtttctacaacgagagcatcgcgtttttctacaatagaagtggcaagcaccttgccacagagtggaataccgtttccaagcttgtgatggggctgggaattactgtgtgcatctttatcatgctggccaatctgctggtgatggttgccatctatgtgaacagaaggttccatttccccatttactatctgatggctaatctcgccgccgccgatttcttcgcaggcctggcctatttctatctaatgttcaacaccgggccgaatacacgtcggctcacagtgagcacctggctcttgcggcagggactgatcgatacatccctgaccgcttccgtcgccaatctgctggccatcgcgattgaacgacacatcacagttttcaggatgcagctgcacactaggatgagtaaccgtcgggtggtggtggtgatcgtggtgatctggactatggccatcgtgatgggggccatcccatcggtgggttggaattgcatatgcgacattgagaactgctccaacatggccccactatatagcgactcctacctagtcttctgggcgatttttaacctcgtcacatttgtagtcatggtcgtactgtacgcccacatattcgggtacgtgcggcaacggacgatgagaatgagccgacacagttccggccctcggcgtaatcgggacacaatgatgtcgctgctgaagaccgtcgtcattgtccttggcgcatttatcatctgctggactccaggccttgtgctgttgctgctcgatgtctgttgcccgcagtgcgacgtattggcatatgaaaaatttttcctactgctcgctgagtttaattctgctatgaatcccattatatacagttatcgagataaggagatgagtgcaacgtttcgccaaattctttgttgtcagagatccgaaaatccaactgggcctacagagggatcagataggtctgccagcagccttaaccacaccatactcgcgggggtgcactcgaacgatcatagcgtagtatag

SEQ ID NO: 122924 - DNA, 1095 bp, synthetic construct
  misc_feature 1..1095: note = Description of Artificial Sequence: Synthetic coding sequence
  source 1..1095: mol_type = other DNA
atggccgccatctccacaagcattccagtcataagccaacctcaattcaccgcgatgaacgagccacagtgtttctataatgagtccattgcattcttttataacagaagcggaaaacatctggcaacggaatggaacaccgtgagcaagctggtgatgggcctggggatcacggtatgtattttcattatgctggccaacctcttggttatggttgctatctatgtgaatcgccgtttccactttccaatttactatcttatggccaatcttgcagccgctgacttctttgctggcttagcttatttttacctgatgtttaatacaggaccaaatactcggcgactgacagtaagtacctggttacttcgtcaggggcttatcgacacatccttgacagccagcgtggctaacctgttggcgattgcgattgagaggcatattactgtgtttaggatgcagctacatacaagaatgtctaatcgcagagtagtggtcgtaattgtggttatctggaccatggcaatcgttatgggagccatcccatccgttgggtggaattgcatctgcgacattgaaaattgttcaaacatggctccactatactcagactcgtacttggtgttttgggccatctttaatctcgtgacatttgtcgtgatggtggtgctctacgcccacattttcggctatgtccgccagcgtaccatgagaatgagccgccattccagcggacctcgcaggaatagggacaccatgatgagcttgcttaaaaccgttgtcatcgtcctcggagccttcataatctgttggacaccagggctcgtcctgctgctcctggacgtgtgctgtccacagtgcgacgttctagcctacgagaaatttttcctgcttctcgcggaattcaattcagcaatgaacccaattatatactcttaccgtgataaggaaatgtctgcaacttttagacagatcctgtgctgccagcggtccgagaacccaactgggccaacagagggtagcgaccgcagcgcatctagcctgaaccataccatcttggccggggtgcactctaacgaccattccgtggtatag

SEQ ID NO: 122925 - DNA, 549 bp, synthetic construct
  misc_feature 1..549: note = Description of Artificial Sequence: Synthetic coding sequence
  source 1..549: mol_type = other DNA
atggcagctataagtacaagcattcctgtgatctcacagccgcaatttacagccatgaacgagccacaatgcttttataacgagagtatcgcatttttttacaatagaagcgggaaacacctggccactgagtggaacaccgtgtcaaagcttgtgatgggactaggcataacagtgtgcatcttcattatgctggccaaccttctggtcatggttgcaatatacgtaaaccgtcgcttccatttccccatttattacctcatggctaatctagccgcagccgacttttttgccggtctggcatacttttacttgatgtttaataccgggcccaacacacgccgcctcaccgtgagtacctggctccttagacaaggtctcattgacactagtctgaccgctagtgtggcaaatctcctagcaattgccatcgagagacacatcactgtgttccggatgcagctacacactcgcatgtccaaccggcgcgtcgttgtcgtgatagtggtgatctggactatggcaatcgtcatgggcgctattccctag

SEQ ID NO: 122926 - DNA, 1041 bp, synthetic construct
  misc_feature 1..1041: note = Description of Artificial Sequence: Synthetic coding sequence
  source 1..1041: mol_type = other DNA
atgaatgagcctcagtgcttttacaacgaaagtatcgcattcttttacaatcggtcagggaagcatttggcgaccgaatggaataccgtctccaagttggtgatgggcctagggattaccgtgtgcatctttattatgctggccaacctgttagtgatggtggctatctacgtaaatcgtcgttttcactttccaatttactatttaatggccaatttggcggcagccgacttcttcgccggactggcctacttttacttaatgtttaacaccggtccaaacacccgcagactcaccgttagcacctggcttctgaggcagggcctgatagacacaagcctgaccgcctccgtagctaacctgctggcgattgccatcgaaagacacattaccgttttcagaatgcaactacatacaaggatgtccaatcgacgggttgtggtggttatcgtggttatatggacaatggcaatcgtaatgggcgcaataccatctgtgggatggaattgtatctgcgatatcgaaaattgtagcaatatggcacccttgtacagcgatagttacctcgttttttgggctatattcaacctcgtcaccttcgttgttatggtggtcctctacgcccacatctttggttatgttcggcagagaactatgagaatgagcaggcacagttcaggccctcgacggaacagggacactatgatgagcctgttgaaaaccgtggtcatcgtgctcggggctttcatcatttgttggacaccaggcctcgtcctgttactgctggacgtctgttgccctcagtgtgatgtgctagcctacgagaaattcttcctcctgcttgccgagtttaatagtgcaatgaaccctatcatttatagctaccgtgacaaggagatgtcagccacattcaggcagattttgtgctgccaacgaagtgagaatcccactggaccaactgaaggctctgatagatctgcttccagtctgaatcacactatcctggcaggggtgcacagcaatgaccatagcgtggtctag

SEQ ID NO: 122927 - DNA, 1098 bp, synthetic construct
  misc_feature 1..1098: note = Description of Artificial Sequence: Synthetic coding sequence
  source 1..1098: mol_type = other DNA
atggaggagggcgcccagcgctctggagccctgggcgctccacatcaatttaccgccatgaacgagccacagtgcttttataacgaaagcatcgcttttttctacaacaggtcaggaaaacacctggcaactgagtggaatacagtgtctaagctcgtgatgggactgggaatcactgtatgcatcttcattatgctcgccaacctcctggttatggtggccatctacgtgaacaggcgcttccacttcccaatttactatctgatggctaaccttgctgctgcagacttctttgccggattggcatacttctacctgatgttcaacaccggaccgaacacacggaggcttacggtctcaacgtggctgctgcggcaaggtctgattgatacaagtttgacagccagcgtggccaacctgctggccattgcaatcgagaggcacatcacggtgtttaggatgcaactccatacacggatgtccaacaggcgggtggttgtagtcattgtagtaatttggacgatggcaatagttatgggtgcaataccttctgtcggttggaattgcatctgtgacatcgagaactgctctaacatggcaccgttatactctgattcctatttagtattctgggcaatttttaaccttgtcactttcgtggtcatggtggttctgtacgcccacatcttcggctatgtacgccagagaacaatgcgaatgtctcgccactcctcaggacccaggaggaatagagatactatgatgtcactgttgaagaccgtggttatcgtgctcggggcgttcattatatgttggacgcccggactcgtgctgctgttgcttgacgtttgctgcccacaatgtgatgtgctcgcctacgaaaaattctttctgttgctggccgaattcaacagtgctatgaaccctatcatctattcttatagggataaagaaatgtcggccacgttccgccaaattctgtgttgccagaggtctgagaatccaacaggacccacagaggggagcgacaggtccgcttcttcactcaatcataccatcctggccggagtgcatagtaacgaccattcggtggtttag

SEQ ID NO: 122928 - DNA, 1098 bp, synthetic construct
  misc_feature 1..1098: note = Description of Artificial Sequence: Synthetic coding sequence
  source 1..1098: mol_type = other DNA
atgctgctcctgctgatccctgcacacagtagcgtgttagaaaatgagttcactgccatgaacgaaccccagtgtttctacaacgagagtatcgcctttttttataaccgttctggcaaacacctggcgaccgaatggaatactgtgtctaagttggtcatgggactgggtatcactgtgtgcattttcataatgctcgcaaacctgctggtcatggtggctatctacgttaataggcgatttcattttccaatttattatctcatggccaacctcgccgctgccgatttctttgccggcctggcttatttttatctgatgtttaacactggtcctaatacacgcagactcacagtttcgacgtggctcctccgccaaggactaatagacaccagcttaacagccagtgtggccaatctgctggccatcgcaatcgaacgccacatcacggtgtttcgaatgcaattgcacacccgaatgagtaatcggcgcgtcgtcgtggtgatcgtcgtgatctggaccatggccattgtgatgggggcaataccttctgtaggctggaactgcatatgcgacatcgagaattgcagcaacatggcccctttgtatagcgacagttacctagttttctgggccattttcaatctggtcaccttcgtggttatggtggtgctgtacgcccatatcttcggctacgtgcgccagaggacaatgcgaatgagtcggcactcctctggacctcggaggaatagagatacgatgatgagtctcctcaaaacggttgtcatcgtgctcggggcgtttataatatgttggactccggggctagtacttcttctactggatgtgtgttgccctcaatgcgacgtgcttgcttacgaaaagtttttcctgctactcgcagaattcaactcagctatgaatccgattatctactcctatagggataaggaaatgtccgccacctttcgtcagatcttgtgttgtcagagatcggaaaacccaacagggcctaccgaagggagtgaccggtccgctagctccctcaatcatacaattttggccggagttcatagcaatgatcacagtgttgtgtag

SEQ ID NO: 122929 - DNA, 1056 bp, synthetic construct
  misc_feature 1..1056: note = Description of Artificial Sequence: Synthetic coding sequence
  source 1..1056: mol_type = other DNA
atggttattatgggccaatgctactacaacgagacgattggcttcttctacaataattccggcaaggaactctcaagtcactggcggcctaaagatgtggtcgttgtcgcgctaggattgaccgtgtccgtgttagtgctcctgaccaatctgcttgttatcgccgcgattgcctccaacaggagattccaccagccgatctactacctactagggaatctggccgctgccgacctgttcgccggggttgcttacctctttctgatgtttcacactgggccccggaccgctcggttaagcctcgagggttggttcctgaggcaaggactacttgacacctcgttaaccgccagtgtcgccaccctgctggcgattgctgtcgaacgtcataggagcgtgatggcagtgcagctgcactcgcggctgccaaggggtagagtcgtgatgctaattgtcggtgtgtgggtcgccgcactgggactcggattactacccgctcacagttggcactgtctttgcgctctggatcgatgtagcagaatggctcccctcttatcccgctcgtacctggctgtgtgggcactgtcgagcctgctggtgttcttactaatggtcgcggtgtacacccgaatcttcttctacgtgagacggagagtgcaaagaatggccgagcacgtgtcttgccacccccgttacagggaaacaaccctgagcctggtgaaaacagtggtcataattctcggagcattcgtagtctgttggacacctggacaggtcgtgctgctgctggatggtttgggctgcgagtcatgcaatgtgctagcagtagagaagtactttctgctgctggcggaggcgaacagcctcgtgaacgccgccgtgtactcctgcagagacgccgagatgcgccgcactttccgacgcctcttgtgttgcgcatgtctgagacaatcaacacgtgagagtgtgcactacacatcctcggcccagggcggtgccagcactcgaattatgctccctgagaacgggcatccactgatggactctaccctgtag

SEQ ID NO: 122930 - DNA, 1056 bp, synthetic construct
  misc_feature 1..1056: note = Description of Artificial Sequence: Synthetic coding sequence
  source 1..1056: mol_type = other DNA
atggtgattatgggccagtgctactacaatgaaacaatagggtttttttacaacaatagcggaaaggagctgtcttcccattggcgccccaaagacgtcgttgttgtggcgctgggcttgacagtgtccgttctggtgctgctcacaaatcttctcgtcattgccgctattgcctcgaataggaggttccatcagcctatttactacctgctgggtaatctggcagctgccgacctgttcgccggggtcgcctacttatttctcatgtttcacactggccctaggacggcaaggctgtcattggagggatggttcctaaggcagggcttgctcgatacctctttgacggccagcgtggcaacactgctcgctattgccgtcgagagacatagatcagtcatggcggtgcagctgcattccagactgcctcggggccgtgtagtaatgctgatcgttggtgtctgggtagccgccctgggactgggactgctgcctgcccactcatggcattgcctgtgtgccttggatcggtgtagccggatggctcccctgctatcgagatcttaccttgccgtgtgggcactctcctcactcctggtgttcctgctcatggtggccgtttatactaggatattcttttatgtccgtcggagggtgcaacgcatggccgagcacgtgtcatgtcaccctcggtatagagagactaccttatccctggtcaagaccgtcgtcattatcctcggggcgttcgtggtatgttggacccccggacaggttgtcctcctacttgatggactgggttgtgaaagctgtaacgttctcgccgttgagaagtacttcttgctgctcgccgaagcgaattctctcgtcaatgcagctgtctattcatgcagggatgctgaaatgcggcgcacatttcgcagattgctttgctgtgcctgcctgcgccagagtactcgtgagagcgtccactatactagttcggcgcagggcggagccagcacccgtatcatgctccctgaaaatggccaccctctgatggatagcaccttgtag

SEQ ID NO: 122931 - DNA, 1062 bp, synthetic construct
  misc_feature 1..1062: note = Description of Artificial Sequence: Synthetic coding sequence
  source 1..1062: mol_type = other DNA
atgaacgagtgccattatgataaacacatggatttcttttataacaggagtaacacagatactgtggatgattggactggcaccaaacttgtgatagtgctgtgcgttggcacattcttttgcctgtttatcttcttcagcaactccctggtgattgcggcggtgataaaaaatcgcaaattccatttccccttttactacctcttggccaacctggccgccgcagatttcttcgcaggtatcgcctatgtgtttctgatgttcaatacaggacccgtttccaaaaccctgacagttaacaggtggtttctgaggcagggccttttggacagctctctgactgctagcctcacaaatctattggtgatcgccgtcgaaaggcatatgtctattatgagaatgagggtgcactctaacctgactaagaagagagtcacgctgctgattcttttggtatgggccatagcaatttttatgggagcagttcctaccctgggttggaactgtttatgcaacattagtgcatgcagtagtctggcccccatttactcgagatcttaccttgtgttctggaccgtgtcaaacctgatggcattccttattatggtagtagtttatctgcgtatctacgtctacgtgaagagaaagacgaacgttctgagtccccacaccagtgggtctatctccaggcgacggacgcccatgaaactcatgaaaactgtgatgactgtcctgggggcattcgtggtctgctggacccctggcctggtcgttttactgctggacgggctgaactgcagacagtgcggagtgcagcatgtcaagcggtggtttctcctgcttgccttattaaatagcgtggttaatcctatcatatatagctacaaggacgaggacatgtatgggacaatgaagaagatgatttgctgtttctctcaagagaatcctgaacggaggcctagccgcataccatctaccgtgctgtctcggagcgacactggcagtcaatatatcgaagatagcatttctcagggcgcagtatgcaataaaagcacaagctag

SEQ ID NO: 122932 - DNA, 1062 bp, synthetic construct
  misc_feature 1..1062: note = Description of Artificial Sequence: Synthetic coding sequence
  source 1..1062: mol_type = other DNA
atgaacgagtgccactatgacaagcatatggacttcttttataatcgcagcaacaccgatacagtggacgactggactggcaccaaacttgtgattgtgctctgtgtggggacatttttttgtttatttattttcttcagcaattcgcttgttattgccgctgtgattaaaaaccgcaaattccatttccccttttactacctcttggcaaatctggccgcagcggatttctttgccgggatagcctacgttttcctgatgtttaataccgggccagtgagtaagacgcttactgtaaacaggtggttccttcggcagggtctgctggatagcagtttaacagcttccctcaccaacctgcttgtaatcgcagtggaaagacacatgagtatcatgcgcatgcgtgtgcacagcaacctaacaaaaaagagagtcacactcctcattctcctggtgtgggccattgctatatttatgggcgccgtgcctaccctgggttggaactgtttgtgcaacatatccgcctgttcaagcctcgcacctatctactccaggtcatatctggtgttttggaccgtttctaacttgatggccttcctgattatggtcgtcgtctaccttagaatctacgtctatgtgaagaggaagaccaatgttttgagtccacatacgagcgggtccatttctaggaggcgcacccccatgaagcttatgaagacagtgatgacggtcctgggggccttcgtggtctgttggactcctggactcgtcgttctcctcctggacggactgaactgtagacagtgcggagtgcagcatgtgaagcggtggttcttattactcgccctccttaatagcgtggttaatcctatcatttacagctacaaggacgaggacatgtacgggaccatgaaaaaaatgatctgctgttttagccaggaaaaccctgagcggcgcccttcaagaataccttccaccgtactctcccgttctgacaccggttcacagtacatcgaagacagcatcagccagggggccgtgtgcaacaagtcaactagttag

SEQ ID NO: 122933 - DNA, 1113 bp, synthetic construct
  misc_feature 1..1113: note = Description of Artificial Sequence: Synthetic coding sequence
  source 1..1113: mol_type = other DNA
atgggagacagacggttcatagacttccagtttcaggacagtaatagttcccttaggccccgtctcggaaatgcgaccgccaacaatacatgtatagtggatgattccttcaagtataaccttaatggagctgtatactccgtcgttttcatcctaggactcataaccaactctgtgtccctgttcgtgttttgttttagaatgaagatgaggagcgaaaccgctatcttcattactaatctggcggttagcgacctgctgtttgtctgcactctccccttcaagattttttacaattttaatagacattggccttttggcgacaccctgtgcaagataagcggaactgcgttcctaactaatatctatgggtccatgctcttcttgacttgcatctcagtcgatcggttcctggcaatcgtataccccttcaggtcccgaaccatacgcacgaggcgaaatagtgccatagtgtgcgccggagtgtggatccttgtcctttcaggcggaattagtgcctccctgttctccacaaccaatgtaaacaatgccactactacatgtttcgagggcttcagcaagcgggtctggaagacttatctgagcaagattacgatcttcattgaggtggtgggctttatcattccgcttattctgaatgtgagctgctcttccgttgtgctgcgaaccctgcggaaacccgccaccttatcccagatcgggacaaacaaaaaaaaggtgctgaaaatgataactgtacatatggccgtgttcgttgtctgttttgttccgtacaatagcgtcctgttcctctatgctctggtgcgtagccaggccatcactaactgctttctcgaacggtttgcaaagattatgtaccctattaccctgtgcctggctactttgaactgttgcttcgatcccttcatttattatttcactctggaatctttccagaagagcttctatatcaatgcccacatacgaatggagtctctgtttaaaaccgagacaccgctgacgacaaagccatccctacccgcgatccaggaagaagtctcagaccagaccacaaacaacggaggagagctcatgctggagagcaccttttag

SEQ ID NO: 122934 - DNA, 1113 bp, synthetic construct
  misc_feature 1..1113: note = Description of Artificial Sequence: Synthetic coding sequence
  source 1..1113: mol_type = other DNA
atgggagaccgcaggttcatcgattttcaattccaggatagcaattcatcactgcggccccgactgggtaatgccacagccaataacacctgcatcgtcgatgacagcttcaagtacaacttgaacggggccgtctacagtgtggtgttcatcctgggattgatcaccaactccgtttccctattcgttttctgcttcaggatgaaaatgaggtctgagacagccatatttatcacaaacctggctgtgagcgacttactttttgtctgtactctgccatttaagattttctacaacttcaatcgacattggccttttggcgacactctgtgcaaaatttctggcacagcattccttacaaatatttacgggagcatgttattcttgacttgtataagtgtggaccgctttctggccattgtctatcccttccgcagccggacaattaggacgcggaggaatagtgccattgtatgcgcgggtgtgtggattctggtgctgagcggaggaattagcgcctcactcttctcaaccacgaatgtaaacaatgcaacgaccacttgtttcgaggggtttagcaagcgggtgtggaaaacatatctcagtaagatcacaatttttatcgaggtggtgggttttatcatccccttaatcttaaatgtctcctgctcatccgtcgtgttgcgtacccttagaaaacctgcaaccttgtcccagatcggtactaataagaaaaaggtgttaaaaatgatcacagtccacatggcagttttcgtggtctgcttcgttccctacaactcggttctgtttctctatgcactggtgcggagccaagccatcactaattgctttctcgagaggtttgccaagataatgtacccaattacgctttgcctggctacactgaattgttgctttgacccatttatctattactttactctcgaatcttttcagaaatccttctacataaatgcacatatccgtatggagtctcttttcaagaccgaaaccccgctcacgacgaagcctagtttaccggcaatacaagaggaggtttcagaccagacaacgaacaacggtggcgaactgatgctagagtccacattttag

SEQ ID NO: 122935 - DNA, 1119 bp, synthetic construct
  misc_feature 1..1119: note = Description of Artificial Sequence: Synthetic coding sequence
  source 1..1119: mol_type = other DNA
atgctcgccaactcttcctccactaattcttccgtcctaccttgtccggattaccgccctacacaccggctccatctggtcgtctatagtctggttctggcagcaggtctgcctttaaacgcgttggcgctgtgggtatttctgcgggcgcttagggtccatagtgtggtctctgtgtacatgtgtaatctcgcggcctccgacttactctttaccttgtcacttcccgtgaggttaagctactatgctctccatcactggccgttccctgacttactgtgtcagactacaggggcaattttccagatgaatatgtacggttcctgtatatttcttatgctcatcaacgtggaccggtatgctgctatagtgcatccgctaaggctccggcacctgcgacgtcctagagtggctcgtttgttgtgtcttggggtgtgggcacttattttagtgtttgcagttccggctgcacgcgtccaccggccctcgcgatgtaggtaccgcgatctggaggtgcggttgtgctttgagtcattctctgatgagctgtggaaaggccgcctgctgcctcttgttctgctagcagaagccctcggatttttgctgcctctggctgccgtagtgtatagttccggccgagtgttctggacccttgctaggcccgatgcaacacagtcacagcgtaggaggaagaccgtcaggctgctgctggccaatcttgtgatcttccttctctgctttgtgccttacaatagcactctggcggtgtatgggctgttgaggtctaaactggtggcagccagcgtgcccgcaagagatagagtccgcggagtgttaatggtgatggtgctgctggcaggtgcaaactgcgtcctcgatcccctggtctattactttagcgcggagggcttccgcaatacccttcggggccttggaactccccaccgggcgcggacttccgctaccaatggaacacgcgctgcacttgcccaatcagagcgcagcgccgttaccacggacgctacaagacccgatgccgcatcccagggactactccgaccatccgattcacacagcctgagctccttcacccaatgtccacaagatagcgcgctgtag

SEQ ID NO: 122936 - DNA, 1119 bp, synthetic construct
  misc_feature 1..1119: note = Description of Artificial Sequence: Synthetic coding sequence
  source 1..1119: mol_type = other DNA
atgctggccaactctagttctaccaactcttccgtgctcccatgtcccgactacaggccgactcacagactgcatctcgtggtttactcactggtactggctgctggtctgcctctgaacgccctggccttatgggtgttcttgcgcgcactgcgtgtgcactcagtggtgagcgtgtatatgtgcaatctggctgcttccgatctcctcttcacactctccttgcctgtgcgtttgtcatactatgcactccaccattggccgttccccgatctgctttgtcagaccacaggggcaatctttcagatgaatatgtacggcagctgtatctttctaatgctgatcaatgtcgaccgatatgctgctattgtccatcccctacggctcagacacctgcgacggccccgagtggcaaggctgttgtgtcttggagtgtgggctctgatcctggtgttcgccgtccccgctgccagagtacaccgaccaagcagatgtcgttaccgcgatttggaagtcaggttgtgtttcgagtcctttagcgatgagttgtggaagggacgcctgctccctcttgtgctcctggcggaggcattaggatttttactccctctggctgctgtggtgtattctagcgggagggtcttttggacccttgcacgccccgacgccacacagtcacagaggagacggaagacggtgcgcctgctcctggctaaccttgtgatctttctactgtgctttgtcccctacaactccacattagctgtctatggcttgctgcgctctaaacttgtggcagccagtgttcccgcacgggacagggtgcgtggtgtactgatggtgatggtgttactggccggcgcaaattgtgtgcttgatccgctggtctactacttctccgccgaggggtttaggaacacgctgagaggtttaggcactccacatagagcaagaacctccgctacaaatggcacacgcgcagcacttgcccagtctgagagatctgcagtcacaacagacgctactaggcccgacgctgcctcacaggggttgctgcgaccctccgatagccactctctgtccagcttcacccagtgtcctcaagacagcgcactttag

SEQ ID NO: 122937 - DNA, 1290 bp, synthetic construct
  misc_feature 1..1290: note = Description of Artificial Sequence: Synthetic coding sequence
  source 1..1290: mol_type = other DNA
atgctggctaactcatcctccacaaactcctccgtgctgccttgtcccgactacagacccacacacagactccatttagttgtatacagcttggtgctcgcagctggactgcccctgaatgctctagctctgtgggtctttctcagggcgttgagggtgcacagcgtggttagtgtgtacatgtgcaatctggcggctagtgatctgctgtttaccctctcactcccggtgagacttagttactacgcactgcatcattggccattccctgacctgctctgccagacaaccggcgccattttccagatgaacatgtatgggagttgcatcttcctaatgctgattaacgtagacaggtacgctgcaatcgtgcatccactcagacttaggcatcttcggagacccagggttgccaggcttctgtgcctgggtgtatgggccctaatcctggtatttgccgtgccggcagcgagggtgcaccgcccctcccggtgccgctaccgtgacctcgaagtaagactatgtttcgagtccttctcagacgagctttggaaaggtcgtctactgcccctggtgttgttggccgaagctctcgggtttctgcttcctctggctgctgttgtgtactcctccggtagggttttttggacccttgcaaggcccgacgcaacacagtcccagcgtcgccgtaagactgtgcgcctcttgctcgccaacctcgtgatcttcctgctgtgtttcgtgccctacaactccactttggccgtctatggcctcctgcggagcaagctagtggctgcctcagtcccggcacgtgaccgggtgcggggggtcctaatggtaatggtgctgctagcaggcgccaactgtgttttggaccctctcgtttattacttttctgcagaaggtttccgaaataccctgcggggtctggggacaccgcacagggccaggacgtctgcaactaacggtacgcgggcagccctcgcccagtcagaaaggtctgcggtcactacagatgcgactaggcccgacgcagcttcacagggcctgctgcgcccttcagacagccacagcttgagctccttcacccacgccatagcgctctcggttccggattcccagcgcctctctttttgggaggcctatcgggtttacacgcaggagggaggtttgggaacgtggactttcgggtggcagttccaactgtccaatgcggaggagtacaaagtctggaaaccaggtcccagggaaggatctgctgccggcaacgggttctttaaactgtag

SEQ ID NO: 122938 - DNA, 1605 bp, synthetic construct
  misc_feature 1..1605: note = Description of Artificial Sequence: Synthetic coding sequence
  source 1..1605: mol_type = other DNA
atgcggctgcgtggctgtgggccccgggcagccccagcgagcagtgctggagccagcgacgctagactgttggctcccccgggtagaaatccattcgtgcatgaactgcggctgagcgcactgcagaaagctcaggtcgccctgatgactctcaccctatttcccgtgcggctcctcgtcgccgcggccatgatgctccttgcttggccgctcgccttagttgctagtctgggctctgcagagaaggaacccgagcagcctcccgcactctggaggaaggttgtggacttcttactgaaagcaattatgagaacaatgtggtttgcaggtgggtttcaccgggttgccgttaaggggaggcaggcacttccaaccgaggcagccatactaactctggcacctcacagttcctacttcgatgccattccagtgacaatgacaatgtctagtatagtcatgaaagcagagtctcgcgatatccctatttggggaaccctgatacaatatattcggcccgtgttcgtgtccaggagcgaccaggactcgaggcgcaaaacagtcgaagagatcaagcgcagagcgcagtcaaacggcaaatggccgcagattatgatcttccccgagggcacatgtacaaaccgcacctgtctgatcacctttaagcccggtgcgttcatcccgggcgctcccgttcagcccgtggtactgagatatccaaacaaactggatactatcacctggacgtggcagggacctggcgccctggagatcttgtggctgacactgtgccaatttcacaaccaggtcgagatcgagttcctgccagtgtactcaccatcagaggaggaaaaaagaaatcccgctttgtacgcatcaaatgtgcgtcgggtaatggctgaggctctgggcgtctctgtcacagattacacattcgaagactgccagctggccttagccgaggggcaactgaggctaccagccgacacttgtctcttggagtttgctcggcttgtccgtggactaggcctcaagccggaaaagctggagaaggaccttgacagatacagcgaacgagccagaatgaagggcggagagaagatcgggatcgcagagtttgctgcctcactagaagtccccgtgtccgatcttttggaagacatgttttctctttttgatgagagtggctctggcgaggttgaccttcgggagtgcgtggtcgcactgtcggtcgtctgccgccctgcccggaccttggatactatccagctcgctttcaagatgtatggagcacaggaagacggaagtgtcggagagggcgacctttcttgcatcctgaagactgctctgggagtcgccgagctcacagtgactgacctgtttcgggccatcgaccaggaagagaagggtaaaattacctttgctgacttccaccgcttcgccgaaatgtacccagccttcgccgaagagtatctttaccccgatcagactcactttgagtcatgcgccgaaacgtctccagcacctatcccaaatgggttttgcgcagatttttccccagagaactcagacgccgggagaaagccagttagaaagaaacttgactag

SEQ ID NO: 122939 - DNA, 1605 bp, synthetic construct
  misc_feature 1..1605: note = Description of Artificial Sequence: Synthetic coding sequence
  source 1..1605: mol_type = other DNA
atgcgcttgcgggggtgcggcccgcgcgctgcccctgccagcagcgccggcgctagtgatgccagacttctggctcctcctggaaggaatcccttcgtgcatgaacttaggctgtcagctctgcaaaaagcacaggttgcgctaatgactctgaccctgttcccagtcaggctcctggttgcagcagccatgatgctgctggcttggcctctcgctttggtggcctctctggggtctgccgagaaagagcccgagcagccacccgcactgtggcgcaaagtggtcgactttctgctgaaggcaatcatgagaactatgtggttcgcgggcggctttcatcgtgtggctgtaaagggtcgccaggctctgccaacggaggccgccatccttaccttggcaccccattcttcctacttcgatgctatccccgttaccatgacaatgtcctccatcgtgatgaaagccgagtctagggatataccaatctggggaacgctgattcagtacatccgccctgtgtttgtaagtcgctcggatcaggattcaaggaggaagacagtggaagagataaaaagacgagcccaatcaaatgggaaatggccacagatcatgatctttccggaggggacttgtaccaatagaacttgcctgatcacattcaaacctggagcctttattcctggggcaccggtccagcccgttgttcttaggtatcccaataagctcgataccataacatggacatggcagggcccgggcgccttggaaatcttgtggctcaccctctgtcagtttcataatcaggttgaaattgagtttctcccggtgtacagcccgtccgaggaggaaaaacggaatcctgcactttacgccagtaatgttcgaagagtgatggctgaggccttgggagtgagcgtaactgactatacgttcgaggactgtcagctggctctcgcggagggacagctcagactgcccgcggatacttgcttgctcgaattcgcgcggctagtgagagggctgggactaaaacctgagaagctggaaaaggacttggatcggtacagtgaacgcgcgaggatgaagggaggagagaagatcggaatcgccgagtttgctgctagcctggaggtgcctgttagcgatctgctggaagatatgttctctctgttcgacgaatctggatctggcgaggtggacctcagagaatgcgtggtagcactgtcggtggtttgtcgcccggccaggacactggacacgattcagctggcctttaagatgtatggggcccaagaggacggtagtgtcggagagggcgacctcagttgcattttaaagaccgctctcggtgtggctgaacttactgtaactgacctctttagggccattgaccaggaagagaagggaaaaataacttttgcagattttcaccggtttgcagagatgtacccggccttcgcggaggagtacctctatccagatcagacacactttgagtcttgtgctgaaacaagtccagccccgatacccaatggcttttgcgccgacttttctccggaaaattctgacgcagggcgcaagccagttcgaaagaaattggactag

SEQ ID NO: 122940 - DNA, 1464 bp, synthetic construct
  misc_feature 1..1464: note = Description of Artificial Sequence: Synthetic coding sequence
  source 1..1464: mol_type = other DNA
atggcctctagtgccgagggtgatgaaggcactgtggtggctctggcaggagtgctgcagagtgggtttcaggagctatccctgaacaaactggcaacttccctgggggcgagtgaacaagccttgagacttataatttccatctttctgggataccccttcgcactcttctaccgccattatctattctacaaagagacgtacctgatccacctgttccacacattcaccggcctcagcatagcctacttcaacttcggcaatcaactttatcatagtctgttgtgcatcgtgctgcagttccttatcttacgcttgatgggacgcaccattaccgcagtgttgaccactttctgctttcagatggcttatttactcgccggttactattataccgctaccggtaattacgatattaaatggaccatgcctcactgtgtactaaccctaaagctcatcggcctggctgtggactatttcgacggaggaaaagatcaaaatagtctgagtagcgagcagcaaaagtatgccatcagaggggtccctagcctgctcgaggttgccgggttttcctacttctatggcgcctttctggtgggcccacagttctctatgaatcattatatgaagttagtgcaaggcgaactgatcgatattcctggcaagattcccaattcaataattccagccctgaaaaggctctcactcgggttattctatctggtggggtatacactgctgagtccccacataactgaggactacctgcttacagaggactacgacaaccaccccttctggtttcgctgcatgtatatgctgatttggggcaaattcgttctgtataaatatgttacctgctggctggtcaccgaaggcgtgtgtatactcacaggattaggatttaacggatttgaagagaaaggcaaggccaagtgggacgcctgcgccaatatgaaagtgtggctattcgaaaccaatcccagattcaccggaacaatcgcatcattcaatattaatacaaatgcttgggtcgcgaggtacatctttaagcggctcaaatttctggggaataaagagctgtctcagggtctctccttgctcttcttagccctttggcatggcttacactccggttacctggtgtgtttccaaatggagtttctgattgtgattgtcgaaaggcaagccgcccgtctgattcaagagagccccacactgtcgaagcttgccgccataactgtcctgcagcccttttactacctcgtgcagcagactattcattggctgttcatggggtattcgatgactgccttctgcttgttcacatgggataagtggctgaaggtgtacaagtccatttacttcctgggccacatcttctttttgtccctacttttcattcttccgtatatacacaaggcaatggttccaaggaaagagaagctgaagaagatggagtag

SEQ ID NO: 122941 - DNA, 1575 bp, synthetic construct
  misc_feature 1..1575: note = Description of Artificial Sequence: Synthetic coding sequence
  source 1..1575: mol_type = other DNA
atgtcccagggcagtccaggtgattgggccccactggacccgacacccggaccacctgcatctcccaatccttttgttcacgagctccatctttccagactgcagagggtgaaattttgcctccttggcgcactccttgccccaatccgggtgcttctagcgttcatcgtcctctttctgctgtggccttttgcctggttgcaagtggccggcctctcagaggagcaactgcaggagcccatcactggatggagaaaaacagtgtgtcacaacggcgtgctggggctatctaggctgctgttctttttgttaggcttcctcagaattagggtaagaggacaacgggcttcccggcttcaggcccctgtactggtcgccgcaccccactccacattcttcgatccaattgtcctgctcccctgtgatctccccaaagtggtcagcagagccgagaacctttcggtcccagtgatcggggcattgctgaggtttaatcaggcaattctggtgagccggcacgaccctgcgtcgcggcggcgcgtggtggaggaggtccgtcggagggctacctcaggcggcaaatggcctcaggttctcttctttcccgagggaacatgctctaataaaaaggctcttctgaaatttaagcccggagcctttattgcaggagtgccagtgcaaccagttcttattcggtatcccaattccctcgacaccacatcctgggcttggaggggccccggagtgctcaaggtcctttggcttacagctagtcaaccatgttcaatagtggatgtggagtttctcccagtttatcacccaagccccgaggaatcacgggatccgaccttgtatgccaataacgtgcagagggtcatggctcaggccttgggcataccggcgacagaatgcgagttcgtcggtagcctgcctgtgatcgtggtggggagactcaaagttgctctggaacctcagttatgggagctgggcaaggttcttcgcaaggccggactctctgctggctacgtggatgccggggcggaaccaggcagatcacggatgatttcgcaagaggagttcgcacggcaactgcaactgagcgatccccagacagtagccggggccttcgggtactttcagcaggacaccaaggggctcgtggactttcgagatgtagctcttgcactcgccgctctagatggggggcgctcactcgaggagctgacacgcctcgccttcgaactatttgcagaggaacaggcagaagggccaaaccggctcctctacaaagacggtttttccactatcctccacctcctattaggatcacctcacccagcagccactgccctacatgccgaactgtgccaggccggaagcagccagggcctctcactttgtcagtttcagaattttagcctgcacgatcctctttacggcaaactttttagtacatatttgaggccccctcacacctctagggggacaagtcagacacctaatgccagcagcccaggaaatccaactgccctggcgaacggtaccgttcaggctcccaaacagaaaggcgactag

SEQ ID NO: 122942 - DNA, 693 bp, synthetic construct
  misc_feature 1..693: note = Description of Artificial Sequence: Synthetic coding sequence
  source 1..693: mol_type = other DNA
atgtgcggcaataatatgtcaacgcccctccccgccattgtgccagccgcaagaaaggctactgccgctgttattttcttgcatggtctgggggatacaggccacggatgggccgaagctttcgccggcatacggtcctcacatattaaatatatctgcccccatgccccagtgcgccctgtaacactgaacatgaacgtggctatgccgagttggttcgacattattgggttatctccagatagccaggaggacgaatctggtatcaaacaggctgctgaaaatatcaaagccctgatcgatcaggaagtgaagaacggaatcccttctaaccggattattttggggggcttttcccaggggggcgcgctgagtctgtataccgcactgaccacccaacaaaagctggctggcgtgaccgctctatcttgctggctgccactccgggccagtttcccccaaggcccgattggcggtgctaatagagacatcagcattctccagtgccacggcgactgcgaccctttagttccgctgatgtttggtagtctgaccgtcgagaaactgaagacactcgtgaatcccgcgaatgtaacttttaaaacttacgaaggtatgatgcactcttcttgtcagcaggagatgatggatgttaagcagttcatagataaactgttgcctccaattgactag

SEQ ID NO: 122943 - DNA, 645 bp, synthetic construct
  misc_feature 1..645: note = Description of Artificial Sequence: Synthetic coding sequence
  source 1..645: mol_type = other DNA
atgtgtggaaacaacatgtccactccacttccagcaattgtacctgcggctcggaaagccactgccgccgtcatctttttgcatggactaggggacacaggccatggatgggccgaggcattcgccggaattagatcatctcacattaagtacatctgtcctcacgcctttgatataatcgggctctctcctgattctcaggaagacgagagcggcattaagcaggctgcggagaatattaaagctttgattgatcaagaggtgaaaaacggcatcccttctaaccggatcatcttgggcggattctctcaagggggtgccctgagcctgtacaccgcactgacaacacagcaaaaactcgcgggcgtcaccgcactgagctgctggctgccactccgggcgtcctttccacagggaccaattggcggggccaatagggacatctcaatcttgcagtgccacggcgactgcgacccactggttccactcatgttcggatctctcactgtggagaaattaaagactttggtcaatcctgcaaatgtgaccttcaagacctacgagggcatgatgcatagcagctgtcaacaggaaatgatggatgtgaagcagtttattgacaagcttctgccgcccatagactag

SEQ ID NO: 122944 - DNA, 1092 bp, synthetic construct
  misc_feature 1..1092: note = Description of Artificial Sequence: Synthetic coding sequence
  source 1..1092: mol_type = other DNA
atggaattacatgagcggcctgatgaacggcggaaagctcggacaagcactcaggggcggcttggagattggaggcgcgtgcacgctgatgggttcactcatagggtgtggtcatcatcgtcctggctggagcctgcaatgacctcccggactagagtgacctggcctagtccgcccagacctctacccgtccccgctgccgcggccgtcgcgtttggggccaagggcacagaccccgccgaagcccgcagcagccgtggaatcgaagaggccggcccgagagcccatgggagagccggtcgggaaccagaaagacgccgttcgagacaacagagaaggggaggtctgcaagctaggaggagcactcttctcaagacttgcgcgcgtgctagagccaccgctcctggcgccatgaaaatggtagctccttggacccgtttttacagcaacagctgctgcctatgctgtcatgtgagaactggaacaattctcctgggcgtctggtacctaatcataaatgctgtggtcttattaatcctgctgtcagccttggctgatcctgatcaatataatttcagctccagtgagctgggaggcgactttgaattcatggatgacgcaaatatgtgcatcgcgatcgcaatcagtctgttgatgatcctgatctgtgctatggccacttacggcgcctacaagcagagagccgcttggatcattcctttcttctgttaccagatattcgattttgcccttaacatgctggtcgcgataaccgtgttaatatacccaaactcaattcaggagtatattagacaactgccccccaacttcccctaccgagatgacgtgatgtcagtgaatccgacttgcctggtgcttatcatccttttatttatcagtataattctgacctttaaagggtaccttatatcctgcgtttggaattgctaccgttatatcaacggtcgcaactccagcgatgtgctggtctatgttacctccaatgacaccaccgtgctgcttcccccttatgacgacgcgaccgtaaatggagcggcaaaggaaccccctcccccatacgtgtcggcttag

SEQ ID NO: 122945 - DNA, 954 bp, synthetic construct
  misc_feature 1..954: note = Description of Artificial Sequence: Synthetic coding sequence
  source 1..954: mol_type = other DNA
atgactagcagaactcgcgtgacctggcctagtcccccgcggcctttacccgtccccgctgcggccgctgttgccttcggcgcgaagggcacagatcccgctgaggcaaggtcctcacgtggcattgaggaggccggacctcgggcccacggccgggccggccgtgagcccgagcggaggagaagtaggcagcaacggcggggtggattacaggctaggcgctctaccctgttgaagacgtgcgcacgagctcgcgccacggccccaggtgctatgaaaatggtcgcaccatggacacgcttctatagcaactcctgttgtctgtgctgtcacgtgcggactggcacaattcttctgggcgtgtggtatctgataatcaacgccgtagtcctgttgatactcctctcagccctcgctgacccggaccaatataactttagctcctcggagttgggaggcgattttgagttcatggacgatgccaacatgtgcattgctattgccatctctctccttatgatcctgatttgcgccatggccacttacggcgcatacaagcaacgtgccgcctggattatccctttcttctgttatcagattttcgattttgctctgaacatgctcgtggccatcaccgtcctgatttatcctaattccattcaggagtacatccggcagttacctccaaatttcccttatcgggatgatgtcatgagcgtgaatcccacatgcctggtgctgatcatcctcctctttattagcatcatcttaacctttaagggctatcttatctcctgtgtatggaactgttatagatatatcaacgggcgaaactctagtgacgtcctggtatacgtcacctcaaacgacaccacagtgttgctgcctccttacgacgatgctacagtcaatggagccgccaaggagcccccgcctccatacgtaagtgcttag

SEQ ID NO: 122946 - DNA, 681 bp, synthetic construct
  misc_feature 1..681: note = Description of Artificial Sequence: Synthetic coding sequence
  source 1..681: mol_type = other DNA
atgaaaatggtggctccttggactagattttattcaaattcatgttgcttgtgttgccacgtgcgtaccggcactatactgctgggagtgtggtacctgattatcaacgcggtggttctgctgatcctgctgagcgccttggctgatccggatcagtataactttagttcaagtgaactgggaggagatttcgagttcatggacgacgcaaacatgtgcatcgctatagccatttccttgctaatgatcctgatctgcgccatggcgacttatggtgcatacaaacagagagccgcatggataatcccatttttctgttatcaaatatttgatttcgcgctgaacatgctagttgccattacagtgttgatctaccccaattcaatccaagagtacattagacagctgccacccaatttcccataccgcgatgatgttatgtcagtgaaccccacctgtctggtacttatcattctgctcttcatctcaatcattctgacatttaagggctacttgatctcctgcgtttggaactgctaccgttacatcaacggtcgaaatagctccgacgtcctggtgtacgtcactagcaacgacaccaccgttctgcttccaccttatgacgatgctacggtgaatggagcagccaaggagcctccaccaccctacgtaagcgcctag

SEQ ID NO: 122947 - DNA, 789 bp, synthetic construct
  misc_feature 1..789: note = Description of Artificial Sequence: Synthetic coding sequence
  source 1..789: mol_type = other DNA
atggacccccggcttagcactgtgaggcagacatgctgttgctttaatgtgagaatcgccaccactgctctcgccatataccatgtcataatgtctgtgctattatttatcgagcatagcgtggaggtggcgcacgggaaggcatcttgcaaactctcacagatgggctatctgcgtattgccgacttgatctcctcatttctcctcattacaatgcttttcatcattagcctgagccttttgatcggggttgtgaaaaaccgcgaaaagtacctgttaccttttctgtcactgcaaattatggactaccttttgtgcttacttactctgctggggagttatatcgagctgcccgcctacctgaaactggcaagtcgtagccgggcctctagctccaagtttccactgatgacccttcagcttcttgatttttgcctgagcatcctgacactgtgtagcagctacatggaggttcctacctacttgaatttcaaaagtatgaaccatatgaattacttgccatcccaggaggatatgccgcataatcagttcattaaaatgatgattattttcagcattgccttcatcacagtcttgatttttaaggtttacatgtttaagtgtgtgtggcggtgttatagactgattaaatgcatgaattcagtcgaggaaaagaggaattccaagatgctccagaaggtcgtcctgccttcatacgaagaggccttaagccttccatccaagactcccgagggtggcccagcgccgcccccttacagcgaagtctag

SEQ ID NO: 122948 - DNA, 873 bp, synthetic construct
  misc_feature 1..873: note = Description of Artificial Sequence: Synthetic coding sequence
  source 1..873: mol_type = other DNA
atggacccccgcctgtccactgtcagacagacatgttgttgctttaacgtgcgcattgccacaacagccctcgcaatttaccacgtgatcatgtccgtgttgctgtttatcgagcatagcgtggaggtagcccacggtaaggcttcttgcaaactgtcacagatggggtaccttcgcatcgcggatctgataagcagtttcctccttatcacgatgctttttatcatctctctgtctctcctgattggggttgtcaaaaatcgagaaaagtacctgttgccctttttgtcactccagattatggactatctgctgtgtctcttgacgttgctgggctcctatatcgagctgccagcttatctcaaactggcttctcggtctagggcatcttctagtaaattcccgctcatgaccttacagcttctcgacttttgtctgagcatcctgactctttgttcatcttatatggaggtgccaacatatttgaacttcaagagcatgaatcatatgaattatcttccatctcaggaggacatgccgcataaccagtttatcaaaatgatgatcattttctccatagccttcatcaccgtgctgatcttcaaggtgtacatgttcaagtgcgtgtggcgatgttaccgtctcatcaagtgcatgaattcagttgaggagaaacggaattctaagatgctgcagaaagtcgtactgcctagctacgaggaagctttatctccggcgggacccgtttcctgtagccagctcgggcaaaggttccgtttatcccactccagcggactttcaatcatccagcccaacaacgcatggtttattagtatctcaagtgatacttgcctcgacgattggcctttctag

SEQ ID NO: 122949 - DNA, 11406 bp, synthetic construct
  misc_feature 1..11406: note = Description of Artificial Sequence: Synthetic coding sequence
  source 1..11406: mol_type = other DNA
atgtcaactgacagcaactcactagctagggagtttctcaccgatgtgaaccggctttgcaatgccgtggtgcagagggttgaggcccgagaggaggaggaggaagaaacccatatggccacccttggccaatacctagttcacgggcggggttttttgcttttgaccaagttaaactccattattgatcaggcacttacgtgtagagaggagttacttaccctgctgctgtccctcttgccactggtttggaaaatccccgttcaggaagagaaagctaccgactttaacctccctctctcagccgacataattttgacaaaagagaagaattcaagtagtcagagatcaacacaggagaaactccaccttgagggctccgctctgtcaagtcaggtttcagccaaggtgaatgtgtttcggaagtccagaaggcagcggaaaataacacatcgctactcagttcgagacgcccggaagactcagctgtccacttcagatagtgaggccaactcagacgaaaagggtatagctatgaataaacatagacgacctcacctactccaccattttttgacctcctttcccaagcaggaccaccccaaggccaagctcgatcggcttgctacgaaggaacagacacctcctgacgccatggccctggaaaattcgcgcgagattatcccccgccagggcagcaatactgatattctctccgaacccgcagccctgagcgtgatcagtaacatgaacaactcccccttcgacctgtgccacgtgctgttatccctgctggaaaaagtttgtaagtttgatgtgacattgaatcacaacagcccactggcggctagtgtggtccctacgctgacagaatttttggcaggattcggggactgttgttccctgtccgataacctcgaaagtcgtgtcgtgagtgccggctggactgaagaaccagtcgcactgattcagagaatgctctttcgcaccgtgcttcacctgctgtcagtcgacgtatcaaccgccgaaatgatgcccgagaacctgcgaaaaaatctgactgaactcctccgagctgccctgaaaattagaatctgcctagaaaaacaaccggacccctttgctccacgtcagaagaaaactctacaagaagtccaggaggactttgtcttttctaagtataggcaccgtgccctcctgttacccgagctgttggaaggagtgctgcagatcttaatttgttgcttgcagagcgccgcgagcaaccccttctacttctcccaggcgatggacttggtgcaagaattcattcagcaccacggctttaatctgtttgagaccgctgttctccagatggagtggctggttctgcgggatggagtgcccccagaagcttccgaacacctcaaggctctgatcaattcggtcatgaaaatcatgtctacagtaaaaaaggttaaaagcgaacagctgcatcatagcatgtgcaccaggaaaagacaccgaaggtgtgagtattcccactttatgcatcaccaccgagatctctccggactgttggtctctgccttcaaaaatcaggtgagtaaaaatccatttgaggaaacagccgacggagatgtatactaccccgagcgatgctgctgcattgccgtctgtgcccatcaatgtctgaggctactgcagcaggcaagcctatcttcaacctgcgtgcagattctctctggtgtgcataatataggtatctgttgctgtatggaccccaagtccgtaatcataccccttctacacgcttttaaactccccgccctgaagaacttccagcagcatatactgaatatcctgaataaactgattctggaccagctgggaggtgcagagataagcccaaaaatcaagaaggcggcgtgcaacatttgtaccgtggacagcgatcagcttgcacagctcgaggagactctgcagggcaacctatgcgacgccgaactcagtagttctctctcctctcctagttacaggtttcagggtattttgcctagttccgggtcagaagatctgctgtggaaatgggatgcactcaaagcttaccagaacttcgtcttcgaggaggatcgcctgcattcaattcagatagcaaaccatatctgtaatttaatccagaagggcaatatcgttgttcagtggaagctgtataactatatattcaacccggtgctccagaggggcgtggaattagcacaccactgtcaacacctctccgtgacctccgcccagtcacatgtgtgcagtcatcacaaccagtgtctgccacaggatgtgctgcaaatttacgtgaagaccctccccatacttctcaagagtagggtcattcgagacctcttcttaagttgtaatggcgtaagtcagatcattgaactgaactgccttaatggcattcgcagtcattccctgaaggcatttgagactctcattataagcttaggggaacagcagaaggatgcctcagtgcccgacatagatggcatcgacatcgaacaaaaagagttgtcaagcgtgcacgtcgggacaagcttccaccaccagcaagcctacagcgactctccacagagcctttctaagttttacgccggtttgaaagaagcctacccgaaaaggcgtaaaaccgttaatcaggacgtgcacatcaacaccattaacttattcctgtgcgtggcctttctgtgtgtcagtaaggaggccgaatcagaccgagagagcgccaatgactccgaagataccagcggatacgattctactgccagtgagcccctctctcatatgttgccatgcatttctttagaatcactggtcctgcctagcccagagcacatgcaccaggccgccgacatttggtccatgtgccgctggatttacatgttgtcttcagtctttcagaagcaattttaccgcctgggcgggttcagggtgtgccacaaattgattttcatgatcatccagaaactcttcaggagccacaaagaggagcagggaaagaaggagggtgacacctcagtgaacgagaatcaggacctgaatagaatctcccagccaaagaggacaatgaaagaggatctgctcagcctggcaatcaaatctgacccgatcccttcagaactcggatccttaaaaaagtcagcagattcactggggaagctggaactgcagcacatttcctccatcaatgttgaggaggtgagtgccactgaagcagcccctgaggaggctaaactcttcacgtctcaggaatcagagacctcactgcagtccatccgattgctcgaggccttgttagcaatctgtctgcacggcgcgcgtacgagtcaacagaagatggaacttgagctgcccaaccagaatctcagtgtagagtcgatactctttgaaatgagggaccacctgtcccaatctaaggttatcgaaacacagctagcgaagcccctgttcgatgccctgctccgcgtcgccctaggcaattacagcgctgactttgagcacaacgatgcgatgactgagaaatcccaccagtccgcagaggagctgagcagccaacccggcgatttcagcgaggaggctgaggattcccagtgttgttcttttaaattgttagtggaggaagaaggatatgaagcagattccgaaagtaatcctgaggacggggagacccaggacgacggcgtggacctcaaaagcgaaactgaaggattctctgctagctcctctcctaatgacctgctagagaatctcacccagggagaaatcatataccccgagatctgtatgcttgagcttaacctgctgagcgcgagtaaagcaaagcttgacgtgcttgctcatgtatttgaatcatttctcaaaataatcagacagaaagaaaagaacgtgtttttgcttatgcaacagggaaccgtaaaaaatcttcttggtggatttctgagcatcctcacgcaggatgattccgacttccaagcttgtcagagggttctcgtggaccttctcgtgtctttgatgtccagtagaacatgtagcgaagaactgactctacttctgcgcatctttctagagaaatccccctgcaccaagatactgctgctgggcattctgaagatcatcgaatctgacacaactatgtcccccagccagtacctgaccttcccactgctgcatgcgccaaacctgagtaatggcgtttccagccagaaatatcctggcattctgaactccaaagccatgggcctgctacggcgggctagggtgtctaggtctaaaaaggaggcagacagagagtccttccctcatcggctgttatcctcatggcacattgcccctgtgcaccttccacttcttggacagaattgctggcctcacctgtcagaagggtttagcgtgtctctgtggtttaatgtcgaatgcatccacgaagccgaaagtactacagaaaaagggaagaagataaaaaagcgcaataaaagcctgattctccccgattcatcgtttgacggtacggaatccgacaggcctgaaggagccgagtacataaaccccggagaaagattaatagaagaaggctgcatacacatcatctccctgggcagcaaggcactgatgattcaggtgtgggccgacccccataacgccactctcatattccgagtctgcatggactctaacgacgatatgaaagcagtgcttctggctcaggtggagtcacaggaaaatatatttctgccttcaaagtggcagcatttagtgctcacttacttacaacagcctcagggaaaaagacggattcacggtaagatttccatctgggtctcgggccagaggaagcctgatgtgactttggacttcatgctgcccagaaaaacgtcattgtctagcgatagcaataaaacgttttgtatgatcgggcattgcctcagttcgcaggaggagtttttacagctcgcaggcaaatgggacttgggaaacctgctcctgtttaacggagcgaaggtgggcagccaagaggccttctacctgtacgcctgtggtccaaaccacactagtgtgatgccctgtaagtatgggaagcccgtcaacgattacagtaagtacatcaacaaagaaatactccgctgtgaacagatcagggagctctttatgacaaaaaaggatgtcgacattggtcttctgattgagtccctttcggttgtctacaccacctactgtcccgctcaatataccatctacgaaccagttattcgattaaagggccagatgaaaacacaacttagccagcgtcccttctcttcgaaggaggtgcagtctatcctgcttgaacctcatcacctgaaaaaccttcagccaaccgaatacaaaacaatccagggaatcttacacgagattggcggaaccggcatcttcgttttcctcttcgctcgagtcgtggagctgagctcatgtgaagaaacccaggcgctggctctcagagtgatcctgtctttaattaagtacaaccagcaaagggtacacgaactagagaactgcaatggactatcgatgattcatcaagtgctcataaagcagaagtgcatcgtagggttctacatattaaaaacgctcctcgaaggctgctgcggcgaagatatcatttacatgaatgagaacggagaatttaagctggacgtagacagtaacgccatcatccaggatgtcaaactgctggaggagctgcttctcgactggaagatatggtctaaagctgagcagggtgtgtgggaaactctccttgcggctctggaagtgttgatccgggccgaccaccaccaacaaatgtttaatatcaagcagttgctgaaggctcaagtggtgcatcactttctgctcacctgccaagtgttgcaggagtacaaggaaggtcagcttacgcctatgcctagggaggtgtgccgctcctttgtcaaaatcattgcggaagtccttggatctccgccagatctggaattgctgacgataatcttcaactttctgctggctgtgcaccctcctacaaatacctatgtttgccacaacccaacgaacttctatttttccttgcatatagatggaaaaatatttcaggaaaaggtgcgtagtatcatgtatttgcgacattcaagttcgggcgggaggtcactcatgagtcccggtttcatggtgataagcccctctggcttcacagcctcgccttatgaaggcgagaacagctccaatattattccccagcagatggctgcccatatgttacgcagcaggtccctccccgcctttccgactagcagcctgttgacccagtcccagaaattgacgggatccttgggctgcagcatcgaccgactgcaaaacattgctgatacctacgtggcgacccagagtaagaaacagaacagtctcggcagcagtgataccttaaaaaaaggaaaggaagacgctttcattagttcttgcgagagcgccaagacggtttgcgaaatggaggctgtcctatcagcacaggtgagcgtcagtgatgtgccgaaaggcgtgctaggcttcccagttgtgaaagccgaccacaagcaacttggagctgaaccacgctccgaggacgactcccccggcgatgagtcctgtcctcgaaggcccgactacctgaaaggactcgcgtcctttcagaggagccactccaccatagctagtctgggcctcgccttcccctctcagaacggaagcgccgcggtgggtaggtggccgtcgctagtggaccgcaacaccgatgattgggaaaacttcgcatactccctgggatatgaacccaattacaaccgcaccgcttcagcacacagtgtcactgaggactgcctcgtcccaatctgctgtggactttacgagctgctatcaggggtgttactaatcctccccgatgttctgttggaggacgtcatggacaaactgatccaggcagataccttactggtcctcgtaaaccacccctcacccgcgatccagcagggtgtcattaagctgctggacgcctactttgctagggcttcaaaggagcagaaagacaagttcttgaaaaatagagggttttctctgctggccaaccaactttatctccatcggggcactcaggaattattggagtgcttcatcgaaatgttttttgggcgacatataggcctcgacgaagaattcgacctcgaggacgtcaggaatatgggactcttccagaagtggagcgtcattccaattttgggcttgatagaaaccagcttatatgataacattctgttacacaatgcacttctgctgctgctgcagatactgaacagctgcagtaaggtggctgatatgttgttagacaatgggctcctctatgtcctgtgcaacacagtggcagcattaaacggcctggaaaagaacatccccatgagtgagtataagctactggcttgcgacatccagcagctttttattgctgtgacgattcatgcatgctcatccagcggcagccaatacttccgcgttatcgaagatctaatcgtgatgctgggttacctgcagaattctaagaacaagaggacacagaacatggctgtggcgcttcaactgagagttctacaagctgcaatggagttcatacgcacaactgccaatcacgattcggagaacttaacagatagtttgcagagtccatcggctccgcatcatgccgttgtgcaaaagcggaaatccattgcgggcccccgcaaatttcctctcgcacagactgagtccctcctcatgaaaatgcgctctgttgccaatgacgaactgcatgtaatgatgcagaggcgcatgtcccaggagaatccctctcaggccacagagactgagctcgcccagcgtctgcagaggttgacagtgctcgccgtgaaccgtatcatttaccaagaattcaactcggacatcattgatatactgcggactccagagaatgtaacccaaagtaaaacatctgtgttccaaacagaaatctccgaggagaatattcaccacgaacaaagctctgtatttaacccctttcagaaagagatcttcacttacctcgtggagggatttaaggtgtctattggctcctcaaaggctagcggaagcaagcagcaatggaccaagattctctggtcatgtaaagaaacattccgcatgcaactgggaagactcctagttcacattctgtcgcctgcccatgcggcacaggagaggaaacagatcttcgagatcgttcatgaaccaaatcaccaggagatactaagggactgtctgagtcccagcctgcagcatggggccaagctggtgctgtacttatccgagcttatccacaatcaccagggtgagctgaccgaggaggagcttggcaccgcggaactccttatgaacgctctgaaactgtgcgggcacaagtgtatcccaccatctgcatcgacaaaggcggacctgattaagatgattaaggaagagcagaaaaagtacgaaactgaagaaggtgtaaataaggcggcgtggcaaaaaaccgttaataacaaccagcagagtctttttcaaaggttagatagtaaatctaaggacatttccaagatcgcagccgatattacccaggccgtttcactcagccaaggcaacgagcgtaagaaagtgatccagcatatacggggtatgtacaaagtggatctcagcgcctcgcggcactggcaggaactcatccaacagctgactcacgacagggcagtttggtacgatcccatatattatcccacctcctggcaactggatccgaccgaaggcccgaatagagagcgccggaggctacagcggtgctacctgaccatccccaacaaatacctgctcagggacagacagaaatctgaagatgtggtaaagccacctctgtcttatctgtttgaggacaagacgcactcaagcttctcatccaccgtcaaagataaggccgcttctgaatcaatcagggttaacagaaggtgtatcagtgtggcaccatcaagggagacagccggggaacttctacttgggaaatgcgggatgtacttcgttgaggacaatgcttctgacactgttgaatcctccagcctgcagggtgagttggaacctgcttctttcagctggacttacgaggagatcaaggaggtgcataaacggtggtggcagctgagagacaacgcagttgagatttttttgactaacgggcgcaccctgttgcttgcttttgacaatacaaaggtacgggacgatgtgtatcacaatatcctgacaaataacctgccaaatttgctcgagtatgggaacattaccgcactgacgaacctgtggtatacaggacagatcactaacttcgaatatcttacgcaccttaacaagcacgctgggagaagctttaacgatctcatgcagtacccagtctttcccttcatactggctgactacgtctcagagacgctggatctgaacgatctgttaatttataggaatctcagtaagcctattgccgtccagtacaaggagaaagaagatcggtacgtcgacacatataagtatctggaggaagagtaccggaaaggggcacgcgaggacgaccctatgccaccggtgcaaccctaccactacggaagccattactcaaatagcgggactgtgcttcactttctggtccggatgccacctttcactaaaatgttcttggcataccaggatcagtctttcgacattcccgaccgcacatttcacagcacgaatacgacatggagactgagctctttcgaaagcatgacagacgtaaaggagctcataccagagtttttctacctgcctgagtttctcgtgaatcgggaaggattcgactttggtgtgagacagaatggggaacgcgtgaatcatgtaaacctccccccatgggcaagaaacgaccctagactcttcatattgatacaccgacaggccctggagtccgactacgtgtctcaaaatatctgtcagtggattgatttagtcttcggctataagcagaaaggaaaagcctccgtgcaggctatcaacgtattccacccagccacatacttcgggatggatgtgagtgcagttgaggacccagtccaacgccgcgcgcttgaaaccatgatcaagacttatggacagaccccccggcaattgttccatatggctcacgtaagcaggcccggcgcaaagctcaatattgagggggagcttcctgccgctgtaggcctcttggttcagttcgcctttcgggagacaagagaacaagtcaaggaaatcacgtatccgtcgccacttagctggatcaagggccttaagtggggagaatacgtggggagtccatcggccccggtcccggttgtttgctttagccagccacatggagaacgcttcgggagcctccaggctctgccgacacgagctatctgcggtctgtcccgtaacttttgtctgctcatgacttattctaaggaacaaggcgtgcgcagcatgaatagtaccgatatacaatggagtgcaattctgtcttggggctatgcggataatatcttacgattgaaaagcaaacagtccgagcctcctgtgaacttcatccagtcttctcaacagtaccaagtgacttcctgcgcatgggtgcccgactcctgccaattgttcactgggtctaagtgcggagtgattacggcttatacgaacaggttcaccagtagtaccccctcggaaattgaaatggagactcagatccacctgtatggtcacacagaggagatcacttcgctattcgtgtgcaagccatattctattctgatctccgtctcgcgagacgggacttgtattatttgggatttaaaccgcctgtgctatgttcaatccctcgctggccacaagtctccagtcacggctgttagcgccagcgagacttccggagatattgcgaccgtctgcgactctgcgggtggaggatctgacctacgcttgtggactgtgaacggggacttggtaggtcacgtgcattgccgcgagatcatttgtagcgtggccttttctaatcaacccgaaggcgtgtccattaatgtgatcgcaggcgggctagagaatggtatagtcaggctgtggtctacgtgggaccttaaacctgtgcgggaaataaccttcccaaaatctaacaagccaatcatctccctgaccttcagctgcgatgggcaccatctgtatacagctaacagtgacggaaccgtgattgcctggtgtcgaaaggaccagcagagactgaaacaacctatgttctacagcttccttagctcatacgccgccggatag

SEQ ID NO: 122950 - DNA, 11406 bp, synthetic construct
  misc_feature 1..11406: note = Description of Artificial Sequence: Synthetic coding sequence
  source 1..11406: mol_type = other DNA
atgagtactgactctaattctctggcccgtgaatttttaacagatgtaaatagactctgtaacgcagtggtccagcgagtggaggctagagaggaagaggaggaggagacacacatggctaccctaggtcagtacctcgttcacgggcgcggctttctgctgctgactaagctcaatagtattatcgaccaggctttgacatgtcgggaggagttgctgacccttctgctgtcactgctgccgctcgtgtggaaaatcccagtccaggaagagaaggccaccgactttaatcttcccctgagcgccgacattatcttgactaaagagaaaaatagtagttcacagagatccacgcaagagaagctgcatttagaagggtccgcactgagctctcaagtatctgccaaagtgaacgtgttcaggaagtccaggaggcagcggaagattacacataggtattctgtccgcgatgctcggaaaacacaactctccacaagcgactccgaggcaaactccgacgagaaggggatcgccatgaacaagcacaggagaccgcacctcttacaccactttcttacttcgtttccaaagcaggatcaccctaaggccaaattggacagactcgccacaaaagaacaaaccccacccgacgctatggccctagagaatagtagagagattatccccagacagggctctaataccgacattcttagtgagccagcagcactttccgtcatctcaaatatgaacaattctccattcgatctttgccacgtgcttttgtccttactcgagaaggtgtgtaagttcgacgtgactctgaatcataacagccccctcgctgcttcagtggtgcctaccctaaccgagtttctcgctggttttggtgactgttgttccctgagcgataacctggagtctagggtggtttccgcaggctggactgaggaacccgttgctcttatccagcgtatgcttttcaggacagtgctccacttgctgtctgtagatgtgtcaacggccgaaatgatgccagagaatctgcgtaaaaatttaaccgaactactccgcgctgctttgaaaatccgcatttgcttggagaagcaacctgatccctttgctcccaggcaaaagaaaactcttcaggaagtccaggaagacttcgtattctccaagtaccgccatagggcattgctgctcccagagctcctggagggtgtgctccaaatactgatctgttgtctgcagtctgccgcttccaaccccttctatttctctcaggctatggatttggtacaggaattcatacagcaccatggattcaacctgttcgaaaccgctgtcctgcaaatggagtggctcgtgcttcgcgacggtgtgccccctgaggcatccgagcatctgaaagccctgattaacagcgtcatgaagatcatgtccactgtgaagaaagtcaaatctgaacagcttcatcacagtatgtgcacgcgcaagcggcatcgtagatgtgagtacagccattttatgcatcaccatcgggacctctctggcttactggtgtccgcatttaaaaatcaggtctctaaaaacccctttgaggagactgcggatggagacgtctactatcccgagcgctgttgctgtatagctgtttgtgctcaccagtgcctgaggctgctccagcaagcgagcctgagctcaacatgtgtgcaaatcctgagcggggtgcataatatcggcatatgctgctgcatggatcctaagtctgtgatcatacccctgctccacgctttcaaacttcccgccctgaagaattttcaacagcatattctgaatatactgaacaagcttatcctagatcagttgggaggagcagaaatctccccaaagataaagaaggctgcctgtaacatatgtacagtggattcagaccagttggcccagcttgaggagacactccaggggaacctttgcgacgctgaactgagctcttctctgtcttccccatcttatagatttcagggtatcctcccgtctagcggcagcgaggatttgttgtggaaatgggacgccctgaaagcctatcaaaatttcgtgtttgaagaggaccggcttcacagcattcagatcgcgaaccatatctgtaacctcattcaaaaaggaaacatcgtggtgcaatggaagctctacaattatatttttaatcctgttctgcagcggggcgtggagctggctcaccactgccaacatctgagcgtaacgtccgcccagagtcacgtgtgctcccaccataaccagtgtctaccacaggacgttcttcaaatctatgttaaaacattgcccatcttactgaaatcacgcgtgattagggacctgttcctatcatgcaatggtgtgtctcagatcatcgagctcaattgcttgaacggcatcagatcacattctctgaaggcgtttgagaccctcatcattagcttaggcgaacagcagaaggacgccagtgtcccagacatcgatggcatcgacattgaacagaaagaactgtcttctgtgcacgtcgggacttcgtttcaccatcaacaggcttactccgattcccctcagagccttagcaaattctacgcagggttaaaagaggcttatcctaagaggagaaagaccgtgaaccaggacgttcatatcaacaccattaacctgtttctttgcgtggcatttctgtgcgtcagtaaggaggccgaaagtgaccgtgaaagcgctaatgatagtgaggatacctccgggtacgattctacagcatccgagcccctcagccacatgctgccatgcattagcctagagtcactagtccttccttctccagaacatatgcaccaggcagccgatatttggtcgatgtgtcggtggatttatatgctgtccagcgtgttccaaaagcaattttaccggctgggaggctttcgggtttgccacaaactcatattcatgattatccaaaaattgttcagatcccacaaggaagaacagggcaaaaaggaaggagacacttctgtgaacgagaaccaggacctgaatagaatctcgcagcccaaacggacaatgaaggaggacttactgtctctcgctatcaagtcagaccctatcccctccgagttgggatcattgaagaagagtgcagacagccttggcaaactggagctccagcatatctcgtccattaatgtggaagaagtcagcgcgaccgaagctgcccctgaagaagccaaactgttcacaagccaggagagtgaaacctccctccagagcattcgcttgcttgaagcgctgctggccatttgccttcacggcgctaggacgtctcagcagaaaatggaattggagctgcccaatcagaacctgagcgtggagagtatcctttttgagatgagagaccacttatcacagagcaaggtgatcgaaactcagctggctaaacccctattcgacgcccttctacgagtcgccttggggaactattccgctgattttgaacacaacgatgccatgaccgaaaagtcccaccagagtgctgaggagctcagttcacagccaggtgacttctccgaggaggctgaggatagccaatgttgctcctttaaattgctcgtcgaagaggagggctatgaggccgattctgaaagcaatccagaggacggtgagacccaagacgacggggtggatctgaagtcagaaaccgagggctttagcgcttctagcagtcccaacgacctgctggaaaatctgacccagggcgaaataatttaccctgagatttgtatgctggaactgaatctgttgagcgccagcaaggccaagttggatgtgctggctcacgtcttcgaaagctttttgaaaataataagacagaaagagaaaaacgtcttcctgctcatgcagcagggcactgttaagaatctgttaggagggttcctgagcatcttgacacaagacgatagtgattttcaagcttgtcagcgggtgctggtagacctgcttgtgtcattgatgagttcccgaacctgcagcgaggagttgaccttactgttgcgaatcttcttagaaaagagcccgtgtacaaaaatcctgttattaggcatactgaagattatagagagcgataccacgatgtccccaagtcaatacctgacttttcccctcctgcatgccccaaacctgtctaacggcgtgtcctctcaaaagtatcccggaattttaaattctaaggccatggggctgctacgcagggccagggtgtcacgttctaaaaaagaagcggatagagagtccttccctcaccgcctacttagcagctggcacatcgcacctgtacatttaccactgctgggccagaattgttggccccatctttccgaggggttttccgtctccctttggtttaacgttgagtgcatacacgaggctgaaagcaccacagagaaagggaagaaaatcaagaaacgtaataagtccctgatactgcctgatagctcatttgatgggacggaatctgatcgcccggagggggccgaatatatcaatcccggagagcgtttgatcgaggagggatgcatccacattatctccctcggatctaaagccctcatgatccaggtgtgggcggatccccacaacgctactctgattttccgtgtgtgcatggattcaaatgatgatatgaaggctgtgctactggcccaggttgaaagtcaggagaacatcttcttaccgtccaaatggcagcatctggtgctcacctatctccagcagccccagggaaagcggcgaattcacggcaaaattagcatctgggtttcgggtcagcgaaagcctgatgtgaccctggatttcatgctgcccagaaagactagcctgtcctctgacagcaataaaaccttctgcatgattggccactgcctgtcgtctcaggaggaatttctgcagctggcgggcaagtgggacctcggaaacctgcttctctttaatggagctaaggttggcagccaggaagccttttatctttatgcctgcggcccgaatcatacttcagtgatgccgtgcaagtatgggaaacctgtcaacgattactctaagtatataaacaaagaaattctcaggtgcgagcagatcagggagttattcatgactaagaaagacgtcgatatcggactgctgattgagtccctttccgtcgtatatactacatattgtcctgctcagtatacaatttacgaacccgtgatccggctaaagggacagatgaagacccagctcagtcaacgtcccttttcctctaaagaggtccaaagcatcctgcttgaaccacaccatctgaagaatttgcagcctacagagtataaaactatccagggcattttgcatgaaattggcgggacaggcatcttcgtcttcctctttgcacgggtagtggagctgagttcctgtgaggagacccaggcccttgctctccgtgtgattttatctctgattaagtacaaccagcagcgcgttcacgaacttgaaaactgcaatggcctatctatgattcaccaagttctgataaaacagaaatgcattgttgggttttacattctgaaaaccttgctggagggatgctgtggagaggatatcatttatatgaatgaaaatggggagttcaagctggatgtggacagcaacgcaataatacaggatgtgaaattgctggaggaactgctgttggactggaaaatctggtcaaaagcagaacaaggggtctgggaaacactcctggcagccttggaagtcctcattcgtgctgaccaccaccagcagatgttcaacataaagcagctgttaaaggcccaggtggtgcatcacttcctgctaacctgccaagtactgcaggagtacaaagagggccagttgacgcccatgcccagggaggtgtgtaggtccttcgtaaaaattatcgctgaggttctgggtagcccacctgatctggagctgctgacaatcatctttaactttcttcttgccgtgcaccctcctaccaatacatatgtgtgccacaatcccacgaacttctatttttcactgcatattgacggcaaaatcttccaggaaaaggtcaggtccatcatgtaccttaggcactcttcttcaggtggtagatcactgatgagcccgggatttatggtaatcagtccctctgggtttaccgcgagtccctacgaaggcgagaacagcagtaatatcattccccagcagatggccgcgcatatgctgcgctccaggagtttgccagcattccccacttcatccctgctcacccagagccaaaaactgactgggtctctcggctgctcaattgaccggctccagaacatcgcagacacgtacgtcgcgacccagagcaagaaacagaactcgctcgggtcatccgataccctgaaaaagggaaaggaagacgcttttatctcctcatgtgaaagtgccaagacagtctgtgagatggaggcggtgctctcagctcaagtttccgtgtcagatgtcccgaaaggggtgctcggcttccctgtggtgaaggccgaccataaacagctgggcgccgagccaaggtcagaagacgatagccctggggacgaatcctgcccccgcaggccagactacctgaagggtcttgcctcctttcaacgttcccattcaaccatcgcctctttgggcctggcattccctagtcagaatgggtcggccgctgtgggaaggtggccatccctggttgatcgcaacaccgacgactgggagaatttcgcttattctctgggctacgaaccgaactataatcggacagcttctgcacatagcgtgaccgaagattgtctcgttcccatttgttgcggtttgtacgagctgctatccggggtgctcctcatcctgccggacgtattacttgaggacgttatggataagttaatccaggccgatacccttttggtcctcgtgaatcacccaagcccagcgatccagcaaggcgtcataaagttgctggacgcctacttcgccagagccagcaaagaacaaaaagacaaattcctgaagaatcgtggctttagtttgctggcaaatcagttatacctccatcgcggcacccaagagctgcttgagtgcttcattgagatgttttttggccggcacattggcctagatgaggagttcgacctggaagatgtgcgcaatatgggacttttccagaaatggagcgttatccctatcctgggactgattgaaacttccctgtatgacaatatcctgttgcataatgcactcctcctgctcctgcaaatactgaattcttgttcaaaggtcgccgacatgttgttggacaatgggctgctctatgtcctgtgtaatactgtagccgccctaaacgggctggaaaaaaacattcccatgtcagagtataaactgctggcttgcgacattcagcaactgtttatcgctgtcacaatccacgcatgcagcagttctggttctcaatactttagggtgatagaagacctcatcgttatgcttggctatctgcagaattccaagaataagcggacccagaacatggcggtggcgctgcagctaagggtcttgcaagccgcgatggaattcatccgaaccacagccaatcacgactccgagaaccttacagactctctacagtccccttccgccccgcaccatgcagtggtccagaaacgcaagtccattgccggtccccggaagtttcctctagcccaaaccgagtccctgttgatgaaaatgcgtagcgtggcaaatgacgagctgcacgtcatgatgcagcgccgaatgagccaggaaaacccttcccaagccaccgaaacagagctcgcacaaaggctacagagattgactgtgctggctgtgaacaggatcatttatcaggagtttaacagcgacatcatcgatatcctgcgcactcctgaaaacgtgacacagagtaagacatccgtctttcagacggagatatcagaggaaaatatccaccacgagcagtcctctgtcttcaatccttttcaaaaagagatttttacctacttggtagagggcttcaaagtcagcattggtagcagcaaagcctccggctctaagcagcaatggacgaagatcctgtggtcctgtaaagagacattccgaatgcagttgggcaggctgctggttcacattctgtcgccggcccacgccgcgcaggagcggaagcagattttcgagattgtccatgaacctaatcaccaggagattctccgagactgtctatctccgtcccttcaacatggtgccaagctggtgctgtatctcagtgaactgattcataaccaccagggcgaactcaccgaggaggagttgggaacagctgaactgctgatgaatgcactgaaactctgtggacacaagtgcattcctcctagcgcttctacgaaagccgatctgattaagatgatcaaggaggagcaaaagaaatatgagactgaggagggtgtcaataaggctgcctggcagaaaaccgtgaacaacaatcaacagagtctctttcagcggttagattcaaagtctaaagatatcagcaaaatcgcggccgatattacccaggccgtaagcttaagccaggggaatgagcgcaaaaaggttatccagcacattcgcggaatgtataaggttgatctctctgctagtcgacactggcaagaactgattcagcagctcacccatgatagagccgtttggtacgatcctatctactatccgactagttggcagttagaccccaccgaaggacccaacagggagagaaggagactgcagcgctgctacctcactatcccaaataagtaccttttgagagatcgccagaaaagcgaggacgtcgtcaaacctcccctgagctaccttttcgaggataagacacattccagcttttctagcaccgtgaaggataaagcggcctccgagtcgattcgggtgaaccggcggtgtatctccgtggcaccctccagagagaccgctggcgagttacttctgggtaagtgtggtatgtacttcgtagaagacaacgcatcagatacagtggagtcatcctcactacagggagaactcgagccagcttcattttcatggacctacgaagaaatcaaggaagttcataagagatggtggcagttaagagacaacgccgttgaaattttccttactaatgggaggactctgctcctggcctttgacaacactaaagtacgggatgatgtgtaccacaacatcctgactaacaatctgcctaacctgctcgaatacggaaatataactgccctcaccaacctgtggtatactggtcagatcactaattttgagtacctgacccaccttaacaaacatgctgggagaagcttcaacgacctgatgcagtatccagtttttccattcatcctggctgactacgtgagcgagacgctggatctgaatgatctgctcatatataggaacctgagcaagccgattgctgttcagtacaaagaaaaagaggacaggtacgtggacacctataagtatctggaggaggaatataggaagggagcgcgggaagatgatcctatgccccctgttcagccttatcactacgggagccattacagcaacagcggcactgtgctccactttctggtgagaatgccgcccttcaccaaaatgtttttggcctaccaagaccagtcattcgacatacccgatcggactttccactcgaccaatacaacttggcggctgagtagcttcgaaagcatgaccgacgtcaaggagcttattccagagttcttttatcttcctgagtttctggtgaatcgagaaggcttcgactttggcgtccgacagaatggggagagggtcaatcatgtgaatttaccaccttgggctagaaacgatcccagactcttcatactcatccaccggcaggccctcgagagcgactacgtgagccagaacatctgccagtggattgatttggtctttggatacaaacagaaaggaaaggcatccgtgcaggccatcaacgtgttccacccggctacttactttgggatggatgtgtctgctgtggaggatccggtccaaagaagggcattagaaactatgattaaaacctacgggcaaaccccacggcaactcttccacatggcacatgttagccgacccggggcaaaactgaatatcgagggggaactacccgccgccgtgggcttactcgtgcagttcgcctttcgggagacccgagagcaggtgaaggagattacttacccatcccctttgtcttggatcaagggactcaagtggggggaatacgtggggtcgcccagcgcgcccgtgccagtcgtgtgtttttcacaaccacatggggagagatttggatcactgcaggcattgccaaccagggcaatatgtggacttagcaggaatttttgtctcctgatgacttattcaaaggaacagggtgttcggtccatgaattccaccgatatccaatggtcagccatcctctcgtggggatatgcagacaacatcctccggctaaagtcgaagcagtcagaacccccggtgaatttcatacaatcgtcccagcagtatcaagtcacttcctgtgcctgggtgcccgactcgtgccagcttttcaccggcagcaagtgcggggtcatcaccgcatatactaacaggttcacgtcttctaccccgtctgagattgaaatggagacacagatccatctatacgggcatactgaagagatcacatctctcttcgtgtgtaaaccttacagcattctaatcagcgtgtcaagagatggcacctgtattatctgggatctgaatagactctgttatgtgcaatcccttgctgggcacaagagtcccgttactgctgttagcgccagcgaaacctccggagacattgccaccgtgtgcgatagcgcaggaggaggcagcgacctccggttgtggacagttaacggggacctggtcggtcacgtccactgtcgggaaattatatgtagcgtggcttttagcaaccagccagaaggtgtcagcatcaacgtcatcgccggaggcctggagaacggtatagtacggctgtggtcaacgtgggacttaaaaccggtgagggaaatcactttccccaagagtaataagccgatcatttctcttacattctcatgcgatggccatcacctttatacagcaaatagtgacggcacagtgattgcctggtgcaggaaagaccagcagcgcctcaagcagcctatgttctattccttcctgtctagctatgccgcaggatag

SEQ ID NO: 122951 - DNA, 4149 bp, synthetic construct
  misc_feature 1..4149: note = Description of Artificial Sequence: Synthetic coding sequence
  source 1..4149: mol_type = other DNA
atgagtacagactccaactccttagctagggagttcctgaccgatgtaaaccggctctgtaacgctgtagtccaaagggtggaggccagggaggaagaggaggaagagacacacatggccacattggggcagtatctggtgcacgggcgtggctttctgcttctcaccaaactaaatagtatcattgaccaggcactcacttgccgagaagaactcctcaccctcctgttatccctgctgccgttagtgtggaaaatcccggtgcaggaggagaaggcaactgattttaacctgccactgtccgcagatatcatcctcactaaagaaaaaaactcctcttcccagcgctctacccaggaaaagctgcaccttgagggatcagccctgtctagccaggtgagcgccaaagttaacgtcttccggaaatcaaggagacagaggaaaatcacccatagatacagcgtcagagacgcccgtaagacacagctgtcgacttccgattcagaagccaatagcgacgagaagggcattgccatgaataaacaccggcgccctcaccttctccatcatttcttgacctccttccccaagcaggatcatccaaaggccaagctcgaccggttggctactaaagagcagaccccgccagatgcaatggcccttgaaaattcacgagagatcattccgcggcaaggctctaacaccgacatactctctgaacctgctgctctgtcagtcatctctaacatgaataactccccgtttgacctgtgccatgtgctcctaagcttactcgaaaaagtgtgcaaattcgatgtgacgttgaatcacaactcaccattggcagcctctgtggtgcctacgctgaccgaatttctggccggttttggagattgctgcagtttatctgacaatcttgagagccgcgtggtgtctgccggatggaccgaggaacccgtagctctgatccaacgcatgttgttcagaacagtattgcacctcctgtccgtcgatgtcagcacggcggaaatgatgcccgagaacttgagaaaaaatctcacagagctcttgagggccgctctgaaaataagaatttgtttggagaagcagcctgacccgtttgcgcccaggcagaaaaaaactttgcaggaggtccaggaggatttcgttttctccaagtaccgtcatcgcgcgcttctgttgccagagctgctagagggggttttacagatcctgatctgctgcctacagtccgcagcctccaatccattctacttctctcaggcaatggaccttgttcaggaatttatccagcaccacggttttaacctcttcgagaccgctgtcctgcagatggagtggcttgtgctgcgggacggagtgcctcctgaagcctccgagcatctgaaggctttgatcaacagtgttatgaagatcatgtcgacagttaagaaggttaagtctgaacagctgcaccatagcatgtgcactcggaaaaggcaccgcaggtgcgagtactcccacttcatgcaccatcaccgcgatctgtccgggttattagtgagcgcattcaagaatcaggtgagcaaaaatcccttcgaagagacagcggacggcgatgtctactatcctgagagatgctgttgcatagccgtctgcgcccaccagtgcctcagactcctccagcaagcttctctctcctcgacgtgtgtgcagatcctctcaggcgtgcacaatatcggcatatgttgctgcatggatcccaagtcagttatcatcccccttctgcacgccttcaagctgcctgctcttaagaactttcagcagcacatcctcaatattctcaacaaactgatcttggatcagttgggaggtgccgagatcagtccaaagatcaaaaaagcagcctgtaatatctgcaccgttgattccgaccagctggcccagttggaagaaactctacagggcaacctctgcgacgctgagctgtcttcaagcctgtcaagccctagttatagattccaggggatcctgcccagctccggaagcgaggatctgctctggaagtgggatgcacttaaggcttaccagaatttcgtcttcgaagaggacaggctgcacagtatacagattgccaatcacatctgcaatcttatccagaaggggaacatcgttgttcagtggaaactgtataactatatctttaacccagtgctgcagcgcggcgtggaactggctcaccattgtcagcacctgagtgtaacctcggcgcagtcgcatgtgtgcagccaccacaaccagtgtctcccgcaggatgtgcttcaaatttatgtgaaaacactccccatcctccttaaatcacgtgtcatccgtgatctcttcctttcatgtaatggagtgagtcagatcattgaattaaactgcctgaatggcattagatcccacagtctcaaggcatttgaaactctgatcatatctctgggtgagcagcagaaggacgcctctgtgccagacatcgacgggattgacattgagcagaaggaactctccagcgtacatgtgggcacatcatttcaccatcaacaggcgtacagcgactcccctcaaagcctctcaaaattctacgctgggctcaaggaggcctatccaaagcggagaaaaacagtaaatcaggacgtgcatatcaacaccattaatctgtttctgtgcgtcgcatttttatgtgtctctaaagaggcggaatctgatcgagaaagcgctaatgactccgaggatacatccggctatgattccacagccagcgagccactgagccatatgctaccatgcatctccctggaaagcttggttctcccatcgcccgaacacatgcaccaggctgccgatatctggagcatgtgcagatggatttatatgctatcctccgtattccagaaacagttctatcgattgggtggctttagggtctgtcataaactgatattcatgatcattcagaagctgtttagatcacataaggaggagcagggtaaaaaagagggtgacacctccgtgaacgaaaaccaggacctgaataggatttcacaacccaagaggactatgaaagaggacttgttgtccctggccattaaaagcgatcctattccatccgagctgggctccctgaaaaaatccgcggattcactcggaaagctggagctgcagcatattagctccatcaatgtagaggaggtctccgcaacagaagcagcacctgaggaggcgaagctgtttactagtcaggaaagtgagactagcttacagtcaattagactgttagaggcactgttagctatttgtttgcacggagccaggacctctcagcagaaaatggagttggaactacctaaccagaacttgtcggtcgagagcatcctgtttgagatgcgggatcacctgtcccagtccaaggtcatagaaactcagctggccaagccactgttcgacgccctgctgagggtcgcgcttggcaactattcggcggatttcgagcacaacgatgctatgacagaaaaatctcaccagtcagccgaggaactcagcagccagcccggcgactttagcgaggaggcagaggactctcagtgttgttcatttaagctgctggtggaagaagaagggtacgaagcagatagcgagtcgaaccccgaggacggcgagacacaggatgatggagtggacctcaagagtgaaaccgaaggattttctgccagctcatcccctaacgatctgcttgagaatctaacacagggggaaattatctatcccgaaatttgcatgctggagctgaacctgttaagtgcaagtaaggccaagttagacgtcctggcacatgtgttcgaatcattccttaaaataatcaggcagaaagagaaaaatgtattcctgttaatgcaacaagggacagttaaaaatctgctcggagggttcctctccatcctgacccaggatgatagtgatttccaagcttgtcaaagagtgctggtggacctgctggtgagcttaatgtcgagcaggacgtgctccgaagaactgactcttctgctgcggatatttttggagaagagcccttgtacaagagccactgaccagaaggttcagtcgacttag

SEQ ID NO: 122952 - DNA, 1254 bp, synthetic construct
  misc_feature 1..1254: note = Description of Artificial Sequence: Synthetic coding sequence
  source 1..1254: mol_type = other DNA
atggccgcacctggaagcgcccgtagacccctcttactcctgctgttgctcctcttgctcgggctgatgcactgtgcctctgccgctatgtttatggtcaagaatggcaacggcaccgcgtgcataatggccaacttctcggccgcgtttagtgtcaattacgatactaaatccgggccgaagaatatgacattcgacctgccttccgacgccaccgtcgtgctcaacagatccagctgcggaaaggagaatacttccgatccaagcctagtcatcgcttttgggcgcggtcatactctcacacttaatttcactaggaacgccactcgatactctgtgcagcttatgtccttcgtttacaacctctccgatacccacctgtttccaaatgcaagtagcaaggagataaagaccgtcgaatcgataacggatattagggccgatattgataaaaagtacaggtgtgttagcggcacccaagtgcacatgaataacgtgaccgtgacactgcacgacgccacaattcaggcatatctgtctaattcaagtttcagccgcggagaaacccgttgcgaacaggatcgaccaagcccaaccactgcccctcccgcacccccatcaccttcaccgtcccccgtgcccaaaagtccgagtgttgacaaatacaacgtcagcggcacaaatggaacatgtctattggccagtatgggactccagctgaatctgacctatgagcggaaagacaataccacagtaacacggcttttgaacatcaatccgaataagacttcagcctcagggtcttgcggcgcgcatctggtgacactggagctgcactccgaggggacaactgttctgctctttcagtttggcatgaacgcatcatcctcacgtttttttcttcagggcatccaactgaacaccatcctacctgacgcgagggatcctgcattcaaggcagcgaacgggtccctgagggccctgcaggccacagtaggtaattcatataaatgcaacgcggaggaacatgtgcgcgttacaaaagcgttcagcgtgaatatattcaaagtctgggtccaggcttttaaggtggaggggggacagttcggaagcgttgaagagtgcctgctcgatgagaacagcatgcttattccgatagctgtgggtggagcactggctggcttagtgctgattgttctgatcgcttacctggtcgggcggaagaggtctcacgcggggtatcagacgatctag

SEQ ID NO: 122953 - DNA, 1095 bp, synthetic construct
  misc_feature 1..1095: note = Description of Artificial Sequence: Synthetic coding sequence
  source 1..1095: mol_type = other DNA
atggcagcccctggtagcgcccgcaggcccttgcttctccttctccttttgttattgctgggcctgatgcactgtgcaagcgccgccatgtttatggtcaaaaacggaaatggaaccgcttgcatcatggctaatttctctgctgccttctctgtgaattatgatacgaagtccggcccgaagaacatgacattcgatctccccagtgacgccactgtggtgttaaaccgaagttcatgtggaaaagagaatacgtcagatccctctctggtgatcgctttcggtcgtggccacactcttacccttaacttcacaaggaacgcgacacgctattcggtgcagttaatgtcatttgtatacaacctgtcggatacccatttgttccctaatgcaagtagtaaggaaactcgctgcgagcaggatcgacctagcccaacaaccgcccctccggccccaccatcaccctcacctagcccagtcccaaaaagcccttcagtggacaaatacaacgtttcaggaacaaatggtacgtgcctccttgccagtatgggtctccagctgaaccttacatacgaaaggaaggataacactactgtcacccggctgcttaatataaaccctaataagacaagtgcatctggcagctgcggggcccatctggtaacgcttgagctacactccgagggcaccactgttttgctcttccagttcggcatgaacgcgtcctcttcgcggttttttttgcagggaattcagttaaacactatcctgcccgacgcccgcgacccggccttcaaagccgccaatggatctttgcgagccctccaagccactgtgggtaacagttacaagtgtaatgccgaagagcacgtccgggtgacaaaagcattcagcgttaatatcttcaaggtttgggtacaggcatttaaggtagagggaggccagttcgggtctgttgaagaatgtctcctcgacgagaacagtatgcttataccaatcgctgtgggtggtgcactggccggcctggtactgatcgttctcatcgcctacttggtgggacgcaagaggagtcatgccggatatcagacaatctag

SEQ ID NO: 122954 - DNA, 1233 bp, synthetic construct
  misc_feature 1..1233: note = Description of Artificial Sequence: Synthetic coding sequence
  source 1..1233: mol_type = other DNA
atggtctgttttaggttgttcccagtgcccgggagtggtctggttttagtctgtctcgtcttgggggctgtgaggtcatacgccttagagctcaatcttacagactccgagaacgcaacctgtctctacgcaaagtggcagatgaactttactgtccgctacgaaacaaccaataaaacttataaaactgttactatcagtgaccacggaacagtgacgtacaacggctcaatctgtggcgatgaccaaaacggtcctaagatcgccgtgcagttcggccccggcttcagctggatagccaattttactaaggccgcctcaacatactccattgacagcgtgtcattttcctacaataccggcgacaacacaacctttcccgatgcggaggataaaggtattttgaccgtcgatgagttgttggccattagaatccctttgaatgatctgttcagatgcaatagcctctcaactctggaaaagaatgacgtcgtgcaacactactgggatgtgttggtgcaggctttcgtgcagaacggtacagtttctacaaatgagttcctttgtgataaagataagacaagtaccgttgcacctaccatccataccactgtgccctcccctaccacaactcccacaccaaaagagaagcctgaggctggcacttattctgtgaataacgggaacgatacctgcttgctcgccacgatgggactccaactgaacataacccaggacaaagtagcctccgtaattaatataaaccccaacactacacactctacaggcagctgtcgctcccatacggccctgttgcgcttgaattccagcaccataaagtatttggactttgtgtttgccgtaaaaaatgaaaaccgattctatctcaaagaagttaatatttctatgtatctggtaaacggtagtgtgttttctatcgccaataataatctatcctactgggacgcaccactggggtcctcgtacatgtgtaataaggagcagaccgtgtccgtgtctggggcctttcagataaacaccttcgacctgagggttcagccgtttaacgtcacccagggcaaatactcgactgctcaagactgcagcgctgacgacgataatttcctggtgccgatcgctgtcggcgccgccctggctggcgttctaattctggttctgcttgcttactttattgggttgaagcatcaccacgcaggctatgagcaattctag

SEQ ID NO: 122955 - DNA, 1233 bp, synthetic construct
  misc_feature 1..1233: note = Description of Artificial Sequence: Synthetic coding sequence
  source 1..1233: mol_type = other DNA
atggtatgttttcgtctgtttccagtgcctgggtctggacttgtgttggtgtgtctggttctcggggccgtgcggagctacgccctggaacttaatctgaccgactctgagaacgccacttgcctatatgcaaaatggcagatgaactttactgtgcgttatgagaccacgaataaaacttacaaaacagtgaccatcagcgaccacggcactgtgacctacaatgggagcatctgcggagacgaccagaacgggccgaagatcgccgttcaattcggacccggatttagctggatcgccaattttactaaagccgcttcaacctactctattgacagtgtgtctttttcttacaatacgggcgacaatacgactttccccgacgctgaagataagggaattctgactgtcgacgaactgcttgctattcggatacctttaaatgacctttttagatgtaactcactgagtactttagaaaagaatgatgtggtgcagcattattgggatgtccttgtgcaggcatttgttcagaatggcaccgtaagtacaaacgagtttttatgtgataaagacaagacctctacagttgctcccaccatccacacaaccgtcccaagccccaccaccacaccaacccccaaagaaaagccagaagccggcacatactccgtcaacaatgggaacgacacctgccttctggccacaatgggtctccagctcaatatcactcaggacaaagtcgcttccgttataaatattaatcctaacaccacccattctactggcagctgtcgtagccatacggccttgcttcgactcaactcctcaacaatcaagtacctcgatttcgtgttcgcggtgaagaacgagaaccgcttctatctcaaagaagtgaacatctcaatgtacctggtgaacgggagcgtgttctccatcgccaataataatctttcctactgggatgctcctctcggaagttcctacatgtgcaacaaggagcaaacagtttccgtctctggagccttccaaattaacacttttgatttgagggtgcaaccattcaacgtgacccagggaaagtatagtaccgctcaggaatgtagcctcgacgacgacactatcctcatacccatcatcgtgggagccgggctgagcggtcttatcatcgttatcgtaatagcatacgtgattgggcgccggaagtcctatgctggataccagacattatag

SEQ ID NO: 122956 - DNA, 1236 bp, synthetic construct
  misc_feature 1..1236: note = Description of Artificial Sequence: Synthetic coding sequence
  source 1..1236: mol_type = other DNA
atggtgtgttttagattgttcccagttcccggtagcggcctagttctggtttgtcttgtgctgggagcagtgcgtagctatgcgctggagctgaaccttaccgactcagagaacgccacttgtttatacgccaagtggcagatgaactttacggtgcgctatgaaactaccaacaaaacctacaaaacggtgaccatctctgatcacggcaccgtgacatacaatggtagcatctgtggagacgatcagaacggtccgaagattgctgtgcaatttggacccggcttctcatggatcgcaaattttaccaaagccgcctctacttattccatagatagcgtgagcttcagctacaatactggcgataatactacattcccagatgccgaggataagggtatcctgaccgtcgacgagctgcttgccatcaggattcctctcaacgacctgtttcggtgtaatagcttgagcacactggaaaagaatgatgttgtccagcactactgggatgtgctcgtgcaggcgttcgttcagaacggcaccgtatcaacaaatgagtttctgtgcgacaaggacaagaccagcactgtcgccccaacaatccacacgaccgttccctctcccactaccacacctaccccgaaagaaaagcctgaggccggtacctattcggtcaataatggaaacgacacatgtctgttggcaacgatgggacttcagctgaacattacccaggataaggtggcaagcgtgatcaatatcaaccccaacacaacccacagtaccgggtcctgtcgcagccacacagctctgctacgcctgaattcttccacaattaagtatctcgattttgtgtttgcagtgaaaaacgaaaataggttttacctgaaagaggtgaacatctctatgtatctggtgaacggctcagtcttttctatagcgaacaacaacttaagctattgggatgctccactggggtccagttatatgtgcaataaagagcagacagttagcgtaagcggggcctttcagattaacacgttcgacctcagagtgcagccgttcaacgttacccagggaaaatatagtacagctgaggaatgctcagcagactcagacctcaatttccttatacccgtggccgtaggggtggccctgggcttcttgatcattgtcgtgtttataagctacatgattgggcgccgaaaaagtcgcaccggttatcagagtgtctag

SEQ ID NO: 122957 - DNA, 903 bp, synthetic construct
  misc_feature 1..903: note = Description of Artificial Sequence: Synthetic coding sequence
  source 1..903: mol_type = other DNA
atggtgtgcttccgcctgtttccagtccccggcagcggactcgtccttgtctgtcttgtcttgggcatcttgacagtggacgaacttttggccataagaatccctttgaacgatctgtttcgctgtaactcgctgagcaccttagagaaaaatgacgtggttcagcactattgggacgtgttggtgcaggctttcgtgcagaatggtactgtctctacgaatgaatttctgtgtgataaggacaagaccagtactgtggcacccacaatccacactactgtgcctagccccacaactaccccgacgcctaaggagaaacctgaggccggtacctatagtgtgaataacgggaatgatacctgtctcctggctactatggggctccagctgaatattactcaggacaaagtggcttccgtcattaacatcaacccgaacacaacacactccacagggagctgtaggtcacacacggccctgttgaggttaaactcctccaccattaaatacctagattttgtattcgcagtcaagaacgaaaaccggttctatcttaaagaagttaacatttccatgtatctagtgaacggatctgtcttttccatagcaaataataacttgtcctattgggacgctcccctggggagctcgtacatgtgcaacaaagagcagacagtctcagtgtctggcgcttttcagatcaataccttcgacttgcgggtgcagccctttaatgtgacccaaggaaagtactcaaccgctgaggagtgttccgcagatagcgacctcaactttctgatccccgtagccgtgggcgtggctctgggttttctcattatagtggttttcatctcctacatgatcggccgccgaaaatcgaggactggctaccagagcgtctag

SEQ ID NO: 122958 - DNA, 1092 bp, synthetic construct
  misc_feature 1..1092: note = Description of Artificial Sequence: Synthetic coding sequence
  source 1..1092: mol_type = other DNA
atgaactttaccgttaggtatgaaaccactaataaaacgtacaaaaccgtaactatttccgatcacggaaccgtgacctacaacggttctatttgtggggacgaccagaacggccccaagatcgccgtacagttcggccccggcttttcgtggatcgccaacttcaccaaggcagccagcacgtacagtatagattcagttagtttctcgtacaataccggcgataacacaacctttccagatgctgaggataagggaattctaactgtggatgagttgctggcaattagaattcccctgaatgaccttttccgttgcaattctctgagtaccctggaaaagaacgatgttgtgcagcattactgggatgtgctagtccaggctttcgttcagaatggcaccgtgagtacaaacgaatttctttgcgacaaggacaagacctccacagtggcaccaactattcacacaacagtgccaagcccgacaaccacacccacaccaaaagagaaacccgaagccggcacttacagtgtcaacaacgggaacgacacctgtctactagcaactatgggcctgcagctgaacatcacacaagataaggttgcaagcgtgataaatattaatcccaatacaactcacagcaccggctcttgccggtctcacacagctctgctaaggctgaactccagtacaattaagtatctggacttcgtgttcgccgttaaaaatgaaaaccggttttacctcaaagaagtgaatataagtatgtatttggtgaacggatcagtgttcagtatagcgaataacaatctctcctactgggatgcaccgcttgggtcgagttatatgtgcaataaagagcagacggtgagtgtgtccggtgcttttcagatcaataccttcgatctgagagtgcagcctttcaatgtcacccagggtaaatatagcactgcccaagaatgcagcctggatgacgacactatactgattcctattatcgtaggagcaggattgagcggtctcatcattgtcatcgttattgcctacgtgatagggcggaggaagagttatgctggctaccagactctctag

SEQ ID NO: 122959 - DNA, 447 bp, synthetic construct
  misc_feature 1..447: note = Description of Artificial Sequence: Synthetic coding sequence
  source 1..447: mol_type = other DNA
atgaaggctcttatcgtgcttgggctcgtgctcctcagtgtgacagtgcaaggaaaggtgtttgagcgatgtgagctggctcggaccctgaagagactgggcatggacggttacagggggatctccctagccaactggatgtgtctggctaagtgggagtcaggctacaacacacgtgcgacaaactataacgccggcgaccgatccacagactatgggatattccaaataaattcccgatattggtgcaatgacggaaaaacccccggcgctgtcaatgcctgtcatctgagctgtagcgcgctgcttcaagacaacattgccgatgccgtggcgtgtgcaaaacgcgtggtacgcgatccccaaggcatacgggcctgggtggcctggcgtaaccgttgccagaatagagatgtgaggcagtacgtccaggggtgtggagtgtag

SEQ ID NO: 122960 - DNA, 585 bp, synthetic construct
  misc_feature 1..585: note = Description of Artificial Sequence: Synthetic coding sequence
  source 1..585: mol_type = other DNA
atgcaggatgctcccctctcatgcttgagccccacaaagtggagcagcgttagctcagcggattccaccgaaaaatcagcaagtgcagcaggcactcgcaacctcccatttcaattctgcttacggcaggccttgaggatgaaagcggctggaatccttaccctgataggttgtctggttaccggggcagagtctaagatctacacacgctgcaaactggccaaaattttttcgcgcgccgggctggataactactggggtttctctttagggaactggatctgtatggcctactacgaaagcggctataacaccacagcccaaaccgtgctggatgacggctcaattgattatggcatctttcagatcaattcttttgcctggtgtcgacgaggtaaactgaaagagaataatcactgtcatgttgcatgttctgccttggtgacagacgatctgaccgatgcaattatttgcgcaaaaaagatagtgaaagaaactcaaggaatgaactattggcaaggctggaaaaaacactgcgagggacgggacctgagcgactggaagaaggattgcgaagtaagttag

SEQ ID NO: 122961 - DNA, 441 bp, synthetic construct
  misc_feature 1..441: note = Description of Artificial Sequence: Synthetic coding sequence
  source 1..441: mol_type = other DNA
atgaaagccagcgtagtgctcagcttgctgggctacttggtggtccctagcggtgcctatatccttggccgttgcacggttgcaaagaagctccacgatggtggtctagattattttgaaggatactccctggaaaattgggtctgcctggcatattttgaatccaagttcaacccgatggccatttatgagaacacccgcgaaggctacaccggtttcggtctctttcagatgcggggcagtgactggtgcggggatcatggcagaaaccgttgtcacatgagctgctctgcactactgaacccaaacctggaaaagacaattaagtgcgcgaaaactattgtaaaaggcaaagaggggatgggagcgtggccaacctggagcagatactgtcagtatagcgatacccttgcgaggtggctggacggctgcaaactgtag

SEQ ID NO: 122962 - DNA, 441 bp, synthetic construct
  misc_feature 1..441: note = Description of Artificial Sequence: Synthetic coding sequence
  source 1..441: mol_type = other DNA
atgaaagcatcagtggttctgagcctgctcgggtacctggttgtgccctctggtgcgtacatcttgggacggtgcactgtggccaagaaattacatgatggaggccttgactacttcgagggctacagcctagagaattgggtgtgtctagcctacttcgagtcaaaattcaacccgatggcgatctacgagaacactcgcgagggctacaccgggttcggcctgttccagatgagaggctcagactggtgcggcgatcatgggagaaatcgttgccatatgagttgctccgccttactgaatccgaacttggaaaaaacaattaagtgtgctaagaccatcgtcaaaggcaaggagggcatgggagcctggccaacctggtcaaggtactgccagtatagcgacactctggctagatggttggacggatgcaagctgtag

SEQ ID NO: 122963 - DNA, 447 bp, synthetic construct
  misc_feature 1..447: note = Description of Artificial Sequence: Synthetic coding sequence
  source 1..447: mol_type = other DNA
atgaccaaagctttactgatatatttagtatcatctttcctcgctctcaatcaagccagtttaatctctcgctgcgatttagcccaagtattgcaactggaggatctggacggattcgagggatatagcctgtcagattggttatgtctcgccttcgtggagagcaagttcaacattagcaagatcaatgagaacgccgatggttctttcgactatggcctgtttcaaattaattcacattactggtgcaacgactataaatcatactctgagaatctgtgccacgtggactgtcaggaccttctgaaccccaatttattggcaggtatacactgtgcaaaacgaattgtaagcggtgcccgggggatgaataattgggtggaatggaggcttcactgctcaggccgacctctgttttattggctgacgggatgccggttgagatag

SEQ ID NO: 122964 - DNA, 447 bp, synthetic construct
  misc_feature 1..447: note = Description of Artificial Sequence: Synthetic coding sequence
  source 1..447: mol_type = other DNA
atgactaaagccctacttatctacctggtttcgtcttttctggctctcaatcaggcatctttaattagtcgatgcgacctggcccaggtgctccagctcgaggatcttgacggattcgagggctattccctatctgactggctgtgcctagcctttgtggaatccaaattcaatattagcaagatcaatgagaacgctgatgggtcctttgactatgggctgttccagatcaactcacattattggtgtaatgactataaatcctactctgaaaatttatgccacgtcgactgccaagacctcctcaatccaaatctgctggccgggattcattgtgctaagaggattgttagtggggccagaggtatgaacaactgggtagaatggcgcctgcattgttctggacggccgcttttttactggctcaccggatgcagattgcggtag

SEQ ID NO: 122965 - DNA, 447 bp, synthetic construct
  misc_feature 1..447: note = Description of Artificial Sequence: Synthetic coding sequence
  source 1..447: mol_type = other DNA
atgacaaaggctcttctcatatacttggtcagctctttccttgcactgaatcaggcgtctctgatctcccgctgcgacctcgcccaggtacttcagctcgaggacctcgacggatttgaagggtactctctctctgactggttgtgtctggccttcgtggaatccaagtttaatatttctaaaattaatgaaaacgccgatggatcgttcgactacgggttgtttcaaatcaattcacattattggtgtaatgattacaagtcttactcagagaacttatgtcacgtcgactgccaggatctgttaaatcctaatttgcttgccggaattcattgtgccaaacggatcgttagcggcgcaagaggaatgaacaattgggtcgaatggagacttcactgtagtggccgacccttgttctactggttgaccggctgcagattacggtag

SEQ ID NO: 122966 - DNA, 2952 bp, synthetic construct
  misc_feature 1..2952: note = Description of Artificial Sequence: Synthetic coding sequence
  source 1..2952: mol_type = other DNA
atggaaatgaagctgcctggccaagagggctttgaggcatcttcagctcctcggaatatcccgtcaggagaactcgattccaaccccgacccaggtacaggcccgtccccagacggtccctcagacactgaaagtaaagagctgggcgttccgaaggatcccctcctgttcattcaactgaatgaattgctgggatggcctcaggccctagagtggcgagagacaggatcctcctcggcatcattactcctggatatgggagagatgccgtcgatcacattgtcaactcatttacaccacaggtgggtgttattcgaggaaaaactagaagtagcagcaggccgctggtctgccccccacgtccccactctcgcacttccaagcttacagaaactacgcagcctactggcggagggtctcgtgttgttagactgtccagctcagtctctgctggaattagtggagcaggtaacgcgggtggagtctctttcaccggaactgaggggtcaactgcaggcactgcttctgcaacggccacagcattataaccagaccaccggaactagaccctgctggggttcaacacatcctaggaaagcatccgataatgaggaggcccccttaagagaacagtgtcaaaatcccctccggcagaagctgcccccgggcgctgaggcagggaccgtgctggctggggaactggggtttctggcgcagcctttgggcgcatttgttcgcctcagaaacccagtggtgctggggtctttgaccgaagtgtccctgcctagccgatttttctgcctcttgctgggaccttgtatgctcggcaaggggtaccatgagatgggtagagctgccgcagttctgctctccgatccgcagttccaatggtccgtgagacgtgcatccaatttacacgacttgttagctgccctcgatgcgttcttagaagaagtgacagtgctgccccctgggagatgggaccctaccgctcggattcccccgccaaagtgccttccttctcagcacaaaagactgccgagtcagcagcgcgaaatacgcggaccagctgtaccccgcctaactagtgccgaggacaggcatagacacggccctcacgctcactcgcctgaactccaaagaaccgggagactgtttggaggtctgattcaggacgttagaaggaaggtgccctggtaccccagtgatttcctggacgcgctgcatttgcaatgtttcagcgctgttctctatatctatctggccactgtcacaaacgctattactttcgggggactcctgggagatgccaccgatggcgctcagggagtgctggagtcctttctcggtaccgctgtcgccggtgccgctttctgcctcatggcaggccagccactcaccatcctctcgtcaacaggccccgtcctggtgttcgagagactcctgttttccttttctcgggactatagccttgactatctgccatttcgattgtgggtgggcatttgggttgccaccttctgccttgtgctcgttgctacagaagcatcagttttggtgcgatatttcaccagatttacagaggaaggcttctgtgccctgattagcctcatcttcatttatgacgccgtggggaaaatgctgaacctaacccatacctatccaattcaaaagcccgggtcatctgcttatggttgtctgtgtcagtatcctgggccgggggggaatgaatcccagtggatccggactcgacccaaagaccgcgacgacattgtatctatggatctcggcttaattaatgccagcctcctacccccccctgagtgcacacgccagggggggcacccgcggggccctggctgtcacactgtgcccgatatagctttcttttccctgctgctgtttctcactagtttcttcttcgcaatggccctgaagtgcgtgaagaccagtcgcttctttccatcagtggtacgaaagggcctgagcgacttctcatcagtgttggctatcctgctcgggtgcggcttggacgccttcctcggcctggccacccctaagctcatggtcccccgcgagttcaaacctacactccctggcagaggctggctcgtcagcccattcggcgccaacccatggtggtggagcgttgctgctgccttacctgccctccttctatccatccttatatttatggatcagcagatcaccgcagtgatcctgaaccggatggaatacaggctgcaaaaaggggcgggcttccacctagacctgttctgcgtagctgtgctcatgctgctgacctcggcattgggcctgccgtggtatgtctcggcaaccgttattagtttggcacatatggacagccttagacgtgaatcaagagcatgcgcccctggagaaagaccaaactttctgggaattcgagaacagagactcacagggctcgtggttttcattctcacgggcgcctcaattttcctggcacccgttttgaaatttattccaatgcctgtgctgtatggcatcttcctgtacatgggcgtagcggccctctcctccatacagtttactaatagagtcaagctgctcctgatgccagcaaagcaccagcccgacctgcttttgctaaggcacgtgcctttgactagggtccacctgtttactgccatccagctcgcctgtctcgggctcctgtggatcattaagtcaaccccggctgctataatatttccactgatgctgttaggcctggtcggggtccgaaaggcgttagagagagtgttctcaccacaggaattgctgtggctcgatgagctcatgccagaggaggaaagaagcatcccagaaaaggggctggaaccggaacactccttttcaggatcagactcagaggattcggaacttatgtatcagcctaaggcacctgagatcaatatctccgttaattag

SEQ ID NO: 122967 - DNA, 123 bp, synthetic construct
  misc_feature 1..123: note = Description of Artificial Sequence: Synthetic coding sequence
  source 1..123: mol_type = other DNA
atgcggtttgcatggacagttcttttactgggtccgctccaattgtgcgcactggtacattgtgcgcctcccgccgctggccaacaacagccccctcgggagccacctgcggctcctggatag

SEQ ID NO: 122968 - DNA, 1134 bp, synthetic construct
  misc_feature 1..1134: note = Description of Artificial Sequence: Synthetic coding sequence
  source 1..1134: mol_type = other DNA
atgcgcttcgcttggactgtcctgctgctgggaccactccagctgtgcgctctagtgcattgtgcacctcctgcagccggacagcagcaaccacctcgggagcctccggcagcccctggtgcagctagcgctcagcagccgcggacgcctatccttttgatccgcgataaccgcaccgccgctgctcgcacacgaaccgccgggtcctccggagtgacggctggccgccctcgcccaacagcgaggcattggttccaggccgggtacagtacgagtagggcccgagaagccggtgcatctcgcgctgagaatcagaccgccccaggggaggtgcccgcgctgagcaatctcagaccaccatcccgcgtcgatggcatggttggagacgatccttacaatccatacaagtattccgatgataacccatactacaactactacgacacatatgaaagaccacgaccaggggggcgatatcgcccaggctatggaaccggctatttccagtatggcttgcctgacctggtcgctgacccttattatatccaggctagcacttatgtgcaaaagatgtccatgtataatctccggtgtgcagccgaagagaactgcttggccagcactgcatacagagctgatgtgcgtgattacgatcacagagtcctcctccggtttccacaaagggttaaaaaccagggaacatctgacttcctgcctagcagacccagatatagctgggagtggcacagctgtcatcagcactatcatagcatggacgagttttcccattacgacttactggacgctaacacacagcggcgggtcgcagagggacacaaggccagtttctgcttagaagatacttcctgtgactacgggtaccatcgccgattcgcttgcaccgctcatacgcagggcctcagcccaggctgttatgacacatatggcgccgatatagactgtcagtggatcgatattacagatgttaaacctggaaattacattctgaaggtctccgtgaatccctcttacctggtgccggagtctgactacaccaataatgtagttcgatgcgacatcagatacaccggtcaccatgcttacgcatcgggttgcacaatctctccttactag

SEQ ID NO: 122969 - DNA, 2325 bp, synthetic construct
  misc_feature 1..2325: note = Description of Artificial Sequence: Synthetic coding sequence
  source 1..2325: mol_type = other DNA
atggaacggccactctgttcacacctttgctcatgccttgcaatgctggctcttctttcgcctctctctctggcccagtatgattcttggccacattatcccgaatactttcagcagcccgcaccagagtatcaccagccacaagcgcccgccaatgtagcaaagatccagcttcgcctggctggccagaagcgaaagcatagtgagggacgtgtggaggtttattatgacggccagtggggaaccgtttgtgatgacgatttctctatccacgccgcccatgtcgtgtgcagagaactaggttatgttgaggccaaatcttggaccgcaagttcctcctatgggaaaggcgaaggcccaatctggctggataatttacattgcaccgggaacgaagcgacacttgccgcctgcacttccaacggctggggcgtgacggactgcaagcatactgaagatgttggagtagtttgcagcgacaagaggatcccaggcttcaagtttgataactctctgatcaaccagatagagaacttgaacatccaggtggaagatatccgaatccgcgcaatcctgtctacctatcgcaagaggacccctgttatggagggatacgtcgaggtaaaggagggaaagacatggaagcaaatttgtgataaacattggactgccaaaaattcccgagtggtgtgtgggatgttcggctttccaggcgaaaggacatacaatactaaggtctataagatgtttgcctccagacgtaagcagaggtactggcctttctctatggactgcacaggcacggaagcacatattagcagttgtaagctcggcccacaggtcagtcttgacccgatgaaaaatgtcacatgcgagaatggcctccctgccgtggtctcctgcgttcctggacaggtcttttctcccgatggacccagcagattcagaaaggcttacaagcccgaacagcctctcgtgcgtcttcgcgggggagcttatattggcgaaggaagagtggaagtgctgaagaacggggagtgggggacggtgtgcgacgataagtgggatctggtgtcagcctctgtggtttgtagggagctgggatttggtagcgccaaggaagccgttaccggtagccgcctgggccagggcatagggcctatccacctgaacgagatccagtgtaccgggaacgagaagtccattattgattgtaagtttaatgctgaaagccaaggatgcaatcacgaagaagacgctggagtgcgctgcaacacccccgcgatgggattgcagaagaagcttagactgaatggaggacggaacccatacgagggcagagtggaggtgctggtcgaacgcaacggatctctcgtttggggaatggtgtgtggtcagaattggggcatcgtggaggcaatggtggtgtgccggcaactgggattgggtttcgcatccaacgcctttcaggagacttggtattggcatggcgacgtgaactctaataaggtggtgatgtctggagtgaaatgttccggtactgaattatctcttgcccattgccgacacgatggtgaggacgttgcgtgtccccaaggcggggtgcagtacggcgcgggagtagcatgttcggaaacggcccctgatctggtcttgaatgcagagatggtgcaacagactacttacctcgaggatcggccaatgtttatgctccagtgcgctatggaagagaattgtctcagtgcatctgccgcgcagactgacccaactacagggtacaggaggctcctgagattctccagccagattcataacaatgggcagtctgatttccgaccaaagaatgggcggcatgcatggatctggcatgactgtcaccggcactatcacagcatggaggtgtttacgcactatgacctgctgaaccttaacgggactaaggttgctgaagggcataaagcatctttttgtctggaagacacagagtgcgaaggcgatatccagaaaaactacgagtgcgcaaattttggcgaccagggcatcactatgggatgttgggatatgtatagacacgatatcgactgccagtgggtggatattacggacgttcccccgggagactacctgttccaggtggtgatcaaccccaattttgaagtcgctgagtccgactattcaaataacataatgaagtgccgaagcagatatgatggccataggatctggatgtataattgccatatcggaggcagcttctcagaagagactgaaaaaaagttcgagcacttttctggcctccttaacaaccagctgtcaccccagtag

SEQ ID NO: 122970 - DNA, 456 bp, synthetic construct
  misc_feature 1..456: note = Description of Artificial Sequence: Synthetic coding sequence
  source 1..456: mol_type = other DNA
atggagcgaccactctgctcccatctatgttcatgtctcgctatgttggccctgctgagcccgctcagtctagctcagtatgacagctggccacactatcctgagtacttccaacagcctgcccccgaatatcatcaaccccaggctcccgccaatgttgctaagattcagctcaggcttgcgggccagaagaggaagcactccgaagggagagtggaagtgtactacgacggccagtgggggaccgtttgtgatgacgatttttcaatccatgcagcacacgtggtctgccgcgagctcggttacgtggaggctaagagctggaccgcaagctcatcctacggtaagggggaggggcctatttggctggataatctgcactgtaccggaaatgaggcaactctagcagcttgtactagcaatggatggggagtgactgactgtaaacacacctag

SEQ ID NO: 122971 - DNA, 291 bp, synthetic construct
  misc_feature 1..291: note = Description of Artificial Sequence: Synthetic coding sequence
  source 1..291: mol_type = other DNA
atggaaagacctctgtgcagtcatctgtgcagctgtctggcaatgctggcactgctctcacccctctcactggcccagtacgactcatggcctcactaccccgagtacttccagcagcctgcgccggaatatcatcaaccgcaggcgccggccaatgttgccaagatccagcttcggcttgcgggccagaagcgtaagcacagcgaaggaagggttgaggtttactatgatggccagtgggggaccgtgtgcgacgacgatttctccatccacgctgctcatgtggtgtag

SEQ ID NO: 122972 - DNA, 420 bp, synthetic construct
  misc_feature 1..420: note = Description of Artificial Sequence: Synthetic coding sequence
  source 1..420: mol_type = other DNA
atggaacggcctctgtgtagccacttgtgcagctgtctcgccatgctcgcgttgcttagcccactgtcgctagcccaatatgactcatggccccattatcccgagtatttccagcagcccgcaccggaataccaccagccccaggcaccagcgaacgtcgctaaaatccagctgagactggctggccagaaaaggaagcatagtgaaggtagggttgaggtttactacgatggtcagtgggggacagtatgcgacgatgacttttccatacacgccgcgcatgtggtgtgtagagagctgggttacgtggaggcaaagagttggactgcatcttcatcttatggaaaaggagagggtcccatctggttagataacctccactgtaccgggaacgaagccacactggcagcttgcacatag

SEQ ID NO: 122973 - DNA, 2262 bp, synthetic construct
  misc_feature 1..2262: note = Description of Artificial Sequence: Synthetic coding sequence
  source 1..2262: mol_type = other DNA
atgaggccagtgtcagtgtggcaatggagcccctggggcctgctgttatgcctgttgtgttcctcgtgcctgggctctccaagcccaagcaccgggccagaaaagaaagcgggctcccaagggctgcgcttcaggctggcgggctttccaagaaagccttacgagggaagggtggaaatccagcgggcaggggaatggggcacaatctgcgacgatgactttaccctgcaggcagctcatatcctttgcagggagctcggcttcaccgaggccacagggtggactcacagcgcgaagtacggccccgggaccggaagaatctggttggataatctctcttgctcgggcaccgagcagtcagtgacagagtgcgccagtagagggtggggcaattccgattgtacacacgacgaagacgctggggtaatctgcaaggaccaacgactccctggattcagcgatagcaacgtgatcgaggtggagcatcaccttcaggtggaggaagtgcgcatccgtccagccgtgggctggggaagacgcccattgcccgtcacagaagggttagtagaagtgaggttacctgacggatggtctcaggtgtgcgacaaagggtggtccgcacataactcccacgtagtatgtggcatgctcggctttcctagcgagaagagagtaaatgctgcattttatcgcctgctggcccagcgccaacagcactccttcgggctgcatggagttgcatgcgtgggtactgaggcccatctctccctgtgctccctggaattttacagggccaacgataccgcaagatgcccgggcggggggcctgccgttgtcagctgtgttccgggccctgtgtacgccgcctctagtgggcagaaaaaacaacaacagagcaaaccgcaaggggaggctcgagtgcggctgaaagggggtgcccatcctggggaggggcgagtggaggtgctgaaggccagtacctgggggacagtgtgcgacaggaagtgggatttgcatgccgcctccgtcgtttgtcgagaactgggctttggatcagctcgggaggccctgagcggcgcacgcatgggacaaggtatgggggccatccacttaagtgaagtgcgctgttccgggcaggaactgtccctgtggaagtgccctcataaaaatattaccgctgaagattgttcacacagccaggacgcaggggtgcgctgtaatctaccttacacaggcgcagaaaccagaattaggctcagcgggggacgcagtcagcacgagggaagagttgaggtccagataggaggacctggtcctctgcgctggggattaatttgcggtgacgactggggcactctggaggccatggtcgcttgccgtcagctgggtttggggtatgccaaccacgggctgcaggaaacgtggtactgggattctggcaacatcaccgaggtggtgatgagtggggtcagatgtactggaacagagctgtcactggaccagtgtgctcaccacgggacacatataacttgcaagagaacaggaacacgcttcaccgctggagtcatttgttccgaaacagcatctgacctgctgctccacagcgcacttgtacaggaaactgcctacattgaagataggccactgcatatgttgtactgcgccgctgaagagaactgcctcgcttccagcgccagaagcgcaaattggccctacgggcaccggcgacttctcagattctcctctcagatccataacctcgggcgtgctgatttcagacctaaagccggccgccacagttgggtgtggcacgagtgccatggacactatcactctatggatatcttcacccactacgatatcttaacgcctaatgggactaaggtggcagaaggacataaagctagcttttgcctcgaagatactgaatgccaggaagatgtgtccaagcgttacgagtgcgctaattttggtgaacaagggatcacagtagggtgctgggatctgtatcgccacgacattgactgtcagtggattgatattacagatgtaaagcccggtaactacatactccaggtcgtgataaatcccaacttcgaggtggccgagagcgactttactaacaacgcgatgaagtgtaactgtaaatacgatggtcatcgcatttgggtccacaactgccatattggcgatgctttttcagaagaggccaatcgccgattcgagaggtacccaggtcagacttcaaatcagatcatttag

SEQ ID NO: 122974 - DNA, 1827 bp, synthetic construct
  misc_feature 1..1827: note = Description of Artificial Sequence: Synthetic coding sequence
  source 1..1827: mol_type = other DNA
atgaggcccgtgtccgtctggcagtggagtccctgggggctgttactatgtctactttgcagttcctgtctgggatcccccagcccaagtacaggaccggagaaaaaggccggcagtcagggactgaggtttaggttggccggctttccacgaaaaccctacgagggtcgggttgaaatccagagagcgggcgaatggggtaccatctgcgatgatgatttcacactgcaggcggcacatatcctgtgtagagaactagggttcacagaagccacagggtggactcattctgctaagtatggacctggaaccggtcgcatatggttggacaacctgtcatgttctggcacagaacagtctgtgacagaatgtgcatcacgaggctggggaaattccgattgcacccacgacgaagacgccggcgtaatttgtaaggatcagagactcccaggtttttccgactctaacgtgattgaagctcgcgtcaggctgaagggaggggcgcacccaggggagggaagagtagaagttcttaaagcgagcacatggggcactgtatgcgaccggaaatgggacctccacgccgcctctgtcgtgtgccgcgagctgggctttggctcagcacgcgaggctctctcaggggcaaggatgggccagggaatgggtgccattcacctaagcgaggtgaggtgttctggccaggaactgtcactgtggaagtgtcctcacaagaacattaccgctgaggattgtagccactcgcaggatgccggagtgcggtgtaatttaccatataccggagccgaaactcgaatacgcttaagtggcggacgctcccagcacgaaggccgtgtggaggtccagatcggggggccggggcctttgcgatggggccttatatgtggggatgattggggaacattagaggcaatggtggcgtgccgccagctgggcctcggatatgctaatcacggcctacaggaaacgtggtattgggactctggcaacattacagaagtggttatgtctggcgtcagatgcaccgggaccgaactcagcctggaccaatgtgctcaccacggtacccatataacctgtaagagaaccggtaccaggtttaccgcaggcgttatttgctcggaaactgcctccgatctgcttcttcactctgcactggtccaggagacagcctatatcgaagacaggcccctgcacatgctctactgcgcggctgaagagaattgcctggctagcagcgccaggtccgccaattggccctacggccatagacgtctcttgagattttcaagtcagattcataacctggggagagctgattttcgcccaaaggcgggaagacactcctgggtttggcatgagtgccacggccattaccacagcatggatattttcactcactatgatatcctgacccctaacggcaccaaggtggctgagggccataaagcctccttctgcctggaagatacagagtgccaggaggacgtgagtaaacgctacgagtgcgcgaatttcggggagcagggaatcactgtggggtgttgggatctgtacagacacgatattgattgtcagtggatagatattaccgatgtgaaaccgggcaactacatcctgcaggtggtgattaaccctaactttgaagtggctgaaagcgattttacaaataatgcgatgaagtgtaattgtaagtatgatgggcaccgcatatgggttcataactgccatataggagacgcattttccgaagaagcaaacaggcgatttgagagatacccgggccagactagtaatcaaatcatctag

SEQ ID NO: 122975 - DNA, 2094 bp, synthetic construct
  misc_feature 1..2094: note = Description of Artificial Sequence: Synthetic coding sequence
  source 1..2094: mol_type = other DNA
atgcgcccggtgagcgtatggcaatggtccccgtgggggttactcctttgtttgctgtgttccagttgtttaggatcccctagccctagcactggccccgagaaaaaggccgggtctcagggtcttagatttagactggccggtttcccccgtaaaccatacgaaggccgtgtggagattcagagagcaggtgaatggggaactatttgtgacgacgactttacattacaggcagcacatattctatgcagagaacttggattcacagaagctacgggctggacacactctgcaaaatatggtcccggcacaggaagaatttggcttgacaatctgtcctgtagtgggaccgaacagtccgtcaccgaatgtgcatcaagaggatggggaaactctgactgtactcatgatgaggatgctggggtaatctgtaaagaccagagactgccgggctttagcgattctaacgtcatcgaagttgaacatcacctgcaggttgaagaagtcagaatccgccccgccgttggctggggccgccgaccattaccagtcactgagggtctggtggaagttcggctccccgacggttggtctcaggtgtgtgacaagggatggtctgctcacaattcccacgtggtttgtggtatgctcggctttcctagcgaaaagagggttaacgccgcattctatcgtctgctagcccagaggcagcaacactcctttggattgcacggagtggcgtgcgttgggacagaagcccacttaagcctctgctctcttgagttctacagagctaatgataccgctaggtgtcccgggggcgggccagccgtcgtatcttgtgtgcctggacccgtttatgcggccagctctggccagaaaaagcaacaacaaagcaagccccaaggcgaggcgcgagtccggcttaagggaggcgcccaccccggcgagggacgggttgaagtgctaaaggcatctacttggggaaccgtctgtgacaggaaatgggatcttcacgcagctagcgttgtttgccgggagctcgggtttgggtcagcccgagaggcactctcgggggctaggatggggcagggtatgggggcaatccacttaagtgaggtgcgctgtagcgggcaggagctttccttgtggaagtgcccccataagaacattaccgcggaagactgttcccattctcaggacgcaggcgtccggtgcaatctgccctataccggcgctgaaactcgtgaaacttggtactgggactccggaaacatcacagaggtggtgatgagcggtgtgcggtgtactgggactgaactgtctttagatcaatgtgctcaccacggaacgcacatcacgtgcaagcgcaccggaaccagattcaccgccggagttatttgttccgaaaccgcatccgacttactgctgcacagtgctctagtccaggagaccgcgtatattgaagacaggcctcttcatatgctgtactgcgctgctgaagaaaactgcctggcaagctctgcgcgctctgccaactggccatacggtcacagaaggctcctgaggtttagttcacagatccacaatctcggccgggccgatttcaggccaaaggccggacggcacagctgggtttggcatgagtgccatggacactatcattctatggacatttttacccattacgacatcctgacacctaatggcaccaaagtcgcggagggacacaaggcatcattctgcctcgaggatacggaatgccaagaagacgtgtctaagagatatgagtgtgcaaatttcggggagcagggcattacagtgggttgctgggacctgtatcgccacgacattgattgtcaatggatcgacatcaccgatgtgaagccgggaaactatatcttgcaggttgtgatcaaccctaatttcgaggtagcggagagtgatttcacgaacaatgccatgaagtgcaactgtaagtatgacgggcaccggatatgggtacacaattgtcatatcggcgatgcatttagcgaggaagccaaccgtcggttcgaaaggtatccagggcagacctcaaaccagattatttag

SEQ ID NO: 122976 - DNA, 912 bp, synthetic construct
  misc_feature 1..912: note = Description of Artificial Sequence: Synthetic coding sequence
  source 1..912: mol_type = other DNA
atgcgacccgtctctgtgtggcagtggagtccatggggcctcctcttatgtctactgtgctcgtcgtgcctcggatcccctagcccctctaccggacctgaaaaaaaagctggaagccaggggctgcggtttaggctcgcagggtttccgcgcaaaccctacgaggggagagttgagattcagcgggctggcgaatggggcaccatttgtgacgatgactttaccctgcaggctgcccatatactgtgtcgggagttaggatttactgaggctacgggatggacccattctgcaaaatacgggcccggcaccggccgaatctggctggataatctgtcctgtagcggaacagagcagtcagtgaccgaatgtgccagccgcggctggggaaattccgactgtactcatgatgaagacgctggtgtgatctgtaaagatcagcgcctgcccggcttttctgattccaatgttattgaggtggagcaccatctgcaggtggaagaggtgaggatcagacctgccgtaggctgggggagaaggcccctgccggttactgaggggctcgtcgaagtgcggctgcccgatggttggtcccaggtgtgtgataaggggtggagtgcccataactctcatgtcgtgtgcggcatgctaggctttccaagcgagaaaagagtcaacgccgctttttatcggctgctcgctcagcggcagcagcattcttttgggctgcatggagttgcttgtgtgggaacagaagcccatcttagcctgtgcagtctggagttttaccgggccaatgacacagcccgctgtccagggggaggcccagctgtggtctcctgcgtgcctggccctgtctacgctgctagctcaggacagaaaaagcagcagcagtcaaaaccccagggctag

SEQ ID NO: 122977 - DNA, 2271 bp, synthetic construct
  misc_feature 1..2271: note = Description of Artificial Sequence: Synthetic coding sequence
  source 1..2271: mol_type = other DNA
atggcctggagtcccccagccaccctgttcctgttcttactgttgttgggacagccaccaccctccagacctcaaagtctcgggaccacgaaactgcgcctagtgggtccagagtcaaagcctgaagaaggacgcctcgaggtgctgcaccagggtcagtgggggacggtgtgcgatgacaactttgcaatacaggaagccacggttgcctgtcggcagctgggctttgaggccgcactgacttgggcccatagcgctaaatatggccagggggaaggacccatatggttagataacgttcggtgtgtggggaccgaatcctcactggaccagtgcgggagcaatggttggggagtctcagactgctcccatagtgaggacgtaggggttatttgccaccctcgccgacaccgcgggtacctttccgaaacagtgagtaatgcattaggaccccagggacgcagactggaggaggtccggttgaaaccaattctggcttcagcgaaacagcactcaccggtgaccgagggagctgttgaagtcaagtatgagggccactggagacaggtttgcgaccagggatggaccatgaacaactcccgggtcgtttgcggaatgctgggctttccaagtgaagtccccgtggacagtcactattacaggaaagtgtgggacttaaaaatgcgggatcctaaatcacgcctcaaatcactcacaaacaagaatagcttttggatccaccaagtaacgtgtttgggaacagagccccatatggccaactgtcaggttcaggtggctcccgcccgtggcaagctacgtcccgcttgtccaggcggcatgcatgcagtggtctcctgtgtagcgggaccccactttaggcctcctaagacaaaacctcagcgtaagggaagctgggccgaagagcccagggtccgcctgcggtctggagctcaagtgggcgagggtcgggtcgaagttctgatgaacagacagtgggggacggtgtgcgatcacagatggaacctgatctccgcttccgtggtctgccgccagctgggctttggtagtgccagggaagctctcttcggcgcaagactggggcaggggctggggccaatccatttgtccgaggttcggtgtcgcggatacgaacggacactgtccgactgccctgcccttgagggatctcagaatggatgtcagcacgagaacgacgccgccgtacgctgtaatgtgccaaacatgggattccagaatcaggtcagacttgcgggcgggagaatacccgaagaaggcctgctcgaagttcaagtcgaggttaatggtgtgccacggtggggatctgtgtgttcagaaaactggggcctcacagaagccatggtcgcatgtcgacagttgggactgggcttcgccatccatgcatacaaagagacatggttttggtcgggcactccgagggctcaagaagtggtgatgtctggggtacgttgttccgggacagagctggcattgcagcagtgtcagcggcacgggccagttcattgcagtcacggaggtggaagattcctggccggggttagctgcatggatagtgccccagatctggtaatgaatgcccagctagtgcaggagaccgcctacttggaggacagaccactgtctcagctctactgcgcccacgaagaaaactgcctcagtaagtctgccgaccacatggactggccgtacggctatagaaggctattgagatttagtacccaaatatacaacctgggcagaacagacttccgcccaaagacggggagggatagctgggtatggcaccagtgccacagacactatcattcaatagaggtgtttacccattatgatttgctcacactaaacggctctaaggtggccgaaggacataaggcaagtttctgcttagaggacaccaactgcccaaccggtctccagaggagatatgcctgcgccaacttcggcgagcagggcgtgaccgtgggttgctgggatacatacaggcacgacatcgattgccaatgggtcgacataaccgatgtgggacccggcaactacatatttcaggtgattgttaatccgcattatgaggtggcagaatctgacttttccaataatatgcttcagtgccggtgtaagtatgatggacacagagtgtggcttcataattgccacactggcaatagctaccccgccaatgccgagttgtccctggaacaagaacaaaggcttcgaaacaatctgatctag

SEQ ID NO: 122978 - DNA, 1794 bp, synthetic construct
  misc_feature 1..1794: note = Description of Artificial Sequence: Synthetic coding sequence
  source 1..1794: mol_type = other DNA
atggctgccgttcaggctgccgaggtcaaggtggacggctctgagcccaaattgagcaaaaacgagctgaagcgccgcctcaaggccgaaaagaaggtagctgagaaggaggccaaacagaaagagctatctgagaagcagctttcccaagcaacggcggcggccaccaaccatactacggataatggagttggcccggaggaagagtccgtcgatcccaatcaatactacaagattaggtcccaggcaatccatcagttgaaagtgaatggagaggatccgtatcctcacaaatttcatgtggacatctcactgactgactttatccagaagtattcacacctgcagcctggcgaccatctgaccgatataacgttgaaggtggccggacgtatccacgccaagcgggcctctggcggcaagctgattttctacgacttacggggggaaggtgtgaaactgcaggtgatggccaattcacgcaattacaagtctgaagaagagtttattcacattaacaataagctgcgcaggggcgacatcatcggagtacagggtaaccctggcaaaaccaagaaaggagaacttagcatcatcccatatgagatcactttgctgagtccatgccttcacatgctcccgcatttgcactttggacttaaagacaaggagaccaggtaccgacaacgctacctcgacctgatcctgaatgactttgtgcgtcaaaaatttatcatcaggtctaaaatcatcacttatatacgcagtttcttggatgagctgggttttctggaaatcgaaacaccgatgatgaatataattcctggcggtgctgtcgcaaagccttttatcacataccacaatgagctagatatgaatttgtatatgagaatcgcgcctgaactgtaccacaaaatgctggtggttggcggcatagacagggtgtatgagattggacgccagttcagaaacgagggaatcgatcttacccacaatcctgagttcactacatgcgaattttacatggcctacgctgattatcacgatctcatggagataaccgagaagatggtgagcggcatggtgaagcacattacgggaagttacaaggttacatatcatcccgacggtccagaaggacaggcctacgatgtggacttcacacctccattcagaagaattaatatggtcgaggagcttgagaaggccctgggaatgaagctacctgaaactaacctgtttgagacagaagagacgaggaaaatactcgatgacatctgcgtggccaaggccgtggaatgcccccccccccggacaacagccaggctgttagacaaactggtcggtgagttcctggaagtcacttgtattaacccgacatttatctgtgaccacccccagataatgagtccgctcgctaagtggcaccgcagtaaagaggggctcacggaacgcttcgaactgtttgtcatgaaaaaggagatctgtaacgcttatactgagctgaacgacccaatgagacaacgacagctgttcgaggaacaggcaaaagccaaggctgcgggggacgatgaggccatgttcatcgacgaaaacttctgcacagcccttgagtacggcttgccccctactgcagggtggggcatgggaatcgatagagtggctatgttcttaactgactccaataacattaaagaggtcctactgttccctgcaatgaagcctgaggacaaaaaggaaaacgtcgcaactactgataccctggaatctacaactgtggggacaagcgtatag

SEQ ID NO: 122979 - DNA, 1878 bp, synthetic construct
  misc_feature 1..1878: note = Description of Artificial Sequence: Synthetic coding sequence
  source 1..1878: mol_type = other DNA
atgttaacccaggcagcagtgcgccttgtccgggggtccctcagaaagacatcttgggctgagtgggggcacagggaactgagactgggccagctggccccctttactgctcctcacaaggacaaaagctttagcgaccagcgctcagaactgaaaaggcggcttaaggcggagaagaaggtggctgagaaggaggcgaaacagaaggaactgtctgagaaacagctgagccaggctactgcagctgccacgaatcatacaactgacaacggcgtcggtccagaggaggagagtgtagatcccaaccagtattacaaaatccgcagtcaggccatacaccaattgaaggtgaatggagaggacccctacccccataagttccatgtggacatctcgctgacagatttcatccaaaagtactcccatttacaaccaggcgaccatctcactgacatcaccctgaaggtggcagggcgtatacatgcaaaacgagcatccggcggtaagctgattttttatgatctgcgaggagaaggtgttaagttgcaagtgatggccaactctcgcaactataagtcagaggaagagtttattcacataaacaataagctccgccgaggcgacataattggtgtccaggggaaccccggaaaaactaagaagggtgaactgtccataatcccgtacgaaattactctgctgtccccctgtctccatatgttaccacatttgcatttcggactcaaagataaagagacccgttatcggcaacgctaccttgacctgatcttaaacgattttgtgcgacagaagtttatcatacgttccaaaatcatcacttacatccggagtttcctagacgaactgggctttcttgaaatcgagacccccatgatgaacatcatccccggaggtgcagtggccaaacctttcatcacttaccataatgaactggacatgaacctgtatatgcgcattgcccctgagctgtaccacaaaatgctggtcgtgggaggcatcgatcgggtctacgaaatcggccgtcagttcagaaacgaaggcatcgacctgactcataaccctgagtttaccacctgcgagttttacatggcctatgctgattatcatgaccttatggagatcactgaaaagatggtaagtggcatggtgaagcacatcacagggtcctacaaggtaacctaccaccccgacgggcccgagggccaggcttacgatgtggacttcaccccacctttcaggcggatcaacatggtggaggaactggagaaggctcttgggatgaaactgcccgagacgaatctttttgaaacggaggaaacgaggaaaatcttagatgacatatgcgtggccaaggccgtggagtgtcccccgccacgcactacagccaggctcttagacaagctagtcggggagttcctggaggtcacctgtatcaatcccaccttcatttgcgaccacccccagattatgtccccacttgctaagtggcataggtcgaaagagggtctgactgagcgcttcgagttgtttgttatgaagaaagaaatatgcaacgcatatacagaacttaatgaccccatgaggcagcgtcagctcttcgaagagcaggctaaggcgaaggccgctggcgatgacgaagccatgtttatagacgagaacttttgcaccgccctggagtacggtcttccaccaacggctgggtggggcatgggaatcgatcgcgtcgctatgttcctgaccgactccaacaacataaaagaagtcctcctgtttcctgctatgaagcccgaagacaaaaaagaaaacgtcgcgaccactgatacactggagagtaccaccgtaggcacttcagtctag

SEQ ID NO: 122980 - DNA, 1569 bp, synthetic construct
  misc_feature 1..1569: note = Description of Artificial Sequence: Synthetic coding sequence
  source 1..1569: mol_type = other DNA
atgcagccgtggcacggcaaagccatgcagcgcgcttccgaggcgggtgctaccgcacccaaagcttcagcacggaacgcccgaggggctcctatggacccgaccgagagtcccgccgccccggaggcggctctccccaaagcaggcaagttcgggccggcccgcaagtcaggctcccgccagaaaaagagcgccccagacacacaggagcgccctccagtgagggcgacaggggctcgggcgaaaaaggccccccaacgcgctcaagatacacaaccatcggacgctacttccgcgcccggtgccgaaggcttagaaccaccagccgctcgggagcccgcattaagtcgagcgggctcatgccggcagcgcggggcccgatgcagtacaaagcctagaccccctccagggccctgggacgtaccatcacctggcctcccagtgtcagcaccgatactcgttcggagagacgctgctccaggcgccagcaaactgcgagctgtgttggaaaagctgaagctgagcagggatgacataagcaccgccgccggcatggtaaagggagtggtcgaccacctgcttctgcggctgaagtgcgactccgcatttcgcggggtggggcttcttaacaccggaagttattacgagcatgtcaaaatttctgcaccgaacgaatttgatgtaatgttcaagttggaagttccacgcattcagctagaggagtattcgaatacccgggcgtattattttgtgaaattcaagcggaaccctaaggagaaccccctgagccagttcttggaaggagagattctgagtgccagcaagatgctttctaagttccggaaaatcattaaggaggagatcaacgacattaaagacacagacgttattatgaaacggaaaagaggagggtctccagccgtgactctccttatttcggagaagattagcgttgatatcacactcgctttagagagtaaatccagttggcctgcatcgactcaggagggcttgcgaatccagaactggttgtccgcaaaggtgcgtaagcagctccggcttaaacctttctacctggttcctaagcatgccaaagaggggaatggattccaggaagaaacatggcgcttaagcttcagtcacatagaaaaggaaatccttaataatcacggaaaatccaagacctgttgtgaaaataaggaggagaaatgctgtcgtaaggattgcctcaagctgatgaagtacctgttagaacaattaaaagagagatttaaagataaaaaacatctcgataagttttctagctaccatgtgaaaaccgcattttttcatgtttgcactcaaaatccgcaagactctcagtgggatcggaaagatttaggtctctgcttcgacaattgcgtgacttacttcctacagtgcctacgcacggagaaactcgagaactattttatccctgaatttaatctgttcagcagtaacctgatcgacaaacggagcaaggaattcctgacaaaacagatcgagtacgagcgcaacaacgaatttccagtgtttgacgaattctag

SEQ ID NO: 122981 - DNA, 1344 bp, synthetic construct
  misc_feature 1..1344: note = Description of Artificial Sequence: Synthetic coding sequence
  source 1..1344: mol_type = other DNA
atgcagccctggcatggtaaggctatgcagagagcctccgaagccggcgccaccgcaccaaaagcctctgcccgcaatgccagaggagctccaatggatcctaccgagtccccagcagcgccagaggccgcgctgccaaaggccggcaaattcgggcctgcgagaaaaagcggttctcgccaaaagaagagcgcacccgacacacaagagagaccacctgttcgggctacgggagcccgggccaaaaaggccccccaacgtgctcaggacacacagccatcggatgccacttcagccccgggggcagagggattggagcccccagcagctcgagagcccgctcttagtcgcgccggatcctgccgccagagaggtgcccgctgctcaacaaagccccggccaccacctggcccttgggatgtcccttctccagggttaccagtgagtgcaccgatcctggttcgcagagatgctgcaccaggcgctagtaaactccgggcagttttggagaagctcaaactgtctagagatgatatttcaacagctgccggcatggtgaagggagtggtggaccacctgctccttcggttgaaatgtgatagcgccttcaggggtgtgggtctgctcaatacgggtagctattatgagcatgtgaagattagcgcaccaaatgaattcgatgtgatgtttaagctggaggtaccccgtatacagctggaagaatacagcaacacgagggcctattattttgtgaaatttaagaggaaccctaaggagaatccactttctcagtttctggaaggagaaatcctgagtgcgagcaagatgctgagcaaattcagaaaaatcataaaggaagaaataaacgacatcaaggacacagacgtgatcatgaagcgtaagagaggaggatccccagcagtgacgctgctgatttctgagaaaatctccgtcgatatcaccttagcccttgagtcaaagtcttcttggccagcgagtacacaggaaggcttgaggattcagaattggttatctgcaaaggtccgaaagcaacttaggctgaaacctttctatctggtgcccaagcacgcgaaagaggggaacggcttccaggaagagacgtggcggctttctttttctcacattgaaaaggaaattctgaataatcatggtaagtccaagacgtgctgtgagaacaaggaagagaaatgttgccgaaaggactgccttaagcttatgaagtacctcctcgagcagctaaaagagagattcaaggataaaaaacatctagacaaattctcatcttatcacgtgaagacggcattttttcatcggctgtactag

SEQ ID NO: 122982 - DNA, 1080 bp, synthetic construct
  misc_feature 1..1080: note = Description of Artificial Sequence: Synthetic coding sequence
  source 1..1080: mol_type = other DNA
atgatagcagcacaagcaaagttagtatatcacctgaacaagtattataatgaaaagtgccaggccagaaaagccgcaattgctaaaacaatccgagaggtctgtaaggtggtcagcgatgtcctcaaggaggtggaggtgcaggagcccagattcatttcatccttaaacgaaatggataataggtatgaagggttagaggtgatctcccccaccgaattcgaagtggtcctctatctgaatcagatgggcgtgttcaatttcgttgatgacgggtcgttgcctgggtgcgctgtgttgaaactgtctgacgggagaaagcggagtatgagcctgtgggttgaattcattaccgcttcaggttacctatctgcccgtaagatccgcagcagattccagacactggttgcccaggccgtggataagtgttcttatagagatgtagttaaaatggttgctgacacttctgaggtgaaattgcgtatccgggatcggtacgtggtgcaaattactccagctttcaaatgtaccggtatttggccacgcagtgcggctcattggcccctgcctcatattccatggcctggccccaacagagtggctgaagtaaaggcggagggatttaatctgctgtcaaaagaatgccattcgttggccggaaaacagtcctcagccgagtcggatgcctgggtgctccagttcgccgaggccgaaaaccgcctgcagatgggcggatgtcggaaaaagtgtctctccatcctgaaaactctaagggacagacacctagagctgccagggcagcccctgaacaattatcacatgaaaactctcgtgtcttacgagtgcgaaaagcatccgcgcgagagcgattgggacgagagctgcctgggcgaccggttgaatgggatcttactgcaacttattagctgcctccagtgcaggagatgcccacactatttcttgccaaacttagatctgtttcaggggaagcctcattcggctctcgaaaacgccgccaagcagacctggcggttggccagggagatactcacaaatcccaagagccttgagaagttatag

SEQ ID NO: 122983 - DNA, 1176 bp, synthetic construct
  misc_feature 1..1176: note = Description of Artificial Sequence: Synthetic coding sequence
  source 1..1176: mol_type = other DNA
atgtcaggtcctgtccccagccgagcgagggtttatacggatgtcaacacccatcgccctcgtgaatactgggattatgagtcccatgtggttgagtggggcaaccaggacgattatcagctggtccggaaactgggcaggggaaaatactctgaagtattcgaagctatcaacatcacgaacaacgagaaggtggtggtcaagatactcaagcccgtgaagaaaaagaaaatcaaacgtgagatcaagatactcgaaaatcttcgggggggacccaacatcatcaccctcgctgacatcgtgaaagaccctgtttcccgcaccccagccctggtgtttgagcatgtcaataataccgattttaaacaactgtaccaaactctcaccgactatgacatccggttctacatgtatgaaattctgaaggcactggattattgccacagcatgggaatcatgcatagagacgtcaagccgcacaatgtaatgatcgatcatgagcacagaaagttaaggttgatcgattggggtttagccgagttttaccaccccggtcaggagtacaacgtgagggtggctagccggtacttcaaaggaccagagctcctggtggactaccagatgtatgactatagcctggatatgtggtcactcggctgcatgttagcctctatgatctttagaaaagagccctttttccacgggcatgataattatgatcagctggtgcgaattgctaaagtgctgggaactgaagatctatatgattatatcgacaagtacaatattgagctggaccctaggtttaatgacattctgggaaggcactcgaggaagaggtgggaacgctttgtccacagtgagaaccagcatctggtttctccggaggcactagattttctcgacaaacttttacggtacgatcatcagtctcggctaacagccagagaggctatggagcacccctacttttataccgtcgtgaaagatcaggctagaatggggtcttcaagcatgcctggaggctctactcccgtgagcagcgccaatatgatgagtggaatcagctccgtgcctacccctagtccattgggcccactggccggatccccagtgatcgccgcagcgaatccactggggatgccagtacccgccgcagcaggcgctcaacagtag

SEQ ID NO: 122984 - DNA, 1347 bp, synthetic construct
  misc_feature 1..1347: note = Description of Artificial Sequence: Synthetic coding sequence
  source 1..1347: mol_type = other DNA
atgtatccctccaacaaaaaaaaaaaggtctggagggaggagaaagagcgactgctcaagatgaccctggaagagcggagaaaggagtacctacgcgattacattcctctaaattcaatactcagttggaaggaggaaatgaagggaaagggccaaaatgatgaggagaacacccaagagaccagtcaggtcaagaagagtctcactgaaaaagtgtccctgtatcgaggagatataacattattggaggttgatgcgatcgtgaatgcggccaatgcatcactgctaggagggggcggcgtggacggttgtattcacagggccgcgggcccctgtctcctggccgagtgccggaatctcaatggatgtgatactggccacgccaagattacgtgtggctatgatctgccagcgaagtatgtaatccacacagttggcccaatcgcccgcggccacataaatggcagtcataaggaggatctggctaactgctataagagcagtctcaagctggtaaaagaaaataacatccgtagcgtggctttcccatgtatctctacaggtatctatggctttccaaacgagcccgcggcggtcatcgctcttaatactatcaaggaatggctggccaaaaatcatcacgaagtcgatcggatcattttttgtgtgttccttgaagttgacttcaaaatctacaagaagaaaatgaatgagttcttctctgtcgacgacaacaatgaggaagaagaggacgtggaaatgaaggaggatagtgatgaaaacggcccagaggaaaagcagtctgtcgaagagatggaggagcagagccaggatgcggatggcgtgaatacggtgacagtcccgggacccgcctctgaggaagccgttgaggattgcaaagacgaagactttgccaaggacgaaaatataacgaaagggggcgaggtgaccgaccactccgttagagaccaggaccaccctgacgggcaggaaaatgactcgacaaaaaacgagatcaagatcgagaccgaatcacagtcatcttatatggaaacagaggagctttcatctaatcaggaggacgcggttattgtcgaacaacccgaggtgattcctctcaccgaggaccaggaggagaaggagggagagaaagcgcctggagaagacacaccacgcatgcccggcaagagcgagggaagcagcgatctggaaaatactccaggacccgatgttgaaatgaacagccaggttgataaagtaaatgaccctacggagtctcagcaggaagaccaactcattgctggggcacaggacgaggccaaggaacagaggaacggtactaaatag

SEQ ID NO: 122985 - DNA, 642 bp, synthetic construct
  misc_feature 1..642: note = Description of Artificial Sequence: Synthetic coding sequence
  source 1..642: mol_type = other DNA
atgaacgagttcttctctgtcgatgacaacaacgaggaggaggaagacgtggaaatgaaggaagacagtgacgaaaacggacctgaggagaagcagagcgtggaagaaatggaagaacagagccaggacgccgacggggtcaacacagtgactgtccctgggccagcttctgaggaggccgtggaggactgtaaagatgaagacttcgctaaagatgagaacatcaccaagggcggggaggttacagaccactcggtccgagaccaggatcatccagatgggcaggaaaatgactcaactaagaacgagattaaaatcgagaccgagagccagtctagttacatggaaaccgaagaattgagcagtaaccaggaggacgccgtgatcgtggaacagcctgaagtaattcctttgaccgaggaccaggaggaaaaggagggagaaaaggcccccggggaggatacgccacgtatgcctggcaagtccgaaggcagttcagatcttgagaacacacccggtccggacgtagagatgaatagccaggtggacaaggtgaatgatccaactgagtcccaacaagaggaccagctgattgctggcgctcaagatgaggcgaaggagcagcgtaacggaaccaaatag

SEQ ID NO: 122986 - DNA, 642 bp, synthetic construct
  misc_feature 1..642: note = Description of Artificial Sequence: Synthetic coding sequence
  source 1..642: mol_type = other DNA
atgaacgaatttttcagtgtggatgataataatgaggaagaagaggacgtggagatgaaagaagacagtgacgaaaacggcccagaggaaaagcagagtgttgaggaaatggaggagcagagtcaggacgccgacggggttaatacagttactgttcccgggcctgcaagcgaagaggcagtggaagactgcaaggacgaggatttcgccaaagacgagaacatcacaaaaggcggagaagtcactgatcactcggtcagagatcaggaccatccagatgggcaggaaaacgactctacgaaaaatgaaataaagattgagactgagtcccagagctcttacatggagacggaagaactctctagtaaccaggaagatgctgtcattgtagaacaaccggaggtgattccacttacagaagaccaggaggaaaaggagggggaaaaagctcctggcgaagacaccccaagaatgccaggcaagtccgaggggtcttccgacctggaaaatactcctgggccagatgtagagatgaattcacaggtggataaggtgaatgatcctactgagtcccagcaggaagatcagctgatagctggggcccaggacgaggcaaaggaacagcggaatgggacgaagtag

SEQ ID NO: 122987 - DNA, 1068 bp, synthetic construct
  misc_feature 1..1068: note = Description of Artificial Sequence: Synthetic coding sequence
  source 1..1068: mol_type = other DNA
atggcagtgcaggaatctgccgcacaactctcaatgacactgaaagtccaggagtaccctacgttaaaggtaccctacgaaactctcaacaagcgctttagggcagcccagaagaacatagaccgtgagacctcgcacgtgacaatggtagtggccgaactcgagaagacgttgagcgggtgcccagcagtcgactcagtcgtctctctccttgacggcgtggtggaaaagctgtcagtactgaagcgtaaggccgttgagtccatccaagcagaagacgagagcgcgaagttgtgtaagcgccggatcgaacatttgaaagagcactcttccgaccagccagccgcggcatctgtttggaaacggaagagaatggacagaatgatggtggagcacttgttacgatgtggatactataacaccgccgtgaaactcgctcgtcagtcaggcatcgagagttgcctggagtttagcctgcgcatccaggagttcatcgaactcatacgccagaacaaacggttggacgcagttagacatgctaggaagcatttttcccaggcagaaggaagccagctggacgaagttcgccaggcaatgggcatgctagcttttcctcctgatacccacatctctccttataaagaccttttggacccagctaggtggcgtatgctgatccaacagtttagatatgacaattaccgcctccaccagctaggcaataattctgtgtttaccctcactctgcaggccggtctttctgcgatcaagacaccccaatgctacaaggaggacggatcttctaaatcacccgattgccctgtctgctcccggtccctgaacaaattagcgcagcctttgccaatggctcactgtgccaattcacgccttgtctgcaagatctcgggcgatgttatgaacgaaaataacccaccaatgatgctccctaacggatacgtgtatggttacaactcactgttgtctatcaggcaggatgacaaggtcgtgtgcccaagaacaaaggaggtgtttcacttcagtcaggcggagaaggtgtatattatgtag

SEQ ID NO: 122988 - DNA, 1191 bp, synthetic construct
  misc_feature 1..1191: note = Description of Artificial Sequence: Synthetic coding sequence
  source 1..1191: mol_type = other DNA
atggctgtacaggagtctgccgcccagttatctatgaccttgaaagtgcaggagtatccaaccctgaaagtcccctacgaaactctcaataaacggtttcgcgccgcacagaaaaatatcgatagagaaacttcccacgtgacaatggtggtggccgagctcgagaagaccctgtccggttgtcccgcagtggactccgtcgtgtcattgctcgacggcgtggtagagaaactgtctgtcctcaagagaaaagccgtggagtcgattcaggcagaagacgagagcgccaaactatgtaaaagaaggattgagcacctgaaggagcacagctcggatcagccagcagctgcaagtgtgtggaagaggaaacgtatggatagaatgatggtggagcacttgttacggtgtggctattacaatacagccgtgaaacttgccaggcagtccggtattgaggacttggtgaatattgaaatgtttctgacagcaaaagaagtggaagagagcttggagcggcgggagacagccacctgtctagcgtggtgtcacgacaacaaaagcaggctgcggaagatgaaaagctgcttggaatttagcctgaggatccaagaatttattgagctgatccgccaaaacaaaagactggatgcagtcagacatgcccgcaaacatttctcccaggcagaggggtcacagctggatgaggtgcggcaagcaatgggtatgctggcctttccccccgatacacatatttccccttacaaggacttattggatcccgcaaggtggcggatgttaatccagcaatttagatatgacaactacaggctccatcagctgggcaacaactctgtttttaccctgacccttcaggccggcctgtcagccattaagaccccacagtgctacaaggaagatggatcaagtaaatccccggactgcccggtttgttctagatctctgaacaaactggctcaaccccttccaatggctcattgcgccaactcacgcctggtatgcaaaatatcgggcgacgtgatgaatgagaataacccacccatgatgttgcccaacgggtacgtgtacggttataactcacttctatctatccgtcaggatgataaggtagtgtgtcctcggacgaaggaggtgttccatttttcacaagccgagaaagtttacattatgtag

SEQ ID NO: 122989 - DNA, 987 bp, synthetic construct
  misc_feature 1..987: note = Description of Artificial Sequence: Synthetic coding sequence
  source 1..987: mol_type = other DNA
atggccgtacaggagtcagccgctcagctgagcatgaccttgaaggtgcaagaatatcctacgctcaaagttccatacgaaaccctcaacaagaggttccgtgccgcccagaagaatattgaccgcgagacgtcccacgtgacaatggtcgtagctgaactagagaaaacactcagcggctgtccggcagttgactcagtagtgagcctgctagacggtgtggtggagaagctctccgtgctgaagcgtaaagccgtagaatctattcaggccgaggatgagtctgctaagctatgcaaaaggcgaatcgaacacctgaaagagcatagctccgaccagcccgctgccgcttctgtctggaaacgtaagagaatggatcgaatgatggttgaacatctcctcagatgtgggtactataacaccgcggtaaagttagccaggcagagcggaattgagacctgtaagaaggctcttcagccatcccgtcgcgagccagcaggccgaggcgctccaggtcatggccacgcggggctccccgctcggcacgctcacctacccgtacagggtcccagcgggccttgcacggtggccgatgctgatcctgccgtgcctgttcggcagctgccgactacacctgctggcaaacaattttgcgtccacccacaccccgccggatggcccctctctcatcaggaacagtgttataaagaggacggttcttccaaatcccctgattgtcctgtttgctctagatctctcaataaattagctcagcctttgcccatggcacattgcgccaacagccgactcgtgtgtaagatttccggagacgtcatgaatgaaaacaaccctcctatgatgctacctaacggctacgtctatggttataacagtttactctccatcagacaagacgacaaagttgtatgtccacgtaccaaagaggtatttcactttagccaagcagaaaaagtatatattatgtag

SEQ ID NO: 122990 - DNA, 954 bp, synthetic construct
  misc_feature 1..954: note = Description of Artificial Sequence: Synthetic coding sequence
  source 1..954: mol_type = other DNA
atgaccctgaaagtgcaggagtaccctactctgaaggtgccttatgaaaccctgaacaagcggtttcgcgccgcccaaaagaatattgatcgagagacgtcccatgtcaccatggttgtcgccgaacttgagaaaactctgtctgggtgtcccgccgtggactccgtggtgagtttgttagatggcgtggtggagaagttgtcggtattgaagcgcaaggaccttgtgaacatcgaaatgtttctgaccgctaaggaggtcgaagaatccctggagcggcgcgaaactgccacctgtctggcctggtgccacgacaacaagtcccgcctacgcaaaatgaagtcttgtctggagtttagcctaaggatccaggagttcatcgaactgatccgtcagaataagcggctggatgcggtgcggcatgccaggaagcattttagtcaagccgagggaagccagttagatgaagtacgtcaggccatgggtatgttggcatttcctcctgacacccatatctcaccatacaaggacctgctagaccccgcccgttggaggatgctaatccagcaatttagatatgacaactataggctgcaccagctgggaaataacagtgtgttcactctcacattacaggccggattgtcagccatcaagacaccacagtgttacaaggaggatggctcgagcaagagtcctgattgtccagtttgcagccggagcttgaataagctggcgcagccccttccgatggcccactgtgccaattcccggcttgtttgcaagatttcgggcgacgtgatgaacgaaaacaatccgcccatgatgcttccaaacgggtacgtatacggatataatagtctcctgtcaattaggcaggacgataaagtcgtgtgccctaggaccaaagaggtcttccatttttctcaagctgagaaagtctacatcatgtag

SEQ ID NO: 122991 - DNA, 1305 bp, synthetic construct
  misc_feature 1..1305: note = Description of Artificial Sequence: Synthetic coding sequence
  source 1..1305: mol_type = other DNA
atggcagtccaggaatccgccgcacaactgtccatgacacttaaagtgcaggaatacccaaccctcaaagtgccttacgagacccttaataagcgattccgggcagctcaaaagaatatcgatagggaaacttcccacgtgacaatggtggtagccgaacttgagaaaacactgtccgggtgtcccgctgttgacagcgttgtgtccctcctagacggggttgtagagaagctttctgtactgaagaggaaggcggtagagagtattcaggctgaggacgagagtgccaagttgtgtaagcggcggatagaacacttgaaggaacattcctcagaccaaccggcggcagcaagtgtctggaaacgaaagagaatggatcgtatgatggtggaacatctcctcagatgtggctattacaacacggccgtcaaactggctcgacagtcaggtattgaagatttggtcaacatagaaatgtttctgaccgccaaggaggtggaggagtccctagagcgaagagaaacagcaacctgtctggcgtggtgtcacgataacaaatcaagattgagaaaaatgaagggtcgccaaaataaacatgaggcgaagacaggacgaaaaagtcgggccgcctcatcttcacccaaagaatcgctggatcttggcatggagacactcaagggaaagcccgagctctcctgcctggaattttccctgcgaattcaagagtttatcgaactgattcgccagaacaaacggctggacgctgtgcggcatgcaagaaaacatttttcacaggcggagggcagccagctggacgaagtgcggcaggccatgggtatgctggcattccctcccgacacacatataagtccttacaaagatctgttggaccctgctagatggcggatgctgattcagcaatttcggtacgataactaccggctgcaccagctgggaaacaattccgtcttcacgttgacgctgcaggccggattatccgccattaagactccacagtgttataaagaagacgggagctcaaaatctccagattgtccggtttgcagcaggtcactgaataagctggctcagccactgccaatggcgcattgtgcgaactcacgactggtgtgtaaaattagtggggacgtcatgaacgaaaacaacccgccaatgatgctgcctaatggatacgtttacggctataatagcctgctgagcattcggcaagatgataaagttgtgtgtcctcggaccaaggaggtgttccatttcagccaggccgagaaagtgtatattatgtag

SEQ ID NO: 122992 - DNA, 1047 bp, synthetic construct
  misc_feature 1..1047: note = Description of Artificial Sequence: Synthetic coding sequence
  source 1..1047: mol_type = other DNA
atggttgtggccgaacttgaaaagaccctgagcgggtgtccagccgtcgactccgtggtgagtctcctagacggagtggtggagaagctgtccgtgctaaagcgcaaagctgtcgaaagtatccaggccgaggatgaatccgctaaactgtgcaagagacgcatagaacatctgaaggagcatagctccgatcaaccggctgccgcttccgtttggaagcggaagagaatggaccggatgatggtagagcatttgctgagatgcggatactataacactgcagtgaaactggcgcgccagagcggtatcgaagacctggttaatatcgaaatgttcctgacggccaaagaagtggaggaatctcttgagcgacgcgagactgccacatgcctggcttggtgccatgacaataagtcacgcctgcgtaaaatgaagagctgcctggaattcagccttaggatccaggaattcatcgagttgatccgtcaaaacaaacggttggatgccgtgagacatgcaagaaaacacttctcacaggccgagggctctcagctggacgaggtgaggcaggctatgggtatgttggcctttcctcctgacacccacatcagtccatataaggacctacttgatcctgcccgatggcgaatgctgatccaacagtttcgttacgacaactaccggcttcatcagctgggaaacaattccgtattcacactgaccttgcaggcggggcttagcgcaattaagacgccacagtgctataaggaggacggtagtagtaaaagccccgattgccccgtgtgctctagatccctgaataagctggctcagcctctgccaatggcccactgcgccaatagtagactggtgtgcaaaatcagcggggatgtgatgaacgaaaacaatccaccaatgatgctccccaacggctacgtttatggttacaactctctgctgagcatccgtcaggatgacaaagtcgtttgtcctaggaccaaagaagttttccattttagccaagccgagaaggtgtacatcatgtag

SEQ ID NO: 122993 - DNA, 1188 bp, synthetic construct
  misc_feature 1..1188: note = Description of Artificial Sequence: Synthetic coding sequence
  source 1..1188: mol_type = other DNA
atgtggacactgcgcgccacaggtcgcgaggtgggctcatcctcttgcgaggacacagtcgctcccgtaccctatgaaacactcaataaacgctttagagccgcacagaagaacatcgaccgggaaacaagtcacgtcacaatggtggtggctgaactggagaagacactgtccgggtgccccgccgtagactctgtggtttcactgctagacggagtggtcgagaaactgtctgtgctcaagcggaaggctgtggagtctattcaggctgaagacgagtcagcgaagttatgcaagaggaggattgagcatttgaaagagcatagttcagaccagcctgctgccgcttctgtctggaagcggaaaaggatggaccggatgatggtagagcacctgctgagatgtgggtactacaataccgcggttaaacttgccagacagagcggtattgaagacctggttaatatcgaaatgtttctgaccgccaaagaagtcgaagagtctcttgaacggagagagactgccacttgtctcgcttggtgccatgacaacaagtcaagattgcggaagatgaagtcttgtctggaattcagtctgcgaatccaggaatttatcgagctgataagacaaaacaagcggttggatgctgtgaggcacgctcgcaaacactttagccaggcagagggctcccagctcgacgaagtgaggcaggccatggggatgctggcctttcccccagatacacatatcagcccctataaagatctgttggatcccgcccggtggagaatgctcattcagcagtttcgctatgacaattaccgcctgcaccagctcggaaacaactcagtatttaccctaaccctccaggcggggctatcagccattaaaactccgcaatgctataaagaagatggtagttcgaagagcccagattgtcccgtgtgctcaaggtccctcaacaaactggctcaaccgttgcctatggcccactgcgcgaactcaagacttgtctgcaagatctcaggcgatgtcatgaatgaaaataacccccctatgatgcttcccaatggttatgtctatgggtataattcactgctgtcgatcaggcaggatgacaaggtcgtatgtccaaggaccaaagaggtgttccatttcagtcaggctgagaaagtttacattatgtag

SEQ ID NO: 122994 - DNA, 987 bp, synthetic construct
  misc_feature 1..987: note = Description of Artificial Sequence: Synthetic coding sequence
  source 1..987: mol_type = other DNA
atggctgtgcaagagtcagccgctcagctgtctatgaccctgaaggtacaagaatacccaactctgaaggtgccttatgaaaccctgaacaaacgctttcgtgcagcacagaaaaatattgaccgggaaacttcacacgtgacaatggttgtggccgagctggagaagactctttccggttgccccgccgtggactctgtcgtcagtctcttggacggagtggttgagaagctttcagtgctgaagcgcaaagcagtagaatccattcaggcggaagatgagagcgccaagctctgtaagcggcgcatagagcatcttaaagaacactcttcggatcagcccgccgctgcttctgtttggaaacgaaaacggatggaccggatgatggtcgaacacctactgaggtgcgggtactataataccgcggtgaagctggctcgtcagagcggcatcgagacctgtaagaaggccctgcagccaagtcgccgcgaaccagccggcagaggcgcaccggggcacgggcacgcaggcctaccagcccgccatgcccacctgcccgttcaggggccttccggaccgtgtacagtggcggatgctgaccctgccgtcccggtcaggcaactcccaaccactccggctgggaaacagttctgcgtgcatccacaccccgcggggtggcctcttagtcaccaagatacctgctacaaagaagacgggtccagtaagagccctgactgtcctgtttgctcaaggagtctgaacaaacttgctcagcctctcccaatggctcattgcgcaaattcccggctagtgtgcaagatctctggcgatgtgatgaacgaaaataacccccccatgatgttacctaacggctacgtgtacgggtacaattccctgctgagcatccgacaggacgacaaagtggtgtgtccgagaactaaggaagtgttccacttctcccaggctgagaaggtctacataatgtag

SEQ ID NO: 122995 - DNA, 1128 bp, synthetic construct
  misc_feature 1..1128: note = Description of Artificial Sequence: Synthetic coding sequence
  source 1..1128: mol_type = other DNA
atggccgtacaggagagcgctgcccagctttccatgacactgaaagtgcaagaataccccactctgaaagtgccgtacgagacactgaataagagattcagggccgcccaaaagaatattgacagggaaaccagccatgtcacaatggtcgtcgcagaactggaaaaactttccgttttaaaacgtaaagccgtggaatcgatccaggctgaggatgaatccgctaagctttgtaagaggcgtatcgaacatctgaaggaacattcatcggaccagcctgctgcggcctctgtatggaaaaggaagaggatggaccgcatgatggtcgagcatttgctgcgttgcggatactataacacagcagttaagctcgcccggcaatcgggcattgaggatctagtgaacatcgagatgtttcttactgcaaaggaggtcgaagaatccctcgaaaggcgtgagaccgccacatgcctggcatggtgccatgataacaaatctaggctcaggaagatgaaaagttgtttggagttttcactccgaatacaggagttcatcgagcttattaggcagaataaacgtctggacgccgtgagacacgctaggaaacatttttcccaggcggaagggtcccagttagacgaggtccgacaggccatgggtatgctggccttcccacctgatacacatatctctccttataaggatcttctggaccccgcacggtggaggatgctcatccaacaatttcgttacgacaattacagactgcaccagcttgggaacaattctgtgttcactctgacattgcaggcaggcctctcggcaatcaagacgccgcaatgctacaaagaggacgggtcaagcaaatcgcccgactgtcccgtgtgtagccggtctctcaacaaattagcacagccactgcctatggcacattgcgcgaacagcagattggtgtgcaagatcagtggagacgtcatgaatgaaaataatcccccaatgatgctgccaaacggctatgtgtacgggtataattcactgctctcaataagacaggacgacaaggtcgtgtgtcctcgtaccaaggaggtcttccactttagtcaggctgaaaaagtctacattatgtag

SEQ ID NO: 122996 - DNA, 1467 bp, synthetic construct
  misc_feature 1..1467: note = Description of Artificial Sequence: Synthetic coding sequence
  source 1..1467: mol_type = other DNA
atggctcctgcggcatggctgaggtcagcggccgcacgagctctcctgcctccaatgctgttgctgctcctccagccccctcctctcctggctcgcgcactccctcctgacgcccaccacctccacgcagagcgaagagggcctcaaccgtggcatgctgctctgccgtcatccccagctcctgcgccagcaacacaggaagcaccccggccagccagttcactccgcccgcccagatgtggcgtgccagatcctagcgacgggctcagcgctcggaacaggcagaaacgattcgttctaagcggggggaggtgggagaagacggatttgacttatagaatactgcgatttccttggcagttggtgcaggagcaagtgagacaaacaatggccgaggcccttaaggtgtggtctgatgtgacccccctgacgtttaccgaagttcacgaaggccgggccgatattatgatcgacttcgccaggtattggcatggagatgatctaccctttgatggaccaggtggcatcctcgctcacgccttttttcctaaaacacacagagagggagacgtccactttgactatgatgagacctggaccataggggacgaccagggaacggacttgttgcaggttgccgcccacgagtttggacacgtcctgggactccagcacaccacagccgctaaggcccttatgagcgccttctatacctttcggtatccactctccctgagcccagacgactgtcgaggtgtgcagcatctgtacggccagccatggccaacggtcacaagtaggacgccagcactcggcccacaggctgggattgataccaacgaaatcgcccctctagaacccgacgccccgccggatgcttgcgaagcctcctttgatgctgtctccacaattaggggagagttgttcttctttaaagccggattcgtgtggcgattaagggggggtcagttacagccagggtatccggctctggcatcccggcattggcaaggactaccctctcctgtggatgcagccttcgaggacgcacaaggccatatttggtttttccagggagctcagtattgggtgtatgatggagagaagccagttctcggccccgcaccactcaccgagcttgggctggtcaggtttccagtgcacgccgctttagtctggggtcctgaaaaaaataaaatttatttttttcggggcagagattactggcgcttccaccccagcaccaggagagtagacagtccggtcccgaggcgcgcaaccgactggcgcggtgtgccatctgaaatcgacgcagcattccaagatgcagacggatatgcctacttcctgagaggaagactgtactggaaatttgatcctgttaaagttaaggcgttggaaggctttccccgcttagtggggcccgattttttcggttgcgcggagccagccaatacctttctttag

SEQ ID NO: 122997 - DNA, 1563 bp, synthetic construct
  misc_feature 1..1563: note = Description of Artificial Sequence: Synthetic coding sequence
  source 1..1563: mol_type = other DNA
atgagaaacaaaaagatcctgaaagaggatgagctgttgagcgagactcaacaagctgctttccatcaaatcgccatggaaccctttgaaatcaatgtccctaagcctaagcggcgcaatggtgtgaacttttccctggctgtggtagtcatttacctcatacttttgaccgcaggggccggcctgctcgtggtgcaggtgttgaacttgcaggctcggctaagagtgttggagatgtacttcttaaacgacacactggcagcagaggatagccctagttttagtcttctacagtcggcgcacccaggagagcacctggcacagggggcttcacggcttcaggtccttcaagcacagctgacctgggtgcgagtgagccatgagcacctgctgcagcgggtggataacttcactcagaaccccggaatgttccggataaagggcgagcagggcgccccaggattgcaggggcataagggcgccatgggtatgcccggtgctccaggaccgccaggccctcccgcagagaaaggcgcaaagggtgctatgggccgcgacggcgcaacaggaccaagcggcccacaaggtcctccgggcgtcaagggagaggccggactgcagggccctcagggcgctcctggaaagcagggcgctacaggaacccccggaccccagggagagaagggttctaaaggggacggaggccttattggcccgaaaggagaaacaggcactaaaggcgaaaagggtgatctgggcttacccggaagcaagggagatcgcggcatgaaaggggatgcaggagttatgggcccaccaggggcgcagggaagcaaaggggatttcgggagaccgggaccacctgggctggccggattccccggagctaagggtgaccaaggccagcctggactgcagggggtccctggacccccaggcgcagtgggccacccaggggcaaagggggagcccggcagcgccggcagtcccgggcgggccggtttgcccggaagtccggggtctccaggagcgaccggactaaagggatcgaagggggatactgggctgcagggccagcagggcagaaaaggtgagtctggggtgcccgggcccgcgggtgttaagggcgaacaagggtccccgggcctcgccggtcctaaaggggctcctggacaagctggccaaaaaggtgaccagggagtgaaaggctcttctggggaacagggcgtgaagggggagaaaggggaaaggggcgagaatagcgtgtccgtacggatcgttgggagtagcaacagagggcgggccgaggtttattacagcggcacatggggcaccatatgcgatgatgagtggcagaactctgacgcaattgtgttctgcaggatgttggggtactccaaaggccgggctctgtacaaggtcggcgcgggcacaggccagatttggctggacaatgtgcaatgcaggggcacggaatctacgctgtggtcttgcaccaaaaacagctggggccatcatgattgttcgcacgaggaggacgccggggtcgaatgctctgtgtag

SEQ ID NO: 122998 - DNA, 1329 bp, synthetic construct
  misc_feature 1..1329: note = Description of Artificial Sequence: Synthetic coding sequence
  source 1..1329: mol_type = other DNA
atgtacttcctgaatgatactctggccgcggaagactctccttctttctccctcctgcagtctgcccatccgggtgagcatcttgcacagggcgcgagccgcttgcaagtgctgcaggcacagttgacctgggtaagggtgagtcatgagcacctgttacaaagagtagacaattttacacagaaccctggaatgtttaggataaagggggaacagggggctccagggctccaggggcacaaaggtgctatggggatgcccggagctcccggcccaccagggccccctgccgaaaagggggccaagggcgccatggggcgtgatggcgctacgggcccaagcgggccacagggaccacccggagtcaaaggggaggcagggctccaaggaccgcagggagctccaggtaagcagggcgccaccggtactccagggcctcaaggggaaaaaggttccaagggtgatggcggactgattggtccaaaaggggagaccgggacaaagggggaaaaaggcgatctgggactgcctggatcgaaaggcgaccgtgggatgaagggtgacgctggggtgatggggcctccgggcgcccaaggaagcaagggagatttcggtaggcccggcccaccgggcctggcgggatttcccggcgcgaaaggagaccaggggcagcccgggctgcagggagtgcctgggcctccaggagccgtcggacacccgggagccaagggggaacctgggtctgccggaagcccaggcagagccggtctacctgggagccccggctctccaggcgccactggacttaaaggttccaagggagatactggcttgcaaggccagcaggggaggaaaggtgagagtggcgtgccaggacccgcaggagtaaagggtgagcaggggtctcccggcctggccggtcctaaaggggcccccggacaggccgggcagaaaggagatcagggggtgaaggggtcctccggtgagcagggggttaaaggagagaagggcgagcgaggggaaaactctgtaagtgtcaggatcgtgggatcctcaaataggggaagggccgaggtctactactctgggacttggggtaccatttgcgacgatgaatggcagaactctgatgccatcgttttctgccgcatgcttggctactcaaagggacgtgcactgtataaggttggagctggaaccggccaaatttggctcgacaatgtgcagtgcaggggtacggagtctactctatggtcctgtacaaaaaactcttggggacatcatgactgcagccacgaggaagacgcgggcgtagagtgttcagtttag

SEQ ID NO: 122999 - DNA, 1356 bp, synthetic construct
  misc_feature 1..1356: note = Description of Artificial Sequence: Synthetic coding sequence
  source 1..1356: mol_type = other DNA
atggagcagtgggaccacttccacaatcagcaggaggacaccgacagctgcagcgagagtgtgaagtttgacgcgagatccatgaccgccctgcttccccccaaccccaagaattcaccatcattgcaggaaaagctcaaaagtttcaaggcagctctgatcgccctctacttgcttgttttcgccgtgctaatccccttgattggaattgttgctgcacaattgctgaagtgggagaccaaaaactgttcagtttccagcacaaatgccaatgacatcacacagtccctgaccggcaaaggcaacgacagtgaggaagaaatgagattccaggaagtgtttatggaacacatgtcaaacatggagaaacgcattcagcacatccttgatatggaggctaacctcatggacacagagcattttcaaaacttcagcatgaccacagaccagcgattcaatgacattctactacaactgtccactctgttttcttccgtgcaggggcatggcaatgcaattgatgagatatctaagtccctgatcagtctgaatacgacccttctggatttgcagctcaatatcgaaaatctgaacggaaaaatccaggaaaacacgttcaagcagcaggaggaaatctccaaactagaagaacgggtatataacgtgtcagctgagatcatggccatgaaagaggaacaggtgcatctcgagcaagaaattaaaggggaagttaaggtccttaataacataactaacgatctgcggctgaaagactgggaacacagccagacgttacgcaatatcactcttatccaaggcccccccggaccacctggtgaaaaaggggaccgcgggcccaccggagaatccggaccgaggggatttccaggccccattgggcccccagggctgaaaggggatcgcggggctattggattccctggctccaggggcctgccgggttacgcgggtaggccgggtaactccggaccgaagggtcagaagggggaaaagggaagcggtaatactctcacccctttcaccaaagtccgacttgtaggcggcagcggaccgcacgaagggcgagtcgagatattacattctggccaatggggcactatttgtgacgaccggtgggaggtccgcgtgggccaagttgtttgcaggtccttaggttacccgggtgtacaggccgtgcacaaagctgcccactttggtcaagggactggcccgatctggctgaacgaggttttttgttttggcagggaatcttcaattgaggaatgtaaaatcaggcagtggggaacgcgcgcgtgctcacattccgaggatgcaggagtaacctgcacactatag

SEQ ID NO: 123000 - DNA, 1167 bp, synthetic construct
  misc_feature 1..1167: note = Description of Artificial Sequence: Synthetic coding sequence
  source 1..1167: mol_type = other DNA
atggaacagtgggaccacttccacaatcagcaggaagacaccgacagttgctcagaaagtgttaagttcgacgcccgctccatgaccgccctgttgcctcctaaccctaaaaatagcccgagcttacaagagaagctgaaatcttttaaagcagctctgattgcgttatatctgctcgtgttcgcagtgctcattcccctgattggcatcgtcgctgcacagttgttgaagtgggagacaaaaaattgttctgtctcctcgactaacgcgaatgatatcacccagtcacttacagggaagggtaatgactcggaggaggagatgagattccaagaggtgttcatggagcatatgtccaacatggagaaacggatccagcatatcctggatatggaagctaatctcatggacaccgaacactttcagaatttcagtatgactactgatcagcgttttaatgacattctgctgcaactcagcaccctctttagcagtgtgcagggccacggaaacgccattgacgagatctctaaatctttgatctcacttaataccacgcttctggatctgcagttgaacatcgaaaatctgaacggcaagatccaggagaacacatttaagcaacaggaggagatcagtaagctcgaggagcgcgtctacaatgtgtccgccgaaatcatggccatgaaagaggagcaggtgcatctggaacaagaaatcaagggggaggtgaaagttctgaataatatcaccaacgacctgcgtcttaaggactgggagcactcacagaccctcaggaacatcactcttatccaggggcctcccggaccccccggggagaaaggcgatcgtggccctacaggggagagcggtccacggggatttccagggcccattggcccgcctggcttgaaaggcgaccgtggcgccattgggttccctggctccagagggctgcctggatacgctggacgtcctggcaattctggaccaaaggggcagaaaggtgaaaaaggtagcggcaatactttatctaccggaccaatctggttgaacgaggttttctgctttggccgggagtcttcaatagaggagtgcaaaatccgccagtggggcacaagggcttgctctcactctgaagatgccggcgtgacgtgcacactctag

SEQ ID NO: 123001 - DNA, 1167 bp, synthetic construct
  misc_feature 1..1167: note = Description of Artificial Sequence: Synthetic coding sequence
  source 1..1167: mol_type = other DNA
atggaacagtgggaccactttcacaatcaacaggaagacacagattcctgctctgagagcgtaaagtttgacgcacggtcaatgaccgccctgctgccgcccaatccaaagaacagtccctctctccaggaaaagctgaaaagttttaaggccgctctcatcgccttgtatctcttagtgttcgccgttctaattcctctgattggaattgttgccgcacaattgctgaaatgggaaaccaagaattgcagcgttagctctaccaacgcaaatgatatcacccaatccttaactggaaaaggcaacgactccgaggaggagatgcgatttcaggaagtgtttatggaacatatgagcaatatggaaaaacggattcagcacattctggatatggaggctaacctgatggacactgaacattttcagaacttcagtatgactaccgaccagcgatttaacgatatattgctccagctctccaccctgttctctagtgtgcagggccatggtaacgccatcgacgagatcagcaaaagtctgatatcgctgaacaccactctcttggacttgcaattgaatatcgagaatctgaacggaaagatccaggagaatacttttaagcagcaggaggagatctcaaagttagaagagagggtgtacaatgtgagcgccgaaattatggctatgaaagaggagcaggtgcacctagagcaggagataaagggtgaggtcaaggtcttaaacaatattaccaacgacttgcgtctgaaggactgggaacattctcagacgctgagaaatatcacgctaattcaggggcctccgggaccgccaggggagaaaggtgaccgcgggccgacaggcgagtcgggcccacggggattccctggccccattggccccccaggcctgaaaggggacaggggcgccattggctttcctggcagcaggggcctgcctggatatgccggtcgtccaggcaactctggaccgaaaggccaaaagggagaaaagggatctgggaacactctctctactggaccaatatggctgaacgaggtattctgtttcgggcgggaaagctctatagaggagtgtaagatccgccagtggggaacccgcgcatgctcccattctgaggacgccggggtgacctgcactctgtag

SEQ ID NO: 123002 - DNA, 1077 bp, synthetic construct
  misc_feature 1..1077: note = Description of Artificial Sequence: Synthetic coding sequence
  source 1..1077: mol_type = other DNA
atggagcaatgggaccactttcacaaccaacaggaggatacggatagttgtagtgagtcggtgaaatttgacgcacggagtatgacggctcttctgcctcccaatcctaagaactcccctagtctccaggagaagctgaaaagcttcaaagccgctcttatcgccctttaccttctcgtttttgccgtccttatcccccttattgggattgtagccgctcagctcctgaaatgggaaacaaagaactgcagcgtgtccagcaccaatgcaaacgatatcacgcagagcctcaccggcaagggcaatgactccgaggaagaaatgcgtttccaggaggtctttatggagcacatgagtaacatggaaaaaaggatccagcacatccttgatatggaggcgaacttaatggacactgagcatttccagaatttttctatgactacagatcaacgatttaacgacattctgctgcagctgagcacacttttctcatccgtgcaggggcacggcaatgccatagatgagatctccaagtctctgatctccctcaacacgacactgctggacctgcagttgaatatagaaaacctgaatggcaagatccaggagaatacctttaaacagcaggaggaaatttccaagcttgaagagcgggtctataacgtgagcgccgagattatggcaatgaaagaggaacaggtgcacctcgaacaggaaatcaagggggaggtgaaagtgttgaataatattacaaatgacctcaggttgaaggactgggagcacagccagaccttgaggaacatcactctcattcagggccctcctggacctccgggagaaaaaggggaccggggacctacaggggagtccggtcctcgcggattcccagggccgataggccctccggggctgaagggagaccgcggggctattggttttccaggatctcgcgggttgccaggctacgcggggcgccccggcaactccggtcccaaaggccagaagggcgagaagggttcaggcaacaccttacgtcctgtccagctgacagaccacatccgcgcgggccccagttag

SEQ ID NO: 123003 - DNA, 1410 bp, synthetic construct
  misc_feature 1..1410: note = Description of Artificial Sequence: Synthetic coding sequence
  source 1..1410: mol_type = other DNA
atgtgttacctctccgctatcatctccatcagcctcctcaataaaaagcccagtatggagcaatgggaccattttcacaatcagcaggaagacacagactcatgcagtgaatccgtaaaattcgatgcaagatccatgacggccttgcttcctccgaaccctaagaactcgccttccttgcaggagaagctgaaaagtttcaaggccgcattgattgctttgtacctgctggtctttgcagtgttgatcccactaatcggaattgtggccgcccagctgttaaagtgggaaacaaaaaactgctctgtgagcagcactaatgctaacgacatcacacagtctctgacgggtaagggaaacgactccgaggaagagatgagattccaggaggtcttcatggagcatatgtcaaatatggaaaaacggattcagcacatcctagatatggaagctaatttgatggacactgaacattttcagaacttttccatgacaacagatcagaggtttaacgacattttgttgcagttatctactttgttcagctctgttcagggacacgggaatgcaatcgacgaaatttccaaatcattaatcagccttaacactactttgctagacttacagctgaatattgagaacctgaacggaaagattcaggaaaatactttcaaacagcaggaggagatctccaaacttgaggaaagggtgtacaacgtcagcgccgagatcatggccatgaaggaggaacaggtgcatctagaacaggaaataaagggcgaagtcaaggtcctgaacaacatcaccaatgacctgcggctcaaagattgggagcactcccagacgctgagaaacataaccttgattcagggaccacccgggccgccaggagagaagggagaccgcgggcctaccggagaatccgggcctagggggtttcccggacccatcgggcctcctggccttaagggcgaccggggagctattggctttcctggcagccgcggactgcccggctatgccgggcgtccgggtaactcgggcccaaaaggccagaaaggagagaaaggttccggaaacaccctaacaccattcactaaggtgaggctggtgggaggctctggtccacacgagggccgcgtcgaaattctgcactccggccaatgggggaccatctgcgatgaccgctgggaggtacgggtaggccaggtggtgtgcaggagcctggggtacccaggtgtacaggcagtgcacaaggccgctcacttcggtcagggaacggggcccatttggctgaacgaggtgttttgcttcggccgcgagagtagcatcgaggagtgcaagatccgtcaatggggcacccgggcttgtagccactccgaggacgccggggtgacctgcacactctag

SEQ ID NO: 123004 - DNA, 195 bp, synthetic construct
  misc_feature 1..195: note = Description of Artificial Sequence: Synthetic coding sequence
  source 1..195: mol_type = other DNA
atggagcaatgggatcacttccataaccaacaggaggacaccgattcttgctccgagagcgttaaattcgatgcccgctcaatgacggccctactgccgccaaatccaaaaaatagccctagcttacaggaaaaactcaaatcatttaaagccgcgttgattgctctttatctgctcgtgttcgcagtcttgtag

SEQ ID NO: 123005 - DNA, 399 bp, synthetic construct
  misc_feature 1..399: note = Description of Artificial Sequence: Synthetic coding sequence
  source 1..399: mol_type = other DNA
atggcaatgaaagaagagcaggtgcatctcgaacaggaaattaaaggcgaagtcaaggttctgaacaatataacaaatgacctgcggctcaaggactgggagcattctcaaacgctgcgaaacattactctgatccagggccccccaggcccccccggggaaaagggagataggggtcctaccggtgagtcaggacctagaggtttccctggtcccataggaccaccaggattgaaaggggataggggggccattggatttcccggctccagagggctgcctggatacgctggaaggcctggaaacagcggcccgaaagggcagaagggtgaaaaagggagcggcaataccctgcggcccgtgcagctgacagatcacattcgtgccggcccaagttag

SEQ ID NO: 123006 - DNA, 4203 bp, synthetic construct
  misc_feature 1..4203: note = Description of Artificial Sequence: Synthetic coding sequence
  source 1..4203: mol_type = other DNA
atggaactgctcccgccactgcctcagagttttttgctcctactgctgctaccggcgaaacccgctgccggagaggactggcaatgcccaaggacgccatacgctgcgagccgggacttcgatgtgaagtacgtagtgcctagttttagtgctggcggcctcgtccaggcaatggttacctacgagggggacaggaatgaaagcgctgttttcgtggccatcaggaatagacttcatgtgctcggccctgacctgaaaagtgtacaatccctggccactggccccgccggcgatcctgggtgtcagacgtgtgccgcctgtgggcctgggccccatggccctccaggcgacacagatactaaggtacttgttttagaccccgccctgcctgcattagtctcctgcggttcttccctgcaggggagatgcttcctgcacgatttggagccacagggaaccgcagttcatctggcagctcccgcctgcctgttttctgcccaccacaataggcccgacgactgtccagactgtgtcgcctcccccctcgggacccgtgtgaccgtggtggagcaggggcaagcttcttacttctatgtcgcttcctccctcgatgccgccgtggcagcaagcttctcaccgcgcagcgttagcatccggagattgaaggccgacgcatccggattcgctcccgggtttgttgccctctctgtgctgcccaagcacttagtctcctactctatcgaatacgtgcactccttccataccggtgctttcgtgtatttcctgacggtccagcctgcgtctgtaacagatgacccgtctgcccttcatacacgactcgcaaggttatcagccacagagcccgagcttggcgattatcgagagttggtgctagattgcagattcgcacctaaaaggcgcagacggggcgcgcccgaagggggtcagccataccccgtcttgcgtgtggctcacagcgctccggttggcgcgcagttggctactgagctttctatcgccgaggggcaagaagtcctcttcggagtcttcgttactggaaaagacggtggaccaggggtcggcccaaattccgtggtgtgcgcattcccaatagaccttttggacacattgatagacgagggggttgagaggtgctgcgagtcacccgttcacccaggtcttcggcgaggactggatttttttcagtcccctagcttttgcccaaaccccccaggactggaggcgctctcccccaatacctcctgtcgacacttccccttgctggtaagttcatcttttagtcgtgtggacctcttcaacggacttctgggcccagttcaggtgacagctctatacgtaacgcggttggacaacgtaacagttgcccacatgggcacgatggacggtcggattctgcaggtcgaactcgtgcggtccctgaactacctgttgtatgtgagcaacttttccctgggcgatagtggtcagcctgtccagagggatgtttctcggctcggggaccacttgctgttcgcttcaggtgatcaggtctttcaggtgccgatccaggggccagggtgccggcactttctgacctgtggtaggtgtctccgggcctggcactttatgggctgcggatggtgcggcaatatgtgcggacagcagaaagagtgcccaggcagctggcagcaggatcactgccctcctaaattaacagagttccaccctcatagcgggcctctgagaggttctacaaggctgactttgtgcggttctaacttctacctgcacccttctggactggtgcccgaaggaactcatcaggtgacagtcgggcagagcccgtgcagacccttaccaaaggatagctccaaattgcgaccagtgccgaggaaggattttgtggaagaattcgagtgcgagcttgagccgctgggcactcaagccgtgggcccaacaaatgtttctctcaccgttaccaatatgccacccgggaagcacttccgcgtcgatgggaccagtgtgctgagagggttctctttcatggaacctgtattaatcgcagtgcaacccctgttcggtccgagggctggagggacatgtctgacactggaggggcagtccctgagcgtggggacaagtagagctgtgctagtcaacggcacagaatgcctgctcgcgcgggtgagcgaaggccagcttttgtgcgctactccccctggcgcgaccgtcgcaagtgtgcccctttctctccaggttggtggcgctcaggtgcctgggagctggacgtttcagtaccgcgaggaccctgtggtgctgagtatctctcccaactgcggatatataaactctcatatcacgatttgcggacagcacctgacttcggcgtggcacctagttctgtctttccatgacgggctgagggccgttgaaagcagatgtgagaggcagctgccagagcagcagctgtgtagattaccggagtacgtggtccgggatcctcagggctgggtggcgggcaatcttagcgctcgcggggatggcgcggcaggctttaccctgcctggattccgttttctccctcctccacaccctccctctgcaaacctcgtgcctctgaaacccgaggagcatgctataaaattcgagtacataggtctgggagccgtcgcagattgcgtgggtattaacgtcaccgttggtggtgagagttgccagcatgaatttcgcggcgatatggtggtctgccccttgccgcccagtctccagcttggccaggatggcgcgccactgcaagtgtgtgtggatggagaatgccatatactcggacgagtagtccgcccgggacccgatggagttccgcagagcacactgttgggtattctgctgcccctgctcttgctggtcgccgcactggccacagctctggttttctcatattggtggaggaggaagcagttggttctcccacccaacctgaatgatctggcctctctggatcagactgctggcgctactccattgccgattctttacagcggctcagactatcgatctggcctggctttgcctgccatagacggtttggatagcacaacgtgcgtccacggtgcctcattttcagactcggaagatgagagctgtgtcccattgttacggaaagagtctatccaactgcgcgaccttgacagcgcgctcctggctgaggtcaaggacgtcctaatccctcacgaacgcgtggtcacccactcagatagggtcattggcaaagggcattttggcgtcgtctatcatggagagtatatcgatcaggcccagaatcgaatccaatgtgcaattaagagtttgtcaagaatcactgagatgcagcaagtggaagcatttctaagggaggggctcctcatgcggggcctgaatcacccaaatgtgttagctctgatcgggattatgcttcccccggaggggctgccacatgtcttgctgccatacatgtgtcatggcgacctcctgcagttcatccgttcccctcagcggaatcccacagtcaaggatctaatcagttttggactacaggtagcaaggagcatggagtatctggctgagcagaaatttgtgcaccgggatcttgcagctcggaattgtatgctcgacgagtcttttaccgtgaaagtagctgacttcgggctggctcgagacatcctggatcgcgaatactattcagtgcagcagcacaggcatgcacgtttgcctgtgaaatggatggcccttgagtccctccagacctatcggtttacaacaaagagcgacgtgtggtccttcggcgttctgttgtgggagctcctcacaaggggcgctccaccttacaggcacatcgatcccttcgatctgacccattttctggcacagggacggcgtctcccccagccggagtactgtccagactccctctatcaggtgatgcaacagtgctgggaggcagacccagctgttaggcccactttccgggtcctcgtgggggaggtcgaacaaatagtgagcgcgctgctgggagaccactacgtgcaattgcctgcaacatatatgaatctcgggccctcgacctcccatgaaatgaatgtacggcccgagcagccccaattttctccaatgcccggtaacgtgcggaggcccagacccctctccgaaccaccccgacctacttag

SEQ ID NO: 123007 - DNA, 4056 bp, synthetic construct
  misc_feature 1..4056: note = Description of Artificial Sequence: Synthetic coding sequence
  source 1..4056: mol_type = other DNA
atggaactgttgccgcctctgccacagtcttttctcctcctgttgctattacctgctaagcctgctgccggggaggactggcaatgcccccgcactccctatgcagcatcacgtgactttgacgtcaagtacgtggtgccatccttcagcgctggcgggctcgtgcaagcgatggtgacatacgagggcgacaggaatgagtccgcagttttcgttgctattagaaataggctgcatgttctcggccccgatctcaagagtgtccagtcgctcgctaccgggcccgccggcgacccaggttgccagacatgcgcagcctgcggaccggggccccatggccctcctggcgatactgacaccaaggtcctggtactggaccctgcgttgcccgcactggtgtcttgcggtagtagtctgcagggccgttgctttttgcacgatctcgaaccacaagggacagctgtgcatttagccgcacctgcctgtctgttttcagcacatcataaccggcccgacgattgcccagactgtgtggcctcacctctgggcacgcgtgtcaccgtggtcgagcagggccaggctagctacttctacgtggcctcatctctggacgccgccgtggccgctagcttttcgcctcggagcgtgtccatcaggcggctgaaggccgatgcgagcggatttgccccaggctttgtggccttgtcagtgctgccaaaacacctggtttcctactctatcgagtacgtgcactctttccacacaggggctttcgtctactttcttaccgtccaacccgcgagtgtgaccgatgacccttccgccctgcacacaaggcttgcaagactgagcgctacggagccggaacttggcgactaccgcgaactagtgctagactgtcggtttgctcctaaaaggaggcgccgcggtgcaccggaaggaggacagccatacccggtgctgcgggtggcccacagcgctcccgttggtgcccagctggccacggaactgagcatcgccgaaggacaggaagttctgttcggagtgttcgtgactgggaaggacgggggacctggagtgggacccaattccgtggtgtgtgccttccccatcgatctcctggacaccctgattgacgagggcgtagagcggtgctgtgagtctcctgtgcatcctggcttgagacgagggcttgacttcttccaatcaccatctttctgtccaaatccaccagggctcgaggcgctatcccccaacacgtcttgtcgacacttccctctcctcgtgtcatcgagttttagccgcgttgacttatttaacggactcctgggcccggtccaggtcaccgcactctatgttacaaggctagataacgtcaccgtcgcccatatgggaaccatggatggacgtatcctgcaagtggagctggtgcgatcactcaactacttactttatgtgtcaaatttcagcctcggcgactccggccagcctgtccagagggatgtgtccaggctcggtgatcacttgctgtttgcatccggggaccaggttttccaggtgccaattcagggacctggttgtcgtcactttctaacgtgcggaagatgtctcagagcctggcactttatgggatgtggctggtgcggtaacatgtgcggacaacaaaaggagtgccccggcagttggcaacaggatcattgccctccgaagctgaccgaattccacccccacagtgggcccctccgcggtagcaccagacttacgctctgtgggagtaatttttatctccacccgagtggacttgtccctgaaggaacacaccaggtgaccgtgggtcaatctccatgccgccccttgcccaaggactcctccaaactccgtcccgtaccacgcaaagacttcgtcgaagaatttgagtgtgagctagaacccctcggcacacaggccgtgggccccacaaacgtttcactgacagtcacgaacatgcccccagggaaacattttcgtgttgacggtacttccgttttgcgcgggtttagctttatggagccagttctgattgcagtgcagcccctattcggcccccgggccggcggaacctgcttgacactcgaagggcagtctcttagcgtgggtacctctagagccgttttagtgaatggaacagagtgtctactggcgagggtgtcagaaggccagctgctttgtgccaccccgccaggcgccaccgtggcgtctgtccccttgtccctgcaggtgggcggagcccaggtgcccggatcttggacattccaataccgggaagatccagtggtgctctctatcagccccaattgcgggtacattaactcccacatcacaatctgcggccaacacctaaccagtgcctggcacctcgtcctgtcctttcatgacggactgagagcagtggagtctaggtgtgaacggcagctcccagagcagcagctttgtcgtctgccagaatacgtcgtgcgggatccccagggctgggttgctggtaatctgagcgctcgcggcgatggagccgccgggttcactttaccggggtttcggttcctcccccctcctcacccacccagcgctaacttggtgcctctcaaacccgaggagcacgctatcaagtttgaagtctgtgtggatggggagtgtcatatcctaggcagagtggttagacctggtcccgatggtgtgccccaatccactctactgggcatcctgctgccgctgctcctcttggtcgctgcacttgccaccgctctggtgttcagttactggtggcgaagaaagcagctggtgttgcctccaaatttaaatgacctcgcctcactggaccagaccgccggtgccaccccgctgccgatcctctactctggctccgattatcgctccggtcttgccctccctgccatagatggactggactcgacaacatgcgtccacggggctagctttagtgacagtgaggacgaaagctgtgtccctctgctgcggaaggagtctattcaactgcgcgacctggactccgctctcttggccgaagtgaaagatgtgctgatccctcacgagagggtcgttactcattcggatcgtgtaataggcaagggccactttggcgtcgtgtaccacggtgagtatatcgatcaggctcagaatagaatccaatgtgccatcaagagcttatcacgtatcacggaaatgcaacaggtggaggcctttctgcgggaaggcctgctcatgaggggactgaaccacccaaatgttcttgcgctgatcgggattatgctccctccagaaggactcccgcatgttttgttgccttacatgtgccacggagatcttctgcaatttatccgttcaccccagcgcaatcctaccgtgaaagatctgatctcatttggtttacaagtggcccgctcaatggaataccttgcggagcaaaaatttgtgcaccgcgatttggccgctagaaattgtatgctggacgagagcttcaccgtaaaggttgcggattttggtttggcccgtgacatccttgacagagagtactactcagttcagcagcaccgccacgctcgccttcccgtaaaatggatggccttggagtctctgcagacctataggttcaccacaaagagcgatgtctggtctttcggggtgctgctgtgggaacttctgactcgcggcgcccccccatacaggcacattgaccccttcgatctgacccacttcctagcacagggtcgtaggctgcctcagccggaatattgtcccgattccctgtaccaggtgatgcagcagtgttgggaggctgacccagcggttaggcccacattccgcgtcttggtgggcgaagttgagcagatagtatcggcattactgggcgatcattatgtccaactgccagcaacgtatatgaacctcgggccttctacgtcacacgagatgaacgtgcgcccagagcagcctcagttttctccaatgcccggcaacgtaagacgccccaggcctttgtccgagcctccgagacccacttag

SEQ ID NO: 123008 - DNA, 2157 bp, synthetic construct
  misc_feature 1..2157: note = Description of Artificial Sequence: Synthetic coding sequence
  source 1..2157: mol_type = other DNA
atggaggacctgggcgagaatacaatggtactcagcacactgagatcactcaataacttcatctcccagagggtcgaagggggaagcggccttgatatttcaacgtccgcccccggaagccttcaaatgcagtatcaacagtccatgcagctggaggaacgcgccgaacagatcaggagcaagtctcacctaatacaggtcgagcgggaaaagatgcagatggagctgagccacaaacgggcacgtgtggaactggaaagagcggctagtacttcagctagaaattacgaaagggaggtggataggaaccaggaacttctgacgcgcatcaggcagttgcaggagcgtgaggctggagctgaagagaaaatgcaggagcagctggaaaggaataggcaatgtcagcagaatttggatgccgctagcaagcgattgagagagaaagaggactccctggcccaggccggcgaaacaattaacgcgctgaagggaaggattagcgaactgcagtggtctgtcatggatcaggagatgagagtgaagagactggagtctgaaaaacaagaactccaggagcagttggacctccagcacaagaaatgtcaggaggctaaccagaagatacaggaactccaggcttctcaggaggcacgggccgatcacgagcaacagatcaaggacttagagcagaagctgtcactgcaagaacaggacgccgcaatagtaaagaatatgaaatctgaactggtgcgcttgccccggttggaaagagagctcaaacagctgagagaggagtcagcccacctgcgggaaatgcgggaaactaacggtctgctccaggaggaactggagggactgcaacgtaagttaggaagacaagagaaaatgcaggaaacgctcgtcggattggaacttgagaacgagaggctcctggctaagctgcagtcttgggaaagacttgatcagactatggggctgtctatccgcacgccagaggatctgtcccggtttgtcgttgaattacagcagagggagctggcactcaaagacaaaaactctgcggtgacatccagtgcccgcggactcgagaaggctaggcagcagctgcaggaggagctccgccaggtctccgggcagctgctggaggaacgcaagaagagggagactcacgaggccctcgcaagacgtttacagaaaagagttctgctgctcacaaaagagcgtgacggaatgcgggccattctgggaagctatgacagcgagctcacaccagcggagtattctccacagttgactagaagaatgagagaagctgaagacatggtgcagaaggtgcattcccattccgctgagatggaggctcagctaagccaggctttggaggaactgggcggccagaaacagcgggcagatatgttggagatggagctcaaaatgcttaaaagccaatccagctcagctgagcagagctttctgttctctcgcgaagaagcagataccctgcgattaaaggtggaagagctggagggcgaaaggtcgcgattggaggaagagaagagaatgttagaggcccaactggaaagacgcgctctacagggagactatgatcagagccgaactaaagtacttcacatgtcactgaaccccacctccgtcgctaggcagcgtctccgggaagaccattctcagctgcaggccgaatgcgagagactgcgcgggctcctgagggctatggagaggggaggcaccgtgcccgccgacctcgaagctgcagctgcgagtcttccttcatccaaggaggtcgccgagttgaaaaagcaggttgaatcagcagaattgaagaatcagcggctcaaagaggtatttcagaccaagatccaagaattcagaaaggcgtgctatacactgacgggctatcagattgatatcactacagaaaaccagtaccggctgactagcctgtacgccgagcaccctggggactgtctgatcttcaaggcgacatctccctctggaagcaagatgcagctgctggagaccgaatttagccacacagtcggcgaacttatcgaggtgcatctgcggcgtcaggactctatccctgcttttcttagcagcctgactctggagcttttcagccggcagaccgtcgcatag

SEQ ID NO: 123009 - DNA, 2157 bp, synthetic construct
  misc_feature 1..2157: note = Description of Artificial Sequence: Synthetic coding sequence
  source 1..2157: mol_type = other DNA
atggaggatttgggagaaaatactatggttctctccacactgaggtccctgaacaacttcatatcacagcgggttgagggtggaagcggccttgacatctccactagcgctcccggctctctccagatgcaatatcagcagtcaatgcagctggaggaacgcgctgagcagataagatcaaagtcccacctcatccaagtggagagagagaaaatgcagatggaactgagccacaaacgggcaagagtcgagttggagagagcagctagcacctcggcacgaaactacgaacgcgaggtagacaggaaccaggagttacttacacggatcagacagctgcaggaaagagaggccggtgcagaagaaaaaatgcaggagcagctggagagaaacagacagtgtcagcagaacctagatgccgcgtccaagcggctcagggaaaaggaggattctcttgctcaagctggggagaccattaacgcgctcaagggccgcattagtgagctccagtggagtgttatggaccaggaaatgagagttaagcgattggagagcgagaagcaggaattgcaggaacaattggatcttcagcataaaaagtgtcaggaagcgaaccagaagatccaggaactgcaggcaagccaggaggcacgcgcagaccacgagcagcagattaaagacctggagcagaaattaagtctccaggagcaagatgcagccatcgtgaaaaacatgaaaagtgagctggttcgactgccccgccttgagcgcgaactgaaacagcttcgtgaagagtctgctcatctgcgcgaaatgcgtgagacgaatggtttactgcaggaggaacttgaaggactgcagcgaaagctcgggaggcaggagaagatgcaagagacattggttggactggaacttgagaacgaacggcttctggctaagttgcagtcttgggaacggcttgatcagacaatggggctaagcatacggacccctgaagacttaagccgctttgttgtcgagctgcagcagagagaactggccctaaaggataaaaactccgccgtaacctcatcagctaggggtctggagaaggcccggcagcagttgcaggaggaactacgccaagtcagcggacaactgctcgaagaaagaaaaaagcgggaaacccacgaggcactcgcacggcggctgcagaagcgggtcttactcctgaccaaggagcgggacggcatgagggccatactgggttcttacgattcggagctgacacccgcagaatatagtccacagctgacccgccgcatgcgggaggcagaagatatggtgcagaaggtgcacagccacagcgctgagatggaggctcaactttcccaagccttagaagagctgggcgggcagaagcagcgggctgatatgctggaaatggaacttaagatgctcaaatcccaatctagctcagcagaacagagcttcctattcagtagggaagaggcagatacattgaggttgaaagtggaggagctggaaggggagcgatcacgactggaggaagaaaaacgtatgctcgaggcccaattggagcgacgtgccttgcaaggcgactatgatcagtccaggacaaaggtgcttcacatgtcactgaacccaaccagcgtggctaggcagcgcctccgcgaggaccattctcagttgcaagcagagtgtgagcgcttgagggggttacttcgagccatggagcggggtggcaccgtgcctgctgatttggaggcggcggccgccagcctcccctcgtccaaagaggttgctgaactcaagaagcaggtcgagtctgcagagctaaaaaatcagaggctgaaggaggtcttccagacaaagattcaggagtttcggaaagcatgctacaccctcactggataccagatcgacattaccactgagaatcagtacaggttgacctccctgtatgctgagcatcccggcgattgcctgattttcaaggccactagtccatcaggctctaagatgcaacttctggagaccgaatttagccacacagtgggcgaactgattgaggtccacttgcggcgccaggatagtatcccagcctttctgagttctctcactctcgaactcttcagcagacagacagtggcctag

SEQ ID NO: 123010 - DNA, 1881 bp, synthetic construct
  misc_feature 1..1881: note = Description of Artificial Sequence: Synthetic coding sequence
  source 1..1881: mol_type = other DNA
atgctgccggcgaggggctgcgtaagaaagcggacggtgtggcctcgcctggcccgcgtactcatcgttaccctgctgacccttgagttgagctacgctccgttaccgtgtcagttatctggcgttccatacaacaccggagatcctgtagggcggtgggcccgcccatgtatttggccttgtccctggcacactacaatcaacgctctcaagggccggatttctgaactccaatggtctgtaatggaccaggagatgagagtgaagcgtctcgaatccgagaaacaggaacttcaggagcagctggacttgcaacacaagaagtgccaagaagccaatcagaagatacaggaactccaagcaagccaagaggcgagagccgaccacgagcagcaaatcaaggacctcgagcagaagctgtctctgcaagaacaagacgcagccattgtgaagaatatgaaatctgagctggtccgcctcccccgcctggagcgggagctgaagcagctcagagaggagtctgctcacctgcgtgagatgagagagacaaatggtctgctccaggaggagctggaaggtcttcagcgaaagctgggccgacaagagaagatgcaggagacgctcgtgggcctggaactggagaatgagcgactcttggcaaagctgcaatcatgggagagattagatcagacaatggggctgtccatccgcactcccgaggatctatcacgcttcgtggtcgagctgcaacagcgggaacttgcattaaaggataaaaatagcgccgtcacctcctcagcacggggtttggagaaggcccgacagcaactgcaggaggagttgagacaagtgtccggacagttgctagaggagcgcaaaaaacgagaaacacatgaggccctcgctcgaagactgcaaaagagagtgctcttgctgacaaaggaacgtgacggaatgcgggccattttgggctcttatgactcagagcttactcctgccgaatattctcctcaactcactaggcgcatgcgcgaagccgaggatatggtacagaaagtgcatagccatagcgccgaaatggaggcacagctgagccaggcactggaagagctgggcggccaaaagcagcgagctgatatgctggagatggagctgaagatgttgaaaagtcagtcctcttcagctgagcaatcattcctgttctcccgagaagaagcagacacactgagactcaaagttgaggagcttgaaggcgagcgatcccgactggaagaggaaaaaaggatgttggaagcccagctcgagcggcgcgccctacaaggggattacgaccaatcacggactaaggtgcttcacatgtcactgaacccaactagtgttgcccgacagagattgagggaggaccatagccagcttcaggccgaatgcgagcggctgagaggcctgcttcgggctatggagcgaggagggacggtgccagccgacctggaagctgccgctgctagtcttccatctagtaaagaagttgctgaactgaagaagcaggttgaatccgccgagctaaagaatcagaggctgaaagaggtcttccaaacgaagatacaggaattccgcaaggcctgttacaccctcaccggttatcagatcgatatcaccaccgagaatcagtataggctgacaagtctatatgcggaacatcctggtgattgcctgatattcaaggctacaagtccctccggttcaaagatgcagctgctcgagaccgagttcagccatactgtgggcgagttgatagaagtccaccttaggcggcaggacagtattccagcatttctgtcaagcctgacacttgaactattcagcagacagaccgttgcctag

SEQ ID NO: 123011 - DNA, 2157 bp, synthetic construct
  misc_feature 1..2157: note = Description of Artificial Sequence: Synthetic coding sequence
  source 1..2157: mol_type = other DNA
atggaggacctcggcgagaatactatggttctttcgaccctcagatctctgaataattttatcagtcagcgggtggaaggtggtagtggccttgacatcagtacctcggcccccggatccctgcagatgcaatatcagcaatccatgcagctggaggaacgtgccgagcaaattagatccaagtctcacctcatccaggtcgaaagggagaagatgcagatggaactttctcacaaaagagccagggtggaactagagcgtgccgcctccacctccgctaggaactacgaacgagaagtggaccgaaatcaggaactgctcacacggattcgccagcttcaggaacgggaggcaggtgctgaggaaaaaatgcaagaacaactggaaaggaatagacagtgtcagcagaatctagatgccgcctctaaacggctgcgggagaaagaggattccctcgctcaggccggtgaaacaatcaatgctctcaagggccgaatcagtgagttacagtggtcagtgatggatcaggagatgagagtgaagcgtctggaatctgagaagcaggaactgcaggagcagctggacctgcaacacaaaaagtgccaagaggctaatcagaaaatccaggagctacaggccagtcaagaagcccgggccgatcacgaacagcagatcaaagacttggagcagaagctgagccttcaggagcaggacgccgccatcgtaaaaaacatgaaatctgagctcgttcgactgccgcgactagaacgtgagttgaaacagcttcgggaggagtcagcccatctcagagaaatgcgggaaactaacggtctgcttcaggaagaactcgagggcctacagcgtaagttggggagacaggaaaaaatgcaggagacactggtgggcctggaactggagaacgaaagacttctggctaaattacagagctgggaacgactggatcaaacaatgggcctcagcatccggaccccagaggacctatcccgttttgtggtggagctgcagcagcgggagctggccctgaaagataaaaattctgccgtgacatcgtcagcacgtggcctggagaaggcccggcagcagctgcaggaggaactgaggcaggtcagcggtcagctgctagaggagcgaaaaaaacgcgagacccacgaggcgctggcgcgcaggctccagaagcgtgtgctattgctcacaaaagagagggacggaatgagagccattctgggcagctatgatagcgagctgacacccgccgaatacagtcctcaattgactcgccgaatgcgagaggctgaggatatggtccaaaaggtccattctcactctgcagagatggaagctcagctgtcacaggccctggaggagttgggaggacaaaaacagcgggctgatatgctggagatggagctgaagatgctaaagtcccagtcttctagtgccgagcagagttttctcttctcccgggaggaagcggacacattacgactcaaggtggaggaactggaaggcgaaaggtcaaggttggaagaggagaagaggatgctggaggctcaactcgagcggagagcactccagggggattacgaccaatccaggactaaggtattgcatatgtctctgaacccaacctccgtcgctcggcagcgactgagagaagatcattcacagcttcaggctgaatgcgagcgtctccgcggcctgcttagagctatggagcgaggtggcaccgtgcccgcagatctggaagccgcggctgcttccctgccatcctcaaaggaggtggccgagctcaagaaacaagtggaatcagccgagctgaaaaaccagaggctaaaagaagtctttcaaaccaagatccaggagtttcgcaaggcttgctacacactcacaggctatcagatagatataacgacggagaatcagtaccgactgaccagcctgtatgcagaacatcccggtgattgtctcatcttcaaggccacctctccatccgggagcaagatgcagctcctcgagacagagttcagtcatacagtaggggaactgattgaggttcacctgcggagacaggatagtattcccgccttcctctctagcctgactttagagctgttctcccgacaaacagtcgcctag

SEQ ID NO: 123012 - DNA, 474 bp, synthetic construct
  misc_feature 1..474: note = Description of Artificial Sequence: Synthetic coding sequence
  source 1..474: mol_type = other DNA
atggaagacctaggggaaaacaccatggtgcttagtaccctcagaagcctgaacaatttcatcagccagagggtggaagggggttcaggactggatatttctacgtcggcgcctggatccctgcagatgcagtaccagcagagtatgcagctggaagaacgggcggagcaaatccgtagtaagtctcatcttattcaggtggaacgagagaaaatgcagatggagttgagccacaaaagggcccgcgtcgagctcgaaagagcagcatccaccagcgcacggaattatgaacgcgaggtcgaccggaaccaagagctgctgacccgaataagacagctccaggagcgcgaagcgggagctgaggagaagatgcaggagcagttagaacgaaacagacagtgccagcagaatttggacgctgcttcaaagcgcctgcgtgaaaaggaggactctctagcccaggcaggcgaatag

SEQ ID NO: 123013 - DNA, 810 bp, synthetic construct
  misc_feature 1..810: note = Description of Artificial Sequence: Synthetic coding sequence
  source 1..810: mol_type = other DNA
atgcgggaactggagttcgcaaagctcgaatgctgtctcgcttggcagctccaggcatcacggagagaactggagatggaattaaaaatgttgaagagccagagcagctcagcagagcagtcttttctgttctcccgggaggaagctgataccttacgcctgaaagtcgaagaacttgaaggagagagatcacggttggaggaagagaagaggatgctcgaggcacagttagagcgacgggctctccagggagattatgatcagtcccgcacaaaagtgcttcatatgtccctgaaccccacatcagtggcccgccaaaggctgagggaggaccacagtcaactccaggcagagtgtgagcgcttgagaggactgcttcgagccatggagcggggcggcacggtacccgctgacttggaggctgccgccgccagcctgccttcttcaaaggaggtcgccgaacttaagaagcaggttgaaagcgctgaactaaagaatcagcgcctgaaggaagtattccagacaaagatacaggaattccgcaaagcctgctacaccctaaccgggtaccagatcgacatcaccacggaaaaccagtataggctgacttctttgtatgcggagcaccccggcgactgtttgatcttcaaggctactagtcctagcgggagcaagatgcaattgcttgaaacagaattcagtcacaccgtcggggaacttattgaagtccacctccggcggcaagacagtatcccagcattccttagcagcctgaccctggaacttttcagcagacaaacagtagcctag

SEQ ID NO: 123014 - DNA, 618 bp, synthetic construct
  misc_feature 1..618: note = Description of Artificial Sequence: Synthetic coding sequence
  source 1..618: mol_type = other DNA
atggctctccagttgtcacgggagcagggcatcaccttgagggggtccgccgagatagtggccgagttttttagtttcggtatcaatagcattctgtaccaaagggggatctacccatccgagacatttaccagggttcagaaatacggcctgacattacttgtcacaaccgacttggaactgataaagtatcttaacaacgtggtcgagcaacttaaggattggctgtacaaatgcagcgtccagaagctggtggtggttataagcaacatcgagtccggcgaggttctggaaaggtggcagttcgacatcgagtgcgacaaaacagctaaagacgattccgctccacgggagaagtctcagaaagccattcaggacgaaatccgaagcgttattcgtcagataactgctactgtcacctttctgccattgctggaggtgtcatgtagcttcgatctattgatatacacggataaggatctcgtcgtgcccgaaaagtgggaggagtccggcccgcagtttataacaaactctgaagaagtgagattgaggtcttttactaccacaatccataaagttaactcaatggtggcttacaagatcccggtgaatgactag

SEQ ID NO: 123015 - DNA, 1212 bp, synthetic construct
  misc_feature 1..1212: note = Description of Artificial Sequence: Synthetic coding sequence
  source 1..1212: mol_type = other DNA
atgccaaaccgcaaggcctccaggaacgcatattactttttcgtgcaagagaaaatcccagaattacgtagacgaggcttgcccgtggcgagagttgctgatgcaatcccctattgtagtagcgactgggccaagcctgtgtttactcctcttcgaaggcctggcatgctggttcctaaacaaaacgtgtcgccacccgatatgtccgctctctcacttaaaggtgatcaggctctgctcggaggcatcttctattttctgaacatcttctcccacggcgagctgccccctcattgtgaacagagatttctcccctgtgaaattgggtgcgtgaaatacagcctgcaggaaggcatcatggctgactttcatagctttattaacccaggcgagatccctcgtggtttcagattccactgtcaagcagccagcgattcctcccacaagattcccattagcaactttgagcgcggtcacaaccaggccactgtactgcagaacctgtaccgcttcatccatcccaatccaggaaactggccacctatttattgtaaatccgatgatcggacccgggtgaactggtgtctgaaacatatggccaaggccagcgagatacggcaagacctgcaactgctgacagtcgaagatcttgtggtgggcatctaccagcaaaagtttctgaaggagcctagcaaaacttggattcggagcctcctggatgtggccatgtgggattatagctcaaatacgagatgcaagtggcatgaggagaacgacatccttttttgtgccctcgctgtttgcaaaaaaattgcctactgtatctctaacagcctcgctacgctgttcggaattcagctaactgaagctcatgttccactgcaagactacgaggcaagtaacagtgtcacacccaaaatggtcgtacttgacgcgggtcggtaccaaaagttgcgtgtaggatcctccggattctcccactttaatagcagcaatgaagagcagcgttctaacaccccgattggagattatccatctcgcgccaaaatcagtggtcaaaactcttccgtacgaggccgcgggatcactagattgcttgaatcaatctccaactcttctagtaatatccataagttcagcaattgcgacactagtctatctccctacatgagccaaaaagatggttacaagtccttctccagcctctcttag

SEQ ID NO: 123016 - DNA, 1305 bp, synthetic construct
  misc_feature 1..1305: note = Description of Artificial Sequence: Synthetic coding sequence
  source 1..1305: mol_type = other DNA
atgcctaataggaaagccagcagaaacgcttactatttttttgtgcaggaaaaaattcccgaactaaggcgcaggggcttgccggtcgcaagagtcgctgatgccatcccttactgttccagcgactgggccctgctgcgggaggaggaaaaagagaaatacgccgagatggcacgggaatggagggcggcccaggggaaggatcccggtccttctgagaagcagaaaccagtgttcaccccgctccgccgaccaggaatgctagtgcctaagcaaaacgtttcccccccggacatgagtgctctgtctcttaagggagaccaggcactgcttggaggaatattctatttcctgaacatctttagccatggagagctgccaccacattgtgagcagcgcttccttccatgcgagatcggatgtgtaaagtattctctgcaagaagggataatggcagacttccatagctttattaatcccggagaaattccgcgcggttttaggttccattgccaggctgcttctgacagcagccataaaatacctatttcaaattttgagagggggcataaccaagccaccgtgctgcagaacctctatcggttcattcatccaaatcccggaaattggcctcccatttattgtaagagcgatgacaggacacgcgtgaactggtgcctcaaacatatggcaaaagcctccgagatcaggcaggacctgcagttattgactgtggaggatctggtcgtgggcatctatcaacagaagttcttgaaggaacctagtaagacttggatacggtccctgctcgacgttgccatgtgggattatagcagtaatacacggtgtaagtggcacgaggagaacgatatactcttctgcgccctggccgtgtgtaagaagattgcttattgcatcagtaattccctagcaaccctgttcggaatccagctgacagaggcacatgtacccctgcaagactatgaggctagcaactcagtgactccaaagatggtagtcctggatgctgggcgataccagaagctaagagtcggatccagcggatttagtcatttcaattctagtaatgaggaacaacggagcaatacccccataggcgactatccttcccgcgcgaagatttcaggccagaattcctctgttaggggtcgaggtataactagactgttagagtctatcagtaactcttcttctaacatacacaaattctcaaattgtgataccagcctaagcccctatatgtctcagaaagatggctacaagagcttttctagcttaagctag

SEQ ID NO: 123017 - DNA, 951 bp, synthetic construct
  misc_feature 1..951: note = Description of Artificial Sequence: Synthetic coding sequence
  source 1..951: mol_type = other DNA
atgccgaaccggaaagcaagtagaaacgcctactacttttttgtgcaggaaaaaatcccggagttgaggcggcggggtctgcccgtggcacgcgtggctgatgcaattccttattgctctagcgattgggcaaagccagtgttcacgcctctgaggagacctggcatgctggttcctaagcaaaacgttagtccgcctgatatgagtgccctctcactgaaaggagatcaggcactgctggggggcatcttttactttctcaacattttttcccatggggaattgccaccccactgcgagcagcgattccttccctgtgaaatagggtgtgttaaatatagtctgcaggaaggaataatggcagatttccactcgttcatcaaccccggggaaataccaagaggcttcaggttccactgtcaggctgcaagcgacagctcccataagatccctatctcgaactttgagcggggccacaaccaggctaccgttctgcagaacctgtatcgattcattcacccaaatccaggcaactggccaccaatctactgcaaaagtgacgaccggactcgggtcaattggtgcctgaagcatatggctaaggccagcgagatccggcaagatctccagctactaactgtggaggatctggtggtgggcatctaccagcaaaagtttctgaaggagcccagcaagacctggattcggtctcttcttgacgtggccatgtgggattactcaagtaacacgagatgtaagtggcacgaggaaaatgacatactattttgtgctctcgctgtgtgcaagaaaattgcttattgtattagtaattctctggctactctgttcggcatccaactgactgaagcccacgtgcctttacaggactatgaggctagcaacagcgtgactcccaaaatggtagtgcttgatgccggaagatatcaatag

SEQ ID NO: 123018 - DNA, 471 bp, synthetic construct
  misc_feature 1..471: note = Description of Artificial Sequence: Synthetic coding sequence
  source 1..471: mol_type = other DNA
ctgctccagcgatgcaagtggcatgaggagaacgatatactcttctgcgcactcgccgtttgtaagaaaatcgcctactgcattagtaacagtcttgctacacttttcgggatacagctgaccgaggcccacgtgccacttcaggactacgaggcgagcaattctgtgacacccaaaatggttgttctggatgccggacgatatcaaaaattacgcgtgggatctagtggcttctcacactttaatagctcgaatgaggagcaaagaagtaacacaccaattggtgactacccgtcccgggccaagatctccggtcagaatagctccgtgagagggaggggcatcactcggctcttggagtccatcagtaactcatcctcaaatatacacaagttttccaactgcgatacatctctcagtccgtatatgtctcaaaaagacggttataagtccttcagttctctgtcatag

SEQ ID NO: 123019 - DNA, 747 bp, synthetic construct
  misc_feature 1..747: note = Description of Artificial Sequence: Synthetic coding sequence
  source 1..747: mol_type = other DNA
atggaccaaagacagagaaggattcttgggcaaccactgagcatccccacatcccaaccaaagcagaagcgcacttctatgatttcattcttctccaaggtatcatggaaattacgatttcaaaaacgcgaacccctcaagaacgtatttttcatactcgccgagcgcgcccgcgacccatcagccaagaagcgtcacatggcaatgagaaacctcggcactatggcgtacgaagcaccagacaaagtgcgcaagtataagaaaatcgtgctcgatctgttagtatacggactgtacgatcctgtcaacctggaggtgatccatgaatctatgaaaaccttgacggtggtccttggcaagattcagggaaaggggctggggagcttctttatcgatattaccctgcagaccaggactctgctagatgatgagaacgacagcctcagatacagcgccttcgtgcttttcgggcagctcgctgccttcgccggccgcaaatggaaaaaattctttacttcgcaggtgaagcagactagggatagtttgctgatccacttacaagatcgaaatccccaggtggctaaagcgtgtaaaaccacgttccaagcctgcagcccgtatttgaaactgaaagaggagtacagctttcagtcggaggaagatcagagaaataccaagctttatcagcagctcagccattatcatcccgaaatcctccagttcttttacgccaacaaaatactttag

SEQ ID NO: 123020 - DNA, 747 bp, synthetic construct
  misc_feature 1..747: note = Description of Artificial Sequence: Synthetic coding sequence
  source 1..747: mol_type = other DNA
atggaccagcgccaaaggcgcatactggggcaacccctaagcatccctactagccaaccaaagcagaagaggacctctatgatttcttttttttcaaaagtaagctggaaactcagattccaaaaacgcgaacccctgaagaacgtcttctttatcctcgctgagagggccagggatcctagcgcaaaaaaaagacacatggccatgcgaaatctgggaactatggcctatgaagctcccgacaaggtgaggaaatacaagaagatcgttctggatctgctggtatatgggctctacgatccagtaaacctggaagtgattcatgaaagtatgaagacacttactgtggtgctgggaaaaattcagggcaaaggtctgggatccttctttatagacatcacactacagactagaacacttctggacgacgagaacgattccctgcgctactcggccttcgtactgttcggacagctcgcagcatttgcgggtagaaagtggaagaaattcttcacgagtcaggtgaagcagactcgggacagcctacttatccatctccaggaccggaatcctcaagtggccaaagcctgcaaaacaacctttcaggcctgtagcccctacctgaaactgaaagaggagtacagttttcaatctgaggaggatcagagaaatactaagctctatcagcagcttagccattaccacccggagatattgcagtttttctatgcaaacaaaattctttag

SEQ ID NO: 123021 - DNA, 591 bp, synthetic construct
  misc_feature 1..591: note = Description of Artificial Sequence: Synthetic coding sequence
  source 1..591: mol_type = other DNA
atggaccaacgccaaaggaggattcttggccagcctctgagtattcccacatcccaacccaaacagaaacgcacctccatgatttctttcttcagcaaagtctcgtggaagttacggttccagaagcgtgagccattaaagaatgtgttctttattctagcagagagagcgcgggatccatccgcgaagaagaggcacatggcaatgaggaacctgggcaccatggcttacgaggcaccggacaaagtgaggaagtataagaagattgtgctcgatctgctggtgtacggcctttatgaccctgtcaatctggaggttatccatgagagcatgaagacactcacggtggtccttggaaaaatacagggaaaaggtctgggtagctttttcattgacataactctgcagaccaggaccctgctggatgatgcatgtaaaaccacatttcaggcctgctctccctatttaaagctcaaggaggagtacagcttccagagtgaagaagatcagcgcaacacgaagctatatcagcagctgagtcattaccaccctgagattttacagtttttctacgcgaacaagattctctag

SEQ ID NO: 123022 - DNA, 633 bp, synthetic construct
  misc_feature 1..633: note = Description of Artificial Sequence: Synthetic coding sequence
  source 1..633: mol_type = other DNA
atggcctgggggtcgaagggcatccaaggatgggaaaatctggccgagagcagccatttggccactactcgcgagtcgtctcctccagagtcaggcacaggtagcggctcttcccgagggtcacggctccaagagccccaggtaagttggaaattaagattccagaagcgcgaaccattgaaaaatgtatttttcatacttgctgaaagggcaagggacccatctgccaagaagaggcacatggccatgcggaatctgggcacaatggcttatgaggcgcccgacaaggtccgtaagtacaagaaaatagttctggatctgctcgtgtatggtctttatgatccggttaacctcgaggtgatccatgagtctatgaaaacccttaccgtggtcctggggaagattcagggcaagggcctgggttccttcttcattgatataactttgcaaacgcgaacactactggatgatgcctgtaagaccactttccaggcttgtagcccttatctcaagctcaaagaggaatactcttttcaaagcgaggaagatcagcgcaacacaaaactgtatcagcaactgtctcactaccacccggagatcctgcagttcttttacgcaaacaagatactgtag

SEQ ID NO: 123023 - DNA, 789 bp, synthetic construct
  misc_feature 1..789: note = Description of Artificial Sequence: Synthetic coding sequence
  source 1..789: mol_type = other DNA
atggcatggggcagcaagggaatccagggatgggagaacctggccgagtcctctcacctggccaccacgcgggaatcctcacctccagagtcgggcactggctccggttcctcacgcggatcgaggctgcaggaaccacaggtctcatggaagctgcgctttcagaaacgggaaccgctcaaaaacgtgttttttattctcgcagaacgagcaagagacccatctgccaaaaaacgacacatggctatgcgcaaccttggtactatggcatacgaggcccccgacaaagtgaggaaatataaaaagatcgtgcttgacctgctggtgtatggcctgtatgacccagttaacctggaagtgattcatgagagtatgaaaacactgacggtggtcctgggaaaaatccagggcaagggattgggctccttcttcattgatatcacacttcaaaccagaaccctgctggacgacgagaacgactcccttcgatacagcgctttcgtcttgttcggacagctagccgcatttgccggcagaaagtggaagaaattctttacatctcaggtgaaacaaacccgtgacagtctactcatccacctccaggaccgcaacccgcaggtggctaaggcttgtaagaccactttccaggcatgtagcccatacttgaaactcaaggaggaatactcctttcagtcagaggaggatcagaggaatactaaactatatcagcagctaagccactaccaccctgagattttgcagtttttttacgctaataagatcctgtag

SEQ ID NO: 123024 - DNA, 591 bp, synthetic construct
  misc_feature 1..591: note = Description of Artificial Sequence: Synthetic coding sequence
  source 1..591: mol_type = other DNA
atggaccagagacagaggcgaattttgggtcaacccctcagtatcccgacatcccagccaaaacaaaagagaacttcaatgatctcattctttagcaaagtgagctggaaactacggtttcagaaacgagagcctttgaaaaatgttttctttatcttggctgaaagagccagagaccccagcgcaaaaaagcgacacatggctatgcgaaacttgggaacaatggcttacgaggcccctgacaaggtaagaaaatataagaaaatcgtgcttgacctcctcgtatatgggctctatgatccagtaaatttagaagtgattcatgagagcatgaagacacttaccgtggttttgggaaaaattcagggcaagggcctgggatctttttttatcgatatcacactccagacgcggaccctcctggacgatgcttgtaagacaaccttccaggcctgcagtccctatctgaagctgaaggaggagtatagtttccagtccgaggaagatcaaagaaatactaagctttatcagcagctgtctcactatcatcccgagattctgcaattcttttacgcaaacaagatattatag

SEQ ID NO: 123025 - DNA, 771 bp, synthetic construct
  misc_feature 1..771: note = Description of Artificial Sequence: Synthetic coding sequence
  source 1..771: mol_type = other DNA
atgaagttgctggaaaacagtagtttcgaagcgattaattctcagctaaccgttgaaactggcgacgcccatattatagggagaattgaatcatactcctgcaagatggccggcgacgataaacacatgtttaagcagttttgccaagaaggtcaaccccatgtcctagaggccctgtcccccccgcagacatctgggctgtctccatctcgtttgtctaagtcccagggcggagaagaagagggacctttgagcgataagtgcagccgcaagacccttttttatcttatcgcaaccctgaacgaaagctttaggcctgattatgacttctcaacagcccgaagtcacgagttctctcgtgagcctagtctgtcttgggtggtcaatgccgtcaactgcagcctattctctgcggtgcgtgaggattttaaagatttaaagcctcagctgtggaatgccgtggatgaggaaatatgcttagccgagtgtgatatctattcttacaaccctgaccttgacagcgatccttttggcgaggacggatccctgtggtctttcaattactttttctacaataagcggctgaaaagaatagtatttttctcctgcagaagcatttctggatccacatacacacctagcgaggccggcaatgagttggacatggaactgggtgaggaggaggtcgaggaagagtcccggagtggaggatccggagccgaagagaccagcacaatggaagaagatagggttccggttatctgcatctag

SEQ ID NO: 123026 - DNA, 213 bp, synthetic construct
  misc_feature 1..213: note = Description of Artificial Sequence: Synthetic coding sequence
  source 1..213: mol_type = other DNA
atgaagctgttggaaaatagttcgtttgaagccatcaactcccagctgacagtggagactggggacgcacatatcatcggcagaatcgaatcctatagttgcaagatggcaggagatgacaagcacatgtttaaacagttttgccaggagggtcagccacacgtattagaagcactctcccctccgcagacgtctggtctctcaccaagttag

SEQ ID NO: 123027 - DNA, 771 bp, synthetic construct
  misc_feature 1..771: note = Description of Artificial Sequence: Synthetic coding sequence
  source 1..771: mol_type = other DNA
atgaaacttctcgagaacagttcattcgaagccattaacagccagctcacagtggaaaccggggacgcccacataataggcaggattgaaagttattcatgcaaaatggcgggagacgacaagcatatgtttaagcagttttgtcaggaagggcagccacacgttctggaggcactctcacccccccagacatccgggctctcaccttcccggctgagcaagagtcagggtggggaagaagagggtcctttgtccgataagtgctcacgaaagacactgttttacctgattgcgacactaaacgaaagcttccggcctgattacgactttagcacagcccgatcccatgagttttcgcgcgagccctcattgagttgggtcgttaacgcagtgaattgttccctgtttagcgcagtacgagaagacttcaaggatttgaaacctcagctctggaacgccgtagacgaagagatctgcttggccgagtgtgacatttattcttataatccagatctggacagtgatccgtttggtgaagatgggtccctctggtcttttaactacttcttctataacaagaggctgaagagaatcgtcttcttttcttgcaggtccatatcaggatcaacatacacaccttctgaggccggaaatgaactggacatggaacttggcgaagaagaggttgaagaggagtctcgatctggcgggagtggagcagaagaaactagcaccatggaagaggatagagtcccggtcatttgtatatag

SEQ ID NO: 123028 - DNA, 1104 bp, synthetic construct
  misc_feature 1..1104: note = Description of Artificial Sequence: Synthetic coding sequence
  source 1..1104: mol_type = other DNA
atgcgtaaagggaaaggccctatctgtctcttcagcaggcctacgcttaggccaagccgctctaaagtgtccctgattgagggccggggagccaacatggctgcccgttggcggttctggtgcgtgtccgtgacaatggtggtggctcttctcattgtctgtgatgttccgtccgcttcagcccagagaaaaaaagagatggtcctgtctgagaaggtctcccaactcatggaatggacaaataagaggccggttatacggatgaatggtgacaaatttcggagattggtgaaagcaccgccgcgtaattatagcgttattgtgatgttcaccgcactacagttacacagacagtgcgtggtgtgcaaacaagccgatgaggaatttcagattttagcaaactcttggcgatactcctctgcatttacaaacaggatatttttcgcaatggtggattttgatgaaggaagcgacgtttttcagatgcttaatatgaattcagcccctacattcatcaactttccggcaaaggggaagccaaaacgtggagacacttatgagctgcaggtgagaggcttctccgccgaacaaattgcgcggtggattgccgacagaaccgacgttaacatccgggtcatcaggccaccaaactatgctggccccctgatgctaggactcctgctcgccgtgattggaggcctcgtgtacctcagacggtctaacatggagttcctcttcaataaaaccgggtgggccttcgccgctttgtgcttcgtccttgcgatgacgtccggccagatgtggaaccatattaggggaccaccttacgcccacaagaatccccacacaggacacgttaattacattcacgggagctctcaagcccagttcgtggctgagacccatatagtgctactgttcaatggtggcgttactctgggcatggtgttattgtgcgaagccgcaacctctgatatggacatcggtaaacgcaagattatgtgcgtggccggcatcgggctagtggtgctgtttttttcctggatgctgtcaatatttagatcaaagtaccacgggtacccatattcttttctgatgagttag

SEQ ID NO: 123029 - DNA, 657 bp, synthetic construct
  misc_feature 1..657: note = Description of Artificial Sequence: Synthetic coding sequence
  source 1..657: mol_type = other DNA
atggtggactttgatgaggggtcagacgtgtttcaaatgctgaatatgaacagcgccccgacattcataaattttccagccaagggaaagcccaaacgtggggacacctacgagcttcaggtccggggatttagcgctgaacagatcgcccgctggattgccgaccgcacagatgtgaatatcagggttattagacctcccaactatgcgggtcctctcatgttgggcctgctgctggcggtgattgggggccttgtgtacctgcgtagaagcaacatggaattcctgttcaataagacagggtgggccttcgctgccctgtgctttgtgctggccatgacatcaggacagatgtggaaccacattcgaggtcccccgtatgcgcataaaaacccccacacaggacatgtgaattacattcatggcagcagccaggcccagttcgttgctgagacccacatcgtcttattgttcaatgggggggtaacccttggaatggttctgctttgcgaagccgccaccagtgacatggacatcggtaaacgcaagattatgtgtgtcgcgggaatcggcctcgtggtgcttttctttagctggatgcttagcatctttcgtagtaagtatcacggctacccctactcattcctcatgtcctag

SEQ ID NO: 123030 - DNA, 330 bp, synthetic construct
  misc_feature 1..330: note = Description of Artificial Sequence: Synthetic coding sequence
  source 1..330: mol_type = other DNA
atggaaagtgacttttatcttcgatactatgtgggacacaaaggcaagtttggtcatgagttcctggaattcgagttcagacctgatggcaagctgcgatacgccaataatagtaactacaaaaacgacgtaatgatccgtaaagaggaactggagattgtgatcggggacgagcatatcagctttactacgagtaagatagggtcactgatagacgtcaaccaaagcaaagatccagaaggattaagagtgttttactatcttgtacaagatctaaagtgtttagtgttcagtctcatcggcctgcactttaagatcaagccaatctag

SEQ ID NO: 123031 - DNA, 441 bp, synthetic construct
  misc_feature 1..441: note = Description of Artificial Sequence: Synthetic coding sequence
  source 1..441: mol_type = other DNA
atggagtccgatttttacctgcggtactacgtgggccacaaggggaaatttggccatgagtttctggaattcgaatttcgccctgatgggaagttgagatatgcaaacaattccaattacaaaaacgacgttatgattaggaaggaggcatatgtccacaagtctgttatggaggagctgaaacgcattatagatgatagtgagatcacgaaggaggacgatgcactgtggccaccccccgatagggttggacggcaggagctcgagatcgttataggcgatgaacacatttcatttaccacctctaagatcggctcactgatcgatgtcaaccagagcaaggacccagagggacttagagtattctattacctggtacaggatttaaagtgcctagttttttccttaatcggtctgcactttaagataaaacccatttag

SEQ ID NO: 123032 - DNA, 1731 bp, synthetic construct
  misc_feature 1..1731: note = Description of Artificial Sequence: Synthetic coding sequence
  source 1..1731: mol_type = other DNA
atgggctccatcctgtccagacggatcgctggcgtggaagacatcgatatccaggccaattccgcataccgctatcccccaaaatctggaaactatttcgcctctcatttcttcatgggaggcgagaaatttgacactccccaccccgagggttatctgttcggggaaaatatggatttgaactttctagggtcgagaccagtccaatttccctacgtcacaccagcccctcacgaacctgtaaagactttaaggagcttggtgaacattcgcaaggactccttacggctcgttcgttacaaggacgacgcagattcgcctactgaagatggggataaaccgcgagtactgtatagcctggaattcacttttgatgcagatgcaagagtggccattaccatctactgtcaggcttccgaggagttcctaaacggtagagctgtctatagccctaaatccccgtccctccaatctgagacagtccattacaagcgcggagttagccagcagttttcccttccatcttttaaaatcgatttctccgagtggaaggatgacgagctgaacttcgatctcgacagaggcgtatttcccgtggtgattcaagctgtggtagatgaaggcgatgtggtcgaggtgactggtcacgcacatgttctgttagccgcattcgagaaacatatggacggttccttctccgtgaagccgctgaaacaaaaacagatagtggatcgagtgagctacctgctccaggagatctacggcatcgaaaataaaaataatcaggaaactaaaccaagcgatgatgaaaactcagataactctaatgagtgcgtggtctgcctgtccgacttgagagataccctgatcctgccgtgtcgacacctgtgtctctgcactagctgtgcggatacccttcgctatcaagcaaataattgtccaatatgcagacttcccttcagggcgctattacagattcgggctgtgcggaagaagccaggtgcactttcacctgtgagctttagtcccgtgcttgcccagtctctggaacacgatgaacacagctgcccatttaaaaagagcaaaccccaccccgcttcacttgcctccaagaagcccaaacgcgaaacgaactccgactcggtgccacctggctatgaaccaatctcgctgcttgaggcactgaacggattaagagcagtgtcccctgcgattcctagcgcccccctgtacgaggaaattacctattccggaatctcagacggtttgagccaagcaagctgcccactggcagctatcgaccatattctggactcgtcacgccagaaaggacgaccccagtctaaggcccctgattcaaccttgaggagtccttcctcaccgatccacgaagaggatgaggagaaactgagtgaggacgtggacgccccgcctccattaggaggagctgagctagccttgcgggagagcagctcgcccgaaagttttatcacggaagaggtggatgagagctcatcacctcagcaaggtacccgagcagcttcaattgaaaacgtgctgcaagatagcagtcctgaacattgtggtagaggaccacccgctgacatataccttcccggccgccctacatccatggaaacagcacatggtctcgccactacttctcccacatggccgcccctgggtggtccctcccctgatccctccgccgccgaactgacacctttatag

SEQ ID NO: 123033 - DNA, 1659 bp, synthetic construct
  misc_feature 1..1659: note = Description of Artificial Sequence: Synthetic coding sequence
  source 1..1659: mol_type = other DNA
atgggctcaatcctttcaaggcgaatcgctggtgtagaggacatcgatatccaggctaatagtgcctaccgctaccctcccaagtccggaaactatttcgcatcgcacttctttatgggaggagagaaatttgatacccctcaccctgaagggtatttgttcggagagaatatggacttgaacttccttggttccaggcctgtgcaatttccatatgtgacccccgctcctcacgaaccagtgaagactctgaggtccctggtgaacattcgcaaggactccctgaggttggtcaggtacaaggacgatgctgactctcccacggaagacggtgacaaaccaagagttctttattccctagaatttactttcgacgcagacgccagagtggccatcacgatttattgccaggctagcgaggaattcctcaacggccgcgctgtctactctcccaaaagcccctccctgcagtccgagaccgtgcactacaaacggggggtctcccagcagttcagtttgccctcattcaaaatcgacttttctgaatggaaggacgatgaattaaacttcgacctggacagaggagtatttcccgtcgtcattcaggccgtcgtcgacgagggggacgttgtcgaagtgacaggccacgcccacgttctgctggccgccttcgagaagcatatggatggctctttttcagttaaacctctcaaacagaaacaaattgtcgatagagtgtcatacctcctgcaggagatttatggtattgagaataaaaacaaccaggagaccaaaccgagtgacgatgagaactctgataactccaatgaatgtgtggtgtgtctctcagacttacgtgacacgctgattctcccctgccgccatctgtgtttgtgtacgtcctgcgcggacactctgcgttatcaagcgaataattgtccaatatgcaggttaccatttcgcgcactgctccaaatcagggccgtgcggaaaaagcctggagcactctctccagtttcttttagccccgtgttggcccaatcactggagcacgatgagcacagttgtccgtttaaaaagagtaagccacacccagctagcctggcttcaaaaaagcccaaaagagagacaaactcagattcggttcctccagggtatgagcccatctccttgctggaggcactgaatggcctgagggctgtctcaccggccatcccttctgcaccattgtatgaggagatcacctattccgggatcagcgatgggctctcccaggccagctgtccacttgcagctattgaccatatccttgactcttctaggcagaaggggagaccccagagcaaggcgcccgattcgactctgcgctcaccctcttctccaatacacgaggaggacgaagaaaagttgagtgaggacgtggacgctcctcctccattggggggagccgagctggctctaagagagtccagctcgcctgagtccttcattaccgaagaagtagatgaatcttcttcaccccaacagggtacacgagctgcaagcattgagaatgtgctgcaggattctagtccagagcactgtggcaggggaccaccggccgatatttaccttccagccctgggacctgacagttgcagcgtcggcattgacgaatag

SEQ ID NO: 123034 - DNA, 1596 bp, synthetic construct
  misc_feature 1..1596: note = Description of Artificial Sequence: Synthetic coding sequence
  source 1..1596: mol_type = other DNA
atgggttcgattctgtccaggcgcatcgcgggagttgaggatatcgatattcaggccaactcggcctaccgctatcctcccaagtccggaaactatttcgcttcacacttctttatgggcggtgagaagtttgatacaccgcaccctgaggggtatctgttcggggaaaacatggacctgaacttcctgggctcccgcccagttcaattcccctacgtcacccccgccccacatgaacccgttaaaacccttagatccctggtcaacattagaaaggactcactgaggctagtgcgctacaaagatgatgcagacagccctaccgaggacggagacaagcctcgggtgctgtattcattagagttcaccttcgatgctgacgctcgggttgcaatcacaatctattgtcaagcctcagaggaatttctaaacggcagggccgtttacagccccaagtcgccctcactccaaagtgagactgtgcattacaagcgtggcgtgtcacagcagttcagcctacccagtttcaaaattgacttcagtgagtggaaggatgatgagcttaattttgacctggaccggggagtcttccctgtcgtcatccaggctgtggtcgacgaaggagacgctgtggtagaagtgaccgggcatgcacacgtgcttcttgcagcttttgagaagcacatggacggctccttcagtgtcaagcctcttaagcagaaacagatcgtggatagggtgtcgtatttactgcaggaaatctacggcatcgaaaacaaaaacaaccaggaaaccaagccgagcgacgacgaaaattctgataattcaaacgagtgtgtggtgtgcctatctgacctgcgggacaccctcatcctgccttgccgccacctatgcctttgtacatcctgcgctgacaccttgagatatcaagccaacaactgtcctatttgtcgactgccgttcagggccctccttcagatccgagccgtgcggaagaaacctggtgcactgtcacctgtgtcatttagcccagtgctggcacaaagcctggagcatgacgaacacagtaattccgactccgtgcccccaggctacgagcccatctctttgctggaggctctgaacggcctccgggcagtctcacctgccatcccttctgcgccgttgtacgaggaaatcacttacagcggcatttcagatgggctcagccaagcatcttgtcccctggctgcaattgaccatattctggacagttcccgacaaaagggaaggccccagagtaaggcccccgattcaacgctccggtccccaagtagtcccatacatgaggaggacgaagagaagctttcagaagatgttgacgcaccccctcctctggggggcgccgaactcgccctcagagaaagtagttctcccgagagcttcattaccgaggaagtggatgagtcttcctcccctcaacaggggacccgggccgcatcaatagagaacgtcttacaggatagctctcccgagcattgtggtcgggggccccctgcggacatctacctgcctgccctaggccctgattcctgcagtgtagggattgatgagtag

SEQ ID NO: 123035 - DNA, 963 bp, synthetic construct
  misc_feature 1..963: note = Description of Artificial Sequence: Synthetic coding sequence
  source 1..963: mol_type = other DNA
atgggaagcatcctctcccgccgcatcgctggagtcgaggacattgacattcaagctaactcagcttacaggtaccctcctaagtccggcaattatttcgccagccatttttttatgggaggcgagaaattcgatacaccacatcctgagggatatctgttcggtgagaatatggacttaaacttccttggttcccggcccgtgcagttcccctatgtgacacctgctccacacgaacctgtcaagactctcagaagtcttgtgaacatcagaaaagatagcctaagactggtgaggtataaggatgatgccgacagcccgaccgaagacggggataaaccaagggtgctctattcgctcgagtttaccttcgacgccgatgcaagggtagccattaccatttattgccaggcttccgaagagttcttaaacgggagggcagtctatagtcctaaatcaccctctctgcaatctgaaacagttcattacaagcgaggcgtgagccaacaattctctcttcctagttttaagatcgacttctccgaatggaaggacgacgaactgaatttcgatctggatagaggcgtttttccggttgtcatccaggctgtagtcgacgaaggcgacgtagtggaagtgacaggccacgcccacgtgctattggcggcatttgaaaagcatatggatggtagcttcagcgtgaagccactaaaacagaagcagatcgtcgacagggtgtcatatcttttacaggaaatctacggaatcgagaacaaaaataaccaggagaccaagccgtcagacgacgagaacagtgataacagtaacgaatgtgtcgtgtgtttgagtgatctccgcgacaccctgattctcccctgccgacatctttgtctctgtacaagttgtgcggacacactgcgatatcaagccaacaactgtccaatttgtaggttgcagctgtag

SEQ ID NO: 123036 - DNA, 1632 bp, synthetic construct
  misc_feature 1..1632: note = Description of Artificial Sequence: Synthetic coding sequence
  source 1..1632: mol_type = other DNA
atggctaagggtgagggggcagaatctggctctgctgcaggcctattgcccacttccatccttcagagcaccgagagaccggctcaagtgaaaaaagaaccgaaaaaaaaaaagcagcaactgtcggtgtgcaacaagttatgctacgcgttaggaggcgcgccctatcaggtcactggttgtgctctgggctttttcttgcagatatacctacttgatgtcgcacagaaggacgaagaagtggttttttgcttttcttcttttcaggtcggccctttttccgccagcatcattctgttcgtgggaagagcctgggatgcaataaccgacccactcgtcggcctgtgtatcagcaagtccccgtggacatgtctgggtagactgatgccttggatcatcttctctaccccactggccgtgatcgcatacttcctcatctggttcgttcctgactttccccatggtcagacctattggtatctgcttttttactgtctcttcgaaacgatggtgacctgttttcacgtgccttatagcgcattgaccatgtttatttctaccgagcagacagagagggattccgccactgcctaccgtatgaccgtcgaggtcctcggaacagtgctggggaccgcaattcagggtcagatcgtaggtcaagcagataccccctgctttcaagacctcaacagcagcacagttgcctctcaatccgcaaaccacacccacggcaccaccagccacagagagacacaaaaggcgtacctcctggcagcaggcgtgatcgtgtgtatatacataatctgtgctgtgatcctgatcctgggcgtccgcgagcagcgtgaaccatatgaggcacagcagagcgagcccattgcctatttcaggggtctgcgcctggtgatgagtcatggaccttatatcaaactgattaccggtttcctctttaccagtctggcctttatgctggtggaggggaacttcgtgcttttctgcacctatactctcggatttaggaatgagtttcagaacctgctgctggcaatcatgctctccgctacacttaccatcccgatttggcagtggtttctgacacgcttcggcaagaagactgcagtatatgtaggaatcagctctgccgtgcctttcctgatcctggtggcactcatggaaagcaaccttatcatcacatatgcagtcgctgtagctgccggtattagcgtggctgcagcctttttgttgccatggtctatgctccctgatgttatagacgacttccacctgaagcagcctcattttcatggtaccgaacccatcttcttcagcttctacgtgttttttaccaaatttgcctcaggtgtttctctcggcattagcactctgtcccttgattttgccggctatcaaacccggggatgtagtcagcccgagagagtgaagttcaccctcaatatgctcgtgacaatggccccaatcgttctgatcctactgggtttgttgcttttcaaaatgtaccccattgacgaggaaaggaggcgacagaacaagaaagctctgcaggcattgcgggatgaagcgagctcttcaggttgctccgagactgattctacggaactcgcatcaattctctag

SEQ ID NO: 123037 - DNA, 1593 bp, synthetic construct
  misc_feature 1..1593: note = Description of Artificial Sequence: Synthetic coding sequence
  source 1..1593: mol_type = other DNA
atggccaagggagaaggagctgagtcaggaagcgcagctgggctgctcccaaccagcatcctgcagtccacagaacgtcctgctcaggtcaagaaagaaccaaaaaaaaaaaaacaacagctgtcggtgtgcaataaactgtgttacgcactggggggcgcaccctatcaagtcactggatgtgccctcgggttcttcttgcagatctatttgctggacgtggcacaagttggcccattttctgcctctatcatcctgttcgtcggaagagcctgggacgccataacagacccacttgtcgggctctgcatctcaaaaagcccttggacgtgcctggggaggctgatgccctggatcatttttagtacccctctggccgtcattgcatatttcctgatctggttcgtgccagatttcccacacggccagacgtattggtaccttttgttctattgccttttcgagaccatggtgacttgctttcacgtgccttatagcgccctgaccatgttcatttcgaccgagcagacagaacgcgatagtgccacagcctatcggatgacggtagaagtgctgggaacagtactcggaactgcaattcaaggccagattgtcggacaggccgatactccttgctttcaggaccttaactcatctacggtggcgtcccaatcagcaaatcacacccatgggaccactagccaccgagaaacccagaaagcatatctgttggccgcgggcgtgatcgtgtgcatctacatcatttgtgcagttatcttgatcctcggcgttagagagcagagagaaccatatgaggcccagcagtcagagccgattgcctattttagggggttgcgtctcgtcatgtctcatggtccttacattaagttgattactggcttcttgtttaccagcctcgctttcatgctcgtggagggcaactttgttctgttttgcacgtacacccttggatttcgaaacgagttccaaaatctgctgctggctatcatgcttagcgccaccctgacaataccgatctggcagtggttcttgacaaggttcggtaagaagactgccgtgtacgtaggcatctccagcgctgtcccttttctcatcctagtggcacttatggagtctaacctcattattacctacgccgtggccgtagccgcaggcattagtgtggctgctgccttcctcctgccctggtcaatgctgccggatgtcatcgatgacttccaccttaagcagccccatttccatggcacagagcccattttctttagtttctacgtattcttcaccaagttcgcctcaggtgtctcactggggattagtacattgtctctcgactttgcagggtaccagacacgcgggtgctcccaaccggaacgcgttaaatttaccctcaatatgctggtcacaatggccccgatcgtgctgattttgctcggcctattacttttcaaaatgtacccgatcgacgaggagcgacgaagacagaacaaaaaggcactgcaagccttgcgtgacgaggccagcagctccggctgctccgagaccgattccacagaactagcctccatcctctag

SEQ ID NO: 123038 - DNA, 1125 bp, synthetic construct
  misc_feature 1..1125: note = Description of Artificial Sequence: Synthetic coding sequence
  source 1..1125: mol_type = other DNA
atggtgacttgtttccacgtcccttactctgctctgaccatgtttatttcaaccgagcagacggagcgagacagcgcaaccgcctacagaatgacagtggaggtcctgggtactgtgttaggtaccgctatccaggggcagatagtgggccaggcagatacaccctgctttcaggacctaaattcttccacagtggcatcacagtctgctaatcacacccatggtaccacttctcatagagagacccagaaagcctacctgctcgctgcgggcgtcatcgtatgcatctacataatatgcgcagttattcttattctgggggtccgcgaacagcgggaaccctacgaagcgcagcaaagcgagcctattgcctacttcaggggacttcgcctggtgatgtcccatggtccctacatcaaactcatcacaggctttttatttacatctctggctttcatgcttgtggagggcaacttcgttttgttctgcacgtacaccttaggttttcgaaacgagttccagaacctgctgctagcaattatgctgtcggccacactgaccattccaatctggcaatggttccttacacggtttgggaagaaaactgccgtgtatgtgggaatcagctccgccgtgccttttctaatcctggtggcgctgatggagagcaatctaatcatcacatacgctgtggctgttgcggccgggatcagtgtcgctgcagccttccttcttccttggtccatgctgcctgacgtcattgacgactttcatctgaaacagccgcatttccacggaacagagccaatttttttttccttttacgttttcttcacgaaatttgcaagcggggtctctttaggaatttcaaccctgagccttgacttcgctggctaccagacgcgcggctgctctcagcctgaacgcgtcaagttcacattgaacatgctggtgaccatggcccccattgtcctgattctgctgggcctgcttttattcaaaatgtatccgatcgatgaggagcggaggcgacagaataagaaagcgctgcaggctctccgcgatgaggccagcagctcggggtgttctgaaaccgatagtactgaactggcaagtattttgtag

SEQ ID NO: 123039 - DNA, 801 bp, synthetic construct
  misc_feature 1..801: note = Description of Artificial Sequence: Synthetic coding sequence
  source 1..801: mol_type = other DNA
atggccaagggggaaggggcggagtctggctccgccgctggcctcctgccgacatccatcctccagtctacagaacgccccgcccagaaggagcccaaaaagaaaaaacagcaactgtccgtctgcaataaactttgctatgccttgggcggtgcgccataccaggtaaccggttgcgcgctaggctttttcttgcagatctatctcctcgacgtggctcaggtgggaccattcagcgccagcataatacttttcgtggggcgcgcatgggacgcaatcactgaccccctcgtgggactgtgtatttcaaagtctccatggacttgcctgggacggctcatgccgtggattatcttttcaactcctctggccgtcattgcctatttcctcatctggtttgtcccagacttcccacacgggcaaacctattggtatttacttttttattgccttttcgaaacaatggtaacatgcttccacgtaccctactccgcgttgacaatgttcatcagcactgagcagaccgagagggatagcgccactgcataccgcatgaccgtggaagtgcttggcactgtgctgggaaccgctatccagggacagatcgtcggccaggctgataccccttgtttccaggaccttaattcctctacagttgcctcacaatctgcaaaccatacccacggaacaacttcacaccgcgagacccaaaaagcgtacctgcttgccgctggcgtcattgtgtgtatctatatcatctgtgccgtgatcctgatcctcggcgtcagagagcagcgctag

SEQ ID NO: 123040 - DNA, 2376 bp, synthetic construct
  misc_feature 1..2376: note = Description of Artificial Sequence: Synthetic coding sequence
  source 1..2376: mol_type = other DNA
atggctgatgataaagtggctatcctgaccgacgatgaggaggagcaaaaacgaaagtacgtcctggccgatccattcaatggaatctcgagagagccggagccacctagtaatgaaacccccagctccacggagacttcagcaatcccagaggaagaaattgattggatagagaagcattgcgtgaagataaataacgaccttctcatcagcaaggttttctacttcttcttctactccgcatacggatcactgtacccattgctacctgtttactacaagcagttgggaatgtcaccgtctcagtcaggtctgctcgtaggaattcggtacttcattgaattctgcagtgcccctttctggggagtcgtggctgatcggttcaagaaagggaagatagtcttgctgttctccttgctctgctgggtactgtttaacctgggtatcggctttgtgaaaccagccactctccggtgcgtcccaaaaattaggcctactacgcaccctacgaatgcatcccatcagctgaccatccttcccaccaatagcagctttacgtcttttctgactatttctccaaagatgcgtgaaaagaggaacctcttggaaacccgccttaatgtttccgatactgtaacactgcctaccgccccgaatatgaacagtgagccaacgttgcagccccaaacgggcgagatcacaaaccgtatgatggacttgaccctgaactcttcgaccgccactccagtttcgcctggatccgtcacaaaggaaactaccacagtaattgtcactactactaagagtttaccttctgatcaggttatgctcgtgtacgaccaacaggaggtagaagctatctttcttgtgatcctcgttgtagttataattggcgagttcttctccgcaagctccgtgaccatcgtggacactgtgacgctccagtatctgggtaaacatcgtgacagatatgggctccagcgcatgtgggggtccctaggatggggcctggctatgctgagcgtggggattgggatcgattacactcatatcgaagtactaatcgatgggaagggctgtaagcctcctgaataccgaaattatcagatcgtgtttatcgtctttggggtgctgatgaccatggccctgatcgtggctacacagttccggttcagatataaccatttcaaaaatgacgactctaagggaaaggaagtggaaatcccccaggttgagcggaacaactcaacagagagctcagaagaaaccccgaccactacctctcatagtcaggcttttaatttctgggaccttataaagttactgtgtagcgtgcagtatggatcagttctgttcgttgcctggtttatgggctttggttacggcttcgtgtttacatttctgtactggcaccttgaggacttgaacggtacaaccacacttttcggagtatgctctgtgctgagtcacgtaagcgaactgacggcctatttttttagtcacaagcttatcgaactgattggccacattcgggtcctttacatcggacttgcctgcaatactgcacgctacatatacattagttacctcgagaatgcctggactgtattgcccatggaagtcctccaaggtgtgacacacgccgccatatgggcggcctgtatttcatatttaagcgctgctgttcctcccgagctcaggacatccgcgcagggcatactgcaggggcttcacctgggcctcggccgaggctgcggtgccatgatcggcggagtcttggtgaactactttggcgcggcagccaccttccgaggcattggcatggcctgtctggttattctcctcctattcgcccttattcagtggctggccgtgccggacgaggaggaggataaaaccatgctggccgaacgcattcctgtgccgtctagcccagtccccatcgccacgattgacctcgtgcagcagcagacggaagacgttatgccgagaatcgagcctcgcctgccacccaaaaaaacaaagcaccaggaggagcaggaggacgtgaacaagccagcctggggggtgtcatcgagtccctgggtgacattcgtgtatgctctctatcagattaaagaaatgatgcagcttaccagggacaatcgcgcttcagagatacaacctctgcaggggaccaatgaaaatcgggagaatagccctgccgggcgcgcccagccagtgccatgtgagacacattccgatcccagtaggaaccagccctctccagatgccgccgcctcacagacacagacaagccccgcccatccttccgtggacccttgcacggaggagagcgaggagcagcaggctcagctggcggccgggggtcattag

SEQ ID NO: 123041 - DNA, 2376 bp, synthetic construct
  misc_feature 1..2376: note = Description of Artificial Sequence: Synthetic coding sequence
  source 1..2376: mol_type = other DNA
atggccgacgacaaagtggcaatactaaccgatgacgaggaggagcagaaacggaagtacgtgctggcagacccatttaatgggatttctagggaaccggagcccccttccaacgagacacccagcagcacggaaacgtccgccataccggaggaggagatcgattggatcgagaagcattgcgtcaaaatcaacaacgacctgctcatctcaaaggttttttacttttttttctactccgcctacggcagcctgtatcctttgctgcctgtgtactacaagcagctcgggatgtctcccagtcagagcggcctattggtcggaatccgctactttatcgaattctgttctgctcctttttggggcgtcgtggccgatcggttcaagaaggggaagatcgtgctgctcttctcgcttttgtgttgggttctctttaaccttggcatcggctttgtgaagcctgctacactgcgttgtgtccctaagatacgccccacgacacacccaactaacgccagtcaccaacttacaatcctacccactaatagttcttttacctccttcttgaccatttcccctaaaatgcgggagaagcggaacctcctcgaaacaagactcaatgtgagtgacaccgtcaccctgcctaccgcgcccaatatgaactccgaaccaacccttcagccacagaccggcgaaatcaccaataggatgatggacctgactctaaatagttcaactgccactcccgttagtcctggttccgtcaccaaggagactaccaccgtcattgtgaccaccactaaatccctcccatccgatcaagtgatgctagtttatgatcagcaagaggtagaagccattttcctggtgattttggtggttgtcatcatcggtgagtttttctctgcttcttccgtgactatcgttgatacggtcacactgcagtacctgggcaaacacagagatcgctacgggctgcagcggatgtggggttccctaggctggggcctggccatgttatcagttggcattggaattgactatacacacattgaggtgttgatcgatggaaaaggctgcaagcccccagaatatagaaattaccagattgtgttcattgtgtttggggttctcatgactatggccttgatcgtggccacacagttcaggtttaggtataaccattttaaaaacgacgacagcaaaggtaaagaagtggagattccgcaggttgagaggaacaattcaacagagagttcagaggagaccccaacaacaacttcgcattcacaggcatttaatttttgggatttaataaagctactttgcagcgttcagtacggaagcgtcttgttcgttgcatggttcatgggtttcggatacggattcgtgtttacctttctgtattggcacctggaggacctgaacgggacaaccactctgttcggagtgtgctcagtgctttcccacgtgagtgagctcacggcctactttttctcccacaaacttattgaactcatcggccatataagggtgctttacattggactcgcatgtaatacagctaggtacatctatatctcttatttagagaatgcgtggaccgtgttgccaatggaggtcttgcagggagtgacgcatgcggccatatgggccgcctgcatctcttacttgagcgctgctgtgccgcccgaactgcgcacgtctgcccagggcatcctccagggattgcatctcggacttggccggggctgcggtgccatgataggtggggtgttagtcaattattttggagctgcagccactttcagggggataggtatggcctgcttggtaatcctgttactatttgccttaatccagtggctggcggtcccagacgaagaagaggataaaactatgctcgcagaacgaatccctgtgccatcatcacctgtgccaatcgcaaccatagatctggtacagcaacagaccgaggacgttatgccaaggatcgaacctcgtctcccccctaagaaaactaaacaccaggaggagcaggaagacgtgaataaaccagcctggggcgtcagcagctcaccctgggtaacatttgtgtacgccctttatcagattaaggagatgatgcagctaacacgcgataatcgtgcctcagagatccagcccctgcagggtacaaatgagaatagagaaaattctccagcggggcgagcccagcccgtaccatgtgaaacccactctgatccctccaggaaccagccttctccagacgcggcagcctcacagacccagacttcccctgcccacccgtcagtggacccctgcacagaagagagtgaagagcagcaggcgcagctcgccgcgggcggacactag

SEQ ID NO: 123042 - DNA, 129 bp, synthetic construct
  misc_feature 1..129: note = Description of Artificial Sequence: Synthetic coding sequence
  source 1..129: mol_type = other DNA
atggccgacgacaaagtggctatcctcactgacgacgaggaagaacagaagcggaaatatgtactggccgatccttttaacggaatcagccgcgagcctgaaccccctagcaacgaaaccccgtcttag

SEQ ID NO: 123043 - DNA, 345 bp, synthetic construct
  misc_feature 1..345: note = Description of Artificial Sequence: Synthetic coding sequence
  source 1..345: mol_type = other DNA
atggcagacgacaaagttgcaattctaactgacgatgaggaggagcagaagcgcaagtatgtgttggccgaccccttcaatgggatttccagagaacccgagccaccctctaacgagacaccatcaagcactgagacctctgctattcccgaggaagaaatagactggatagagaagcactgcgttaaaatcaataacgacttactgatttccaaggttttttatttctttttctactcagcatatgggagtctttaccctctactgccggtgtattacaaacagctcggcatgtccccctcacagagtggactgctagtcgggataagatatttcattgagtag

SEQ ID NO: 123044 - DNA, 471 bp, synthetic construct
  misc_feature 1..471: note = Description of Artificial Sequence: Synthetic coding sequence
  source 1..471: mol_type = other DNA
atggctgacgataaggtagctatcttaacggatgacgaggaggagcagaaacgtaagtatgtcctcgctgatccttttaatggtatatcacgggaacccgaacctcctagcaatgaaactccaagctccacagagaccagtgctattcctgaagaagaaatcgattggatagaaaaacattgcgtgaagattaacaacgaccttttaatctcgaaggtgttttattttttcttctatagcgcgtacggctccctgtatcccttattacccgtgtattacaagcagctcggaatgagcccttcgcagagtggattacttgtcggcattaggtactttatcgaattctgttctgcaccattctggggcgtggtcgctgataggtttaaaaaaggaaaaattgtcctgttgtttagcctgttgtgctgggtgctgttcaatctgggaatcggtttcgtgaagcctgcaacttag

SEQ ID NO: 123045 - DNA, 762 bp, synthetic construct
  misc_feature 1..762: note = Description of Artificial Sequence: Synthetic coding sequence
  source 1..762: mol_type = other DNA
atggaagttttacagggtgtgacacacgcagccatctgggctgcttgcatatcctatctatccgccgctgttccacccgaactgaggactagcgcccagggtattctccaaggcctccaccttgggctggggcgcggatgcggcgccatgattggtggagtactggtgaattatttcggcgccgccgctacattccggggaatcggcatggcctgcctggtgatactgctgctgtttgccttgatccaatggctcgcggtacctgacgaagaagaggacaaaaccatgctggctgagcggatcccagtgcctagtagccccgtacctatcgcgactatagatctggtccagcagcagaccgaagacgtcatgccccgaatcgagcctaggctgcctccaaaaaaaaccaaacaccaagaagagcaagaggacgtgaacaaacctgcttggggtgtgtccagctccccatgggtcactttcgtgtatgccctctatcaaatcaaggaaatgatgcagctgacaagggacaaccgcgcatcagaaatacagccactccaggggactaacgaaaatcgggagaactcgcccgccggaagagctcaacccgtaccctgcgaaacacactccgatccaagcagaaatcagccgtccccagatgccgcggcctcccagacacagactagccccgcgcacccatcagtcgacccttgtactgaagagagcgaggaacagcaagcacaactggcagctggtggacattag

SEQ ID NO: 123046 - DNA, 696 bp, synthetic construct
  misc_feature 1..696: note = Description of Artificial Sequence: Synthetic coding sequence
  source 1..696: mol_type = other DNA
atggaagtcttacaaggggttactcatgcagcgatctgggcggcttgcataagctacctctctgctgccgttccccccgagcttcggaccagcgcccaaggcatcctccagggcctgcaccttgggctgggacgcggatgtggcgctatgatagggggggtattggttaactacttcggcgctgcggctactttccggggtatcgggatggcttgcctggtcatcctgctcctgtttgcactgattcagtggttggctgtgcccgatgaagaggaggataagactatgttggccgaacggatccctgtgccaagctctcctgtgccaatcgcaacaatcgatctggtgcagcagcagacggaagacgtcaataagcccgcctggggcgtgagcagctccccatgggttacttttgtgtacgccttgtatcagattaaagagatgatgcagctgacccgtgataatagagcctcggagatacagcccctgcagggaacaaatgaaaatagagagaattcacccgccggcagggcccagccagtcccatgcgagacacattccgatccctctagaaatcagccctcaccagatgccgcagcctcgcagactcaaacctcacccgcccacccatccgtcgacccctgcacggaggaatcggaagagcagcaagcgcagctcgctgccggaggccactag

SEQ ID NO: 123047 - DNA, 1557 bp, synthetic construct
  misc_feature 1..1557: note = Description of Artificial Sequence: Synthetic coding sequence
  source 1..1557: mol_type = other DNA
atggctggtcttaggaatgagagcgagcaagaaccactgttgggggacactcctgggtcccgggaatgggacatcctcgagactgaggaacattacaaatccaggtggcgaagtattcggattctttacctgacaatgttcctctcatcagtggggtttagtgtggtgatgatgtcaatctggccatatttacaaaaaatcgatcccaccgctgacacctctttcctggggtgggtcattgcatcctattctctgggccagatggtggcgagcccaatattcggactatggtcgaactacagaccccgaaaagaaccactgatagtgtccattttgattagcgtggcggcgaattgtctgtacgcatatttgcatatccctgcgtctcataacaagtactatatgctcgtcgctcgtgggctcctgggaatcggtgccggaaacgtggcagtcgtgcgcagttacaccgctggtgcaacaagtctccaggaacgaacttcctctatggccaatatcagtatgtgtcaggctcttggatttatactcggcccggtcttccagacctgttttaccttcttgggagagaagggcgtgacgtgggatgtgatcaagctacagattaatatgtatactactccagtgttactgtcagcgtttctaggcattctcaacataatcctgattttagctatcctccgggaacacagagtggacgactcaggaaggcagtgcaaatcaattaacttcgaggaagcctcaacagatgaagcacaggtccctcaaggaaacatagatcaagttgccgtggttgcgataaatgtcctgtttttcgttacattgttcattttcgccctttttgaaactattatcacccctttaacaatggatatgtacgcctggactcaggagcaggccgtgttatataatggaatcatcttggctgcgctgggcgtggaagcagtcgtgatcttcctcggcgtcaagttgttatcaaagaaaattggagaaagggctattctgttaggcggtctgattgtagtttgggtgggtttctttattttactcccctgggggaaccaattccctaaaatccagtgggaggatttgcacaataacagcatcccgaacacgacttttggcgaaataattattggcttatggaaatcgcccatggaagatgacaacgaacgcccaaccgggtgttcaatcgagcaggcctggtgcctctacacacctgtcattcatctggcccagtttctaacatccgcggtcctcatcggcctcggctatcccgtgtgcaatttgatgtcatacacactctactccaagatactgggtcccaagccacagggcgtctacatgggctggctgacagcaagcggctcaggagcccgaattctcggccctatgtttatctctcaggtctacgctcattggggacctcggtgggctttctctctggtgtgcggtataatcgtcctgactatcactctcctaggtgtcgtttacaaacgcctgatagcactcagtgtacgatatgggcgcattcaggaatag

SEQ ID NO: 123048 - DNA, 462 bp, synthetic construct
  misc_feature 1..462: note = Description of Artificial Sequence: Synthetic coding sequence
  source 1..462: mol_type = other DNA
atgttcctgtcatcagtcggcttcagtgtcgtaatgatgagtatttggccatacctacagaaaatagatcccacagccgacactagtttcttaggatgggtgatagcctcttactccctgggacagatggtggcatcgccgatatttgggctgtggtctaactaccggcctaggaaggaacctttgatcgtttcaatcctcatcagtgtcgccgccaactgcctctacgcttatcttcatattccagcctctcacaacaaatactacatgctcgtggctagaggccttctaggcattggagcagtattccagacatgttttaccttcctgggagaaaaaggcgtgacttgggacgttatcaagctgcagatcaacatgtatacaaccccggttcttctcagcgcttttctgggcatactgaatattatacttatcttagctattctaagcaaatatcgctag

SEQ ID NO: 123049 - DNA, 555 bp, synthetic construct
  misc_feature 1..555: note = Description of Artificial Sequence: Synthetic coding sequence
  source 1..555: mol_type = other DNA
atgtttctgagttctgtgggattcagcgtggtaatgatgtctatatggccctacctgcagaaaatcgatccaactgccgacacaagttttctaggatgggtcatcgcaagctactcacttgggcagatggttgcctcccccatctttggcctttggtcaaactatcggccacgcaaggaaccactcattgtatcgatactaatctctgtggctgcgaattgtctgtacgcgtaccttcacatcccagcgtcacataataagtactatatgcttgtcgcacgcggacttttaggcattggggccggaaacgtcgccgtggtccggtcctacaccgcaggtgcaacgtctttgcaggaacgcactagttccatggccaatatcagtatgtgccaagccttgggtttcatccttggtccagaaaatatcgtatggatgactcaggaggatagcgtcaaagtgctgatattgaaaaagcaggtgcagatgaagctcagatttcctaaggaaatcttgacacgactcctcctgtggccgtctatgttctgcttcctttag

SEQ ID NO: 123050 - DNA, 750 bp, synthetic construct
  misc_feature 1..750: note = Description of Artificial Sequence: Synthetic coding sequence
  source 1..750: mol_type = other DNA
atgggggagctgatggcattcctgttgcctcttattatagttttaatggttaaacatagtgattcaagaacgcacagcctcagatattttagactgggggtctctgacccaatccacggagtgcccgagttcataagcgtgggttacgtcgacagccatccaattaccacgtatgactctgtcacacggcagaaagagccccgcgcgccgtggatggcagagaatctcgccccagatcactgggagcgatacacacagttgctcagaggttggcagcagatgttcaaggtcgagttgaaacgcctccagcgtcattacaaccatagcgggtcccacacctaccaacggatgatcggctgcgagctcctcgaggacgggagcactactggttttctgcaatacgcctatgacgggcaggatttcctaattttcaacaaagatacactcagctggctagccgtcgacaacgtggctcacaccataaaacaagcctgggaggcgaaccagcacgagctattgtatcagaaaaattggctcgaagaagaatgcatcgcgtggttgaaaaggttccttgaatacggcaaagatacactccagagaacagagagtgagacgatccctcttgtgatgaaagcagtaagcggatctatcgtgttggtgatcgtgctagcaggggtcggagtgctcgtgtggcgacggcggcctagagagcagaacggcgcaatatacctcccaacccctgaccggtag

SEQ ID NO: 123051 - DNA, 783 bp, synthetic construct
  misc_feature 1..783: note = Description of Artificial Sequence: Synthetic coding sequence
  source 1..783: mol_type = other DNA
atgcgacccgaagaccgtatgttccacattcgggccgtgattctccgtgccctctcactcgcttttctcctcagcctcaggggcgccggtgccatcaaagccgaccatgtttcaacctacgccgcgttcgtccagacccatagaccaacaggcgagtttatgttcgaatttgatgaggatgagatgttttacgtagacctcgataagaaagagaccgtgtggcacctggaagagtttggccaggccttctccttcgaggcccaaggtggcctggcaaatattgctattctgaataacaatctaaacacccttatccagagaagcaaccacacccaagctacaaatgatccacctgaggttacagtgttccctaaggaacccgttgaactgggacagcctaacaccctaatatgccatatcgataaattttttccgcctgtgctcaacgtgacttggctctgcaacggagagttggtgacagaaggcgtggccgagtctcttttcctacccagaacagactactcctttcataagtttcattacctcacttttgtcccttccgcggaggatttctacgactgcagagtagaacactgggggttggatcaaccattgctgaagcattgggaagcacaggagccaattcaaatgcccgaaacgaccgaaacagtcctgtgtgcactgggactggtgctgggcctcgtgggcattattgtggggaccgttctgatcattaaatctctgagatcagggcacgaccccagagctcagggcaccctgtag

SEQ ID NO: 123052 - DNA, 783 bp, synthetic construct
  misc_feature 1..783: note = Description of Artificial Sequence: Synthetic coding sequence
  source 1..783: mol_type = other DNA
atgagaccagaggatagaatgtttcatatccgcgcagtgattctgagagccctttcgcttgcttttctactctccctacggggagcgggcgcgatcaaagctgaccacgtgagcacatacgccgccttcgttcagacgcacagacccactggcgaattcatgttcgaattcgacgaggatgagatgttttacgtggacctcgacaaaaaggagacggtttggcatctggaggagtttgggcaggccttctcgttcgaggctcaaggcggcctggcaaacattgctatcctgaacaacaatctcaataccctgatccagagatctaatcatactcaggcaaccaacgacccccccgaagtgaccgtcttcccgaaagagccggtcgaactggggcagcctaacaccttgatctgccatatagataaattcttcccaccagtgctcaacgtgacatggctttgtaatggtgaattagtgacagagggcgtcgccgagagcctgtttctgccaaggacggactactcattccataagttccactatctgacttttgtacccagcgccgaggatttttatgactgcagggtcgaacattggggactggatcagccactcttgaaacactgggaagcacaggagcccattcagatgccggagaccaccgaaactgtgttgtgcgcattgggcctcgtcctgggcctggttggaatcattgtggggacagtgctgataatcaagagcctccggtccggccacgacccccgcgcccagggaactctgtag

SEQ ID NO: 123053 - DNA, 72 bp, synthetic construct
  misc_feature 1..72: note = Description of Artificial Sequence: Synthetic coding sequence
  source 1..72: mol_type = other DNA
atgcggcccgaagatcgcatgtttcacatccgagcggtcatactcagggccctgtctctcgcatttctgtag

SEQ ID NO: 123054 - DNA, 387 bp, synthetic construct
  misc_feature 1..387: note = Description of Artificial Sequence: Synthetic coding sequence
  source 1..387: mol_type = other DNA
tagaacaccttgatctgtcatattgacaagttctttcctccagtacttaatgtgacttggctctgcaacggcgaactagtgaccgaaggggtggccgagtctctgttcctacctaggaccgactatagttttcataagttccattatctgaccttcgtaccttccgccgaagacttttatgattgtagagtggaacactggggtctggatcagcccttgctcaagcactgggaggcccaggagccaatacagatgccggagacaactgagactgtcctttgtgcgttgggcctggtgctaggtctggtgggcatcattgtgggaactgttcttataataaaatccctgaggtcgggacacgaccccagggctcaagggacactttag

SEQ ID NO: 123055 - DNA, 630 bp, synthetic construct
  misc_feature 1..630: note = Description of Artificial Sequence: Synthetic coding sequence
  source 1..630: mol_type = other DNA
atgagacctgaggatcgtatgttccacatcagagccgtcatccttcgggctctcagcctggcgtttcttctgagccttcgcggcgccggcgcaatcaaagcggatcatgtgtctacttatgcggcttttgtgcagacacaccgcccgacaggagaatttatgttcgagtttgatgaagacgagatgttctatgtggacctggacaaaaaggagacagtgtggcaccttgaggaatttggacaggcgttctcatttgaggctcaaggggggctcgccaacatcgccattcttaataacaatctaaacacgctgattcagcgttctaatcatacccaggctacaaatgatccccccgaagttaccgtgttccctaaagagcccgttgagttggggcagccgaatactctaatttgccatatcgacaaatttttcccacccgtgctcaatgtgacatggctgtgcaatggcgaactggtgactgagggagtggctgaatcactattcctgccccggacggattattccttccataaatttcactatttgacctttgtgccatctgctgaagatttttacgattgtcgcgtagagcactggggcctcgaccagcctctcctaaaacactggtag

SEQ ID NO: 123056 - DNA, 783 bp, synthetic construct
  misc_feature 1..783: note = Description of Artificial Sequence: Synthetic coding sequence
  source 1..783: mol_type = other DNA
atgagaccggaggatagaatgttccatataagggcagtaattctgcgtgctctgtccctggcatttttactttccctgaggggcgctggcgccatcaaggccgatcatgtaagtacatatgccgccttcgtacagacgcatcggcccactggcgaattcatgtttgaatttgatgaggatgagatgttttacgtggacctggacaagaaggaaaccgtctggcatcttgaagagtttggccaggccttttctttcgaagcccaggggggcctggctaatattgccattctgaacaataatctgaatactttaatccaacggtcgaaccacacccaggcgacaaacgacccaccggaggtcactgtctttcctaaggagccagtggaactcggacagccgaataccttgatctgccacatcgataaatttttcccaccggttctgaatgtcacttggctatgcaatggagaattggtgacagagggggtggcagaatccctattcttgccccgtactgattattcgtttcacaaattccactatcttacgttcgtgccatctgcggaggatttttacgattgcagagtagaacactggggcctggatcagcccctgctgaaacattgggaggcacaggagcccatacagatgccggagacaactgagaccgtgttgtgtgcccttggtctagtcttgggtctggtggggattatcgttgggaccgtcttgatcataaagagtttacgcagcgggcacgaccctcgggcacaggggactctgtag

SEQ ID NO: 123057 - DNA, 72 bp, synthetic construct
  misc_feature 1..72: note = Description of Artificial Sequence: Synthetic coding sequence
  source 1..72: mol_type = other DNA
atgcggcccgaggacagaatgttccacatccgggctgtcattctgagggccctatccttagcctttctgtag

SEQ ID NO: 123058 - DNA, 783 bp, synthetic construct
  misc_feature 1..783: note = Description of Artificial Sequence: Synthetic coding sequence
  source 1..783: mol_type = other DNA
atgcggcctgaggacaggatgtttcatattagagccgtaatccttcgggctcttagtcttgccttcctgctgagtctcagaggggccggagcaattaaagctgaccatgtgagtacatacgccgcctttgtacagactcataggccgaccggcgaatttatgttcgagtttgacgaggacgagatgttttatgtggacttggacaaaaaagaaacagtttggcatttagaggagttcggccaggccttcagctttgaagcacaaggcggcctagcaaacatagccatcctgaacaacaatctgaacaccctaatacagcgcagcaaccatacccaggcgacaaatgacccgcccgaagtcacggtgttccccaaagaaccagtcgagttgggccaacctaatacgctcatatgtcatatagacaaattcttccctcccgttctcaacgttacatggctttgtaacggtgaactcgtaactgagggcgtggcagaatctttgttcttgcctaggaccgattactcattccataaatttcattatttaacattcgtaccttctgcagaagatttctatgactgtcgtgtggaacactggggcttagatcagcccctcctcaaacattgggaggcccaggaaccaattcagatgccagagacgaccgaaacagttttgtgtgccctgggtctcgtcctgggtctggtggggataatcgtaggaacagtgctgattattaagtctctgagatctggacacgaccccagagctcaggggaccctgtag

SEQ ID NO: 123059 - DNA, 387 bp, synthetic construct
  misc_feature 1..387: note = Description of Artificial Sequence: Synthetic coding sequence
  source 1..387: mol_type = other DNA
tgaaataccctaatctgccatatcgacaaattcttccctcctgtcctcaatgtcacatggctctgcaatggggagctggtgaccgagggagttgctgaaagcctgtttttgccaagaacagactacagcttccacaaattccattacctcacgtttgtgccatctgctgaagacttctatgactgtagagtggagcattgggggctagaccagcccttgctgaagcactgggaggcccaggagcctatccagatgccagagacgaccgaaacagtgctgtgtgccctgggactcgttttgggtctggttggtatcatcgtgggcacagtcctgatcattaaaagcctcaggtccggccacgaccctcgcgcgcagggcacattgtag

SEQ ID NO: 123060 - DNA, 783 bp, synthetic construct
  misc_feature 1..783: note = Description of Artificial Sequence: Synthetic coding sequence
  source 1..783: mol_type = other DNA
atgagaccagaggaccgaatgtttcacatccgcgccgtgattctccgcgctctgtctctagcctttctgctcagcctccgcggcgctggggcaattaaagcagatcacgtctcaacctacgcagcatttgtacagacccatcgacctaccggcgagtttatgttcgaattcgacgaagacgagatgttttacgtggatcttgacaagaaagaaactgtctggcacctcgaagagttcgggcaagcattttcatttgaggcacagggtggattggcaaatatcgccatcctgaacaacaatctcaacactctgatccagagatccaaccatacccaagcaaccaacgatcctccagaggttacggtgttccctaaggaacccgttgagctgggtcagcctaacacacttatttgccatatcgacaaattctttcctcccgtcctcaatgtcacgtggctctgtaatggtgaactcgtgaccgagggcgtggcagagagcctcttcctaccccggaccgactatagtttccacaaattccactatctgacgttcgtcccatccgcggaggacttctacgactgcagagtggaacactggggcctggatcaaccattacttaaacactgggaggcccaggagccgatccaaatgccggagacaacagagactgtcctgtgtgccctaggacttgtgctcggactagttggtataattgtggggaccgtcctgatcatcaaatccctgcgcagcggccacgacccacgcgcccagggcaccttgtag

SEQ ID NO: 123061 - DNA, 72 bp, synthetic construct
  misc_feature 1..72: note = Description of Artificial Sequence: Synthetic coding sequence
  source 1..72: mol_type = other DNA
atgagacccgaagaccgcatgttccatatccgagcagtgattctccgcgccttgtccctggcgtttttgtag

SEQ ID NO: 123062 - DNA, 630 bp, synthetic construct
  misc_feature 1..630: note = Description of Artificial Sequence: Synthetic coding sequence
  source 1..630: mol_type = other DNA
atgcggccagaagacaggatgtttcacataagggctgttatccttcgcgccctttcattagcattcctgctgagtctccgcggtgccggtgcaattaaagctgaccacgtgtctacgtatgctgcttttgtccagacacataggcctactggtgagttcatgttcgagttcgatgaggatgaaatgttctacgtggatctcgataaaaaagagactgtgtggcacctggaggagtttggacaggccttttcctttgaagcacaaggcgggttggcaaacatcgctatacttaataacaatctgaatacgcttattcaacgcagcaaccacacccaggcaaccaacgatccacccgaagttactgtctttcccaaggagccggtggagctgggacagcctaacacgctcatatgccatattgacaagttcttccccccagttctcaatgtcacatggctgtgcaatggagagctcgttaccgagggggttgctgaatcactgtttctgccaagaactgattactcttttcacaaattccattacctcacgttcgtgccctctgccgaggacttttacgattgcagagtggaacactgggggcttgaccagccacttctgaaacattggtag

SEQ ID NO: 123063 - DNA, 72 bp, synthetic construct
  misc_feature 1..72: note = Description of Artificial Sequence: Synthetic coding sequence
  source 1..72: mol_type = other DNA
atgagaccagaagacagaatgtttcatatccgcgcagtcatcttgcgggcgcttagtctggcatttctgtag

SEQ ID NO: 123064 - DNA, 387 bp, synthetic construct
  misc_feature 1..387: note = Description of Artificial Sequence: Synthetic coding sequence
  source 1..387: mol_type = other DNA
tagaatacattgatttgtcacatagacaagttcttcccgcccgtcttgaatgttacctggctgtgtaacggggagctcgtgactgagggagtggcagaatcattgtttctacctcgtactgattactcattccacaaattccactacctgacatttgtgccctcagcagaggatttttatgattgcagagtggagcactggggcctggatcagcccctgctgaagcactgggaggcccaagaacctatccagatgccagagactacagaaacagtcctgtgcgcacttggtctggtgttaggcctcgtaggaatcatcgtaggcacagtgttgattattaagtcactcaggtccggccacgatccccgggcgcaaggaacattgtag

SEQ ID NO: 123065 - DNA, 783 bp, synthetic construct
  misc_feature 1..783: note = Description of Artificial Sequence: Synthetic coding sequence
  source 1..783: mol_type = other DNA
atgagacccgaagatcgcatgttccacatcagggcagtgatcttgagggcactgagcctagctttcctgctgagcctccggggtgctggcgcaatcaaagctgaccacgtgagcacctacgccgcgttcgtgcagacacatagacctaccggcgagtttatgttcgagttcgacgaggacgaaatgttttatgtcgatttggataagaaagagacggtgtggcatttggaagagtttggccaagccttttcgttcgaggcacagggaggtttagcaaacattgctatcctcaacaacaacctcaataccctcatccaacgcagcaatcatacccaagcaaccaatgatccgccagaagtgaccgtgttcccaaaagaaccagtggagctggggcagccaaacacgctcatctgccacattgacaagttcttccctcctgtccttaacgtgacatggctctgtaacggggagctcgtgacagaaggggtggcagagtccctgttcctgccgcggacagactatagcttccacaagttccactacctgacattcgtcccctcagccgaagacttttatgactgtagggtggagcactggggcctggatcaacccctgttgaaacattgggaagcacaggagcccattcagatgccagaaacaactgaaacagtcctctgcgctcttgggctggtgcttggtctcgtcggaatcatcgtggggacagtgctgatcatcaaaagcttacgctccggacatgacccccgcgctcagggtactctttag

SEQ ID NO: 123066 - DNA, 387 bp, synthetic construct
  misc_feature 1..387: note = Description of Artificial Sequence: Synthetic coding sequence
  source 1..387: mol_type = other DNA
taaaacactctcatctgccacatcgacaagtttttcccacctgttttaaatgtgacttggctgtgcaatggcgagttggtgactgagggcgttgccgagagcctattccttccgagaaccgactactcctttcataagtttcactatctcacattcgtccccagtgccgaggacttttacgactgtcgagtcgagcactggggccttgatcaacctttacttaaacactgggaggctcaggagcctatacagatgcctgagaccacagagacagtcttgtgtgccctaggcctggtcctcggacttgtcgggattatagtggggacagtgctgattatcaaaagccttcgttccggccacgaccctagggcacagggaactctgtag

SEQ ID NO: 123067 - DNA, 72 bp, synthetic construct
  misc_feature 1..72: note = Description of Artificial Sequence: Synthetic coding sequence
  source 1..72: mol_type = other DNA
atgcgtcccgaagaccgtatgttccacattcgggcagtcatcttgcgggccctgtctttggctttcctctag

SEQ ID NO: 123068 - DNA, 630 bp, synthetic construct
  misc_feature 1..630: note = Description of Artificial Sequence: Synthetic coding sequence
  source 1..630: mol_type = other DNA
atgcgtcctgaagaccggatgttccatatcagggcagtaatccttcgggctcttagtctagcctttttactgtcattgaggggagcaggggccatcaaagccgaccatgtgagtacctatgcggcctttgtacagactcaccgccccactggagagttcatgttcgagtttgatgaggacgagatgttctacgtggatctggacaaaaaggagacagtctggcatctcgaagagtttggacaggcatttagcttcgaagcccagggggggttggcaaatattgctattctgaataacaatctgaacaccctcattcagcggtccaaccacactcaagccacgaacgaccctcctgaggttacggtgttcccaaaggagccagtcgaacttgggcagccgaatactctgatctgccatattgataagtttttccccccagttttgaatgtcacatggttatgtaatggcgaactagtgacggaaggggttgccgagtcgctgttcttacccaggacggattacagcttccataaattccattacctcacattcgtgcccagcgctgaggatttttacgattgccgtgtcgagcattggggccttgaccaaccactcttaaagcattggtag

SEQ ID NO: 123069 - DNA, 639 bp, synthetic construct
  misc_feature 1..639: note = Description of Artificial Sequence: Synthetic coding sequence
  source 1..639: mol_type = other DNA
atgcggccggaagatcgtatgtttcacatcagagccgttatattgcgcgcgctgtcgctcgcgttcctgctcagccttcgcggcgccggggccataaaggctgaccacgtgtcaacatatgctgcttttgtgcaaacccaccgaccaacgggcgagttcatgttcgaatttgacgaagacgagatgttttacgttgaccttgacaagaaggagacggtctggcacctggaggagtttgggcaggctttttccttcgaagtgaccgtgtttcctaaggagcctgtggagttaggacagcccaacacgctgatttgtcacattgacaaatttttcccccccgtcctgaatgtgacttggctgtgcaatggagaactcgtcactgaaggtgtagcagagagcctgttcctccctaggacagattatagcttccacaagttccactacctgacattcgtcccctccgcagaggacttttatgactgccgcgtggaacactgggggttggaccagccactactcaagcactgggaagcccaggagcccatccagatgcccgaaaccactgagactgtactctgcgctttaggcctggtgctggggctggtgggcatcattgtcggaactgtcctcatcatctag

SEQ ID NO: 123070 - DNA, 639 bp, synthetic construct
  misc_feature 1..639: note = Description of Artificial Sequence: Synthetic coding sequence
  source 1..639: mol_type = other DNA
atgcgacccgaggatagaatgttccatattcgggccgtgatcctacgagccctgtccctggcttttctgctgtccctgcgtggcgctggagccataaaagctgaccatgtaagcacatatgccgcctttgtgcagacccacaggcccacaggtgagttcatgttcgagttcgacgaggatgaaatgttctatgtcgacctggacaaaaaggagaccgtatggcacctggaggagttcggccaagcgttcagctttgaggttacagtcttccccaaagaacctgtcgaactgggtcagcccaacaccctcatttgccatatcgataagttctttcctccggtgctgaacgtgacatggctctgtaatggcgagctcgtcacagagggcgtcgccgaatccctttttctaccccggaccgactacagttttcataaatttcattatctgacctttgtgccgtccgccgaagacttctatgactgtagagtggaacactggggcctggaccaacctctgctgaaacattgggaagctcaggagcccattcagatgccagagactacagaaaccgtgctttgtgctctcggcctggttctgggccttgtggggatcatcgtgggcactgtgttgatcatctag

SEQ ID NO: 123071 - DNA, 387 bp, synthetic construct
  misc_feature 1..387: note = Description of Artificial Sequence: Synthetic coding sequence
  source 1..387: mol_type = other DNA
taaaatacactcatttgccacatagacaaattttttcctcctgtgttaaatgtcacatggttatgcaacggggagctggtaacagaaggtgtagctgagagcctattccttccccggaccgactactctttccacaaatttcactatctcaccttcgtacccagtgccgaggatttctatgactgccgggtcgaacattggggtttggaccagcctcttctcaagcactgggaagcccaggagccaatccagatgccagaaacaacagaaacggtgctgtgcgccctgggactcgtgctcggccttgtgggcataatcgtgggcacagtgcttatcattaaaagcctgagatccgggcacgaccctcgcgcccaggggacattgtag

SEQ ID NO: 123072 - DNA, 639 bp, synthetic construct
  misc_feature 1..639: note = Description of Artificial Sequence: Synthetic coding sequence
  source 1..639: mol_type = other DNA
atgcggcccgaagaccggatgtttcatattcgcgcagtgattctccgcgcactaagtctcgccttcctcctgtccttaaggggagcgggcgctatcaaagccgaccacgtatctacatatgctgccttcgtgcagacccatcgacctaccggcgaatttatgttcgagtttgacgaggatgagatgttctacgtcgatctggataagaaggaaacggtctggcaccttgaagaattcggccaagcatttagttttgaggtgaccgttttcccaaaagagcctgtggaacttgggcagcctaataccctgatatgtcatatcgacaagttcttcccgcccgtgctcaatgtgacttggctttgcaacggcgagctggtaacggaaggagtggctgaatcactgtttctcccgagaaccgactatagctttcacaagtttcactacctgacatttgttccaagcgctgaagatttctacgattgtcgcgtcgagcattggggcctggatcagcctcttttgaaacattgggaggcccaggagccaatccaaatgccagagaccactgagaccgtgctgtgcgccttgggcctggtgttggggttggtggggatcatagtggggacagtgctcataatctag

SEQ ID NO: 123073 - DNA, 630 bp, synthetic construct
  misc_feature 1..630: note = Description of Artificial Sequence: Synthetic coding sequence
  source 1..630: mol_type = other DNA
atgcggccagaagatcgaatgtttcacattcgggccgtgattctgagagccctatctctcgccttccttttaagtttgcgcggcgccggcgctataaaggcagatcacgtatcgacctatgccgcatttgtccagacacataggccaactggtgaattcatgttcgagttcgatgaagacgagatgttttatgtggatctggataagaaggaaacagtgtggcatctcgaggaatttggccaggccttctccttcgaagcccagggcggattggctaacattgcgattctgaataataacctgaacacgctcatccaaagaagtaaccatacacaggccacgaatgatcccccagaggtaaccgtatttcccaaggagcctgttgagctgggccaaccaaatactctaatatgccacatcgacaagttttttcctcccgtccttaacgtcacatggttgtgcaatggggagttggtgaccgagggtgtcgctgaatccttgtttctgccgagaaccgattactcgtttcacaaatttcactatctgactttcgtcccctcagccgaggacttctacgactgtcgagtggaacactggggactggatcagcctctgctgaagcattggtag

SEQ ID NO: 123074 - DNA, 72 bp, synthetic construct
  misc_feature 1..72: note = Description of Artificial Sequence: Synthetic coding sequence
  source 1..72: mol_type = other DNA
atgagacccgaagacagaatgtttcacattcgtgcagttattcttagagccctaagccttgcttttttgtag

SEQ ID NO: 123075 - DNA, 639 bp, synthetic construct
  misc_feature 1..639: note = Description of Artificial Sequence: Synthetic coding sequence
  source 1..639: mol_type = other DNA
atgaggccagaagacaggatgttccatatccgggccgtgattctgcgagccctgagcttggcgttcctcctaagtctgcggggcgctggtgccattaaggccgatcacgtgtctacctacgccgcatttgtgcaaacacatcggccaactggcgagttcatgtttgagtttgatgaggacgaaatgttttacgtcgatctagacaagaaagaaaccgtctggcatctcgaagagttcggacaggctttttcctttgaagtcaccgtcttccccaaagagcctgtcgagctcggccagcctaacacactgatatgtcacatcgacaaattcttcccacccgtactgaacgtgacctggctgtgtaacggggagctggtaaccgaaggcgtggccgagagcctattcctgccccgcactgattattcattccacaagtttcactacttaactttcgtgccaagcgctgaggacttttacgattgccgcgtcgagcactggggcctggaccagcctctgctgaagcattgggaagctcaagaacccattcaaatgccggaaaccactgagacggtattgtgtgcccttggcctggtgcttgggctggtagggatcattgtggggacagtcctaataatctag

SEQ ID NO: 123076 - DNA, 630 bp, synthetic construct
  misc_feature 1..630: note = Description of Artificial Sequence: Synthetic coding sequence
  source 1..630: mol_type = other DNA
atgcgaccagaagaccgtatgtttcacatcagggccgtaatattaagagcccttagtctcgccttcctgctctccctgagaggagccggggcaatcaaggcagaccacgtctccacttacgccgcctttgtccagacacaccgaccaactggcgagtttatgtttgagttcgatgaggatgagatgttctacgtggatctcgataagaaggagacggtgtggcacctggaggaatttggacaagcctttagtttcgaagctcaggggggactcgcaaacattgcaatccttaacaataacctcaatacattaatccagcgaagtaatcatacacaggctacgaacgaccctcccgaggtgaccgtcttcccaaaggagcccgtagagctaggacagcccaacacacttatttgccacatagataagttcttcccccccgtgctcaacgtcacctggttgtgtaatggagaactcgttaccgagggcgtcgccgagagcctgttcctgccccgtacagattactcgtttcacaaatttcactatctgactttcgttccaagtgctgaagacttctatgattgtcgggtggaacactggggccttgatcagcctctgctcaagcattggtag

SEQ ID NO: 123077 - DNA, 387 bp, synthetic construct
  misc_feature 1..387: note = Description of Artificial Sequence: Synthetic coding sequence
  source 1..387: mol_type = other DNA
tgaaacactctgatctgtcacattgataaattctttccccccgtgctcaacgtgacctggttatgtaatggcgagctagtcactgaaggcgtggctgagtctctctttctccctcgcacagactactcctttcataaatttcattaccttacatttgtgccgtccgccgaggacttctatgattgccgggttgaacactggggtcttgaccagcctttactgaagcattgggaagctcaggaacctattcagatgccggagaccaccgagactgtgctgtgcgcacttggtctggtacttggactggttggcatcatcgtgggaactgtgttgatcataaagtctctgcgatcaggccacgatccccgggctcaggggacactgtag

SEQ ID NO: 123078 - DNA, 783 bp, synthetic construct
  misc_feature 1..783: note = Description of Artificial Sequence: Synthetic coding sequence
  source 1..783: mol_type = other DNA
atgcggcccgaggacaggatgttccacataagggccgttattctgcgggcactcagcctcgccttcttactgtctctgcgcggcgctggagctatcaaggctgaccatgtctcaacatacgccgctttcgtccaaactcacagacctacaggagagttcatgtttgaattcgacgaagacgaaatgttttacgtggatttggataaaaaggagacagtgtggcacctggaagagtttggacaggcttttagcttcgaggctcagggcggtctcgcaaacatcgcgattttgaacaataaccttaatacattgatacagaggagtaaccacactcaagccactaacgatcctccagaagtcacagtattcccaaaagagccggtggagctggggcagcctaatactctgatctgccacattgataaattctttcctcctgtcctgaacgtgacttggctctgcaacggcgaactggtgactgaaggggtcgccgagtcactgtttttgccccgcaccgattattcatttcacaaattccactatctgacattcgtcccctcagctgaagatttctacgactgcagggtcgagcattgggggctggaccaacctctgctcaaacattgggaagcccaggaacctattcaaatgcccgaaacgacggaaactgtcctctgcgccctgggactcgttctgggtctagtgggcatcatagtgggcactgtgttgattattaagagccttaggagcggacacgatccacgtgctcagggcacactgtag

SEQ ID NO: 123079 - DNA, 639 bp, synthetic construct
  misc_feature 1..639: note = Description of Artificial Sequence: Synthetic coding sequence
  source 1..639: mol_type = other DNA
atgcggcctgaagacaggatgttccacatccgggcagtaattctgcgggctttgagcttagcctttttactgagtctgaggggggccggggcgatcaaggccgaccacgtgtctacctacgcggcttttgttcagactcaccgccctacaggggaatttatgtttgagtttgatgaagacgaaatgttttatgtggacctggacaagaaagaaaccgtttggcatctcgaagagttcgggcaagctttttcgttcgaggttacagtttttcccaaagaacctgtggagctgggtcagcccaacaccctcatttgtcatatagacaaattttttccacctgtgcttaacgtgacttggctgtgtaacggagaactcgtaaccgagggcgtggccgaatctttatttctcccccgaaccgattacagcttccacaagttccactacctaacattcgttccaagtgcggaggacttttatgactgtagggtggaacattggggccttgaccaaccacttctgaagcattgggaggcccaggagcccatccaaatgccagagacaaccgaaaccgtgttgtgcgctcttggactggtgttgggactggttgggattattgtgggaactgtcctgattatttag

SEQ ID NO: 123080 - DNA, 72 bp, synthetic construct
  misc_feature 1..72: note = Description of Artificial Sequence: Synthetic coding sequence
  source 1..72: mol_type = other DNA
atgaggcccgaggataggatgtttcacatccgcgccgtgattctgcgcgctctatcccttgccttcctgtag

SEQ ID NO: 123081 - DNA, 639 bp, synthetic construct
  misc_feature 1..639: note = Description of Artificial Sequence: Synthetic coding sequence
  source 1..639: mol_type = other DNA
atgagacccgaggacagaatgttccacattcgagcggtaattctgcgggctctgtccctggctttcctgctcagtctaaggggcgccggtgcaatcaaggcagaccacgtatcaacctacgctgccttcgtgcagacccatcgacctaccggggaatttatgtttgaatttgacgaggatgagatgttttatgtcgacttagacaagaaggaaaccgtctggcacctcgaggagtttggacaggctttcagctttgaagtgacagtttttcccaaagaacccgtggagctggggcagccaaatacccttatttgtcacattgacaagtttttcccccctgtcttgaacgtgacttggttatgcaatggagaactggtcactgaaggagtcgctgaatctctgttcctgccacggaccgactattcatttcacaagtttcactatctgacctttgttccttctgcggaagacttttatgactgccgcgtggagcactggggcctcgaccagccgttgctgaagcactgggaagcacaggagcctattcaaatgccggaaaccactgaaacagttctgtgcgctttgggtctggttctcggtttggtgggaatcattgtgggtacagttctgattatttag

SEQ ID NO: 123082 - DNA, 72 bp, synthetic construct
  misc_feature 1..72: note = Description of Artificial Sequence: Synthetic coding sequence
  source 1..72: mol_type = other DNA
atgcgaccagaggaccgtatgttccacatccgggccgtgatactaagggctctctccttggcattcctgtag

SEQ ID NO: 123083 - DNA, 639 bp, synthetic construct
  misc_feature 1..639: note = Description of Artificial Sequence: Synthetic coding sequence
  source 1..639: mol_type = other DNA
atgagacccgaagaccgcatgttccatattcgtgctgtaatccttcgggccctgtctctggcatttttattgtctcttagaggggccggagcaataaaggccgatcatgtgagtacctacgcagccttcgtccaaacacacaggcccaccggtgaattcatgtttgaattcgacgaagatgagatgttttacgtagatctcgataaaaaagaaacagtttggcatctcgaagagtttggacaggcgttttctttcgaggtgactgtttttccaaaggaaccagtggaacttgggcagcctaatacactcatctgccacattgataaattcttcccaccggttctgaatgttacatggctatgcaacggtgagctcgtgaccgagggggtcgctgagtctctctttcttccgaggaccgattacagctttcataagtttcactacttgaccttcgtgccctccgcagaggacttctatgactgcagagttgaacattggggcctagaccagcccctgctgaagcactgggaggcacaggagcctattcaaatgccagaaacaaccgaaaccgttctttgcgcactcggattggttctgggcctggtggggatcatagttggtactgtgctgatcatttag

SEQ ID NO: 123084 - DNA, 387 bp, synthetic construct
  misc_feature 1..387: note = Description of Artificial Sequence: Synthetic coding sequence
  source 1..387: mol_type = other DNA
tgaaatacccttatttgccatattgacaaattctttccacccgtccttaacgtcacatggctgtgtaatggagaacttgtaacagagggcgtcgcagaaagtctcttcttgcctcgcacggactacagttttcataagttccattatctgacatttgtcccctccgcggaggacttttacgattgtcgggttgagcactgggggttggatcagcctctcctaaagcattgggaggcccaagaacctatccagatgcccgagaccacggagactgtgctgtgcgcattgggcctggtgctgggattagtgggcattatcgtcggtaccgttcttatcattaagtcactgcgcagtggccatgacccccgtgcccaaggcactctttag

SEQ ID NO: 123085 - DNA, 630 bp, synthetic construct
  misc_feature 1..630: note = Description of Artificial Sequence: Synthetic coding sequence
  source 1..630: mol_type = other DNA
atgcggcccgaggaccgaatgttccacatacgggccgtcatcctccgggccctctcattggcctttttgctcagtctccgcggcgcaggggccattaaggctgaccacgtatccacgtacgccgcgtttgtacagacccaccgacctaccggcgagttcatgtttgaattcgatgaggatgaaatgttctatgttgatctggataagaaggaaaccgtttggcatttggaggagtttggccaggctttttcttttgaagcacagggtggcctggccaacattgccattctgaacaacaatcttaacactcttatccagcgctcgaaccacacacaagcgaccaacgatcctcccgaagttaccgtttttccaaaggagccagtggagctgggccagcctaacactcttatatgtcatatcgataaattcttcccgcctgtgctgaacgttacctggctgtgtaatggcgagctcgtcacagagggagtggccgaaagcctgtttctgccccgcaccgactactccttccataaattccattacctcaccttcgtaccctcagcggaggacttttatgactgtcgagtagagcactggggactggaccagccacttcttaaacactggtag

SEQ ID NO: 123086 - DNA, 783 bp, synthetic construct
  misc_feature 1..783: note = Description of Artificial Sequence: Synthetic coding sequence
  source 1..783: mol_type = other DNA
atgaggccagaggatcgaatgttccatattcgggccgtgattttgcgcgcactgagtcttgcattcctgctgtctctacggggtgccggtgccataaaggctgatcatgtgtcgacttacgccgcctttgtgcaaacgcatagacccaccggcgagttcatgtttgagttcgatgaggacgagatgttctacgttgatctggataagaaagagaccgtctggcacttagaggagtttggacaggcttttagcttcgaggcccagggaggtctcgctaatatcgccatcctgaataacaatctcaacactcttattcagagaagtaatcatacccaggccaccaatgacccaccagaggtcaccgtgttcccaaaggaacccgtagagcttgggcagccaaacaccctgatctgtcacattgataaattcttcccccccgtccttaacgtgacgtggctctgcaatggtgagctggtgacagagggcgtggcagagagcttgtttcttcctaggaccgattattccttccacaagttccactatctgacatttgtcccgtccgccgaggatttctatgactgtcgggtcgaacactgggggttggaccagccactcttaaaacactgggaggctcaggaacctatacagatgcctgagaccactgagacagttctgtgtgccctgggcctcgtgctgggcttggtgggtatcattgtggggacagtgctcattataaagagcctcagatcaggacacgacccccgggcccagggcacgctctag

SEQ ID NO: 123087 - DNA, 387 bp, synthetic construct
  misc_feature 1..387: note = Description of Artificial Sequence: Synthetic coding sequence
  source 1..387: mol_type = other DNA
tgaaacaccttgatatgtcacatcgacaagttctttcccccagtgttaaatgtcacctggttatgtaacggcgaacttgtgactgaaggcgtggcagagagtctgtttctgccccgcaccgattattcatttcataaattccattatctgactttcgtgcctagcgccgaagatttctatgactgcagggtggagcactgggggttagaccagccactccttaagcactgggaagcccaggagccaattcagatgcctgaaaccaccgaaactgtcttgtgcgcccttggcctcgtgctgggtttggtcggtattatcgtgggcacagtgctgattattaagtctctgcgttccgggcatgaccccagagcccagggaaccctttag

SEQ ID NO: 123088 - DNA, 630 bp, synthetic construct
  misc_feature 1..630: note = Description of Artificial Sequence: Synthetic coding sequence
  source 1..630: mol_type = other DNA
atgcggccagaagacagaatgttccatatccgcgctgtcatactgcgtgccttgtctctcgctttcttgcttagtttgcgcggtgccggcgcaattaaagcagaccatgtgagtacctatgccgctttcgtgcagactcaccggccaactggggagttcatgtttgagtttgatgaggatgagatgttctatgtcgacctcgataaaaaggaaaccgtctggcatttggaagaattcggacaagccttctcattcgaagctcagggtggtttggctaacattgccattttaaataacaacctcaacaccctcatccaaagaagtaaccacacccaggccactaatgatcctcctgaggtaaccgtgtttcctaaggagccagtggagctcggccagcctaatactttaatctgccatatagacaagttctttccgccggtcctgaatgtgacctggctctgcaatggcgagctcgtgaccgagggagtggccgagtccctgttcctacctaggaccgactatagctttcacaagtttcattacctcactttcgtgccatctgccgaagacttttacgactgccgagtggaacactgggggctcgaccaacctctgctcaagcactggtag

SEQ ID NO: 123089 - DNA, 630 bp, synthetic construct
  misc_feature 1..630: note = Description of Artificial Sequence: Synthetic coding sequence
  source 1..630: mol_type = other DNA
atgcggccggaggatcggatgtttcacattagggccgtcatcttacgagcgctgtccctggcatttcttcttagtctcagaggtgccggagccatcaaggcggatcatgtttccacttacgctgcatttgtccagacacataggcctactggagagttcatgtttgaatttgatgaggatgagatgttctacgtcgatctggacaagaaggagacagtatggcacttggaagagtttggacaggccttctccttcgaagctcaggggggtctcgcaaatatcgcaatcttgaacaacaacctcaatacattgatccagagatctaaccatactcaggcaaccaacgacccccctgaggtgacagtctttcctaaagagcccgtggaacttggtcagcccaatactctaatatgtcacatcgataaatttttcccccccgtgttgaatgttacttggctctgcaatggggagctcgtgaccgagggcgttgccgagtcattattcttacctaggacagattattctttccacaaattccactacctaacctttgtgccctcggccgaagacttttatgattgccgtgtcgaacactggggcctggaccaaccgctgctcaagcactggtag

SEQ ID NO: 123090 - DNA, 783 bp, synthetic construct
  misc_feature 1..783: note = Description of Artificial Sequence: Synthetic coding sequence
  source 1..783: mol_type = other DNA
atgcgccctgaagatcggatgttccatattagggctgtgattctccgggccttaagcttagccttcttgctgtccctccgcggcgccggcgccataaaagcagaccacgtcagcacctatgcagcctttgtgcagacgcatcgccctacaggggagttcatgttcgaattcgacgaggatgaaatgttttacgtggatttggacaaaaaggagacggtctggcatctggaggagtttgggcaagcctttagctttgaggctcagggcggcctggccaacatcgccatcctgaataataacttaaacaccctgatccaacgaagcaatcacacccaggcgactaatgacccccccgaggtcacagtgttcccgaaggagcccgtggaacttggacagcctaatacgttgatttgtcacatcgataaattttttcccccagtgctgaatgtgacatggctgtgcaatggggagttagttacagagggtgtggctgaatctctgtttctgccccgcactgattacagcttccataagtttcactacctcacatttgtcccttcagccgaggacttttatgattgcagagtggaacactggggcctggatcagcctctcctgaagcattgggaggcccaggaacctatccagatgccagagactacggaaactgtcctttgtgctctgggtctcgtacttggccttgtgggtattattgtcggaaccgttcttattatcaagtcactgcgctcagggcacgatccgcgtgcccagggcactctatag

SEQ ID NO: 123091 - DNA, 639 bp, synthetic construct
  misc_feature 1..639: note = Description of Artificial Sequence: Synthetic coding sequence
  source 1..639: mol_type = other DNA
atgagacccgaagaccggatgttccacatacgtgcggtaatcctgagagctctgagtctggcctttctgttgtccctgcgcggcgccggtgctatcaaggccgatcacgtgtctacttacgcagcgtttgtacagactcaccgacccactggagagttcatgtttgagttcgacgaagacgaaatgttctatgtggaccttgataaaaaggagactgtgtggcacctggaagaatttggccaggccttctctttcgaggtgaccgtattccctaaggagcctgtggaactggggcaaccaaataccctgatatgtcacatcgataagtttttcccacccgtcctgaatgtgacctggctttgtaatggtgagctggtgaccgagggcgtggcagagagtctgttccttcctcgcactgattacagctttcacaaatttcactatttaacctttgtgccctccgcggaagatttttatgattgccgagtggaacattggggactggatcaacctctgcttaaacattgggaagcccaagaacccatacagatgcctgagacaactgagactgttctttgcgccctgggcctggtgctcggccttgtcggcattatcgtaggcaccgtgctgattatctag

SEQ ID NO: 123092 - DNA, 783 bp, synthetic construct
  misc_feature 1..783: note = Description of Artificial Sequence: Synthetic coding sequence
  source 1..783: mol_type = other DNA
atgcgcccagaagatcggatgttccatatccgcgcggtgatcctaagagcactgtcactagcattcctcctgagcctgaggggcgccggggcgattaaagcagaccacgttagtacctacgcggccttcgtccaaactcatagacccactggagagttcatgtttgaattcgatgaagacgaaatgttctacgtggacctggacaaaaaagaaaccgtttggcaccttgaagaattcggacaggccttttcctttgaggctcagggtggtctggccaatatagctatcctgaataacaatctgaacacgctcatacagaggagcaaccacacgcaggctaccaatgaccctccagaggtcaccgtgttccccaaggagcccgtggaactcgggcagccaaataccctcatttgccatatagataaattctttcctccagtgctgaacgtgacctggctctgcaacggcgagctggttacagagggagtggccgagtcgctctttctccctaggactgactacagcttccataagttccattacctgacattcgtacctagcgccgaggacttttacgattgccgtgttgaacattggggcctggatcagcccctgcttaagcactgggaggcacaggagcccatacagatgcctgagacaacagaaacagttctctgtgctctgggacttgtcttgggcttagtgggcattatcgttggcacagtgctgatcatcaaatcgcttcgttccggccacgatcctcgggcccaggggaccttatag

SEQ ID NO: 123093 - DNA, 783 bp, synthetic construct
  misc_feature 1..783: note = Description of Artificial Sequence: Synthetic coding sequence
  source 1..783: mol_type = other DNA
atgcgacctgaggatagaatgttccatatacgcgccgtgattctgagggctctttccctcgccttcctgctgtccctacgtggtgccggagccattaaagccgatcatgtgagtacgtacgcggcatttgtgcagacacatcggcctacgggtgagttcatgttcgaattcgacgaagacgagatgttctacgtggatctcgacaaaaaagagaccgtgtggcatctggaagagttcggccaagctttttcttttgaagcccagggtgggcttgctaatatagcaatactgaacaacaaccttaatacactgatccagcggagtaaccacactcaggcgacgaacgatcctcccgaggtcactgtgtttccgaaagagcctgtggagttaggtcagcccaacacccttatttgtcacattgacaagttctttcctcccgtcctgaacgtgacatggctgtgcaatggcgaattggttaccgaaggagtggctgagagtttatttcttccgaggactgattatagcttccacaaatttcactacctaaccttcgtgccctcagcagaagatttctatgattgccgcgtcgagcattggggtctggaccagccccttctaaagcattgggaggcccaggaaccaatccaaatgccagaaactactgaaaccgtgttgtgtgctctggggttagtgttgggcttagtgggaatcatagtggggactgtcttgatcataaagtccctcaggtcaggacatgatccgcgcgcccagggtaccttgtag

SEQ ID NO: 123094 - DNA, 783 bp, synthetic construct
  misc_feature 1..783: note = Description of Artificial Sequence: Synthetic coding sequence
  source 1..783: mol_type = other DNA
atgaggcccgaagatagaatgtttcacatcagggccgttatcctgcgagccttgagcctggcattcctgctgagcctcagaggagccggtgctattaaagcagaccacgtgagcacctatgccgccttcgtccagacccaccgtcccacaggcgagttcatgtttgagttcgatgaggatgagatgttttatgtggacttggacaaaaaggaaactgtctggcatcttgaagagtttggccaggctttttccttcgaggcccaaggaggattggcgaacatagctatcctcaataacaatctgaatacactgatacaaagatccaaccatactcaggcaacaaatgaccctcccgaggtgaccgttttccccaaagagccggtcgaacttggtcaaccaaacactctcatttgccatatcgacaagtttttcccccccgtgctgaatgtaacatggctgtgcaatggcgagctggtcaccgagggagtcgccgagagtctcttcctgccccgcactgattactcatttcataaatttcactatctcacgttcgtgccttccgccgaggacttttacgattgcagagtggaacactgggggctcgaccagccactgctcaagcattgggaggcgcaggagccaatccagatgcctgaaacgaccgagacagttctgtgcgcgctcgggttggtgctcgggttggttggaattatagtggggaccgtactgataataaagtcgctgcgctccggccatgatcctcgcgctcaagggacactgtag

SEQ ID NO: 123095 - DNA, 783 bp, synthetic construct
  misc_feature 1..783: note = Description of Artificial Sequence: Synthetic coding sequence
  source 1..783: mol_type = other DNA
atgagaccggaggatagaatgtttcacataagggccgtgatcctgagggccctgtccctggcctttttgctgtccttaagaggtgctggcgcgatcaaagcggaccacgtgagcacctatgctgcattcgttcaaactcaccggccgacaggcgaatttatgtttgaatttgatgaagatgaaatgttttatgttgatctggacaagaaagagaccgtgtggcaccttgaagagtttgggcaagcatttagcttcgaggcccagggaggcctggccaacatagctatcctcaataacaatttgaacaccctgatccaacgctcgaaccatactcaggccacaaatgatccccccgaggtcacggtttttccaaaggaacccgtggaactgggacagcccaacaccctgatttgccatatcgacaagttttttccaccggtccttaacgttacttggttgtgtaacggggagctggtcacagagggagttgcagagagcctgttcctcccaagaaccgactatagttttcacaaattccattacctgacatttgtcccctccgctgaagatttctatgactgccgggtggaacattgggggctggaccaacctctgttaaagcactgggaggcccaggagcctatccagatgccagaaactacagaaacagttttgtgcgccctggggctggtgcttggactggtgggcattatcgtcggcacagtgttaattatcaagtctctgcgctccggccacgaccccagagcacagggaaccctctag

SEQ ID NO: 123096 - DNA, 783 bp, synthetic construct
  misc_feature 1..783: note = Description of Artificial Sequence: Synthetic coding sequence
  source 1..783: mol_type = other DNA
atgcggcctgaagacaggatgtttcacatcagagccgtgattctgagggcactctcactcgcttttctcctttccctgcgcggagcgggggccattaaggctgaccacgtgtctacttatgcagcattcgtccagacccaccgtcccacgggtgaatttatgttcgaattcgatgaggatgagatgttctacgtggatctcgacaaaaaagagacggtttggcatctcgaggagtttggacaggctttctctttcgaggcccagggagggctcgctaatatcgctatcctcaacaataacctgaacacactaatccagcggtcaaaccatacccaggcaaccaacgatccacccgaggtcaccgtgttccctaaggagccggtggaactaggccagcctaatactttgatctgccacatcgacaagttcttccctcctgtactgaatgtaacgtggctgtgcaatggcgaattagtgactgaaggtgtggcagaatccctgttcctcccacggacagactactcttttcacaaattccactacttaaccttcgtgcctagtgcagaagacttttatgattgtagggtggagcattggggactcgatcaacctctcttaaagcactgggaagctcaagaacccatacagatgcccgagaccaccgagaccgttctgtgtgctctgggtttggttctggggctggtggggattatcgttgggaccgtcttaataattaaatcgttacggtccggacatgatccccgggctcaggggaccctgtag

SEQ ID NO: 123097 - DNA, 783 bp, synthetic construct
  misc_feature 1..783: note = Description of Artificial Sequence: Synthetic coding sequence
  source 1..783: mol_type = other DNA
atgcgcccggaggacagaatgttccatataagggccgtgatcctgcgcgcattgtcgcttgcctttctgctgagcctgcggggcgctggcgccattaaggccgaccatgtgtccacctatgccgctttcgttcagacccaccggccgactggggagttcatgtttgaatttgacgaggacgaaatgttttacgtggatctggacaagaaagagaccgtatggcacctggaagagttcggacaggccttttcgttcgaggcccagggtggactggccaacatagccatacttaataacaatctgaataccctcatccagcggtcaaatcacacgcaggcaactaacgacccccccgaggtgacagtttttcctaaagagccagtggagctcggacagcccaataccctgatctgtcacattgacaagtttttcccacctgtgctgaatgtaacatggctttgtaacggagagcttgttacggaaggagtggcagagtcattgttcttgccacgcacagactacagttttcataagtttcactacttaactttcgtgccctctgccgaggacttctacgactgccgtgtagagcattggggactggaccagccactcctcaagcactgggaagcacaggaacctattcaaatgcccgaaactactgaaacagtgctctgcgcccttggactagtgcttgggctcgttggcatcatcgtagggacggtgctgattattaagagtctgagatctggccacgacccgagggcacaggggacactatag

SEQ ID NO: 123098 - DNA, 777 bp, synthetic construct
  misc_feature 1..777: note = Description of Artificial Sequence: Synthetic coding sequence
  source 1..777: mol_type = other DNA
atgatggtgctgcaagtctctgcagctccacgcacagtcgccctcaccgctctgctcatggtactgttgactagcgttgtgcagggtcgcgctaccccagaaaactatgtctaccagttgcgccaggagtgctatgcatttaatggaacacagcgcttcttggaacgttatatctacaaccgtgaggaattcgtgagatttgatagcgatgtgggtgagttcagggccgtgacagaactcggtcggcctgacgaggactactggaacagccagaaggacttgctcgaagagaagcgagccgtacccgacagggtgtgccgtcataactatgagctagacgaggccgtgacgctccaaagacgggtgcagcccaaggtcaacgtctcacctagcaagaagggtcctctgcagcaccataacctcttagtatgccacgtcacagatttttacccaggatccatacaggtacgatggtttctgaacgggcaggaggaaacggcaggtgtcgtctcaacaaatttgatcagaaacggggattggaccttccagatactcgtgatgctcgaaatgacaccacagcagggtgatgtgtatatttgtcaggtcgagcacacatccctggacagccctgtgacggttgagtggaaggctcaatctgattcagccaggtccaaaacccttactggtgcgggggggttcgtgttggggctgataatatgtggcgtgggaatcttcatgcatcgtcggtccaaaaaggtacaacgcgggtccgcttag

SEQ ID NO: 123099 - DNA, 687 bp, synthetic construct
  misc_feature 1..687: note = Description of Artificial Sequence: Synthetic coding sequence
  source 1..687: mol_type = other DNA
atgatggtgctccaggtgagcgccgcccctcgaaccgtggctctcaccgctttactgatggtcttactgactagtgtggtacaggggagagctacccctgagaactacctttttcagggcaggcaagaatgctacgcctttaacggcactcagaggttcctcgaacggtatatctacaacagggaagagctggtgaggttcgatagcgatgtcggggaatttcgtgctgtcaccgagttagggcgcccagaagcagagtattggaactcacagaaggacatacttgaggaagagagagcagttcccgataggatgtgccgccacaactatgaacttggcggtcccatgactttgcaacgacgcggaagcatacaggtcagatggttcctgaacggacaggaagaaaccgcaggcgtggtgtccaccaatttgattcggaacggcgattggacttttcaaattctagtgatgcttgaaatgacgccccagcagggagacgtgtatacttgtcaagttgaacacacctctcttgactctccagtgacagttgaatggaaggcccaatctgattccgcgagatccaaaacccttaccggcgctgggggattcgtgctaggactgatcatctgtggcgtgggtatttttatgcatagaaggtccaaaaaagtgcagagagggtccgcatag

SEQ ID NO: 123100 - DNA, 777 bp, synthetic construct
  misc_feature 1..777: note = Description of Artificial Sequence: Synthetic coding sequence
  source 1..777: mol_type = other DNA
atgatggttctacaagtaagcgccgcaccccgaacagtcgccctcacggcactgctaatggtgctcctaacctccgtcgtgcaggggcgcgctacaccagaaaattaccttttccaagggcgccaagagtgctacgcctttaacggaacccaacggttcctggagcgttacatttataatagagaagagctggtgaggttcgatagtgatgttggggagttccgggctgtgacagagttgggtaggcctgaagctgaatactggaattcacagaaggatatattggaggaagaaagggcagtccctgaccgcatgtgcaggcataattatgagcttggcgggcctatgactctgcagcgtcgggtacagcctagggtgaatgtatccccgtccaaaaaaggccctctccagcaccataaccttctggtttgtcatgtgacagacttttatccggggtcaatccaagtgagatggttcctaaatgggcaggaagagacggccggggtggtctctacgaacctaataaggaatggggattggaccttccaaatcctcgtgatgctggagatgactcctcagcagggcgatgtttatacatgtcaagtggagcacacctcacttgactctcccgtgactgtggagtggaaagctcagtcggactccgctagatcaaagacccttactggagcgggcgggttcgtcctgggcctgattatttgtggagtaggaattttcatgcaccgtcgctccaaaaaggtgcaaaggggctccgcttag

SEQ ID NO: 123101 - DNA, 690 bp, synthetic construct
  misc_feature 1..690: note = Description of Artificial Sequence: Synthetic coding sequence
  source 1..690: mol_type = other DNA
aaacaagcttggagaggaagtgccacgcgcctcgggccacagaattcaggcagacaggagtgctatgcgttcaacggcacccaaagatttttggagagatatatatacaatagggaagagcttgtgcggtttgactccgacgtaggtgaatttagagccgttaccgaactcgggcgtccagaagcagaatactggaattctcagaaagatatcctggaggaagaacgcgccgtgcccgaccggatgtgcaggcataactacgagctggggggacccatgactcttcagcgaagagtccaaccacgcgttaatgttagccctagtaagaagggaccactgcagcaccataaccttcttgtttgtcacgttacagacttctaccccggctctattcaagtacgatggtttctgaacggccaggaagagaccgccggtgttgttagtacaaatctaatccgaaacggagactggacgtttcagatcctcgtgatgctggagatgactccccaacagggcgacgtatacacctgccaagttgagcacacaagccttgatagccccgtgaccgtagagtggaaagcacagagcgactcagcgcgctccaagaccctaacaggagctggcggattcgtgcttggactaattatctgtggggtgggaatttttatgcacagacggtcaaaaaagtag

SEQ ID NO: 123102 - DNA, 687 bp, synthetic construct
  misc_feature 1..687: note = Description of Artificial Sequence: Synthetic coding sequence
  source 1..687: mol_type = other DNA
atgatggttctgcaagtgagcgcggcacccagaactgtcgctctgacggcccttctgatggtgctgctcacttcggtagtgcagggccgtgccactccggagaattatctctttcagggtcgccaggaatgctatgcttttaacggcacccagcggttccttgaacggtatatctacaatcgggaagaattcgctagatttgactccgacgtcggggagttccgggctgtgacggaacttggccggccagctgctgagtactggaactcccagaaggacattctggaggaaaagcgggccgtccctgatcgaatgtgcagacataactacgagctcggcggccctatgactcttcaaagacgcggctcaattcaagtgcgctggttcctaaatggtcaggaggagacagctggggtcgtcagcacaaacctgatccgcaacggggattggacgttccagatcctggtaatgctggagatgacccctcagcaaggggacgtgtatacgtgtcaggtggaacatacaagtctcgatagtccagtgaccgttgagtggaaagcccagtccgactcagctaggtctaaaaccttaacaggagccgggggatttgtgctggggctcataatctgcggtgttgggatatttatgcatcgcaggtccaagaaagtgcagaggggcagtgcttag

SEQ ID NO: 123103 - DNA, 687 bp, synthetic construct
  misc_feature 1..687: note = Description of Artificial Sequence: Synthetic coding sequence
  source 1..687: mol_type = other DNA
atgatggtgctgcaggtgtcagccgctcctcggactgtggctctaaccgctctattgatggtcttgcttacttctgtggttcaggggcgggccactcccgaaaattatctctttcagggtaggcaagaatgctacgcgtttaatggtacacagaggtttctggagagatacatttataacagagaagagttcgtgaggttcgattccgatgtgggtgagtttagagccgtcacagagctgggaagacctgatgaggaatattggaattcacagaaagatatcctagaggagaagcgcgccgttccagacaggatgtgccgtcacaattatgaactgggaggacccatgacattgcagaggcgcgggagcatccaggtgcgctggttcctgaacggccaggaagagacagctggcgtcgtgagcaccaacctgattagaaatggcgactggacatttcagattttagtgatgctggagatgacacctcagcagggtgacgtctacacgtgccaggttgaacatacgagcatggatagcccagtgacggtagagtggaaggcccagtccgacagtgctagatcaaagacactgactggggccggcggattcgtgcttggactcattatttgcggcgtgggtatctttatgcatcgacggtctaaaaaggtgcagagagggagcgcatag

SEQ ID NO: 123104 - DNA, 708 bp, synthetic construct
  misc_feature 1..708: note = Description of Artificial Sequence: Synthetic coding sequence
  source 1..708: mol_type = other DNA
tagaactatcttttccaaggtaggcaggagtgctacgcattcaacggaactcagcggtttcttgagcgctacatctacaaccgagaggaattcgtaaggttcgacagcgatgtgggagaatttcgtgctgtcacagagctgggacgccctgacgaagaatattggaattcccagaaggatatcctcgaggagaagagggcggtccctgatcgcatgtgcagacacaactatgaactgggcggcccaatgactcttcagcggagagttcagccccgagtaaacgtctcgccatcaaagaaaggaccactccagcatcataacctgttagtgtgccacgtgactgacttttacccaggtagtattcaagtgagatggtttctcaacggacaggaagaaaccgccggcgttgtctctaccaacttaataagaaatggagactggaccttccagatcctggtgatgctggagatgactccccaacaaggcgacgtatacacatgccaggtagagcacactagtatggactctcccgtcaccgtagagtggaaggcgcagtccgattccgctaggtccaaaaccctcaccggagccggaggcttcgtactcgggctgataatatgcggtgttggtatctttatgcaccgtcggagtaaaaaaggcgagaaagcatgcagattcaatgaagaccttcataagcagggctcttag

SEQ ID NO: 123105 - DNA, 777 bp, synthetic construct
  misc_feature 1..777: note = Description of Artificial Sequence: Synthetic coding sequence
  source 1..777: mol_type = other DNA
atgatggtgctgcaggtttcagcagcccctcgaactgttgctctgacagcccttctcatggtactgctgacatccgtcgtgcaaggccgcgccactccggaaaactacctgttccagggtcgacaggaatgctacgcgttcaacggcacgcaacgcttcctggagcgctacatttataaccgggaggagtttgtacgcttcgactctgacgtgggggagtttcgcgccgtgaccgagctcggtcgtcctgacgaggaatattggaattcgcagaaggacatccttgaggagaagcgtgcggtgccggaccgcatgtgccgtcacaactacgaacttgggggacctatgacactgcagcggagagttcagccccgcgttaacgtttcaccttccaaaaagggccctctgcagcaccataatctgttggtgtgtcacgtgactgacttttacccaggcagtatccaggttcggtggttcctcaacggacaggaggagactgctggagttgtcagcactaacctcattcgtaatggagattggaccttccagatccttgtaatgctggagatgacgccacagcagggagacgtgtacacctgtcaagtggagcataccagtatggattcgcctgtgacagtggaatggaaagcgcaatcagattccgcacgctcaaaaaccctcaccggcgccgggggtttcgtgctgggactcatcatctgcggggtaggtatttttatgcatagacggtccaaaaaagtgcagaggggatctgcatag

SEQ ID NO: 123106 - DNA, 687 bp, synthetic construct
  misc_feature 1..687: note = Description of Artificial Sequence: Synthetic coding sequence
  source 1..687: mol_type = other DNA
atgatggttttgcaagtgagtgctgcccctaggaccgtggctctcacagcactcctcatggtgctcttgacctcagttgtacagggccgagccacccctgaaaactatttgttccagggtcgtcaggaatgctatgcgtttaacggaacccagcgattcctggagcgttacatttacaatagagaggaattcgccaggttcgattcagacgtcggggagtttcgagcagtgactgaactcggacgccctgcagctgagtactggaacagccagaaagacatcttagaagaaaagcgtgctgtccccgaccggatgtgtaggcataactatgaacttggcgggcccatgacactccagcgtagggggagcattcaagtcagatggttccttaatggacaggaagagacagcaggggtagtgagcacgaatctgattaggaacggtgattggacattccagattttagttatgctagagatgactcctcaacagggagatgtctatacttgtcaggttgagcacacatcacttgattctcctgtgaccgtggagtggaaagcccagtcagattccgctagatcaaagacccttacaggcgccggcggattcgtgctgggtctgatcatatgcggagtcggcattttcatgcacaggcgatctaaaaaggttcagcgcggctctgcctag

SEQ ID NO: 123107 - DNA, 690 bp, synthetic construct
  misc_feature 1..690: note = Description of Artificial Sequence: Synthetic coding sequence
  source 1..690: mol_type = other DNA
aagcaggcctggagaggtagtgccactcggctcggcccccagaatagcgggagacaggagtgttacgccttcaatggaacccaacgctttctggaacgatatatttataatcgggaagagtttgtgcggttcgactccgacgtgggggagtttcgcgccgtgacagaacttggaaggccagacgaggagtattggaactctcagaaagatattcttgaagaggagcgcgccgtccctgataggatgtgccggcacaactacgagcttggggggcccatgacactacagaggagggttcagccacgcgtcaacgtctccccctcgaagaaaggccctctccagcaccataacctgctagtgtgccatgtgactgacttctacccaggaagcatccaggttcgctggttcctaaacgggcaggaggagacagctggagtggtctcaaccaatttaatccgcaatggcgactggacattccagatattggttatgctcgagatgacaccccaacaaggagatgtgtacacctgccaagtcgaacatacatcgctcgactcacctgttaccgtggaatggaaggcccaatcggacagcgcgcgctcaaagaccctcactggagctgggggctttgtccttgggctaataatctgcggagtcgggatcttcatgcatagaagaagcaaaaagtag

SEQ ID NO: 123108 - DNA, 777 bp, synthetic construct
  misc_feature 1..777: note = Description of Artificial Sequence: Synthetic coding sequence
  source 1..777: mol_type = other DNA
atgatggtcctgcaggtgtccgccgcaccccggaccgtggcactgactgctcttctgatggtccttctaacatccgtggtacagggacgcgcaacgcctgaaaactatctgtttcaaggaagacaggaatgttatgcctttaacgggacacagcggttccttgaacggtacatctacaatagagaagagtttgtgagattcgattctgacgtaggggaatttagggcggtgaccgagctcggccggcctgatgaagagtactggaattctcaaaaagacatattggaagaggagagagccgtacccgaccgcatgtgcaggcacaattatgaacttggcggacccatgacactccagcggcgcgtgcagccacgcgttaatgtgagcccatctaagaaagggccgttgcagcaccacaatctgctggtatgccacgtgactgatttttatcctgggtctatccaggtgcgttggtttttaaacggccaggaggagaccgccggcgtagtgtccactaatctcatccgtaatggcgactggactttccagatcctagttatgctggaaatgacaccacagcaaggggatgtttacacatgtcaagtggagcataccagcctcgattctcctgtgacggtagagtggaaagcccagtccgacagtgcccggagtaagacactgacaggagctggtggatttgttctgggattaatcatttgcggcgtgggaattttcatgcatagacgctctaaaaaggtgcagcgcggctcagcgtag

SEQ ID NO: 123109 - DNA, 708 bp, synthetic construct
  misc_feature 1..708: note = Description of Artificial Sequence: Synthetic coding sequence
  source 1..708: mol_type = other DNA
taaaactacctatttcaagggagacaggagtgttacgcctttaatggcacacagcgctttttggagcgttatatctataaccgagaagaattcgctagatttgattcagatgtgggagaatttcgcgctgtaacggagctggggcgcccggctgccgagtactggaatagccagaaggatatcctcgaagaaaaacgggcagttcccgatcgcatgtgccgtcacaactacgagctgggggggcccatgacattacagagacgtgtgcagccacgtgtgaatgtcagcccttctaagaaaggcccactgcaacaccataatcttctagtttgccatgttaccgatttctatcccggatccatccaagtgcgatggttcctaaacggacaggaagaaacagctggcgtggttagcaccaacctcattaggaatggcgattggacatttcagattctcgtcatgctggagatgaccccccagcagggggatgtgtacacatgtcaggtggagcatacatcactggattcccccgtgactgtcgaatggaaggcccagtcagactcagccagatcgaaaacactgaccggagcaggaggtttcgtgctcggcctgatcatctgtggagtcggcatattcatgcatcgccgctcaaaaaaaggtgaaaaagcatgccggtttaacgaagacttacacaagcaaggtagctag

SEQ ID NO: 123110 - DNA, 690 bp, synthetic construct
  misc_feature 1..690: note = Description of Artificial Sequence: Synthetic coding sequence
  source 1..690: mol_type = other DNA
aagcaggcctggcgggggtccgcgacaagactcggccctcagaattcaggccggcaggagtgctatgcattcaatggcacccagaggtttctggaacgttacatttacaatagagaagaattcgctaggtttgacagcgacgtcggcgaatttagggctgtgactgagctggggcgacctgcagccgagtactggaactcacaaaaagacattctggaagagaagcgtgcggttcctgatcgtatgtgcaggcacaattatgaacttgggggcccaatgactttgcagaggcgcgtacagcccagagtgaatgttagtccttctaaaaaagggccgctccaacatcataatctgctggtgtgtcacgtgaccgacttctaccctggaagtattcaggtccgatggttcctgaacgggcaggaggaaacggcaggcgtggtgtccacaaacttgattcggaacggcgattggaccttccaaatcctggtaatgctcgaaatgacgccacagcagggcgacgtttatacctgccaggtcgaacataccagcctcgacagtccagtgactgtggagtggaaagcacagtcagactccgcacgcagcaagacactgactggggccgggggatttgtcctcgggctgataatatgcggagtgggaatcttcatgcaccgaagatctaagaagtag

SEQ ID NO: 123111 - DNA, 777 bp, synthetic construct
  misc_feature 1..777: note = Description of Artificial Sequence: Synthetic coding sequence
  source 1..777: mol_type = other DNA
atgatggtcttacaggtctccgctgcgccacggacagtggcgcttaccgccctactgatggtgctactcacctccgtggtgcaaggtagggccacacctgagaactacttgtttcagggcagacaggagtgttatgctttcaatggcacccagcgttttctggaacgttacatctacaaccgtgaagagttcgccaggtttgacagcgatgtaggcgagtttcgggcagtgaccgagctaggaaggccagccgccgaatactggaacagtcagaaggacattcttgaggagaagagggctgtgccggatagaatgtgtcgccataattatgagctggggggacccatgactctgcagaggagggttcagcctagagtgaatgtctctccctctaagaaggggccccttcaacaccacaaccttcttgtttgccacgtgaccgacttttaccctggttctattcaagtgcgttggtttctgaacggtcaagaggagaccgctggagttgtgagtacaaatctcatcaggaacggtgactggacttttcagatcctggtgatgcttgaaatgactccacagcaaggtgatgtttatacgtgtcaggtggaacatacaagcttggactctccggtcacagtggagtggaaggctcagtcagattctgctaggagcaaaactctcacgggagcgggaggattcgttttgggactgattatctgcggcgtcggaatcttcatgcatagaaggtcaaagaaagttcagcggggtagcgcctag

SEQ ID NO: 123112 - DNA, 249 bp, synthetic construct
  misc_feature 1..249: note = Description of Artificial Sequence: Synthetic coding sequence
  source 1..249: mol_type = other DNA
atgaccccccaacagggggatgtctacacatgccaggtggaacacacctcgctagattctcctgtgaccgtggaatggaaggcccaatccgatagcgcaaggtcaaaaacactgacgggcgctggaggccgggcaggagcgcaccatctgtggtcaggccacctgcatgcccaggaggaacaggaaagcagtacccggatctgtattaatcgggtgccagaattgacggaaaagaccatcgtgccttag

SEQ ID NO: 123113 - DNA, 777 bp, synthetic construct
  misc_feature 1..777: note = Description of Artificial Sequence: Synthetic coding sequence
  source 1..777: mol_type = other DNA
atgatggtcctgcaggtgtctgccgccccccgaacggtcgcactcactgccctccttatggtgctcctcacctctgtcgtgcagggacgcgccactcccgagaattatctgttccagggcagacaggaatgttacgctttcaatggaacccagcggtttctggagcgttacatttataatcgcgaggagttcgtcaggtttgatagtgacgtaggggagtttagggctgtgaccgagctgggtagaccggatgaagagtactggaacagtcagaaggacattctggaagaaaaacgggccgtgcctgatcggatgtgcagacacaactatgagttgggtggtccgatgactctgcagaggcgggttcaaccacgcgtgaacgtgtctccatctaagaagggcccactgcaacatcataatctcctggtctgtcacgttactgatttctatcccggctctatacaggtgagatggtttcttaacggccaagaggaaaccgccggtgtggtcagcactaacctgattcggaacggagattggaccttccagattctcgtgatgttagagatgaccccacagcagggggatgtgtacacttgtcaggtggagcatacttcaatggactcacccgtgactgtagagtggaaggcgcaaagcgattcagccagatcgaaaactctgactggggcgggaggttttgttttgggtttaatcatctgtggggtcgggattttcatgcacaggcggtccaaaaaggttcagagagggtccgcctag

SEQ ID NO: 123114 - DNA, 690 bp, synthetic construct
  misc_feature 1..690: note = Description of Artificial Sequence: Synthetic coding sequence
  source 1..690: mol_type = other DNA
aagcaagcatggcggggatcggccaccaggttaggcccacagaattcaggccgccaggagtgctacgccttcaatgggacccagcgcttcctagagcgctacatatacaaccgcgaagagtttgctcggttcgacagtgacgtgggcgaattcagagcagtgactgagctgggcagaccagcagcggaatattggaattcacagaaggatatcctggaggagaagagagcggtaccagatcggatgtgtcggcacaactatgaattaggcggtcctatgaccctacagcgtcgtgttcagcccagggtgaatgtgagtcccagcaaaaaaggacctctacagcatcataatcttctcgtgtgccatgtgactgacttttatccaggctccatccaggtccggtggttcctgaatgggcaagaagagacagccggggtggtttcaactaatctgatacggaatggggactggactttccagatcctggtcatgctagaaatgacacctcagcaaggcgatgtttatacctgccaagttgagcacacttccctcgatagtcccgtgaccgtcgaatggaaagcacagtccgacagcgcacgctccaaaacactgaccggcgccgggggatttgtgctgggcctgatcatatgtggggtcggcatcttcatgcatcgtcggtctaaaaagtag

SEQ ID NO: 123115 - DNA, 708 bp, synthetic construct
  misc_feature 1..708: note = Description of Artificial Sequence: Synthetic coding sequence
  source 1..708: mol_type = other DNA
taaaattatcttttccaaggccggcaggagtgctatgcttttaacgggactcagcggttcctggagcggtacatctataaccgggaagagctggtgagatttgactctgacgtgggcgagtttagagccgtcacagagctgggacgccccgaagctgaatactggaatagccagaaagatatccttgaggaggaacgcgccgtgcccgacagaatgtgccgtcataattacgagctcggcgggcctatgactctgcagaggcgagtgcagccccgagtaaatgtctcgccttctaaaaagggaccactgcagcaccataatctactcgtctgtcacgtgactgatttttatcctggttctatccaggttagatggtttcttaatggacaggaggagacagctggcgtggtttccacaaacctgattcggaatggagattggacgtttcagatcttggtcatgttggagatgaccccccaacaaggtgatgtctatacctgccaagtcgagcacaccagtctggacagccccgtaaccgtcgagtggaaggcgcagagcgacagcgcacgatctaaaactttaacaggcgccggaggtttcgtgttgggactcatcatctgcggtgttgggatattcatgcaccggaggtcaaaaaaaggagagaaggcgtgtcgctttaacgaggatttacacaaacaaggttcctag

SEQ ID NO: 123116 - DNA, 777 bp, synthetic construct
  misc_feature 1..777: note = Description of Artificial Sequence: Synthetic coding sequence
  source 1..777: mol_type = other DNA
atgatggtgttacaggtgtccgctgccccacgcaccgtggcattaacagcgctgttaatggtgctgctgacctccgtggtgcagggccgcgccacccctgagaattatcttttccaaggcagacaagagtgctacgcattcaacgggactcagaggtttctggagaggtatatatataacagagaagagtttgcaaggttcgactcggatgtgggagagtttcgggctgtaaccgaactcgggcgcccggccgccgaatattggaattcccagaaggacattctcgaggagaaacgcgcagtgcccgaccggatgtgtcgtcataactatgaactcggtggacctatgaccctgcagagacgggtgcagcctcgggttaacgtatcccccagtaaaaaaggccccctgcagcatcacaacctgctggtttgtcatgtcaccgacttctaccccggatcaatacaagtccggtggttcctgaatggacaggaggagaccgcaggcgttgtttcaaccaacctcattcggaacggcgactggacatttcagatcttagtgatgctggagatgaccccacaacaaggagatgtgtacacctgccaggtggaacacacatccctggacagccctgtgaccgtggaatggaaagctcagtccgactctgcgcggtctaagactttaacaggcgccgggggcttcgtccttgggctgatcatttgtggtgtaggcatatttatgcaccgaagatccaagaaagttcaaaggggctctgcttag

SEQ ID NO: 123117 - DNA, 708 bp, synthetic construct
  misc_feature 1..708: note = Description of Artificial Sequence: Synthetic coding sequence
  source 1..708: mol_type = other DNA
tgaaactatgtgtaccagttgcgccaggaatgttacgcgtttaatgggactcagagattcctggaaaggtatatttataaccgcgaggagttcgttcgcttcgacagtgatgtcggggaatttagggccgtcacagaactgggacgaccagacgaagactattggaattctcaaaaggatctgttggaggagaaaagagccgtgcccgatagagtttgtcgacataactacgaactggacgaagccgtgacgttacaacgtagagtgcagccaaaagtcaacgtctcaccaagcaaaaaaggtccactccaacaccataacctgctggtgtgccacgtgaccgacttttatccaggatcaattcaagtgcgctggttcctcaatggacaggaagaaacggctggtgtcgtgtccactaacctgataaggaatggagactggacttttcaaatcctcgtcatgttggagatgactccgcagcaaggtgacgtgtacatctgtcaggtggagcacacatccctcgattctccagtgaccgtggaatggaaggctcagtccgactcagcacgatctaaaactctgaccggggctggaggtttcgtgttgggtctgattatatgcggggtgggcatctttatgcaccggcgaagcaaaaaaggtgaaaaggcctgcaaattcaatgaagatttacacaagcaaggctcttag

SEQ ID NO: 123118 - DNA, 690 bp, synthetic construct
  misc_feature 1..690: note = Description of Artificial Sequence: Synthetic coding sequence
  source 1..690: mol_type = other DNA
aaacaggcttggcgtggatccgccacccggctgggcccacagaactctggtcgccaggagtgttatgcatttaacggaacacagcggttcttagagaggtacatatacaatagggaagagtttgttcgctttgatagtgatgtcggggaattcagggctgtcacggaactgggtaggccggatgaagagtactggaattcccagaaggacatcttggaggaaaaacgggccgtgcctgaccggatgtgtcgtcataactacgagctaggtggacccatgaccctgcaacgccgagtccagcccagagtgaacgtgtccccctctaaaaaggggcccctgcaacaccacaatctgttagtgtgtcatgtgactgacttctatcccggctcgatccaggttaggtggttcttaaacggacaggaagagaccgcaggcgtggtgtctaccaacctgattagaaacggcgattggactttccagatcctagtaatgcttgagatgacaccccagcagggagacgtctatacatgccaggtggaacatacgtcaatggatagccctgtgactgtagaatggaaggcgcaatccgactccgcacgttctaaaacgttaaccggtgcaggcggtttcgtcctggggcttatcatctgtggcgtgggtatattcatgcatcgccgtagcaagaaatag

SEQ ID NO: 123119 - DNA, 687 bp, synthetic construct
  misc_feature 1..687: note = Description of Artificial Sequence: Synthetic coding sequence
  source 1..687: mol_type = other DNA
atgatggttcttcaagtctctgcggcccccaggactgtggcactcactgccctgctgatggtgctgctgacgagcgtggttcaggggcgcgccacacccgagaactacgtgtaccaactgcgccaagaatgctatgcgttcaatggaacacagcgtttcctagaacgttacatatacaacagggaagaattcgtcaggtttgattccgatgtgggtgagttcagggccgtcaccgagctgggacgacctgatgaggactactggaattctcaaaaggaccttctggaagagaaacgggcggtacctgacagggtgtgccgccacaattatgagctggacgaggcagtgactttacaacgtagaggaagcatacaagtacggtggtttcttaatgggcaggaggagactgctggagtggtaagtactaacttaattcgcaatggcgattggaccttccaaattctcgtgatgctagagatgacaccccaacagggcgacgtctacatctgtcaggtggaacatacctcacttgatagtcccgtcaccgtggagtggaaggctcaaagcgacagtgcacgaagtaaaaccttaacaggagcaggggggttcgtcttggggctgatcatatgcggggtcggtatatttatgcatcgccgcagcaagaaggtacagaggggcagtgcatag

SEQ ID NO: 123120 - DNA, 687 bp, synthetic construct
  misc_feature 1..687: note = Description of Artificial Sequence: Synthetic coding sequence
  source 1..687: mol_type = other DNA
atgatggttttacaagtttctgccgccccaagaaccgttgccctcacagctctgttgatggttctcctcacaagtgtggtgcaaggtcgagccacacctgagaactacctgttccagggccggcaggaatgttatgcattcaacgggacccagagattcctagaacggtatatttacaatagagaggagttcgtgcggttcgacagcgacgtgggggagttccgagcggtcaccgaactgggacgccccgacgaagaatactggaattcgcaaaaggatatcctcgaggagaagcgggcggtccccgaccggatgtgtcgacacaactacgaactcggaggccctatgactttgcagcgaagggggtccattcaggtgaggtggttcctgaacggccaggaggaaacggccggagtggtctccacaaaccttatccggaacggagattggacgtttcagatattagtaatgctggagatgaccccacagcaaggcgatgtgtacacctgtcaggtggagcatacgtcgatggattccccagtgacagtggagtggaaagcacagtccgactcggcccgctctaagactttgaccggggccggaggatttgtcctcggcctgattatttgcggggtgggcatatttatgcaccggcggtccaaaaaagttcagcgcggttccgcttag

SEQ ID NO: 123121 - DNA, 687 bp, synthetic construct
  misc_feature 1..687: note = Description of Artificial Sequence: Synthetic coding sequence
  source 1..687: mol_type = other DNA
atgatggtgctgcaggtgagcgctgcaccacggactgtagccctcaccgctctcctaatggttttgttaacctccgtggttcaaggcagagctacacctgagaactatctgttccaagggcgccaggagtgttatgccttcaatgggacacagagattcctcgagcggtatatttataaccgagaagaatttgctcgtttcgattccgatgtaggcgagttccgcgccgtgaccgaattaggccggccggcggccgaatattggaactctcaaaaggatattctcgaggaaaagcgagctgtgccagatcggatgtgtagacataactacgaattaggcggccccatgacactgcaacgcaggggaagtattcaagtccgttggttcctaaacggccaggaggaaacagcaggagtcgtgtccaccaacttaatcagaaacggcgactggaccttccagatactggttatgctggagatgactccacagcagggcgacgtatacacatgtcaggtggaacacacatcattggactcaccagtgactgtggagtggaaggcccagtctgatagcgctcgatcgaagactctcacaggcgccggaggttttgtgctgggcctaatcatctgtggggttggtatttttatgcacagaaggagcaagaaagtgcagcggggtagtgcgtag

SEQ ID NO: 123122 - DNA, 690 bp, synthetic construct
  misc_feature 1..690: note = Description of Artificial Sequence: Synthetic coding sequence
  source 1..690: mol_type = other DNA
aagcaggcgtggcgaggcagcgctacaagactgggacctcagaattcaggacggcaggaatgctacgcctttaatggcactcagcgcttcctcgagagatacatctacaacagggaagaatttgtccggttcgacagcgacgtcggggagttccgggcagtcacagagttaggaaggcccgacgaagaatattggaactctcagaaggatatccttgaagaaaaacgcgccgttcccgatagaatgtgtcggcataactacgagctaggcggaccgatgacacttcagagaagggttcagccccgggtgaatgtatctccaagtaagaaaggccctctccagcaccacaacctcctggtctgtcatgtgactgacttttaccccggcagcattcaggttcggtggttccttaacggccaagaggagactgccggagtagtgtcaactaacctgatccgcaatggggactggacatttcagatactggtcatgttagagatgacaccgcagcagggtgatgtctacacctgccaagtggaacacacatcaatggatagtccagttaccgtggagtggaaggctcaaagcgattctgcgagatctaagacgttaactggagctggcgggtttgttttggggctgatcatttgcggggtgggcatctttatgcataggagatcaaaaaagtag

SEQ ID NO: 123123 - DNA, 708 bp, synthetic construct
  misc_feature 1..708: note = Description of Artificial Sequence: Synthetic coding sequence
  source 1..708: mol_type = other DNA
tagaactatctgttccaagggagacaagagtgttacgccttcaacggcacgcagcgcttcttggagaggtacatatataacagagaggagttcgtacggtttgattctgacgtgggcgagttcagggccgttactgaacttggccgacctgacgaagagtattggaattctcagaaggatatacttgaagaggagcgcgccgtgccagatcgaatgtgccggcacaactatgaacttggaggccctatgactcttcagcgcagagttcaaccccgagtcaacgtgtccccttctaaaaaaggacctctgcaacaccacaaccttttggtgtgtcatgtcacagacttctatccgggttccatccaggttaggtggtttcttaatggacaagaagagaccgccggggttgtgagcaccaatttgattaggaatggcgactggacattccagattctggtcatgttggaaatgaccccccaacagggtgatgtctatacctgccaggtggagcacacctctctggattcaccagtgacagtcgagtggaaggcacagtctgacagcgctaggtctaaaacactcacaggcgcaggtggattcgtgttgggtctcatcatttgcggggtgggcatatttatgcaccggcggtccaaaaaaggcgaaaaagcatgtcgctttaacgaagaccttcacaaacaggggtcttag

SEQ ID NO: 123124 - DNA, 708 bp, synthetic construct
  misc_feature 1..708: note = Description of Artificial Sequence: Synthetic coding sequence
  source 1..708: mol_type = other DNA
taaaattatctgttccaaggcagacaggaatgctacgctttcaacggcactcagcgtttcctcgaaaggtacatttacaatcgagaggagtttgctagatttgacagcgacgttggtgaattcagggctgtgactgagctgggcagacctgcagctgagtattggaacagccagaaagacatccttgaggaaaaaagagccgtgcctgatcgcatgtgtaggcataactacgagctgggagggccaatgacgctacagaggagagtccaacccagggtaaacgtgagtccgtccaagaaaggcccgctacagcaccataacctgctggtctgtcatgtcactgatttttatcctggctccattcaagtgagatggttcctcaacggacaagaggagaccgccggagttgtatctacgaatctgatccgcaacggtgactggacgttccaaatcctggtcatgctcgaaatgacacctcagcaaggtgacgtctacacctgccaggtcgagcacacgtcccttgattcccccgtgactgtggaatggaaggctcagtccgactcggctagatccaaaactttgacaggcgcaggagggttcgtcctagggctgattatctgcggggtgggcatattcatgcatcggagatcgaaaaagggcgagaaggcttgtcgcttcaatgaggatcttcataaacagggaagttag

SEQ ID NO: 123125 - DNA, 687 bp, synthetic construct
  misc_feature 1..687: note = Description of Artificial Sequence: Synthetic coding sequence
  source 1..687: mol_type = other DNA
atgatggtcttacaagtcagcgccgccccaagaactgtggcactcactgccctgctcatggtgctgcttactagcgtggtgcagggacgcgctacacctgagaattatctgtttcagggccgccaggaatgctacgcgtttaatgggacacagcggtttctagagagatatatctataaccgtgaagagttcgtcagatttgattcagatgtgggcgaatttcgggcagtgactgaactgggccggcccgatgaagagtattggaacagtcagaaagacattcttgaagaggagagggccgtacccgacagaatgtgtcgccacaattacgagctcggggggcccatgacactccaacggcggggatcaattcaggtccggtggttcctgaacggtcaggaggaaaccgctggtgtggtaagcaccaatctaatacggaatggagattggactttccagattctggtaatgttggaaatgacaccacaacagggggacgtttatacctgccaagtcgaacacaccagtctggactcacccgtaacggtagagtggaaagctcaaagcgatagcgctaggagcaagactctgaccggggcagggggatttgtgttaggactaataatctgcggggttggcatttttatgcacaggaggtccaaaaaggtccagcggggaagtgcctag

SEQ ID NO: 123126 - DNA, 690 bp, synthetic construct
  misc_feature 1..690: note = Description of Artificial Sequence: Synthetic coding sequence
  source 1..690: mol_type = other DNA
aagcaggcatggaggggcagcgctactagactcggtccacagaactctttacgccaggagtgctacgccttcaatggaacccagagatttctggagcgctacatctataatagagaggaattcgtccgctttgattcggacgtcggagaattcagagcagttaccgagctcggacgacccgatgaagattattggaatagtcagaaagacctgcttgaagagaagagagcagtcccagatagagtttgcagacacaattacgagctggacgaggccgttaccctgcagcgtcgtgtccagcccaaagttaacgtgagcccaagcaaaaaaggacccctgcagcatcataacctgctggtgtgtcacgtgaccgacttttaccccggctccatccaggtgcgctggtttttgaacgggcaggaagaaactgccggcgtcgtgagtactaatctgatccgcaacggagattggactttccagattctcgttatgttagagatgacaccacaacagggggacgtttatatctgccaggtcgagcatacctcactcgacagcccagttactgtcgaatggaaggcccagtcagacagcgccagatctaaaaccttgaccggggccggtggcttcgtgctaggactgattatttgcggggtggggatttttatgcacaggaggagcaagaaatag

SEQ ID NO: 123127 - DNA, 777 bp, synthetic construct
  misc_feature 1..777: note = Description of Artificial Sequence: Synthetic coding sequence
  source 1..777: mol_type = other DNA
atgatggtgctgcaggtgagcgccgctcctagaaccgtggcactaactgcactgctgatggtcctgctcacctctgtggtgcagggcagggccacacctgagaattacctcttccaaggtcgccaggagtgttatgcatttaatgggacacagaggtttctggagcgttatatatataatcgcgaggagttcgcgcggtttgacagcgatgtcggtgagttccgtgcagtaacggagctggggagacctgcagctgaatattggaattctcagaaagacatcctggaggaaaagcgggcagttcccgatcggatgtgcagacataactacgaactgggggggccgatgactttgcagcgccgagtgcagcccagggtgaacgttagtccttccaaaaagggccccctgcagcatcataacctgctggtgtgccatgtgaccgacttctacccaggctcaatacaagtcaggtggttcttgaatggacaggaggagactgccggcgtggtatccaccaatctcataaggaacggtgattggacgttccagatccttgtgatgttggagatgactccccagcagggtgatgtttatacttgccaagttgagcacacaagcttggactcaccagttacagtcgagtggaaggcccagtcagattcagctcggtctaagaccctgactggggcgggcggattcgttctgggcctaatcatatgcggggtgggcatatttatgcacaggagaagcaaaaaggtgcagcggggcagcgcctag

SEQ ID NO: 123128 - DNA, 708 bp, synthetic construct
  misc_feature 1..708: note = Description of Artificial Sequence: Synthetic coding sequence
  source 1..708: mol_type = other DNA
taaaattacctgttccagggccgccaggaatgctatgcctttaatggaacacaaaggtttcttgagaggtacatctacaaccgtgaggagtttgtaagattcgacagtgacgtcggcgaattcagagccgttactgagctcggccgcccagacgaagagtattggaatagccagaaggatatcctcgaggagaagagagcagtgcctgaccgcatgtgccggcataactatgaactaggcggacctatgactcttcagaggagggtgcaaccgcgagtcaatgtctcaccctctaagaagggacctctacagcaccataatctgttggtttgccacgttaccgacttctacccaggctccattcaggtgagatggttccttaatggccaggaagagaccgcgggtgtcgtgtcgactaacttaatcaggaatggcgactggacttttcagatcctggtcatgctggaaatgactccacagcagggcgacgtctacacatgccaggtcgagcacacatcaatggatagccccgtgacagttgagtggaaggcccaatccgattcagccaggagcaagacattgacgggagctggtggattcgtgctgggcctgatcatttgtggcgtgggaatttttatgcatcgtaggtcaaagaagggtgagaaagcttgtaggttcaacgaggatctgcataagcagggttcttag

SEQ ID NO: 123129 - DNA, 690 bp, synthetic construct
  misc_feature 1..690: note = Description of Artificial Sequence: Synthetic coding sequence
  source 1..690: mol_type = other DNA
aaacaagcctggaggggcagtgccacgaggctgggaccccagaacagcggacgccaggagtgctacgccttcaacgggacccagaggtttttagaacggtatatctacaaccgcgaggagttcgccaggttcgactccgatgtgggggagttccgagccgtaacagagctcgggaggccggccgcagagtactggaactcccagaaggacatccttgaagaaaaacgcgcagtcccagaccgtatgtgtcgccataattacgaactcggcggccccatgacccttcagcgacgcgtgcagcctagggttaacgtctcgccatctaaaaaaggtcctctgcaacaccacaatctcctagtctgccacgttaccgacttctaccctggatccatacaggtcaggtggttcctcaacgggcaggaggaaacagcaggtgtagttagtaccaacctcatcaggaacggagattggaccttccagatactcgtgatgctcgagatgaccccgcagcagggtgatgtctatacatgccaggtagagcataccagtctcgactctccagtcactgtcgagtggaaggctcagtccgacagcgcaaggtcaaagacccttaccggtgccggaggcttcgtgttgggattgattatctgtggcgtcggcatctttatgcaccgaagatctaagaagtag

SEQ ID NO: 123130 - DNA, 708 bp, synthetic construct
  misc_feature 1..708: note = Description of Artificial Sequence: Synthetic coding sequence
  source 1..708: mol_type = other DNA
tgaaactacctctttcaaggccggcaggaatgttatgctttcaatggtactcagagatttctggagcgatatatctataaccgtgaggaattcgcccgctttgatagcgacgttggagagttccgcgctgtgactgagttaggcagacccgcagccgaatactggaacagccagaaggacatcctagaagagaaacgagctgtgcctgacaggatgtgcagacacaactacgagctgggtggccctatgacccttcaaagacgcgtgcaaccacgagtgaatgtgagtccgtctaagaagggccccctgcagcaccataatcttctcgtgtgccacgtgactgacttctatcccggctctatacaagttaggtggtttctcaacggtcaggaagaaaccgcaggggtcgtaagtactaacctgatacggaatggtgattggacatttcagatcctggtaatgctggagatgacgccccagcagggagacgtctacacctgccaggtagagcacacctccctggactcccctgtaaccgtggagtggaaggctcagtctgatagcgcacggtcaaagacactcactggcgctggtggattcgtcctcggtctgatcatttgcggcgtcggaattttcatgcatcgaaggtctaagaagggagagaaagcctgtcgtttcaacgaagacctgcataagcagggcagctag

SEQ ID NO: 123131 - DNA, 372 bp, synthetic construct
  misc_feature 1..372: note = Description of Artificial Sequence: Synthetic coding sequence
  source 1..372: mol_type = other DNA
atgatggtcttgcaagtgtctgcagcgcctaggaccgtcgctttaaccgcactactgatggttctgctgactagcgtggtgcagggccgcgccaccccagagaactacctttttcaggggaggcaggagtgttatgcgttcaacggtactcaacggtttttggagagatatatttataatcgggaggaatttgcgcgctttgacagcgatgtgggagagttcagggcagtgactgaactgggaagacctgcggccgagtactggaactcacagaaggatattttggaagaaaaacgcgctgtaccggacagaatgtgccggcacaactatgaactcggaggcccaatgactctgcaacggcgcggggagtag

SEQ ID NO: 123132 - DNA, 249 bp, synthetic construct
  misc_feature 1..249: note = Description of Artificial Sequence: Synthetic coding sequence
  source 1..249: mol_type = other DNA
atgactcctcagcagggggacgtgtatacttgccaggtcgagcacacgtctctggactcccccgtcactgtggaatggaaggcccagtccgattcagctaggtctaagaccttaacgggtgcaggaggccgagctggcgcacaccatttgtggtccgggcatctgcacgcacaggaggagcaagaaagctctaccagaatttgtataaacagagttccggagcttactgaaaagactatcgtgccttag

SEQ ID NO: 123133 - DNA, 249 bp, synthetic construct
  misc_feature 1..249: note = Description of Artificial Sequence: Synthetic coding sequence
  source 1..249: mol_type = other DNA
atgacaccgcagcagggggatgtttatacctgccaggtagagcatacaagcttggattcccctgtgaccgtagagtggaaggcacagtctgacagtgctcgctcgaaaacattgacgggcgctggcggaagggccggagcacaccatttgtggtctgggcacctgcacgcccaagaagaacaggaatcctccaccagaatctgcattaatcgcgtgcctgagctcaccgaaaagactatcgtgccctag

SEQ ID NO: 123134 - DNA, 372 bp, synthetic construct
  misc_feature 1..372: note = Description of Artificial Sequence: Synthetic coding sequence
  source 1..372: mol_type = other DNA
atgatggtactccaagtgtccgccgccccaagaaccgtggctctgactgcccttctgatggtgctgcttacttcagttgtgcaaggacgggcaaccccggaaaactacctattccaaggcaggcaggaatgctacgcctttaatgggacccagcgctttctcgagcggtatatttacaatcgggaagagctggtccggtttgattctgacgtaggggaattccgcgcggtgacagagttaggtcgccctgaagccgagtactggaattcacagaaggacatattggaggaggagcgtgccgtgccagatcgcatgtgtaggcacaattacgaactaggcgggcccatgaccttacagcgtaggggagagtag

SEQ ID NO: 123135 - DNA, 372 bp, synthetic construct
  misc_feature 1..372: note = Description of Artificial Sequence: Synthetic coding sequence
  source 1..372: mol_type = other DNA
atgatggttcttcaagtctccgcagctccacgtaccgtggcactaaccgcactgctgatggttctgctgacttccgtggttcagggcagggcaacccctgagaattacttgtttcaggggaggcaggaatgttacgcttttaacgggacccagcgattcctggaacgatatatttataatcgtgaagagtttgttaggtttgactccgatgtgggggagttccgcgctgtgaccgagctgggcagaccagatgaagagtattggaatagccaaaaagacattctggaagaaaagagagcggtgcctgatcgcatgtgccgtcacaattatgaacttggcgggcccatgacgttgcagcggcggggggaatag

SEQ ID NO: 123136 - DNA, 372 bp, synthetic construct
  misc_feature 1..372: note = Description of Artificial Sequence: Synthetic coding sequence
  source 1..372: mol_type = other DNA
atgatggtgcttcaggtgagcgctgccccgaggaccgtggctcttacggcactgcttatggtgctgctgactagcgtggtgcaaggtagagcaactcctgaaaactacctctttcagggacggcaggagtgttatgcatttaatggaacgcagaggttcctcgaaagatacatatacaatcgggaagagttcgtgcgtttcgacagcgatgttggggaattcagggctgtaacagaactggggcgacccgatgaggagtattggaacagccaaaaggacatcctggaggaagagcgcgcagtgcctgacaggatgtgtcggcacaactacgaactcggtgggcctatgacgctacagcggaggggagaatag

SEQ ID NO: 123137 - DNA, 750 bp, synthetic construct
  misc_feature 1..750: note = Description of Artificial Sequence: Synthetic coding sequence
  source 1..750: mol_type = other DNA
atggtcctgttgacgagcgtagtacagggacgggccacacccgagaattacgtttaccaactccgtcaagagtgttacgcctttaatggaactcagcgcttcttggaacggtacatctacaacagggaggagttcgtgaggtttgactcggatgttggcgaattcagggctgtaactgaattggggagaccagatgaggactattggaactctcagaaagatctgctcgaagagaagagagccgtgccagatcgggtttgtcgccacaattacgaactggacgaggctgtgacactccagcgaagagtccagcccaaggtgaatgtgtcaccaagtaagaaaggacccttgcagcatcacaacctcttggtgtgccacgtaacagatttctatcccggctcgatacaggtgaggtggtttctgaacgggcaggaggagactgccggcgtcgtgagcacaaatctgatccgcaatggcgactggacctttcagatcctggtgatgctggagatgaccccacaacagggcgatgtgtacatctgtcaggtggagcacacaagcctggacagccccgtcactgtcgaatggaaagcccagagtgattcagctcgatccaaaactctgactggagcggggggatttgtgctcggcctcatcatctgtggggtcggtatttttatgcatagacggagtaagaagggagagaaagcgtgcaagtttaatgaggatttgcataagcaaggcagctag

SEQ ID NO: 123138 - DNA, 249 bp, synthetic construct
  misc_feature 1..249: note = Description of Artificial Sequence: Synthetic coding sequence
  source 1..249: mol_type = other DNA
atgactccccaacagggtgacgtttacacctgccaggtagagcacacatcacttgactctcctgtcacagttgaatggaaggctcaatcagacagtgcacgctctaagacactcaccggtgcaggaggcagagctggagcacaccacctgtggagtggacatctgcatgcccaagaagaacaggagagtagcacacggatttgcatcaatagggtccccgagctgactgagaagaccatcgtcccttag

SEQ ID NO: 123139 - DNA, 372 bp, synthetic construct
  misc_feature 1..372: note = Description of Artificial Sequence: Synthetic coding sequence
  source 1..372: mol_type = other DNA
atgatggtgctgcaggtcagcgccgccccgcggactgtggcgctgacagcgcttcttatggtactgctcactagcgtcgttcaggggcgggccacccctgaaaactatctgttccaaggacggcaggagtgttacgctttcaatggcacccaacggttcctagagagatatatctacaatagagaggaatttgctcgcttcgatagcgatgttggggagttcagggccgtcaccgagcttggacggccagcggcggagtattggaattcgcaaaaggatatcctcgaggagaagcgagccgttcccgaccggatgtgtagacataattacgagctgggcggccctatgactttacagcgtcggggggagtag

SEQ ID NO: 123140 - DNA, 372 bp, synthetic construct
  misc_feature 1..372: note = Description of Artificial Sequence: Synthetic coding sequence
  source 1..372: mol_type = other DNA
atgatggtgctgcaggtttccgctgcgccccggaccgttgccctcaccgctctgttaatggtgttgcttacaagcgtggttcagggcagagccactccagagaactatttatttcagggccggcaggaatgttacgccttcaatgggacccagcggtttcttgagcgctacatttacaacagggaggaattcgcccgctttgatagcgatgtgggcgaattccgagcagtcactgaactaggcaggcctgcggccgagtattggaattcgcagaaggacatcctggaggagaaacgggcagtgccagaccgtatgtgtaggcataattatgagctgggaggtcctatgaccctgcagcggcgcggtgaatag

SEQ ID NO: 123141 - DNA, 198 bp, synthetic construct
  misc_feature 1..198: note = Description of Artificial Sequence: Synthetic coding sequence
  source 1..198: mol_type = other DNA
atggatagtcccgtcactgttgaatggaaggcacaatctgatagcgcaaggagcaaaaccctcacaggagcaggcggaagagctggggcccaccacctgtggtccgggcacctgcacgcccaggaggagcaggagtcgtccacccggatttgcattaatcgcgtgccagaacttaccgaaaagacaattgtgccgtag

SEQ ID NO: 123142 - DNA, 381 bp, synthetic construct
  misc_feature 1..381: note = Description of Artificial Sequence: Synthetic coding sequence
  source 1..381: mol_type = other DNA
atgatggtcctccaggtgtccgccgctccgaggaccgtagcacttacagccttgctgatggtccttctgacaagcgttgtccaaggcagggctaccccagagaactacgtctatcagctgcgccaggaatgctatgccttcaacggtacacagaggttcctcgaacgctacatctataatcgcgaagagttcgttagatttgactctgacgtgggcgagtttcgcgctgtgaccgagcttggccgcccagacgaggattactggaattctcaaaaagatctcctcgaggaaaagagagcagttccggatcgagtttgtagacacaactacgaactagacgaggcagtaacgctgcagaggcgggagagagggaaaaaatag

SEQ ID NO: 123143 - DNA, 249 bp, synthetic construct
  misc_feature 1..249: note = Description of Artificial Sequence: Synthetic coding sequence
  source 1..249: mol_type = other DNA
atgactccgcagcagggcgacgtgtacatttgccaggtggagcacacaagtctcgactcccccgtgaccgtggaatggaaggcacaatcagattctgcccgttcgaaaacgctgaccggtgctggaggcagggccggtgcccatcacctttggtccggacatttacacgcccaggaggagcaggagagctcaactcgcatttgcataaacagagttccggacctcacagaaaaaactaatgtcccgtag

SEQ ID NO: 123144 - DNA, 249 bp, synthetic construct
  misc_feature 1..249: note = Description of Artificial Sequence: Synthetic coding sequence
  source 1..249: mol_type = other DNA
atgacaccccagcaaggagacgtttacacctgtcaggtggaacacactagcttggattcccccgtgaccgtggaatggaaggcacagtccgactccgccaggagtaaaactttaactggtgccggtgggagggctggtgcacaccacctgtggagtggacatttgcatgcgcaggaagaacaggaaagctctacaaggatctgcatcaacagagttccagagctgaccgagaagacaattgtgccgtag

SEQ ID NO: 123145 - DNA, 372 bp, synthetic construct
  misc_feature 1..372: note = Description of Artificial Sequence: Synthetic coding sequence
  source 1..372: mol_type = other DNA
atgatggtgttacaggtgagcgccgctccccgcacggtagctctaacagcattattaatggtgctgttgaccagtgtggtccagggtcgagcaacccccgagaattacctgttccagggcagacaggaatgctatgcctttaacgggactcagagattcctggagagatatatatacaatcgggaggagttcgttcgtttcgatagtgatgttggagagtttcgagccgtcaccgaattgggcagacctgacgaggagtattggaacagtcagaaggatattcttgaggaaaagcgagccgttccagatcgcatgtgcagacataactacgagctcggaggtcccatgacacttcagaggcgcggcgaatag

SEQ ID NO: 123146 - DNA, 198 bp, synthetic construct
  misc_feature 1..198: note = Description of Artificial Sequence: Synthetic coding sequence
  source 1..198: mol_type = other DNA
atggactcacccgtcaccgttgaatggaaagctcagagcgattccgccagaagtaaaactctgactggcgcgggagggagggcaggcgcccatcatctatggagcggccatctccatgctcaggaggaacaggagtccagtacgagaatctgtatcaatcgcgtgcccgaactcactgaaaagacaatcgtaccatag

SEQ ID NO: 123147 - DNA, 768 bp, synthetic construct
  misc_feature 1..768: note = Description of Artificial Sequence: Synthetic coding sequence
  source 1..768: mol_type = other DNA
atgatcctgaacaaagcattactgctgggggctctggctttgacgaccgtcatgtccccctgcgggggcgaagacatagtggccgaccatgtagcctcttgtggcgtgaacctgtatcagttttatgggccatctggccagtacactcatgaattcgacggggacgagcagttttatgttgacctcgagcggaaggaaaccgcctggagatggccagaattttccaagtttgggggttttgaccctcagggcgcactgcgcaacatggccgtagccaaacacaatctaaacattatgattaaacgatacaattccaccgctgcgaccaatgaagttcctgaagtgactgtctttagcaaaagtcccgtgaccctgggacagcccaacaccttgatttgtctggttgataatatctttcccccagtggtgaacattacgtggctgtccaacggacagtcggtcacagagggtgtaagtgagaccagttttctgtcgaaatccgatcattcctttttcaaaattagttatctcacctttctgcccagcgcggacgagatttatgactgcaaagtggaacactggggtctggatcagcctttgcttaaacactgggaacctgagatacccgctcccatgtccgagctgacggagaccgtcgtgtgcgcactcgggctgtcggtgggcttgatggggattgtggtggggactgtgttcatcattcaaggactgcggtccgtgggggcaagccgtcaccaaggcccactgtag

SEQ ID NO: 123148 - DNA, 768 bp, synthetic construct
  misc_feature 1..768: note = Description of Artificial Sequence: Synthetic coding sequence
  source 1..768: mol_type = other DNA
atgatcctcaacaaagccttactgctgggtgccttggccctcaccaccgtgatgagcccctgcggcggggaggacatcgtggctgatcacgttgcgagctgtggcgtgaacttataccagttttacggaccatccggccagtatactcatgaatttgacggggacgagcagttctatgttgacttggagaggaaagagactgcatggaggtggccagaattttccaagtttggcggattcgatccacagggggctctgcggaatatggccgtcgcaaagcacaatctcaacatcatgatcaaacggtacaacagtaccgctgcaactaacgaggtgcctgaggtgacggtgtttagcaagagccctgtgaccctgggccaacccaacactctaatttgtcttgtggataatatctttccaccagtggtcaacattacctggttgtccaacgggcagagtgttacagaaggggttagcgagaccagttttttgagcaaatctgaccactccttcttcaaaatcagctaccttacattcctgccctccgccgatgagatctatgattgtaaagttgagcactgggggctggatcaacctctgctgaagcattgggaacctgagatcccagcgcctatgtcagagctgacagaaaccgtcgtgtgtgcccttggattatcagtgggcttgatgggtatcgtcgtgggcaccgtgttcattatccaggggctcaggtcagtgggtgcctccagacatcaggggcctctttag

SEQ ID NO: 123149 - DNA, 765 bp, synthetic construct
  misc_feature 1..765: note = Description of Artificial Sequence: Synthetic coding sequence
  source 1..765: mol_type = other DNA
atgattctgaacaaagcacttatgctgggagctcttgccctaacaaccgtgatgtctccctgtggcggtgaagatatagtggctgaccatgtagcatcgtatggagtcaatctgtatcaatcatacgggccgtccggccaatacacgcatgagtttgatggggacgagcaattctacgtcgatttggggagaaaagaaaccgtgtggtgcctcccagtgctgaggcagtttcgtttcgacccccagttcgcattaacaaacatcgctgtcctgaagcacaacctgaattccttaatcaagagatccaactcgactgccgccactaatgaggtaccagaggtaaccgtattttccaagtcccccgtaacgttggggcagcccaatattttgatatgtctggtcgataatatcttcccccccgtcgtaaacattacttggctcagcaatgggcatagtgttaccgaaggagtcagtgaaacttctttcctttccaaatccgaccacagcttttttaagattagctatttaaccttgctcccatccgcggaggagagttacgactgcaaggttgagcactggggcctggataagcccctgctaaagcattgggaacctgagattccagcgcctatgtcggagctcaccgagacagtcgtttgtgcccttggtctctccgtggggctggtcggaattgttgtcggcactgttttcattatcagaggattgaggtctgtgggagcaagcagacaccaaggtccactgtag

SEQ ID NO: 123150 - DNA, 768 bp, synthetic construct
  misc_feature 1..768: note = Description of Artificial Sequence: Synthetic coding sequence
  source 1..768: mol_type = other DNA
atgatcctgaataaagctctgttgctgggcgccctcgccttaactactgtgatgtctccctgtgggggggaagatattgttgccgatcacgtagctagctgtggggtgaatctgtatcaattctatggaccttctgggcaatatactcacgagttcgatggagatgaacagttctacgtggatctagaacgaaaagagacagcctggaggtggcctgagttcagcaagttcggaggtttcgacccacagggtgctctccgtaacatggcagtagccaagcacaatttgaacatcatgataaaacggtacaattccaccgccgccactaacgaagtgccggaggtcactgttttttccaaatccccagtcactctcggtcaaccaaatactctgatctgtttagtggataacatttttcccccggtggttaatattacatggttgagcaacgggcagtcagtcaccgagggtgtgagcgaaactagtttcctaagcaaatctgaccacagtttcttcaagattagttatttgacttttctgccctccgctgacgagatctatgactgcaaagtggagcattggggactagatcagccactgctgaagcactgggagcctgagatccccgccccgatgagcgagctgactgaaacagtagtatgcgccctcggtctgtctgtgggactcatgggcatagttgtgggaacagtctttataatccagggtctcagatccgtcggagcctcccggcatcaggggccactctag

SEQ ID NO: 123151 - DNA, 768 bp, synthetic construct
  misc_feature 1..768: note = Description of Artificial Sequence: Synthetic coding sequence
  source 1..768: mol_type = other DNA
atgatcctgaataaagcactgctactgggcgctctcgctctgactaccgttatgagtccctgtggaggtgaggatatcgtcgccgaccacgttgcctcctgtggagtaaatttatatcagttctatggaccaagtggccaatacacccacgaattcgatggcgatgaacagttctatgtggatctcgagcgtaaagaaaccgcctggcggtggcctgagttctcaaaattcggcggcttcgaccctcagggtgcccttaggaacatggctgtggccaaacataacctgaacatcatgatcaagaggtacaactcaaccgcagcaacgaacgaagtgccagaagtcactgtgttctctaaaagtccagtgacgctgggtcagccaaacaccttaatctgcctagttgacaacatttttccccccgtggtgaacatcacctggctaagtaatggccagtcagtcacagagggagtatcagagacgtcctttctgagcaagagtgatcatagtttctttaagataagctatctgacatttttacccagtgccgatgaaatttatgactgtaaagtggagcactggggactcgaccaacctttgttaaagcattgggaacccgaaatccctgcacccatgtccgagctaaccgagactgtcgtttgcgctcttgggttatctgtcggcctcatgggaattgttgtagggaccgtctttataatacaggggctgcggtccgtgggcgcatcgagacatcagggcccactgtag

SEQ ID NO: 123152 - DNA, 765 bp, synthetic construct
  misc_feature 1..765: note = Description of Artificial Sequence: Synthetic coding sequence
  source 1..765: mol_type = other DNA
atgattctgaataaagccctgatgctgggcgccctagctttaacgacagtgatgtctccctgtgggggcgaagatatcgtggccgaccacgtcgcctcctatggagtaaacttgtaccagtcctacggaccaagtggacagtatacccatgagtttgacggcgatgagcagttttatgtagacctgggccgcaaagaaacagtctggtgcctacccgtgctccgacagttccgcttcgatcctcaattcgcactgacgaatattgcagtgttaaagcataacctcaacagcctgattaagcgttcaaactcaaccgctgctaccaatgaagttcctgaggtgaccgtcttttctaagagtccagtaacccttggccagcccaatattctcatatgtctcgtggataacatcttcccaccagtggtgaacatcacgtggttgtctaatgggcattcggtgactgagggcgtgtctgagacaagctttctgagtaagtcagaccactcgtttttcaaaatttcctaccttactctgctccctagcgccgaggagtcctatgattgcaaggtagaacactggggcctggataaacccctgttgaaacattgggagcctgagattccagcaccaatgtccgagttgacagaaacagtggtatgcgcactagggctctctgtcggcctcgttggcatcgttgtgggcactgtcttcattataagaggtcttagaagcgttggcgcctcgaggcatcagggccctctttag

SEQ ID NO: 123153 - DNA, 765 bp, synthetic construct
  misc_feature 1..765: note = Description of Artificial Sequence: Synthetic coding sequence
  source 1..765: mol_type = other DNA
atgattctcaacaaagctctgatgttgggggcattggctctcacgacggttatgtccccttgtgggggggaggacatcgtggcggaccacgtggcctcgtatggcgtcaatctgtatcagagttacggcccaagcggtcagtatacacatgagttcgacggcgacgagcagttctatgtggatctgggcagaaaggaaaccgtgtggtgtttgcctgtgctccggcagttccggtttgatccacagttcgctctgacgaacatcgctgtgttgaagcataatctcaactctttgattaagcggtccaattctacagctgctactaatgaggtgcccgaggtgacagtcttctccaaatctcccgtgacactggggcagcctaacattctcatttgtcttgtggacaacatctttccacctgtggtgaatatcacctggttgagcaatgggcacagcgtaactgagggcgtctctgagacatcctttttgtcaaaaagtgaccacagcttcttcaagatttcctatcttacgctgctgccttcagcggaggagagttacgattgtaaggtggagcactgggggctagacaagcctctcctaaaacactgggaaccagaaattccagcgcccatgtctgaactcaccgaaaccgtcgtttgcgctttgggactgtccgtgggcttagtgggtatagtcgtgggaacggtctttattatccgcggtctgcggtccgtgggggccagtaggcaccaagggcctctttag

SEQ ID NO: 123154 - DNA, 75 bp, synthetic construct
  misc_feature 1..75: note = Description of Artificial Sequence: Synthetic coding sequence
  source 1..75: mol_type = other DNA
atgatactcaacaaggcgctcatgctgggtgcactggcacttacaaccgtcatgtccccctgtggcggcgaatag

SEQ ID NO: 123155 - DNA, 765 bp, synthetic construct
  misc_feature 1..765: note = Description of Artificial Sequence: Synthetic coding sequence
  source 1..765: mol_type = other DNA
atgatccttaacaaagcacttatgctcggtgctctcgcattgaccactgtgatgtccccctgtgggggggaagatatcgtggcagaccatgtggcaagctacggagtgaatttataccaatcctacggaccaagcgggcagttcacacacgagtttgacggcgacgaggaattttatgttgatttggagagaaaggagacggtgtggaagcttccactcttccacaggttgcgttttgatcctcagttcgccctaacgaacatcgctgtgttaaagcacaacctgaacatcctgattaaacggtctaattctactgcagccactaacgaggttccagaagttacagtgttctctaagtcacccgtgacccttggtcagcctaacaccctgatttgtctcgtggacaacatttttccccccgtcgtaaacatcacctggctcagcaatggccactctgtaacggagggcgtgagcgagacatcttttctgagtaaatccgaccattcgttcttcaaaatctcttacctgacatttcttccatcggccgacgagatttatgattgtaaagttgagcactgggggcttgacgaacccctgttaaagcattgggaaccagagattccggcacctatgtcggaactcacggaaacagtggtctgcgccctcggtctctctgtaggattggtcggcatcgttgtagggacagtgcttattattcgagggctgagaagcgttggcgctagtcggcaccagggacccctgtag

SEQ ID NO: 123156 - DNA, 768 bp, synthetic construct
  misc_feature 1..768: note = Description of Artificial Sequence: Synthetic coding sequence
  source 1..768: mol_type = other DNA
atgatcctgaacaaagcgctcatgctgggggccttagcgttgacgactgtgatgagcccatgcgggggtgaggacattgtggccgaccacgtagcatcttatggcgtgaatctttatcaatcatatgggcctagcgggcagtacagccacgaatttgatggtgacgaagagttctacgtggacttggagagaaaggagactgtgtggcagctccccctttttcgcagattccgccggtttgatccacagtttgcgcttactaacatcgcggtcctgaaacataaccttaacatcgtcattaagcggagcaactcaactgctgcaactaatgaggtccccgaagtaacagtttttagcaagtcaccagtgactctggggcagccgaacaccttgatctgcctggtcgataatatcttcccacctgtcgtcaatattacatggctgtcgaacgggcactcagtgaccgagggcgttagcgaaacctcttttctgagcaaaagtgatcacagtttctttaaaataagctacctgacatttctcccatctgcggatgaaatctacgattgcaaggtggagcactgggggctagacgaacctttactgaaacattgggagcccgagattcccaccccaatgagcgaacttacagagacagtggtgtgtgctttaggactgagcgtgggtctagtcggcatcgtcgtcgggaccgtactgattatcagaggcttgagatcagtgggcgctagccggcatcagggacctctgtag

SEQ ID NO: 123157 - DNA, 768 bp, synthetic construct
  misc_feature 1..768: note = Description of Artificial Sequence: Synthetic coding sequence
  source 1..768: mol_type = other DNA
atgatattaaacaaggcattgatgcttggggctctggctttaaccaccgtgatgtctccatgtggaggggaagatatagtcgcagaccacgtggcatcatacggagtaaacctttaccagtcttacgggccttcaggccagtactcccatgaattcgatggggacgaggaattttacgtggacttagaacggaaggaaaccgtgtggcagttaccactgttcaggagattccggcgtttcgacccccagttcgccttgactaatatcgctgtcctgaaacataacctgaatatagtaatcaaacgcagcaacagcactgcagcaacaaacgaggtgcccgaagtgaccgttttctccaaatctccagttaccctgggacaacctaacacccttatttgccttgtcgataacatctttccccctgtcgtcaacattacttggctttccaatggacatagtgtgactgaaggcgtgtctgaaacgagctttctttccaagagtgaccactctttttttaagatctcctacctgacttttctaccaagtgatgacgagatttacgattgtaaggttgaacattggggactagacgaaccactgttgaaacactgggagcccgagattccaactcccatgtcagagcttactgagactgtggtgtgtgctctgggcttgtctgtcgggttggtgggcattgtggtgggcacagtgctgatcatccgaggattgcgttctgtgggcgcctcacgccaccaaggacccctctag

SEQ ID NO: 123158 - DNA, 75 bp, synthetic construct
  misc_feature 1..75: note = Description of Artificial Sequence: Synthetic coding sequence
  source 1..75: mol_type = other DNA
atgattctcaacaaggctctgctgttaggagcccttgctctgactacagtgatgtcgccctgcggcggtgaatag

SEQ ID NO: 123159 - DNA, 768 bp, synthetic construct
  misc_feature 1..768: note = Description of Artificial Sequence: Synthetic coding sequence
  source 1..768: mol_type = other DNA
atgattctgaataaggctcttatgctgggagcactggctctgactactgtgatgtctccctgcgggggtgaggacattgtagcagaccatgtagcctcctacggggttaatctttaccagagctatggacctagtggccagtactcacacgaattcgatggagatgaggagttctacgtcgatctcgaacgcaaggagacagtgtggcagcttccgctcttccgcagattccgccgattcgacccccaattcgccctgaccaacatcgcagtgctcaagcataatctcaacatcgtgattaagaggtccaacagcactgctgcgacaaacgaagtgccagaagtgacagttttttctaaaagccctgtaacgttgggacagccaaatacactgatttgccttgtggacaacatattcccccctgttgtcaatatcacctggctcagcaatggccacagcgttactgaaggggtcagtgaaacctcattcctgtcaaagagcgatcactctttctttaaaatctcttacctaacattcttaccaagcgacgatgaaatctatgattgcaaggttgaacactgggggctggatgaaccactgctcaagcattgggaacccgagatccctactcccatgtctgagctaacagagactgtggtgtgcgcactagggctttccgtcggtctggtcgggattgtcgtgggaaccgtcctaataatcagggggctgcggtctgtgggcgcctcccggcaccagggaccactttag

SEQ ID NO: 123160 - DNA, 765 bp, synthetic construct
  misc_feature 1..765: note = Description of Artificial Sequence: Synthetic coding sequence
  source 1..765: mol_type = other DNA
atgattctgaataaagcgttgatgttaggcgccctagcacttaccactgttatgtccccctgcggaggcgaagacatagtcgccgaccatgtcgcatcttacggagtcaacttgtaccagtcctacggcccatccggacagttcacccatgaatttgacggtgatgaggaattctatgtcgacctcgaacggaaagaaacggtttggaagctccccctttttcacaggctccgcttcgaccctcagtttgctcttaccaatattgcagtgctgaaacacaacctgaatatccttatcaagaggtctaattctactgctgcgacaaatgaagttcctgaggtaaccgtttttagcaagagcccagtcaccctgggacagccgaatactcttatctgcctggtagacaatatttttccaccagtggttaatataacatggctgtcaaatggccattcagttactgaaggtgtctctgaaacgtctttcctgtccaagagcgatcactcattctttaagatcagctatttgacctttctgccctccgctgatgaaatttatgattgcaaggtggagcactggggcttggacgagcctttattgaagcactgggagccagaaattccagccccaatgagtgagctgaccgaaacggtcgtatgtgcgctgggactgagcgtgggactggtaggaattgttgtcgggacagtgctgattataagagggctgagatcagtgggtgctagcaggcatcaggggccgctttag

SEQ ID NO: 123161 - DNA, 765 bp, synthetic construct
  misc_feature 1..765: note = Description of Artificial Sequence: Synthetic coding sequence
  source 1..765: mol_type = other DNA
atgatcctcaacaaagcactgatgctcggagccctggcactgacaacagtgatgtcgccctgtgggggcgaggacatcgttgcagatcacgttgccagctatggcgtgaacctgtaccaatcttacggtccttcaggacagttcacccatgagttcgatggtgacgaggagttctatgtagacctggagcgcaaggagaccgtttggaaattaccactctttcaccggctgcgctttgatcctcagttcgcattaacaaacatagctgtgcttaaacacaacttaaacattttgatcaaacgctccaattctacagctgcaactaacgaagttcctgaggtgaccgtgttttcgaagtctcctgtgacactcggacagcctaatactttgatttgtttggtcgataacatttttccgccagtcgtcaacatcacctggttgtcaaatgggcattcagtaactgagggagtgtccgagacttccttcctgtcgaaatctgaccattcattcttcaaaattagctacctgacttttctccctagtgccgatgagatatatgactgtaaagtcgagcactggggtttagacgagcctctccttaaacattgggaacccgagatcccggccccaatgagcgagttaactgaaactgtggtgtgcgcccttggcctgtccgtgggtctggtgggtatagtggtgggcaccgttctaatcatcagaggcctgcgatccgtaggcgcctcccggcaccagggcccactgtag

SEQ ID NO: 123162 - DNA, 765 bp, synthetic construct
  misc_feature 1..765: note = Description of Artificial Sequence: Synthetic coding sequence
  source 1..765: mol_type = other DNA
atgatccttaacaaggctctgatgttgggcgcacttgccctgaccacagttatgtccccttgcggaggggaagacattgtggccgatcacgtggcctcatatggcgtgaacctctaccagtcctacgggcctagcggccagtttacccacgaattcgacggagacgaggaattttatgtggatttggagcggaaggagaccgtttggaaattaccattattccatagacttcgcttcgatccacagtttgcgctgacaaacatcgcggtgctcaaacacaacctcaacattctgattaagcgcagcaatagcacagccgcgacgaacgaggtcccggaagtgaccgtgttcagtaagagtcctgttaccttgggccagccaaacacattaatctgcctggtggacaacatatttcccccagtggtgaacatcacgtggctatctaacggtcacagcgtgacagagggggtgtctgagacttccttccttagtaagtcagatcatagcttctttaaaataagctacctgaccttcctgccatccgctgatgagatttacgactgtaaagttgaacactgggggcttgatgaaccactgttgaaacactgggaacctgagatccctgcaccgatgtctgaactcaccgagacagttgtgtgtgccctgggcctctctgtgggactcgttgggattgtggtgggcacagtcctaataatcagaggactacgcagcgtcggcgcttccaggcaccaaggcccactctag

SEQ ID NO: 123163 - DNA, 768 bp, synthetic construct
  misc_feature 1..768: note = Description of Artificial Sequence: Synthetic coding sequence
  source 1..768: mol_type = other DNA
atgattttgaacaaggctctgatgctgggagctcttgcactgacaacagtgatgtcaccatgtgggggtgaagacattgtggccgaccacgtggcaagctatggtgtgaatctgtaccagtcctatggaccgagtgggcagtatagccacgagtttgatggcgatgaggaattctatgtcgatctagagcgcaaagaaaccgtctggcagttgcctttgttcagaagattccgaaggttcgatcctcagttcgcccttacgaacatcgcggttctaaaacacaacctcaatatcgtgataaaaagatcaaatagtactgcggctaccaacgaggtgccggaggttaccgtgttcagcaagagcccagtgacactggggcagcccaacaccttgatttgcctcgtagataatatctttcccccggtggtaaacatcacgtggcttagtaacggccatagcgtcaccgaaggagtgtcagagacctcatttctgagcaaaagcgaccactcgttttttaagatctcctacctaacattcttgcctagcgctgatgagatttatgactgtaaagtggaacactggggtctggatgaacccctgcttaagcattgggaacccgaaatccccactcccatgtctgagttgaccgagaccgtagtgtgcgccctcggactctcagtcggattggttggaatcgtggtggggaccgtgctcataataagaggcctccggtctgtgggagctagtcgtcaccaggggcccctctag

SEQ ID NO: 123164 - DNA, 75 bp, synthetic construct
  misc_feature 1..75: note = Description of Artificial Sequence: Synthetic coding sequence
  source 1..75: mol_type = other DNA
atgatccttaacaaggcgctgatgcttggcgcactggctcttactaccgtgatgtccccatgtggaggagaatag

SEQ ID NO: 123165 - DNA, 75 bp, synthetic construct
  misc_feature 1..75: note = Description of Artificial Sequence: Synthetic coding sequence
  source 1..75: mol_type = other DNA
atgattcttaacaaggccttgatgctcggagccctcgcactgactaccgttatgtctccctgcggcggtgaatag

SEQ ID NO: 123166 - DNA, 768 bp, synthetic construct
  misc_feature 1..768: note = Description of Artificial Sequence: Synthetic coding sequence
  source 1..768: mol_type = other DNA
atgatactgaacaaggctttgatgttaggggctcttgcgctgaccactgtcatgtccccctgtggcggagaggatatcgtcgcagaccatgtggcaagctacggcgtgaacttgtaccagtcctacggcccatccggacaatattcccatgagtttgacggggacgaggaattttacgtggatctggaaagaaaggagacagtgtggcagctaccgctatttcggagatttcgccggttcgatccccagttcgctctcaccaatattgctgtcctgaaacataacctgaatatcgttatcaaacgctcaaactccaccgcggctactaacgaggtacccgaggtgaccgtgtttagtaagagccccgtgacccttggccagcccaacacactgatctgcctcgttgacaacatcttccccccggtggtgaacattacctggctctccaacggccactctgtgaccgaaggggtctccgaaacatcattcttaagcaagtctgatcactcttttttcaagatcagttacctcacttttcttccgtcggacgatgagatttatgattgtaaagtcgagcactggggtctggatgagcctctgctcaaacactgggagccagagattcccacacccatgtctgaactgaccgagacagtggtctgtgcgctgggtctttcagtgggtctcgttggaatagtagtgggaactgtactgatcataagagggttgcgttcagtgggagcctcacggcaccaggggcccctgtag

SEQ ID NO: 123167 - DNA, 765 bp, synthetic construct
  misc_feature 1..765: note = Description of Artificial Sequence: Synthetic coding sequence
  source 1..765: mol_type = other DNA
atgatactgaataaagcactcatgttaggtgcattggccctgactaccgtgatgtccccttgtggcggcgaggacattgtggccgatcatgtggccagctatggtgttaatctctaccagtcgtacgggcccagcggacaatttacgcacgagtttgacggggatgaagagttttacgtggacctggaacgcaaggaaaccgtctggaaactcccactctttcatcggctgaggtttgatccgcaatttgccctgactaatattgcagtcctgaaacacaacctcaatatcctgatcaagaggtccaactcaacggctgccaccaatgaagtcccagaggtgactgtgttctccaagagccctgtgacacttggccagccaaatacactgatttgtctggtagacaatatctttccgccagttgtaaatatcacctggctcagtaatggacactctgtgacagaaggcgtgtcagagactagtttcttaagcaagtccgatcactcattcttcaagatcagttacctgaccttcctcccttcagcagatgagatctatgattgcaaggtcgagcactgggggttggatgaaccgttgttgaagcactgggagccggagatccctgctcccatgtcagaactaacagaaacagtagtgtgcgcgttgggcctgtctgtggggctggtgggtatcgtggtgggaaccgtcctcataatcaggggtctcagaagcgtcggggcatccagacaccaaggacctctgtag

SEQ ID NO: 123168 - DNA, 765 bp, synthetic construct
  misc_feature 1..765: note = Description of Artificial Sequence: Synthetic coding sequence
  source 1..765: mol_type = other DNA
atgatcctgaataaggctcttatgctgggtgccttagcactgacgactgtcatgagcccttgcggtggcgaagacatcgttgctgaccacgtggctagttacggggtgaatttgtaccagagctacggtccaagcggccagttcactcatgagtttgatggcgatgaggaattttatgttgatttagaacgaaaggaaaccgtatggaagctacctttgttccaccgcctgcgcttcgatccgcagttcgcgctcacaaacatagcagtattaaaacacaatctgaacatcctgatcaagcggtccaactcaacagctgccactaacgaggtgcctgaagtgactgtcttttcaaaatccccagtcaccctgggccagccaaacacattgatttgcttggtggacaatatcttcccacccgtggtcaacatcacgtggcttagtaacggtcatagcgtcaccgagggggtctcggagacaagttttctttcaaagtctgatcacagtttcttcaagataagctatttgacattcctgccctccgccgacgagatctacgactgcaaggtagaacattggggattggacgaacccctcctgaagcattgggaacccgaaatcccagccccaatgtccgaactgactgagacggtagtgtgtgcgctcgggctcagcgtgggactggtgggaatagtcgtgggcaccgtcttgatcataaggggcctgaggtccgtgggtgctagcagacatcaaggacccctgtag

SEQ ID NO: 123169 - DNA, 765 bp, synthetic construct
  misc_feature 1..765: note = Description of Artificial Sequence: Synthetic coding sequence
  source 1..765: mol_type = other DNA
atgatattgaataaggctctcatgctcggagccctcgcactcacaacagtgatgtctccctgtggaggggaggatattgtggcagatcacgtggcttcgtacggagtaaacctgtatcagtcttacgggcccagcgggcagtttacccacgagttcgacggagatgaagaattctatgttgatcttgagaggaaggagacggtgtggaagctgcccctgttccacagattgaggttcgacccacagtttgccctgaccaatatcgccgtcctgaaacataatttgaatattctgattaaacggagcaatagcaccgccgcgactaacgaggtgccagaggtgacggtcttcagtaagtcccccgtcacattgggccagccaaatactctgatttgtctggtcgataatatctttccgcccgtggtgaacatcacctggctgtctaacggtcactccgtgacggagggggtgagtgagacttcattcctgtctaaaagtgatcactccttctttaagatcagttacttgacctttcttccctcagccgacgaaatttatgattgtaaagttgagcattggggactggatgaaccactgcttaagcattgggagcctgaaattcccgcaccaatgtccgaattgacagagacagtcgtgtgcgctctggggctgtccgtcggtctggtgggcatcgttgtggggaccgtgctaattatcagaggcctgaggtccgtaggggcctctagacaccaaggcccactgtag

SEQ ID NO: 123170 - DNA, 768 bp, synthetic construct
  misc_feature 1..768: note = Description of Artificial Sequence: Synthetic coding sequence
  source 1..768: mol_type = other DNA
atgatcctcaacaaagccctaatgctcggtgctctcgcactgacgaccgtcatgagtccctgcggtggcgaggacattgtcgctgatcacgtagcgagctatggagtgaatctataccaatcctatggccccagtggccagtattcgcacgaatttgatggggatgaggagttttatgttgacctggaaaggaaagagaccgtgtggcagctgccacttttccgacgctttaggcgttttgacccacaattcgctctgacaaatattgcagtgctgaaacataatctgaatattgtgataaagcgctctaatagtaccgctgccaccaatgaggtacccgaggttacggtcttctcaaaaagtcccgttacattaggacagcctaatactctaatttgtcttgtggataatatttttccccctgtggtcaatataacatggctgtccaatggtcacagtgtcacagagggggtctcggagacttctttcctgagcaagtctgaccacagcttctttaagatctcctacttaacctttctccctagtgacgatgagatctatgattgtaaggtggaacactgggggctggacgaaccgctcctgaagcactgggaacccgagatccccacccccatgagcgagcttacggaaacagtggtgtgtgctctcggcctgagcgtgggcctggtggggatcgttgtgggcaccgtgctgattatccgcgggctgcgcagtgtgggcgcctcacggcaccaaggtccactctag

SEQ ID NO: 123171 - DNA, 765 bp, synthetic construct
  misc_feature 1..765: note = Description of Artificial Sequence: Synthetic coding sequence
  source 1..765: mol_type = other DNA
atgattctgaacaaggcgttgatgctcggcgcgctggcattaaccacagtcatgtcaccatgcggaggcgaggacatcgtcgccgaccacgtggcatcatacggagtgaatttgtatcagtcttatggcccttctggccagttcactcatgaattcgatggagatgaggagttttatgtggatctcgaaagaaaagagacggtgtggaagctccctctgttccatcggcttcgttttgatcctcaattcgcattaaccaatatcgctgttctaaagcataatctaaatattctgatcaagcggtctaatagcacagcggctacaaatgaggttcctgaggtcacagtgttctcaaaatcccctgttacactgggccaacctaacacactgatatgcctggttgacaacatcttccctccggtggtcaatattacatggctctccaatggacattcggtgacagagggagtttccgaaacatcttttcttagcaaatctgatcactccttttttaagattagctacctgacattcctaccaagtgctgatgagatttacgactgcaaggtggagcactggggactcgatgagcccctgctgaaacattgggagcctgaaatccccgcccctatgtccgagttaaccgaaactgtggtgtgtgctctgggcctctccgtgggcctggtcggcattgtcgtgggcacagtgcttatcattcgagggctgcggagcgttggcgcctctcgccaccaaggcccgctgtag

SEQ ID NO: 123172 - DNA, 645 bp, synthetic construct
  misc_feature 1..645: note = Description of Artificial Sequence: Synthetic coding sequence
  source 1..645: mol_type = other DNA
atgatccttaacaaggcattgctacttggggcgcttgcactcactaccgtaatgtcaccgtgtggcggggaggacatcgtggcagatcatgtggccagctgcggtgtcaatctgtaccagttctacgggccatctgggcaatatacccacgaatttgatggtgatgaacagttctacgttgatctagagcggaaagaaacagcatggagatggcccgaattcagtaaatttgggggatttgacccccagggcgccctgcgcaacatggctgtcgctaagcataatctcaacattatgattaaaaggtacaatagcaccgctgcgaccaatgaggtgcctgaggtaaccgtcttcagcaagagcccggtgacactcggccagcctaacacgctcatctgcctggtcgataacatatttccgccagttgttaatataacttggctttccaacgggcaaagcgtgacagagggggtcagcgaaacctcctttctcagtaagagcgaccactcctttttcaagatctcttacctaacatttctcccaagcgccgatgaaatttatgactgtaaagttgaacactggggattggaccagcctcttctaaagcactggggagcctctcctagcactggggcagaagagtag

SEQ ID NO: 123173 - DNA, 576 bp, synthetic construct
  misc_feature 1..576: note = Description of Artificial Sequence: Synthetic coding sequence
  source 1..576: mol_type = other DNA
atgagcccttgcggaggtgaagatatcgtcgccgaccacgtggcctcatatggagtgaatctctatcagtcatacgggccttccggacagtattctcacgagttcgatggtgatgaagagttttatgtggaccttgaacgcaaagaaactgtgtggcagctccccctgttcaggcgttttagaaggttcgatcctcagtttgcgctcaccaacattgccgtgcttaagcataacctcaacatcgtgattaagagaagtaattctacggctgcgactaacgaagtgcccgaggtaacggttttctctaagtctcctgttacacttggccagcccaacaccctgatctgcctggtcgacaacatttttccccctgtagtgaatattacctggctcagtaacgggcattcggttactgagggagtgtctgagacttccttcttaagcaaaagtgaccacagcttctttaaaatcagctacctcacattcttaccttctgctgacgagatttacgactgcaaggtcgaacattgggggttggatgagccccttctgaaacactggggtctcctgcattag

SEQ ID NO: 123174 - DNA, 441 bp, synthetic construct
  misc_feature 1..441: note = Description of Artificial Sequence: Synthetic coding sequence
  source 1..441: mol_type = other DNA
atgatcctgaacaaggctctgatgcttggcgcattagctctgaccaccgtgatgtccccgtgtgggggggaagacattgttgctgaccacgttgcttcgtatggggtaaatctgtatcagtcatacggtccctcaggacagtacactcacgagttcgatggagacgaacaattctatgtggatctcgggcggaaggaaactgtgtggtgtctgcccgtgctccggcagttccgctttgatccacaattcgctttaactaatatgtgtattgccatttaccggagccggagggtagaccttctgcacgacctggcactcttttccggtccgatctaccacattccgtttcttcttcagatgtttctactgagcccacttctgtgggatctgaattgttatatttgcagtgagcttactaacgctttcgagctattcccatag

SEQ ID NO: 123175 - DNA, 762 bp, synthetic construct
  misc_feature 1..762: note = Description of Artificial Sequence: Synthetic coding sequence
  source 1..762: mol_type = other DNA
gggtgtctggggaaaaggatgatccttaacaaggccctgatgctgggggccctcgcccttacaactgtaatgtcgccctgcggtggagaagacatcgtggctgaccacgtggcatcttacggcgttaacttgtaccagtcttacggccccagcggacagtacacccatgagtttgacggtgatgagcagttctatgtggatctgggacgtaaagagaccgtctggtgtctgcccgtgttgcgccagtttagattcgatccccagttcgccctgacgaatatagcggtactgaaacacaatctgaactccctaatcaaaagatctaacagtactgccgccaccaatgaggttcctgaggttacagtgttcagtaagtcacctgtgacactggggcagccaaacattttgatatgtctggtggataatatcttccctcctgtggtgaacattacgtggttgtctaacggacactcagtcaccgaaggggtatcggaaacatcttttttgtccaagtccgatcatagcttttttaaaataagctatctcactctgctccccagcgcagaagagtcatacgattgtaaagtcgaacattggggtctggacaagcctctgctgaaacactggggaaaggacgagtttcaccacttcctgatgttgtcctgtttgagttcttccgaactccctgccttttatagctacataccgaaactggtgtttcacacgtcctgggtgtcattctttcttatcttctttttctag

SEQ ID NO: 123176 - DNA, 603 bp, synthetic construct
  misc_feature 1..603: note = Description of Artificial Sequence: Synthetic coding sequence
  source 1..603: mol_type = other DNA
atgtcaccttgcggtggagaggatatcgttgctgaccatgtggcctcctacggcgttaatctgtaccagtcttacggaccttccggccagtatagccatgaattcgacggggacgaggagttttacgtagacctagagagaaaagaaacagtgtggcagctccccctattcaggcgttttcggcgatttgatccgcagtttgctctgacaaatattgctgtgttgaagcacaatcttaacattgttataaaaagaagcaacagtaccgccgccaccaacgaggtcccagaagtgacagtgttttctaaatcccctgtcaccttgggccagccaaacacactgatctgcttagtggacaatatctttcccccagtggtgaatatcacatggctctcaaatggccactctgtcacagaaggagtgagtgaaaccagctttcttagcaagtccgatcactctttttttaaaatttcttaccttacctttctgccatcagccgatgaaatttacgattgcaaagttgagcattggggacttgatgagcccttgctcaaacattgggagtctcagtcccgcgagtcagaggaaagtacaaaatcatag

SEQ ID NO: 123177 - DNA, 582 bp, synthetic construct
  misc_feature 1..582: note = Description of Artificial Sequence: Synthetic coding sequence
  source 1..582: mol_type = other DNA
atgagcccgtgtggtggagaagacatcgtcgctgatcatgtggcaagttatggggttaatttgtaccagtcttacggcccttctggacagtatacccacgaattcgacggcgatgagcaattctacgtggatcttgggcggaaagagacagtatggtgcttgccagtgctgcgccagttcagatttgatccacagtttgctcttacgaatatcgctgtgctgaagcataatctgaactcgttgattaagaggagcaacagtacggccgccactaacgaggtcccagaggtaacagtcttcagcaaatcccctgttacactcggtcagcctaatatcctgatatgcttagtggataatatctttcccccagtcgtgaacatcacctggctctctaacggccactcagttacggagggtgtaagcgaaacgagtttcttgtccaaatcagatcacagtttttttaagatttcctatctgactttattaccctccgctgaggagtcctacgactgtaaagtcgagcactggggcttagacaaacccctgttaaagcattgggttcacggatttctcagcttttag

SEQ ID NO: 123178 - DNA, 606 bp, synthetic construct
  misc_feature 1..606: note = Description of Artificial Sequence: Synthetic coding sequence
  source 1..606: mol_type = other DNA
atgtcaccttgcggaggcgaagacatagtcgctgaccacgtggcaagctatggcgtaaatctctatcagagctatggcccctccgggcagtactcccatgaatttgacggagatgaggaattctacgtcgacttggaaagaaaagaaaccgtgtggcaattgccactgtttcgacgtttcaggaggttcgacccccagttcgctcttactaacattgccgtcctgaaacataatctgaatatagtaatcaaacggagtaatagcacagccgccaccaatgaggtccctgaagtgacagtttttagtaaatcacccgttacacttggacagccgaataccttaatctgcctcgtggacaatatttttcctccggttgttaacattacgtggctgtccaacggacacagcgtgacagagggtgtgtcggaaacatcattcctttctaagtcagatcatagcttctttaaaataagttatctcacatttctcccgtctgcagacgaaatctacgactgcaaagttgaacattggggcctggacgagccccttttaaaacactggggcatccaggcagaggaaggacaaagacgcaagaaacttggctag

SEQ ID NO: 123179 - DNA, 258 bp, synthetic construct
  misc_feature 1..258: note = Description of Artificial Sequence: Synthetic coding sequence
  source 1..258: mol_type = other DNA
aataccctgatctgcctggttgacaatatatttccccccgttgtgaatattacctggttatctaacggacactcggtcaccgaaggcgtttcagagacctcattcttgagtaagtccgatcattcctttttcaagatcagctacctcacctttttgccttctgcggatgaaatatatgattgtaaggtcgagcactggggccttgacgaacctctgctaaagcactgggggaaagattttatgtctttcttttattag

SEQ ID NO: 123180 - DNA, 390 bp, synthetic construct
  misc_feature 1..390: note = Description of Artificial Sequence: Synthetic coding sequence
  source 1..390: mol_type = other DNA
ggatgcctgggaaaaaggatgatactgaacaaggctctcatgctgggggctttggccttaacaactgtaatgtccccttgtggtggagaggacattgtcgccgaccatgtcgcatcttatggggttaatctatatcagagctacggcccgtctggacaatatagccatgagttcgatggagacgaggaattttacgtggatctggagcgcaaagaaaccgtctggcagttgcccctcttcagacgctttcgccgcttcgaccctcagtttgcactgacaaacattgccgttctgaagcataatctcaacatagtgattaagagatccaacagcacggctgccaccaatgaagtccccgaggtgacagttttctccaaaagcccagtgtag

SEQ ID NO: 123181 - DNA, 768 bp, synthetic construct
  misc_feature 1..768: note = Description of Artificial Sequence: Synthetic coding sequence
  source 1..768: mol_type = other DNA
atgatcttgaacaaagctctccttctgggtgccctggcattgacagccgtcatgagcccttgtggaggcgaggacatcgttgctgatcatgtggccagttatggggtaaacttttatcagtcacatggtccgagcgggcagtacacccacgaatttgacggggatgaggagttttacgtggatctggagacaaaggaaactgtctggcagctcccaatgttttccaagttcattagcttcgatccccaaagcgctttgaggaacatggccgtcggtaagcacaccctggagttcatgatgcggcaaagtaatagcacggcggcgacaaacgaagttcccgaagtgactgtgttcagtaagttcccagtcactcttgggcagccaaacacgcttatctgcctcgttgacaatatctttcctcctgttgtgaatatcacttggctttctaacggccattctgtgacggaaggtgtatctgagacttccttcttgtctaagtccgaccattctttttttaagatttcttatctgacgtttctcccctcagcagacgagatttatgactgcaaggtcgagcactggggactcgacgaaccactgctcaaacactgggaacctgagattccagcccctatgtccgaactgaccgaaaccttggtctgcgccctagggttgagcgtggggctgatggggattgtggttggcacggttttcattatccaaggattaaggtcagtggatgcgtcgcgccaccagggccttctctag

SEQ ID NO: 123182 - DNA, 768 bp, synthetic construct
  misc_feature 1..768: note = Description of Artificial Sequence: Synthetic coding sequence
  source 1..768: mol_type = other DNA
atgattttaaacaaggctttactgcttggggctctagcacttaccgctgttatgtccccttgcggcggagaggacatcgtggctgaccatgttgcaagttacggcgtgaacttctaccaatcccatggtccgtcagggcagtatacacacgaatttgatggggatgaagaattttacgtcgatctggagacgaaggaaaccgtgtggcagctgcccatgtttagcaagtttatctcctttgatcctcagtctgcactgcgaaacatggctgtggggaagcacaccctggagttcatgatgagacagtcaaattctacagctgccactaatgaagtgccagaggttactgtcttttctaagtttcctgtcactttgggacagccgaatacactgatctgcttggtcgataacatcttcccacccgtcgtcaatattacctggttgtctaatggccattctgtcacagaaggggtgagcgagacctctttcttatctaaaagtgatcactcgttcttcaagatctcctatctgacttttctcccaagtgctgacgaaatctacgactgcaaggtggagcattggggacttgatgaaccactcctgaaacactgggagcccgagatacccgcacctatgagcgagctgaccgaaacactggtgtgtgccctagggctgtccgtgggcctcatgggtatagttgttggtacagtgttcattatacagggtctgagatcggtgggagcatctaggcaccaggggctgctctag

SEQ ID NO: 123183 - DNA, 768 bp, synthetic construct
  misc_feature 1..768: note = Description of Artificial Sequence: Synthetic coding sequence
  source 1..768: mol_type = other DNA
atgatcctgaataaggcactcctgttgggcgccctcgctctgaccgccgtgatgtctccatgcgggggagaagacatcgtagctgatcatgtcgcctcctacggtgtcaacttctatcagagtcacggcccttcagggcaatatacccacgagttcgatggcgacgaggaattctacgttgacctggagacgaaggaaaccgtatggcagcttcctatgttttccaagttcatcagcttcgacccacagagtgctcttagaaatatggcagtcggcaagcataccctggaattcatgatgggccagtctaacagcacagctgctactaatgaagtgcctgaggtcaccgtcttctccaagtttcccgtaaccctgggccagcccaacacacttatttgtttggtggataatatcttcccccctgtggtgaacatcacatggctgagcaatggtcacagcgttacggaaggtgtgtctgagaccagctttctttccaagtctgaccatagtttttttaagattagttacctcacctttctgccctccgcagatgagatctatgactgcaaagtggaacactggggtttggatgaaccgcttctaaaacattgggagcccgaaattcccgctccgatgtcggagttaactgagaccctcgtgtgcgcacttggactcagcgtgggtctgatggggattgtcgtcggcaccgtgtttattattcagggcctcagaagtgtgggagcctcaagacatcaggggctgttgtag

SEQ ID NO: 123184 - DNA, 768 bp, synthetic construct
  misc_feature 1..768: note = Description of Artificial Sequence: Synthetic coding sequence
  source 1..768: mol_type = other DNA
atgatactgaataaggctcttctgctgggcgccctggcacttactgcggtcatgtccccctgtgggggggaggacattgtggctgatcatgtagcctcgtacggggtaaacttttatcaaagccacggcccatccggtcaatatacccatgaatttgatggtgacgaagagttttacgtagacctcgagaccaaagaaactgtctggcagctcccgatgttcagcaagttcatttccttcgatccgcagtcagccctgaggaacatggccgtgggtaaacatacattagagtttatgatgagacagtccaactctacggctgctaccaatgaagtgccagaggtaacagtcttttcaaaatttcccgtcaccctagggcaaccaaatacccttatttgccttgtagacaatatattcccacctgtggtaaacattacatggctgagtaacggacacagtgtcacagagggcgtgtccgaaactagtttcctgtccaagagcgaccactcattctttaaaatatcctacctaacattcctgccaagcgctgacgaaatctacgattgtaaggtggagcactgggggttagacgagccgctgcttaagcattgggagccagaaataccagcccccatgtctgaactgaccgagacattagtctgcgccctcggtttgtctgttggactaatggggatcgtggttgggaccgtattcatcatccagggtcttagaagcgttggagcctcgcggcatcagggtctgctctag

SEQ ID NO: 123185 - DNA, 768 bp, synthetic construct
  misc_feature 1..768: note = Description of Artificial Sequence: Synthetic coding sequence
  source 1..768: mol_type = other DNA
atgatactgaataaagccctgctcctcggagccctagcactgacggcagttatgagtccctgtggaggcgaggacatagtggcagatcacgttgccagctacggggtcaacttctatcagtcccatggcccctccggtcaatatacacatgaattcgacggcgatgaagaattttatgttgatctggagactaaggagacagtgtggcagttgccaatgttttccaaattcatctctttcgatcctcaatcagccttaaggaacatggctgtgggaaagcatacactggagttcatgatgcgccagtcaaatagcactgcagccacaaacgaggtgccagaagtgactgtattttccaaatttccagttacacttgggcagccaaatacactgatctgcttagtggacaacatcttccctcctgtggtgaacatcacatggcttagcaacgggcactctgtcacagaaggtgtctcagaaacgtctttcctaagtaagtccgaccatagcttctttaagatatcttatttaacatttctccctagtgccgatgagatctacgattgtaaggtcgagcattggggcctggatgagccgctgctcaagcattgggagcccgaaattccagccccaatgtctgaacttacagaaacattagtgtgtgctctcggccttagcgccggactcatgggtatagtcgtgggaaccgtttttattattcagggtttacgatccgtgggagcttcccgccaccaagggttgctctag

SEQ ID NO: 123186 - DNA, 768 bp, synthetic construct
  misc_feature 1..768: note = Description of Artificial Sequence: Synthetic coding sequence
  source 1..768: mol_type = other DNA
atgattctgaataaggctcttctcctgggcgcgctggcactgactgcagtgatgtccccctgtgggggggaggacatcgtagctgatcacgtcgcaagctatggagtgaatttttaccagagccacggcccaagcgggcagtatacccacgaattcgatggcgacgaagaattctatgtggacctggaaactaaggagacagtctggcagttgcctatgttcagcaagtttatttcctttgacccccagtcggctctgaggaatatggcggttgggaagcacacgttggagttcatgatgagacaatcaaactctaccgcagcaacgaatgaggtgcccgaggtgactgtctttagtaagttcccagtcacgctcggccagcccaacacccttatctgtctggtggacaacatctttccacctgtggtcaacataacttggttgagtaacgggcacagcgtcaccgaaggagtgagcgagaccagcttcttatctaaaagcgaccactctttctttaagatatcatacttgacttttctaccttcggccgatgagatctacgactgcaaagttgaacactggggacttgacgaaccactgctcaaacactgggagccagaaattccagcccctatgtctgagttgacagaaacactggtgtgtgcattgggactgtccgttggcttaatgggcattgtcgttggaaccgtattcattatacaggggttgagatctgtaggagctagtcgacaccaggggctgctctag

SEQ ID NO: 123187 - DNA, 768 bp, synthetic construct
  misc_feature 1..768: note = Description of Artificial Sequence: Synthetic coding sequence
  source 1..768: mol_type = other DNA
atgatcctgaataaagctctccttcttggggcgcttgcactcacagccgtgatgagcccctgtggcggagaggacattgtcgctgatcatgttgctagctatggcgtcaacttctatcagagtcatggccccagcggccagtatacacacgagtttgatggtgacgaggaattttatgtggatctcgaaacgaaggaaactgtatggcagctcccgatgttttcaaaattcataagcttcgacccacagagcgctcttcgaaacatggccgtcggcaaacacaccttagagttcatgatgcgccaaagcaattccactgcggctaccaatgaagtgccggaggttacagtgttttccaagttcccagtcacccttggacagcctaacacactcatttgtctcgtcgacaatatattcccacctgtcgtgaacattacctggctcagcaatgggcattcagtaacagaaggggttagcgagacctccttcttgtccaagtctgatcacagtttctttaaaatctcctacctcactttcctgccaagtgcagatgagatctacgactgtaaggtggaacattgggggctcgatgagcctctcctcaaacattgggaacccgagattccggcccctatgagcgagctcactgagactcttgtgtgtgcgctggggctgtccgtagggctgatggggattgttgttggcaccgtgttcatcattcaggggttgagatccgtgggagcgtctaggcaccagggactgctgtag

SEQ ID NO: 123188 - DNA, 768 bp, synthetic construct
  misc_feature 1..768: note = Description of Artificial Sequence: Synthetic coding sequence
  source 1..768: mol_type = other DNA
atgattttgaacaaggcccttctgctcggggcattagcgctcactgctgtcatgtccccatgtggaggcgaagatattgttgccgaccacgtagcttcctatggggttaatttttaccaatctcacggtccctcgggccaatatacccatgaattcgatggcgatgaggagttttatgtggacttggagacgaaggaaactgtgtggcagctccctatgttttcaaaatttatctcatttgatccacagtctgcgctgagaaacatggctgtaggtaagcataccctagagtttatgatgaggcagagtaacagcactgccgctaccaacgaagtgccggaggttacagtgttcagtaaatttcctgtaaccttgggccagcccaataccctcatttgtctggtggacaatatcttcccacctgtggtcaatatcacatggctgagtaatgggcactctgttactgagggcgtgagcgagacttcatttctgagcaagagcgaccattctttttttaagatcagctatctgaccttccttccgtctgctgatgaaatctatgactgcaaagtggaacactggggcctggacgaaccccttttgaaacactgggagcccgaaattcccgctcctatgtccgaactgaccgaaaccctggtgtgtgctcttggcctgtctgcaggtctcatgggcattgtggtaggcaccgtgtttataattcaggggctccggagcgttggcgcaagtaggcatcagggactgctctag

SEQ ID NO: 123189 - DNA, 768 bp, synthetic construct
  misc_feature 1..768: note = Description of Artificial Sequence: Synthetic coding sequence
  source 1..768: mol_type = other DNA
atgatccttaacaaagcccttctgctcggggccttggctctcacagccgttatgtctccctgcggaggtgaagatatcgtggctgaccacgtggcgtcctatggggtcaatttttaccagtcccatggaccctctgggcagtatacccacgagttcgatggcgacgaggagttttacgtggaccttgaaaccaaggagactgtctggcaactgcctatgtttagcaaattcatttctttcgacccacagtccgccctccggaacatggccgttggtaaacacacacttgaatttatgatgcggcaatcaaattctacagcagctacaaacgaagttcccgaagtgactgtcttttcaaagtttcctgtgacattaggtcagccgaacacactgatttgtctggtggacaatatctttccacccgtggtaaacataacttggctgagcaacggacactcagtaaccgagggggtgtctgaaacaagttttctttccaaatccgaccacagtttcttcaagatctcctacttgacatttctccccagtgcagatgaaatctacgactgcaaggtggaacattggggccttgacgagcccctcctgaaacactgggagcctgagatcccggctccaatgagtgaattgaccgaaacactggtctgtgcattgggccttagtgtggggctaatgggaatagtagtgggaactgttttcatcattcagggactaaggagtgtgggggccagccggcatcaaggcctactgtag

SEQ ID NO: 123190 - DNA, 249 bp, synthetic construct
  misc_feature 1..249: note = Description of Artificial Sequence: Synthetic coding sequence
  source 1..249: mol_type = other DNA
gaccatgtcgcaagctatggggtaaatttttaccaatcccacggccccagtggacaatacacacacgagtttgatggagatgaagagttctacgtcgacctcgaaaccaaagaaaccgtgtggcaactgcccatgttttcaaagtttatcagctttgatcctcagtcagctcttcggaatatggccgtgggtaagcatactttagaatttatgatgcgacaaagtaattccaccgccgcaaccaactag

SEQ ID NO: 123191 - DNA, 768 bp, synthetic construct
  misc_feature 1..768: note = Description of Artificial Sequence: Synthetic coding sequence
  source 1..768: mol_type = other DNA
atgatcctgaacaaggccctgttgcttggtgcactggccctgacggccgtcatgagtccctgtgggggagaagacatagttgccgatcacgttgcctcctatggagtaaacttttaccaaagccacgggccatccggacagtacacccacgaattcgacggagacgaggagttctacgtggatctggagacaaaggagaccgtgtggcaactacccatgttcagcaagtttatttcattcgacccccagagcgccctacgcaacatggctgtcggaaagcacaccctcgagttcatgatgaggcagagcaactctacagcagctacaaacgaggtaccggaagtgactgtgttctccaaattccccgttaccctggggcagccaaacaccttgatctgccttgtggataacatcttccccccggttgtcaacatcacgtggctttccaacggacactctgtgacggaaggcgtgagcgagactagctttctgtctaaatccgatcacagcttctttaaaatcagctacctgaccttcttacctagtgccgacgaaatatacgattgtaaagttgaacattggggactggacgaaccgctgttgaagcattgggaacccgagattccggctcccatgagcgagctgaccgagacactcgtttgcgcccttggactgtccgtgggactgatggggattgtagtcgggaccgtgttcatcatacagggattgcgcagtgttggcgcctcccgccaccagggactcctctag

SEQ ID NO: 123192 - DNA, 84 bp, synthetic construct
  misc_feature 1..84: note = Description of Artificial Sequence: Synthetic coding sequence
  source 1..84: mol_type = other DNA
atgattctcaataaagctctactgctgggtgctctggctctcacagccgtcatgtcaccttgtggaggcgaggatattgtgtag

SEQ ID NO: 123193 - DNA, 810 bp, synthetic construct
  misc_feature 1..810: note = Description of Artificial Sequence: Synthetic coding sequence
  source 1..810: mol_type = other DNA
atgtcctggaaaaaagctttgcgcatcccgggtgacctcagagtggctacggtaaccctcatgctggctatgttgtcgtctttgctggccgagggacgcgacagccccgaggacttcgtgttccaatttaaaggaatgtgctacttcaccaatggcacagagagggtccgcctggtgaccagatatatctacaacagggaggaatatgcccggtttgactccgacgtgggggtctatcgcgccgtgactccacagggcagacctgacgccgagtattggaactctcagaaggaggtgctcgagggcacccgcgcggaattggatacagtgtgccgccataactatgaggtcgcctttcgcgggatactccaaaggagagtggaacctacggtgacgatttcacccagtagaacagaagccctgaaccaccacaatctcctggtgtgctcagtgacagacttttatcccggtcagataaaagtgcgttggtttcgcaacgaccaggaagagaccgctggggtggtcagcaccccactgatccggaatggtgattggaccttccagatactagtaatgctcgagatgacaccccagcgaggcgatgtgtatacctgccacgtcgaacatcccagcctgcaatcacccatcaccgttgagtggagagctcagtctgaaagtgctcagtccaaaatgctgtctggagtggggggcttcgtactaggactgatctttctggggttggggctcatcatcagacaaagatctcaaaagggtccccaagggcccccacccgctggcctactacattag

SEQ ID NO: 123194 - DNA, 786 bp, synthetic construct
  misc_feature 1..786: note = Description of Artificial Sequence: Synthetic coding sequence
  source 1..786: mol_type = other DNA
atgtcatggaaaaaagctttgcgtattcccggaggtcttagagctgctaccgtaactctcatgctgtcaatgctttcaaccccagtggctgagggtagagactcaccggaggattttgtgtatcaattcaaggggatgtgttattttactaacggcacggagcgggtacgactcgtttctcgctcaatctacaacagggaagagattgtgcggttcgactccgacgtaggcgaattcagggctgtcacactgctcggcttgcctgcggctgagtactggaattcccagaaggacattctcgaacgcaagcgcgcagctgttgaccgcgtctgtcggcacaactaccaactggaactcagaactacacttcagcggagagtggagcccaccgttacaatttcgccctcaagaacggaggcactgaaccatcataacctgttggtgtgctcggtgactgacttctacccagcacaaatcaaggtaaggtggttccgcaatgaccaagaggagacagcgggagtcgtgagcacccctctgattcgcaacggcgactggactttccaaatcctggtgatgttagagatgacccctcaaagaggagatgtctacacttgccacgtagagcacccatcgttacagtctcccatcacagtggagtggagagcccaatctgagagcgcccagtccaagatgctgagcggtattggggggtttgtactggggctgatattccttggcctgggcttgattatacatcaccgttcacagaaaggtcttcttcattag

SEQ ID NO: 123195 - DNA, 786 bp, synthetic construct
  misc_feature 1..786: note = Description of Artificial Sequence: Synthetic coding sequence
  source 1..786: mol_type = other DNA
atgagttggaagaaggcattgaggattcccggcggtttgagagccgcaaccgtcacattgatgctttcaatgctgagcacgcccgtggcggagggcagagactctcctgaggatttcgtctaccagttcaagggcatgtgctatttcacaaatggcactgaacgggtgaggttggtatcccgctccatctataatcgggaggagatcgtgagatttgactccgacgtaggagagtttcgcgccgtgaccctgctggggcttccagctgccgagtactggaacagccaaaaagatattctggagcgaaagcgcgcggccgtggaccgtgtgtgcaggcacaattatcaactcgaactgagaaccacactccagcggcgtgtagagcctaccgtaaccatctctccctcccgcaccgaggctctgaaccaccacaatctcctcgtgtgctccgtaacagacttctacccggcacagattaaggtaagatggttccgaaatgaccaggaggaaacagccggtgttgtgtccaccccactgattaggaatggcgactggacattccaaattctggtgatgctggagatgacccctcagcggggagacgtgtatacatgccacgtggagcacccaagcctgcagtcaccgataacagttgaatggcgagcacagtcggaatctgctcagagtaaaatgctctctggtattggaggcttcgtactgggactgatttttcttggcctcgggttgatcattcaccacagaagtcagaagggcctgctgcactag

SEQ ID NO: 123196 - DNA, 810 bp, synthetic construct
  misc_feature 1..810: note = Description of Artificial Sequence: Synthetic coding sequence
  source 1..810: mol_type = other DNA
atgagttggaagaaggctctcagaatccctggcggtcttcgggcggcaacagtgactttgatgctggcgatgctttccacacccgtcgccgaaggtcgggactcccctgaagatttcgtttatcagtttaaggcaatgtgctattttacgaatgggacagagagagtacgctatgtcacacggtacatttataatcgcgaggagtacgcaaggttcgattctgatgtggaggtctatcgggccgtcacacctttagggcctccagatgccgaatattggaattcacagaaggaagtgctggaacgaacaagagcggagctcgacaccgtctgtcgacacaactaccaacttgaactgcgcacgaccctgcagcggcgcgtggaacctacagtgacaatttcaccctctcgcactgaggcccttaatcatcacaacctcttggtgtgcagcgtgaccgatttttatccggctcagattaaagttaggtggttcagaaatgatcaggaggagactaccggcgtggtttctacccctctgattagaaatggagactggacattccagatcctggtcatgcttgaaatgactcctcagcacggagatgtgtacacctgtcacgtggaacacccctctctccagaaccctatcactgttgagtggagagctcagtcagaaagcgctcaaagcaagatgctcagcggaatcggtgggtttgttctgggcctgatctttttagggctgggcctcatcattcaccaccggtcacagaagggacctcaaggtccccctccggctggactactccattag

SEQ ID NO: 123197 - DNA, 810 bp, synthetic construct
  misc_feature 1..810: note = Description of Artificial Sequence: Synthetic coding sequence
  source 1..810: mol_type = other DNA
atgagttggaagaaggcattacgcatccccggaggtctgcgggtggccactgtcacgctgatgttggccatgctctccacaccagtagcggagggacgagatagccctgaggatttcgtgtaccaattcaagggaatgtgttacttcacgaatggtacagagagagtccggctcgttactcgttacatctacaatcgcgaggagtacgcgcgttttgactcggacgttggggtttacagggccgtcacacccctgggacccccagatgctgaatactggaactcgcagaaggaagttctagagcgtactagagctgaactcgacaccgtctgtaggcacaactaccagctagaactgcgaacaacactgcagcgacgggtggaaccgacagtgaccatctccccgtcacgcaccgaagcactgaatcatcacaacctgctggtctgtagtgttacagacttctatcccgcccaaatcaaagtgagatggtttcggaacgatcaggaggagactacaggtgtcgtaagtacaccactcatcagaaacggtgattggaccttccaaattctggttatgctggagatgactccccagagaggagacgtgtacacttgccacgttgagcacccttcactgcagaatcccatcatagtcgagtggagggctcaatccgaatccgcccagtcaaagatgctatccgggattggcgggtttgtcctgggtctgatttttctgggactggggcttattattcaccatcgaagtcagaaaggaccacaaggacctccccccgcaggactgttgcattag

SEQ ID NO: 123198 - DNA, 675 bp, synthetic construct
  misc_feature 1..675: note = Description of Artificial Sequence: Synthetic coding sequence
  source 1..675: mol_type = other DNA
atgtcttggaagaaagccctgagaatccctggagatctcagggtggctaccgtgacgctcatgttggcaatgctgagttccttgttagccgagggccgggatagccctgaggatttcgtctttcaatttaaaggcatgtgttacttcaccaatggaacagaaagagtgagactagtaacccgctacatttataatcgtgaggaatacgcgagattcgattcagacgtgggcgtgtaccgtgctgtgacgccgcagggaaggccagatgctgaatattggaactcccaaaaggaggttctggagggcacacgggctgagctagacaccgtctgtagacacaactatgaggtggcatttaggggtatactacagcgccgcgtcgaaccaacagtaacaatcagcccatcaagaacagaggctttgaaccaccataatctattggtgtgtagcgtcacagacttttatcccggacagatcaaagtgaggtggttcagaaacgatcaggaagaaacagccggcgtggtatcaacccctttgattagaaatggagattggacttttcagatccttgttatgctggagatgactcctcagagaggcgatgtgtacacatgtcatgttgaacatccttctctgcaaagcccaatcaccgtagagtggaggttactccattag

SEQ ID NO: 123199 - DNA, 786 bp, synthetic construct
  misc_feature 1..786: note = Description of Artificial Sequence: Synthetic coding sequence
  source 1..786: mol_type = other DNA
atgagctggaagaaagccctgcgcatcccaggagatttgagggtggcaacagtgactctgatgctggcaatgctgtcctctctgttagctgaggggcgcgattcccccgaggatttcgtttttcagtttaagggaatgtgttatttcactaacggtacggagcgggtacgcttggtaacccgatacatctacaaccgcgaggaatacgcaaggttcgactccgacgttggggtgtatagagccgttacgcctcagggcagaccagacgccgagtactggaactcccaaaaagaggttctggaaggaactcgcgccgagctggacacggtgtgcagacacaactacgaggttgcctttagaggaattctacaaagaagggtggagccaactgtgaccatctctccctcacgcacagaagcactaaaccatcataacctgctggtgtgtagcgttaccgatttctaccccggacagataaaggttagatggttccggaacgatcaagaagagacagctggggtcgtgtcaaccccattgattaggaacggggactggacatttcaaatcctggttatgctcgaaatgacaccgcagaggggggacgtttatacatgccatgtggaacatccctcattacaatcacccattaccgtggaatggcgggcccagtcagaatccgcgcagagtaagatgctgtccggggtgggaggctttgtccttgggctgatctttctaggtctgggactaatcatacggcaaagatcgcagaaagggttgctgcactag

SEQ ID NO: 123200 - DNA, 786 bp, synthetic construct
  misc_feature 1..786: note = Description of Artificial Sequence: Synthetic coding sequence
  source 1..786: mol_type = other DNA
atgtcatggaaaaaggccttgcggattcctggagggctgagagctgctaccgtgacgctgatgttagctatgttgtctactcccgtagccgaaggcagggactcaccagaggattttgtgtaccagttcaaggcgatgtgctattttacaaacggaactgaacgtgtacggtatgtcacacggtatatctacaaccgcgaggagtacgcacggttcgattcagatgtcgaggtctatcgggccgtgaccccactgggaccacctgacgctgaatactggaactcacaaaaagaagtgttggagagaacaagagccgaactggacacagtctgtcgtcacaattatcagctggagctgagaaccaccctgcaacggcgcgtggaaccgaccgtgaccatatcaccgagcaggacagaggcactgaaccatcacaacctccttgtgtgttcggtgacggacttctacccagctcaaataaaagttcgttggtttcgtaacgatcaggaggagacaacaggcgttgtctctactcccctaattagaaacggggactggacattccagatactcgttatgctcgagatgaccccacagcatggcgacgtgtacacctgtcacgtggaacacccatcattgcagaatccaatcactgtcgagtggcgtgcccagtccgaatccgcccagagcaagatgctttcaggaatcgggggttttgtgttaggactgatatttttaggactgggcttgattatccatcacagatctcagaaggggctgttacactag

SEQ ID NO: 123201 - DNA, 675 bp, synthetic construct
  misc_feature 1..675: note = Description of Artificial Sequence: Synthetic coding sequence
  source 1..675: mol_type = other DNA
atgtcttggaaaaaagccctgaggatccccggaggactgagagcggcaaccgtcactctgatgctaagcatgctgtccactcctgtggccgaaggaagggatagcccagaggattttgtgtaccagttcaaagggatgtgctatttcaccaacggtacagaacgggttagacttgtgagcaggtctatttataaccgggaagagatcgtgaggtttgactccgacgtaggcgagttccgagcggtgacactgctggggcttccggctgcggagtactggaattcccagaaggacattctagaacgaaaacgagctgctgtagaccgtgtgtgtagacacaattaccaactggaactaaggacaacacttcaacgcagagttgagcccaccgttaccattagcccaagccgcaccgaggctctgaatcaccataacctgctcgtgtgctctgtcaccgatttctatcctgcccagattaaggtgcgttggttccgcaatgaccaggaggagactgcaggggtggtgagcacgccactgattcgaaacggggactggacttttcagatactggtgatgctggaaatgactccccagaggggggacgtgtacacctgccacgtggaacacccctcattgcagagcccgattactgtcgagtggagactgcttcattag

SEQ ID NO: 123202 - DNA, 786 bp, synthetic construct
  misc_feature 1..786: note = Description of Artificial Sequence: Synthetic coding sequence
  source 1..786: mol_type = other DNA
atgtcatggaagaaagccctccggataccagggggacttcgtgccgctactgtaaccctgatgctggccatgctgagcacgcctgtggccgaaggccgcgatagccctgaagattttgtatatcagtttaaggctatgtgctatttcacgaacggtacagagcgggtgcgatacgtgacaagatacatctacaatcgggaagaatacgctaggtttgattccgacgttgaagtctacagggccgtcactcctcttggtccacccgatgccgagtattggaattctcaaaaggaggtactggagagaacccgtgcagaactggatactgtatgccgccacaactaccagctggagttgcggacaaccctccagagaagagtggagcccaccgtgaccatctctccctcccgcacggaagcactgaaccatcacaaccttctggtgtgttcggtgacagacttctatccagctcagattaaggtgaggtggttccgtaatgaccaggaggagacaactggagtcgtgagtactcctcttatcagaaatggtgattggactttccagatcttagtgatgttggagatgaccccgcagcatggggatgtctacacctgccatgtagaacatccatctctgcagaatcctatcactgtggaatggagagcccagtctgagtctgcgcagtcaaaaatgctttctggaatcggcggctttgtactgggtctgatctttctcgggctcgggctcattattcatcatcggagccagaaaggtcttttgcactag

SEQ ID NO: 123203 - DNA, 786 bp, synthetic construct
  misc_feature 1..786: note = Description of Artificial Sequence: Synthetic coding sequence
  source 1..786: mol_type = other DNA
atgagctggaaaaaggctttacgcatcccagggggacttagagtggccactgtcactctgatgctagctatgctttctacccctgtagctgaaggaagagactcccctgaggactttgtgtaccaatttaaggggatgtgttattttacaaacggtaccgagagagtaagaggagtgactcggtacatctataatagggaagaatacgcgcgctttgattccgacgtgggggtatatcgggccgtgacacccctggggcccccggctgccgagtattggaatagccagaaggaagtgcttgaaagaaccagggccgagctggacacagtgtgccgacataattatcagctggagctgagaactacactgcagcgtcgagtagaacccactgtgacaatttcaccttcccgtactgaagcacttaatcaccataacctgttggtgtgttccgtcactgacttctatcccgcacaaatcaaagttagatggtttcgcaacgaccaggaggaaacgacgggagtggtgtcaacacctttgatcaggaatggtgactggacattccagatcctagtcatgctcgaaatgacgccccaacggggggatgtgtacacttgtcatgttgagcatcccagtctccaaaaccctatcattgtggaatggagagctcagtctgagagcgcacagagcaagatgctatctgggataggtggcttcgtgctgggtctcatcttcctggggttgggcctgattatccatcatcgcagtcagaaggggttgctccactag

SEQ ID NO: 123204 - DNA, 675 bp, synthetic construct
  misc_feature 1..675: note = Description of Artificial Sequence: Synthetic coding sequence
  source 1..675: mol_type = other DNA
atgtcctggaagaaggcccttagaataccaggcggcttgcgagcggcgaccgtgacgcttatgctgagtatgctgagtactcccgtggccgaggggcgtgattcacctgaagattttgtttaccagtttaaaggaatgtgctacttcactaatgggactgaaagggtccgcctcgtttcaagaagtatttataaccgtgaagaaatcgtgcggttcgattctgacgtgggagagtttagagctgtcaccctcctcggtctgccggcggcagaatactggaacagccagaaggatatccttgaaaggaagagggccgctgtcgatcgtgtttgcagacataactaccagctcgagttgaggacaaccctccaacggcgcgtggaaccgacagtcaccatctccccctcacgcaccgaagccctgaaccatcacaatctcctggtgtgttccgtgacagatttttaccctgcccagattaaggtgcgatggttccgcaatggccaggaggaaaccgcaggggtcgtgtctacgcccctaattcggaacggcgactggaccttccagattttggttatgcttgaaatgacccctcagaggggtgacgtctacacctgccacgtggagcacccatctttgcagtccccaattactgtagaatggaggctccttcattag

SEQ ID NO: 123205 - DNA, 786 bp, synthetic construct
  misc_feature 1..786: note = Description of Artificial Sequence: Synthetic coding sequence
  source 1..786: mol_type = other DNA
atgagttggaaaaaggcgttgaggatccccggtggcttacgcgtcgctacagtcaccttaatgttagcaatgctttctacacccgtcgctgagggtagagactccccagaggacttcgtataccagtttaagggcatgtgctattttaccaacggaacagagcgcgttagactcgtcacaagatacatctataatcgggaggaatatgctcggttcgacagtgatgttggagtttacagagcggtcacaccgttaggtccgcctgatgctgaatactggaactctcagaaggaagtactggagcgtactagggccgaactcgacaccgtgtgcagacataactatcagctggagctgcgcacaacactccagcgacgggtggagcctaccgtgactatttccccctccagaaccgaggccctcaaccatcacaacctgttggtctgtagtgtgacggacttctatccggcccaaatcaaagtgcgatggttcagaaacgaccaagaggaaacgacaggtgtggtgtccacccccctaattcgaaatggcgactggaccttccagatactcgttatgctcgaaatgacgcctcagcggggagacgtctacacctgccacgtggagcatccttctcttcagaacccaataatcgtggagtggagggcccagagcgaatctgcccagagtaagatgctgtccgggatcggaggttttgtcttgggacttatcttcctaggactcggacttattatccatcaccgctcacagaagggactgctgcactag

SEQ ID NO: 123206 - DNA, 786 bp, synthetic construct
  misc_feature 1..786: note = Description of Artificial Sequence: Synthetic coding sequence
  source 1..786: mol_type = other DNA
atgtcctggaagaaggccttgcgtattcctggcggtttgcgagctgctaccgtcaccctgatgctgagtatgctgtccacacctgtggccgagggcagagattccccagaggatttcgtgtaccagtttaaggggatgtgttactttacaaacggcacagaaagagtgcgcctggtgtctcgatccatttataatagggaagaaattgttcgttttgactctgacgtcggggaattcagggcagtgaccctgctgggattgccggcagctgaatattggaactctcagaaagatatcttagagcgaaagcgggccgccgtggaccgggtttgccggcataattatcagctggagctccgtacgactctgcagagaagagtcgagcccacagtcactatctcccccagcagaaccgaggccctgaaccaccacaacctgttggtgtgcagtgtgacagatttttaccctgcccagatcaaggtgaggtggtttagaaatggacaagaggaaactgctggagtcgtgtccacaccgctgatccggaatggtgactggacgttccagatattggttatgctagaaatgaccccccagcgtggagatgtatacacttgtcatgtggagcacccctcactgcaaagccccataaccgtagaatggcgggcacagtccgagagtgcccagagcaaaatgctgagcggcattggggggttcgtcctcggtctgattttcctcgggctggggctcattatccaccatcggtctcaaaagggattgctccattag

SEQ ID NO: 123207 - DNA, 810 bp, synthetic construct
  misc_feature 1..810: note = Description of Artificial Sequence: Synthetic coding sequence
  source 1..810: mol_type = other DNA
atgtcctggaagaaagccctccgcattcccggtggcctgagggctgcgacggtgaccctgatgttatctatgctctctacgcccgtggcagaagggagggactcgcctgaagactttgtttaccaatttaaggggatgtgttactttacaaacggaaccgaaagagtcagactggttagcaggtctatctacaatagagaagagattgtgcgattcgactccgatgtgggtgagttccgggcagtaactctattgggacttcctgcagctgagtactggaattcacagaaggatatcctcgagcgaaagagagcagctgttgatagagtttgtcggcacaactatcagcttgaactgaggaccactctgcagaggagggtggagcccacggtgaccatctcaccatcgcgaacagaagcattgaaccatcataacctccttgtgtgtagcgtgaccgatttctatcctgcacagattaaggtccggtggttccgcaacgggcaggaggaaaccgcaggagtagtttccacacccctcatcagaaatggagattggacattccagattctggtgatgttggagatgaccccacagagaggcgatgtgtatacttgccacgtcgaacatccttcacttcagtccccaattacagtcgagtggcgcgctcagtctgaatcagcccagtccaaaatgctgtctggtatcggggggttcgtgctgggactgatatttctcggtctgggcctcatcattcaccaccgttctcaaaagggaccacagggcccgccccctgctggtctcctccattag

SEQ ID NO: 123208 - DNA, 786 bp, synthetic construct
  misc_feature 1..786: note = Description of Artificial Sequence: Synthetic coding sequence
  source 1..786: mol_type = other DNA
atgagttggaagaaggcccttcggattcctggcgggctaagagtcgccactgtcacgcttatgctggctatgctctctacccccgtggcagaggggcgtgactctcctgaagacttcgtgtatcagtttaagggtatgtgttacttcacgaacggcacggagagagtgaggttggtgacccgttatatttataacagagaagagtacgccagattcgattcagacgtgggagtctacagggccgtaacacctctcggtccaccagatgcagaatactggaactcccaaaaagaggtcctggagaggacccgagccgaactagacactgtctgccggcacaattaccaactcgagctgaggacaacactccagagaagagtggaaccgactgttacaatctcaccctcacgcaccgaggctctgaaccaccacaatctcctggtttgctcggtaactgatttctacccagcacagattaaggtacggtggtttaggaatgaccaggaggagaccaccggtgtggtttcgacacccttaatccggaacggcgactggacatttcagatcttggtcatgctggaaatgacgcctcagcgcggagatgtttacacatgccacgtggagcatccttctctccagaatcctattatcgtggaatggagggcccaatccgaaagtgctcagtccaagatgctgagcggtataggcgggtttgtcctgggcctaatcttcctcggtctgggtcttatcattcaccacaggtcacagaagggcttgttgcattag

SEQ ID NO: 123209 - DNA, 675 bp, synthetic construct
  misc_feature 1..675: note = Description of Artificial Sequence: Synthetic coding sequence
  source 1..675: mol_type = other DNA
atgagctggaaaaaggcacttaggataccaggcggactgcgcgcagccaccgtcacccttatgctagcaatgctcagtacacccgtcgcagagggaagggacagccctgaagattttgtctaccagtttaaggcgatgtgctactttacaaacggaaccgaaagagttaggtacgtgacccgatacatctacaatagagaagagtacgcgagatttgatagcgacgtggaggtatatcgagccgtcacacctttggggccgcctgacgcggagtactggaacagccagaaagaggttctggaaagaacccgcgccgaattggacaccgtttgccggcataactaccaattggagcttaggacaacattacaaaggcgggtcgagcccaccgttaccatctccccctcacgtacagaggccttaaatcaccacaacctccttgtgtgtagtgtaacggatttctatccagctcagataaaagtcaggtggttcaggaatgaccaggaggagaccacaggcgttgtcagcacaccgttgatcagaaatggagactggaccttccagatcctggtgatgctggaaatgactcctcagcatggggacgtgtacacttgccatgtggaacacccttctctccagaaccccatcaccgttgagtggcgattgctgcattag

SEQ ID NO: 123210 - DNA, 786 bp, synthetic construct
  misc_feature 1..786: note = Description of Artificial Sequence: Synthetic coding sequence
  source 1..786: mol_type = other DNA
atgagttggaagaaagcccttcgcattcccggggggctgagagcagcgacagtgacattaatgctgtctatgctgtctactccagtagcggaaggcagagatagtcccgaggattttgtgtatcagtttaagggcatgtgctacttcaccaatgggaccgagagagttagacttgtgagtcgctctatctacaaccgggaggaaatcgttaggtttgacagtgacgtgggagagttcagagccgtgacgctgctgggactaccagccgcagagtattggaatagtcagaaggacatcctggagcgaaagcgcgcagcagtggaccgcgtctgcagacataactaccaacttgaacttaggactaccttgcagaggagggtggaaccaacagtgaccatttcaccgagccgaacagaggccctcaaccaccataatctgctggtgtgcagcgttactgacttctaccccgcacagatcaaggtgcgctggtttcgaaacggacaggaagaaaccgctggagtcgtgagcaccccactcatccgaaatggggattggacctttcaaatccttgtaatgttagagatgacaccccaaaggggggacgtctatacttgtcacgtagaacacccttctcttcaatctcctattacggtagagtggagagctcagtcagagtccgcacagtcaaaaatgcttagtggcatcggtggatttgtgctcggactgatcttcctcggactcggtcttatcatacatcacaggagccagaagggactgctgcattag

SEQ ID NO: 123211 - DNA, 405 bp, synthetic construct
  misc_feature 1..405: note = Description of Artificial Sequence: Synthetic coding sequence
  source 1..405: mol_type = other DNA
atgtcctggaaaaaagccttgaggatccctggggggctgcgagccgctaccgtgacgctaatgctgagtatgctgtccactcccgtcgcagagggcagggactctcctgttgagccaactgtcacaatttctcctagccggaccgaggcccttaatcatcacaatctgctggtgtgcagcgttactgacttctaccccgctcagatcaaagttagatggtttaggaacggtcaagaggaaacagccggtgtcgtaagtactccactcattaggaacggcgactggaccttccagattcttgtgatgttggaaatgacacctcagagaggagacgtgtacacatgtcatgtcgaacaccccagccttcagtctcccattactgtcgagtggcgtttgctgcactag

SEQ ID NO: 123212 - DNA, 405 bp, synthetic construct
  misc_feature 1..405: note = Description of Artificial Sequence: Synthetic coding sequence
  source 1..405: mol_type = other DNA
atgagctggaaaaaagccttgagaattcctggaggcctcagggtcgcgactgtgacccttatgctagccatgttatccacaccagtggctgagggacgcgacagtcccgtcgagcctaccgtgactatttctccttccaggactgaagcacttaatcaccacaacctgctggtgtgttcggttaccgacttctatccagctcagatcaaggttagatggttcaggaacgaccaggaagagactacaggagtggtctccactcccctgatccgaaacggggactggacctttcagatccttgtgatgttagaaatgactccacaacggggcgacgtgtatacgtgccacgtggagcacccttccctgcagaatcctataattgtagaatggcggctgctccactag

SEQ ID NO: 123213 - DNA, 435 bp, synthetic construct
  misc_feature 1..435: note = Description of Artificial Sequence: Synthetic coding sequence
  source 1..435: mol_type = other DNA
atgagctggaagaaggccctcaggatcccagggggcctgagagtggctactgtgacaccattaggcccgcctgacgcagagtattggaactcccaaaaggaggtgctcgaaaggacaagggctgagctggataccgtgtgccggcacaattatcagctggagctccgcacgaccttgcagagacgtgtggagccaaccgtgaccataagcccctcaaggacagaggccctgaaccaccacaacctcttggtatgcagcgtgaccgacttttaccctgcccagatcaaagtcaggtggttcagaaacgatcaggaggaaactacgggggtggtctccactccccttataagaaacggggactggaccttccagatacttgtcatgcttgagatgacacctcagcgaggcgacgtgtacacctgccatgtggaatag

SEQ ID NO: 123214 - DNA, 405 bp, synthetic construct
  misc_feature 1..405: note = Description of Artificial Sequence: Synthetic coding sequence
  source 1..405: mol_type = other DNA
atgtcttggaagaaagctctacgcattcccggaggactcagagctgccacggttacccttatgctcgctatgttgtcaactccggtagcagagggtagggatagccccgtggagcccacagtcactatcagtccctccaggacagaggctctcaatcatcataatcttcttgtgtgctctgtcactgatttttatcctgcccaaatcaaggttagatggttcagaaatgaccaggaggagacaacaggggtcgtgagcacccctctgatcaggaatggcgactggacatttcagattcttgttatgctggaaatgaccccgcagcacggagatgtgtatacttgccacgttgaacacccttcactgcaaaatcctatcactgttgaatggcggctactgcattag

SEQ ID NO: 123215 - DNA, 786 bp, synthetic construct
  misc_feature 1..786: note = Description of Artificial Sequence: Synthetic coding sequence
  source 1..786: mol_type = other DNA
atgtcttggaagaaagccctgcgcataccaggagacctgcgtgtcgccactgttacactgatgctcgcaatgctctcctccctgcttgcagaaggacgggactctccggaagacttcgtgtttcagttcaagggcatgtgctacttcacaaacggcactgaacgggttcggctggtcacaaggtacatctataatcgcgaggagtacgcaagatttgatagtgacgtcggtgtgtatcgggcggttacaccccagggcaggcccgacgccgagtattggaactctcaaaaagaggtactcgagggaaccagggcagagcttgatactgtgtgccgtcacaactacgaagtggcttttcggggcatactgcagcgacgtgtcgaaccgacagtgactatctcaccttcaaggaccgaggcattgaatcaccacaatctcttggtatgttctgttaccgacttttacccaggtcaaatcaaagttaggtggtttaggaacgaccaggaggagacagcaggagtggtctctacaccgctcattagaaacggagattggaccttccagattctggtcatgctagagatgacaccacagagaggagacgtttatacgtgtcacgttgagcatccatctcttcaatcacctatcaccgtggaatggagagcgcaatcagagtctgcccagtccaagatgctgagcggcgttggcggatttgtcctcggcctcattttccttggactcgggctgatcattaggcaaagaagccagaagggactcctccactag

SEQ ID NO: 123216 - DNA, 675 bp, synthetic construct
  misc_feature 1..675: note = Description of Artificial Sequence: Synthetic coding sequence
  source 1..675: mol_type = other DNA
atgagctggaagaaggctcttaggatccctggcggactgagggtcgctaccgtcacgttgatgttagctatgttatccacaccagtggccgaaggacgggacagtccagaggattttgtctaccagtttaagggaatgtgctacttcactaatggcactgagcgtgtgcgtctggtcacacgttatatatataatagagaggaatatgctcgcttcgactcagatgtcggggtgtatcgcgctgtcactccgctgggcccacccgacgctgaatactggaactcacagaaggaggtgctggaacgcactcgtgccgagctggataccgtctgcaggcataattatcagttggaactgagaacaacattgcaacggagagtggaaccgacagttacaatttccccaagccggaccgaggcactgaatcaccataacctcctcgtctgcagcgttactgatttttatccagctcagattaaggtgaggtggtttcgtaatgaccaggaagagactactggcgtggttagcacaccactgattagaaacggggattggacttttcaaatcttagtaatgcttgagatgacgccgcagcgcggggatgtgtacacatgccatgtagagcatccatcacttcagaacccaatcatcgttgagtggcggctgttacactag

SEQ ID NO: 123217 - DNA, 435 bp, synthetic construct
  misc_feature 1..435: note = Description of Artificial Sequence: Synthetic coding sequence
  source 1..435: mol_type = other DNA
atgtcatggaagaaagctctcagaattcccggcgatcttcgggtagctacagtaactccgcagggtcggcctgacgccgaatactggaattctcaaaaggaggtgctcgagggcaccagggccgagctggacacagtgtgcagacacaattacgaggtggccttccgcggcatcctgcagcgaagagtcgagccaacggtgaccatctccccctctcgaacggaggcattaaaccatcataatttgctggtatgttccgtgaccgatttttatccaggtcagatcaaggtgcggtggtttcggaacgaccaggaggagacggctggggttgtaagtacacccttgataaggaacggggattggactttccaaattctggttatgctagaaatgacccctcaaaggggagacgtgtacacttgtcatgtagagtag

SEQ ID NO: 123218 - DNA, 435 bp, synthetic construct
  misc_feature 1..435: note = Description of Artificial Sequence: Synthetic coding sequence
  source 1..435: mol_type = other DNA
atgtcatggaagaaagccctgcggatccccggggggttacgcgccgccaccgtcacattgctgggtctgcctgcggcagaatattggaacagccagaaagatatcctggaacgaaagagggctgccgtcgatagagtgtgcagacataactaccagctggaacttcggaccacgttacaaagacgggtggaacctactgttacaatcagcccttcccgaaccgaagcactgaatcaccataatctgttggtctgcagtgttaccgacttctacccggctcagatcaaggtccgctggtttcgtaacggccaggaagaaacagctggcgtggtctcgacaccactcatccggaatggagactggactttccagatccttgtcatgctggaaatgaccccccagagaggcgacgtgtacacctgccatgttgagtag

SEQ ID NO: 123219 - DNA, 435 bp, synthetic construct
  misc_feature 1..435: note = Description of Artificial Sequence: Synthetic coding sequence
  source 1..435: mol_type = other DNA
atgtcatggaagaaggcattacggattccaggcggccttcgggcagccacagtcactcccctcggccccccggatgccgagtattggaactcccagaaggaggtactggaaagaacaagagctgagctggataccgtttgccgacacaactaccaacttgaactgaggacgactctccagcgtagggtagaaccaactgtcaccatttcacctagcagaaccgaggctttaaaccatcacaaccttctcgtttgctctgtcaccgatttctatccagcccagatcaaggtgcgctggtttcgcaatgatcaggaagaaaccacgggcgtcgtaagcacgccgctcatcaggaatggcgactggacgttccagatactggtgatgctggagatgacacctcagcacggcgatgtgtacacctgccacgtcgagtag

SEQ ID NO: 123220 - DNA, 411 bp, synthetic construct
  misc_feature 1..411: note = Description of Artificial Sequence: Synthetic coding sequence
  source 1..411: mol_type = other DNA
atgagctggaaaaaggcgcttcggataccagggggtctgcgggctgccacggttacactgatgctttccatgctgtccacgcccgtcgccgagggccgcgattccccggaagacttcgtgtaccaatttaagggaatgtgttacttcacaaacggcacagagcgagtgcggttggtgtctagatctatctataatagggaggagatcgtgagatttgactcagatgtaggggaatttcgtgccgtcaccctgctgggtctcccagctgcggagtactggaacagccagaaagacatccttgaacgaaagcgcgccgctgtggaccgcgtctgcaggcacaattaccagctcgagctccgcaccacactgcaacggcggggaatggtgacagggccaagtcggagttggtag

SEQ ID NO: 123221 - DNA, 411 bp, synthetic construct
  misc_feature 1..411: note = Description of Artificial Sequence: Synthetic coding sequence
  source 1..411: mol_type = other DNA
atgtcttggaaaaaggctttgcgcatccctggaggtctcagggccgcaaccgttaccctgatgctggcgatgttaagcactccggtggccgagggaagggatagcccagaggattttgtgtatcagttcaaagctatgtgttatttcacgaatggcactgagcgggtgcggtatgtaactagatatatatataatcgcgaggagtatgcccggtttgatagtgacgtagaggtgtatagggccgtaacccctcttgggccacctgacgcggaatattggaacagccagaaggaggttctggagcgaacacgggctgagctggatacggtttgccgacataactatcagctcgaactgagaacaactctacagcggagaggaaccgtgacgggcccttccaggtcgtggtag

SEQ ID NO: 123222 - DNA, 411 bp, synthetic construct
  misc_feature 1..411: note = Description of Artificial Sequence: Synthetic coding sequence
  source 1..411: mol_type = other DNA
atgagctggaaaaaagcactacggatacccggcgatctaagagtggcaacagtgacactgatgctcgccatgctgtctagtttattagccgagggacgcgattcccctgaggatttcgtgtttcagtttaaaggcatgtgttatttcacaaatggcaccgagcgggtcagattggtcacacgatacatctataaccgtgaggagtatgcccggttcgacagtgatgtgggcgtctatcgcgccgtgacaccccagggacggccagacgcagagtattggaattcccagaaagaagtcctggagggaacgagggccgaactggacaccgtgtgcagacacaactacgaggtcgcttttaggggcattcttcagagaaggggcatggtcaccgggctctccaggagctggtag

SEQ ID NO: 123223 - DNA, 717 bp, synthetic construct
  misc_feature 1..717: note = Description of Artificial Sequence: Synthetic coding sequence
  source 1..717: mol_type = other DNA
atgctgagcaccccagttgcggagggaagggacagccccgaagattttgtataccagtttaagggcatgtgttacttcacaaatggcacagaacgcgtgcggctggtgtctagatccatctacaatagggaagagatagtgaggttcgacagcgacgtgggcgagttccgcgccgtaactctcctggggctgcccgccgccgagtattggaacagtcagaaagatatcctggagaggaagcgcgccgctgtcgatcgggtgtgccgccacaattatcagctcgagctcaggactacattgcagagacgagtggagccaactgttacaatctccccgagcaggacggaagccctgaaccatcacaacttactggtgtgttccgtgacagatttttatcctgcccaaattaaagtgagatggttcaggaatgggcaggaggagaccgccggcgtcgtaagcacaccgctgattagaaacggcgattggacattccagattctggtgatgctggagatgaccccgcagaggggcgatgtgtatacctgtcatgtcgaacacccttccctgcagagcccgatcaccgtggaatggcgggctcagtctgaatccgctcagagtaagatgttgtctggcataggaggcttcgtgctggggctgatcttcctcggcttaggcctgatcattcaccacagaagtcagaaaggattactgcactag

SEQ ID NO: 123224 - DNA, 543 bp, synthetic construct
  misc_feature 1..543: note = Description of Artificial Sequence: Synthetic coding sequence
  source 1..543: mol_type = other DNA
atgtgctatttcactaacggaactgaacgagtcagaggtgtgacccgatatatctataatcgagaggagtatgctagatttgactcagatgtgggcgtgtaccgggctgtgaccccacttggacctcctgccgctgaatactggaatagtcagaaggaggtcctggaacggacacgagctgaactcgacactgtgtgtcgtcacaactaccagctggagctccgaaccacacttcagaggcgggttgagccgacagttacgatttccccctcccggactgaagccctgaaccaccataacctgctggtctgtagcgtgactgacttctatccagcccagattaaagtcaggtggttcagaaacgatcaggaggagacaaccggagtggtctccacaccacttattcgcaatggggactggaccttccagattttagtgatgctggaaatgacacctcagcgcggcgacgtctacacatgccacgtggagcacccatccctgcaaaatcctattatcgtcgagtggagaatggatgaattctag

SEQ ID NO: 123225 - DNA, 717 bp, synthetic construct
  misc_feature 1..717: note = Description of Artificial Sequence: Synthetic coding sequence
  source 1..717: mol_type = other DNA
atgctgagcacccccgtagccgagggtagggactctcccgaagacttcgtgtatcaatttaaaggaatgtgttatttcaccaatggcacagaacgggtccggttagtgagtagatccatctacaaccgagaggagatcgttcgctttgattccgatgtgggcgagttcagggctgtgaccctgttgggcctgccagccgctgaatattggaacagccagaaagacatactggaaagaaaacgggcagctgtggatcgcgtttgtcggcataactaccagcttgaactccggactactctgcagaggcgggttgagcctacagtgacaatctctcctagcaggaccgaggcgctgaaccatcacaatttgctggtatgttcagtgacagacttttaccccgctcagatcaaagttcgttggttcaggaacgaccaagaagaaacagctggcgtggttagtacacctctgatcagaaatggagattggacttttcagattttagtaatgttagaaatgaccccccagcgaggagacgtttacacctgccatgtagaacacccaagcctgcagtctcccatcacagtagagtggagggcacagagcgagtcggctcagagcaaaatgctttcaggtatcggtggcttcgtgctgggattgattttcctgggcttgggcctcatcatccatcataggagtcagaagggcctcctgcactag

SEQ ID NO: 123226 - DNA, 744 bp, synthetic construct
  misc_feature 1..744: note = Description of Artificial Sequence: Synthetic coding sequence
  source 1..744: mol_type = other DNA
atgctatctacccccgtggctgaaggtcgtgatagccctgaagacttcgtctaccagttcaagggcatgtgctactttaccaacggtaccgagagagtaaggggcgtgactcgttatatttataaccgcgaggagtatgcaagatttgactcagatgtgggcgtgtatagggctgtaacccccttaggtcctccagccgccgaatattggaacagtcaaaaggaagttctcgagcgtacccgagctgagctggatacggtttgtcgacataattaccagctggagttacgtaccacgctccagaggagggtggaaccaacagtcaccatttcaccttctaggacagaggccctgaatcaccacaacttactcgtctgtagcgttaccgatttctaccctgctcagatcaaagtgcgttggttccgaaacgaccaggaggagactactggtgtcgtaagtacccccttaatccggaacggggattggacgttccaaattcttgtcatgttggaaatgacaccccagaggggtgatgtttacacgtgtcatgtcgaacatccctcactgcagaaccccattattgtcgagtggagggctcagtctgaatccgcacagtccaagatgctctccggcattgggggattcgtgctgggcctgatcttccttggtctggggctgatcattcatcacagaagtcagaaggccctacctcagggaccaccgccagctggtgacattagctag

SEQ ID NO: 123227 - DNA, 717 bp, synthetic construct
  misc_feature 1..717: note = Description of Artificial Sequence: Synthetic coding sequence
  source 1..717: mol_type = other DNA
atgttgtctactccggtggccgaaggacgcgactcaccggaagatttcgtctaccaattcaaaggaatgtgctactttacaaacggcactgagcgcgtgcgattggtttctagatctatttacaatagagaagaaattgtgcgctttgactccgatgtgggagagtttagagctgtcaccctgctaggtttacctgcagcagaatactggaatagtcagaaggacattttagagcgcaagagggcagccgtggaccgcgtctgccggcacaattaccagttggaactgaggacaactctgcaaagacgagtggaacctaccgtgactatctccccgtcaaggactgaggccctgaaccaccataatctgctagtttgtagcgttaccgacttttatcccgcacagattaaggttcggtggttccgaaacgatcaggaggaaactgccggtgttgtttctacacctctcattagaaatggggactggaccttccagatcctggtcatgctagagatgacccctcaacgaggagacgtgtacacctgccacgtcgagcacccgagcctgcagtcacctattacggttgaatggcgcgcccagtccgagagcgctcagagcaagatgctttccggtatcggcggattcgtacttggcctcatcttcctagggctcggcctcataatccaccaccgaagccagaaagggctgcttcactag

SEQ ID NO: 123228 - DNA, 801 bp, synthetic construct
  misc_feature 1..801: note = Description of Artificial Sequence: Synthetic coding sequence
  source 1..801: mol_type = other DNA
atggtctgcttgcgcctccccggcgggtcctgcatggcagtactgacagtgacacttatggtgctgtcatcccccctagccctggctggggatacccgccctcgatttctagaatactccacatccgaatgccacttctttaacgggacagagagggttagatacctggaccggtatttccacaaccaagaggagaacgtgcggtttgatagtgacgtgggagagtttcgggccgttactgagttgggaagaccagacgctgagtactggaattctcagaaggatctactggaacaaaagagagggagagtggataactattgtagacataactacggagttgttgagtcttttaccgtccagaggcgagtgcaccctaaggtgacagtgtacccaagtaagacacagccactgcaacaccataatcttctagtctgctccgtttcagggttttatcccgggagcatcgaggtgcgatggttcaggaacggccaggaggagaaaactggcgtagtgagtacgggactgatccacaacggggactggaccttccagacgttagttatgctggagacagtgcctagatccggtgaggtttacacctgccaggtcgagcacccttctgtcacctcgcctcttaccgtggaatggagagcacgtagcgaatcagcccagtctaagatgctgtctggcgtggggggcttcgtcctgggactgctattcctcggcgccggtctgtttatatactttcgcaatcagaaagggcacagtggactgcagccccgaggatttcttagctag

SEQ ID NO: 123229 - DNA, 801 bp, synthetic construct
  misc_feature 1..801: note = Description of Artificial Sequence: Synthetic coding sequence
  source 1..801: mol_type = other DNA
atggtgtgtctgaagctcccaggcggcagttgcatgactgccttgacggtcaccttgatggttttaagcagccccctggccctcagtggggacacccgccctagattcctgtggcagcctaaaagagagtgccattttttcaatggcacagagagagtgcggttccttgaccgctacttttataaccaagaagagtcagtgagatttgatagtgacgtgggagagtttagagctgtaacagagctggggcggcctgatgctgagtactggaattcccagaaagacattctggagcaggcccgcgctgccgtagatacctattgccgacacaattacggagtcgtcgagtccttcaccgtgcagagaagggtgcaacccaaggtgacagtgtatcctagtaagacccagccactgcagcatcataatttgctagtctgttcagtttccggtttctaccctggctccatcgaagtgagatggttcctcaatggacaagaagagaaggcaggtatggtgagtactggcctgattcagaatggggattggacttttcagactctggtgatgttagagactgtccccaggtccggggaggtgtacacttgccaggtcgagcacccgtccgtcaccagcccccttaccgtggaatggagagcacggagcgagagcgctcagtcaaagatgttaagcggtgtcggagggttcgtactggggctgctgttccttggggctggtttgttcatatactttcgcaaccaaaagggacattctggattgcagccgactggtttcctgtcttag

SEQ ID NO: 123230 - DNA, 801 bp, synthetic construct
  misc_feature 1..801: note = Description of Artificial Sequence: Synthetic coding sequence
  source 1..801: mol_type = other DNA
atggtgtgcctaaggctccctggggggtcttgcatggccgttcttaccgtgaccctgatggtgctgtcttcccctttggccctagcaggggacactcggcctcggtttcttgaatactccacaagcgagtgccacttcttcaatggtaccgaaagggtgagatacctggacaggtactttcataaccaagaggaaaatgtccgcttcgacagcgatgtgggggaattcagggcagtgacagaactgggcagaccagatgccgagtactggaatagtcagaaggatcttctcgaacagaagcggggtagagtggataactactgtaggcacaattacggagtagtggagtctttcaccgtgcaaagaagggtccaccccaaggtgacggtgtacccaagcaagactcagcccctccagcaccataacctgctggtatgctcggtcagcgggttctatccagggtctattgaggtgcgctggtttaggaatggacaggaggagaaaacaggcgtggtaagtacggggctgatccacaatggggattggacgttccagaccctcgtgatgctcgaaaccgtcccgcgatctggcgaggtgtatacctgccaggtggaacacccatccgtgacttctccgctcactgtggagtggcgcgcccgtagtgagagtgcccagtccaaaatgcttagcggagtgggcggttttgttctagggttattgttcttgggcgctgggctcttcatctacttcagaaaccagaagggacattccggcctgcagccaaggggttttctctcctag

SEQ ID NO: 123231 - DNA, 753 bp, synthetic construct
  misc_feature 1..753: note = Description of Artificial Sequence: Synthetic coding sequence
  source 1..753: mol_type = other DNA
ctgctgaaattgacacgagattttcctcagcgccatgagaagtaccaaagctgggcaggcacctttcacctttgcttaaaaaagaataagtatcccgattctcggagcacattcattaagcatgctggtagctacctgaagagaggggaatttttaagcatacataccgcaatcacttgtttctttctgcagatcagcgcacgttttctggaacaggttaaacacgagtgccattttttcaacgggaccgaaagagtaagatttctagaccgctacttctaccaccaggaggaatatgtccggtttgactccgacgtgggcgagtatcgggctgtgaccgagctcggaaggcccgacgcggaatactggaacagccagaaggatcttctagagcagcgccgcgcggaagtggacacatattgtcggcacaattatggtgtagtcgagtctttcacggtgcagaggagagtgtaccctgaagttactgtctaccccgctaaaacccagcctcttcagcaccacaatttactggtctgcagcgtcaatggcttttacccaggcagtattgaggttagatggttcagaaatggacaagaagaaaaaaccggtgtggtatcaacaggcctaattcaaaacggtgactggacatttcagactctggtgatgctggaaaccgtcccacggtctggtgaggtgtacacctgtcaggtggaacatccatcccttacatcgcctctgaccgtggagtggtag

SEQ ID NO: 123232 - DNA, 756 bp, synthetic construct
  misc_feature 1..756: note = Description of Artificial Sequence: Synthetic coding sequence
  source 1..756: mol_type = other DNA
tagctgctcaaactgacacgggactttccccaacggcatgaaaagtatcagtcctgggccggcacctttcatttatgcctgaagaagaacaaatatcctgattcacggtccacctttataaaacacgctggtagctacctaaagagaggagagtttttggctatccacactgccatcacctgttttttccgccagatatctgctcgcttcctggaatattctacatccgaatgccatttctttaatggaaccgagcgggtaagatacctcgacaggtatttccataatcaagaagagaacgttaggttcgattccgatgtaggagagtttcgggccgtcaccgaattgggcagacctgatgccgaatactggaattcacagaaggacctactggagcagaagcgaggccgggtagacaactactgtcgccacaattacggtgtggttgagagcttcacagttcagcggagagttcaccccaaagttacagtgtatccttctaaaacgcagcccctccagcatcataacctccttgtctgtagcgtgagtggattttacccagggtccatcgaggtaagatggtttcggaatggacaggaagaaaagaccggagtggtttctaccgggctgattcacaatggcgattggacattccagacactggtgatgctggagacggttccaaggtccggcgaagtatacacctgccaagtagaacatcctagcgtgacatctccccttacagtcgaatggtag

SEQ ID NO: 123233 - DNA, 801 bp, synthetic construct
  misc_feature 1..801: note = Description of Artificial Sequence: Synthetic coding sequence
  source 1..801: mol_type = other DNA
atggtttgcctgaagttcccaggcggatcttgcatggccgcgctgacagtaacactgatggtgctctcttcccctctggccctcgctggggatacaagaccaaggttcctggaacaggtgaaacatgaatgtcacttctttaacggcacagaaagagtgcgttttctagaccgctacttctaccaccaggaagagtatgtacgtttcgatagtgatgttggcgaatacagggcagttaccgagctaggtcgcccagatgcggaatactggaactcgcagaaagacctgttggaacagagaagggccgaggtggatacgtattgtaggcacaactacggggtagtggagagctttaccgtccaaaggcgcgtgtaccctgaggtgactgtgtatcccgctaagacccagcctctccaacaccataatcttcttgtgtgctcagtgaatggtttctaccctgggagcattgaagtacgctggttccggaacggccaggaagaaaaaactggagtggtgagcacagggctcatccagaatggcgattggactttccagacccttgtgatgcttgagactgtgccacggtccggggaagtgtatacctgtcaggtagaacacccatcgcttaccagccccctgaccgtcgagtggagggcacggagcgagtcagcgcaaagcaagatgctttcaggagtggggggctttgtgctcgggctgctctttctgggggctggcctgtttatctacttccgaaatcagaagggccactcagggcttcaacctaccggttttttgtcctag

SEQ ID NO: 123234 - DNA, 756 bp, synthetic construct
  misc_feature 1..756: note = Description of Artificial Sequence: Synthetic coding sequence
  source 1..756: mol_type = other DNA
taactgcttaagctgacaagagatttcccccagcggcacgagaaatatcagagttgggctggaacttttcacctttgtctgaaaaagaacaaatatccagatagcagatccacttttattaagcacgcaggctcatacctcaagagaggagaatttctggccatccacacggcaatcacatgtttctttcgacaaatctcagctcgtttcctcgaatacagtacctctgagtgccatttcttcaacggaaccgagcgcgtcagataccttgatcggtatttccacaaccaggaggaaaatgtgcgctttgattccgatgtcggggaatttagagccgtcactgaactcggcagacccgatgccgagtattggaactcccagaaagatttactcgagcagaagcggggcagggttgataactactgtaggcacaactacggggtggtcgaatctttcactgtgcagcgcagggttcatcccaaggttaccgtttaccccagtaagacccagcccttacaacaccacaatctgctagtctgcagcgtttctggcttctaccccggctccattgaggtgcgctggtttaggaacggccaagaagagaagacaggtgttgtgtccaccgggctaattcacaacggtgattggactttccagaccttagtcatgctcgaaacagttcctcggtccggcgaggtctatacttgccaggttgagcatccctctgtcacatcacccttaactgtagagtggtag

SEQ ID NO: 123235 - DNA, 753 bp, synthetic construct
  misc_feature 1..753: note = Description of Artificial Sequence: Synthetic coding sequence
  source 1..753: mol_type = other DNA
tgacttctcaagctcaccagagactttccccaaagacacgaaaagtatcagtcttgggctggtacgttccacctgtgccttaaaaagaataaatacccagattcgcgaagtacgttcatcaaacatgccgggagctacttaaaacgcggcgaattcctatccatccacaccgctatcacgtgcttttttctacagatctcggctcgcttcctgtggcaggggaaatacaaatgccactttttcaatggtaccgaacgggtgcaattcctggagaggctgttttataaccaggaggagttcgtgaggtttgattcagatgtcggcgaataccgggctgtgaccgagctaggccgccctgtggctgaaagctggaatagccagaaggacatcttagaggaccgccggggtcaggtcgacaccgtgtgcaggcacaattacggcgtgggggagtcttttaccgtacaacggagggtgcacccagaagtcacagtgtatcccgcaaaaacccagcccctgcagcatcacaacctgctcgtgtgttcggtgtctggattttaccctggaagtatagaggtgcggtggtttcgaaacgggcaggaggaaaaggcgggtgtagtgagtaccggtttgatccaaaacggggattggacgttccagaccctggtcatgttagaaacggtgccgagaagcggagaagtgtacacatgccaggttgagcacccctcagtcatgagtcccctaaccgtggaatag

SEQ ID NO: 123236 - DNA, 801 bp, synthetic construct
  misc_feature 1..801: note = Description of Artificial Sequence: Synthetic coding sequence
  source 1..801: mol_type = other DNA
atggtctgtttgaagctgcctggaggttcatgtatggctgctctgacagtgaccttaatggtgctgtcgtctcccctggccctggcaggggatacacagccgcgcttcctgtggcagggcaaatacaagtgtcacttcttcaacggcactgaaagggtgcagttcctggagcgcctgttttacaaccaggaggaattcgttcgattcgacagcgatgtgggcgaataccgcgccgtgaccgagttagggcgccctgtcgcggagtcctggaactctcaaaaagacatccttgaggaccgtagggggcaggtggacaccgtctgccgccacaactacggggtgggtgaaagctttactgtccagaggagggtccatccagaggtcactgtgtacccggcaaagacccagcctctacaacatcacaatcttttggtctgctctgtttccggcttctacccaggctcaatcgaggtgcgatggttccggaacggccaggaggagaaggcaggcgtggtaagcaccggactaattcaaaacggcgactggactttccagacactggttatgctagagactgtacctaggagtggcgaagtgtatacgtgtcaggtcgagcacccgagtgtaatgtctcctctgactgtggagtggcgcgcccgctcagagtccgcgcaaagcaaaatgctgtccggcgtgggaggctttgtcctgggcttgttgttcttgggagccggcctctttatatatttcaggaaccagaaaggtcattccggtctgcaacctactggcttcctgtcctag

SEQ ID NO: 123237 - DNA, 801 bp, synthetic construct
  misc_feature 1..801: note = Description of Artificial Sequence: Synthetic coding sequence
  source 1..801: mol_type = other DNA
atggtctgcctgaagctaccaggaggctcttgcatggctgctctcactgttaccctcatggtcttaagctcccctctagctctcgccggcgacacccagccacgcttcctgtggcaaggcaaatacaagtgtcacttttttaacggaacagaaagagttcagttcctggaaagacttttctacaaccaggaggaattcgtgcgttttgattcagacgttggagagtatagagctgtgacagaattagggcgccctgtggcagaatcatggaacagccaaaaggacatcctggaagacaggaggggccaggtagacaccgtatgcaggcacaactatggcgtgggggaaagctttactgtgcaacggagggtgcatcccgaggtgaccgtctaccctgcaaagacccaacccctccaacaccacaacctgttggtgtgttcagtgtccggcttctacccaggctctattgaggtgcggtggtttcgtaacggtcaagaagagaaggccggcgtcgtgagcaccggcctcattcagaacggcgattggacttttcagactctagtaatgttagagaccgtcccacggtctggagaggtctatacgtgtcaggtggagcaccccagcgtcatgtccccacttaccgtggagtggcgtgcccgtagcgagtcagcccagtcgaagatgctgtcgggggtggggggatttgtccttgggctgctatttctgggcgccggcctgttcatttattttagaaatcagaaggggcatagcggcctccagccaactggctttctgtcctag

SEQ ID NO: 123238 - DNA, 810 bp, synthetic construct
  misc_feature 1..810: note = Description of Artificial Sequence: Synthetic coding sequence
  source 1..810: mol_type = other DNA
atgtcttggaaaaaagccctccgcatccccggcggcctgagggttgccaccgtcacattgatgctggctatgctgtccactcccgtggctgaagggagggactctccagaggattttgtataccagttcaagggcatgtgctactttacgaacggaaccgagcgggttaggggcgtgacaaggtatatctacaatagagaggaatacgctagatttgactccgatgtgggtgtgtaccgagcagttactccgctaggccctccggccgccgaatactggaatagccagaaggaagtgttggaacggactcgcgctgagctcgacactgtgtgtaggcataactaccaactggaactaagaactacacttcaaagacgggtctaccccgaagtcaccgtgtacccggctaagacacagccattgcagcaccataatttactcgtctgcagtgttaatggcttttacccaggcagcatcgaagtcaggtggttccgtaatgggcaagaagaaaagaccggcgtagtcagcaccgggcttatccaaaacggagactggactttccagactctggtcatgcttgaaacggtgcctagaagcggggaggtttacacgtgccaagtggagcatccatccctcacttcccccctcactgtggagtggcgagctagaagtgaaagtgctcaatcaaaaatgcttagcggggtcgggggatttgtgctgggcctgctgttcctgggcgctggactgttcatttatttcaggaaccagaagggccattcaggtttgcagcccacaggcttcctgagctag

SEQ ID NO: 123239 - DNA, 792 bp, synthetic construct
  misc_feature 1..792: note = Description of Artificial Sequence: Synthetic coding sequence
  source 1..792: mol_type = other DNA
atggtgtgcctgaaattccccggaggatcttgcatggctgccctgactgtgaccttgatggtgctcagtagcccactggctctagccggtgacaccaggcctagattcctcgagcaggtgaaacacgaatgccactttttcaacggcaccgagagggtgcggttccttgatcgatacttttaccaccaggaagagtacgttagatttgattctgatgtcggagaatatcgggccgttactgagttagggcgaccagacgccgaatactggaatagccaaaaggatctcttggagcagcgacgagcggaagtcgacacgtattgcaggcacaactacggggtggtggagtcttttacggtgcagagaagggtctatccagaagtaacagtgtaccccgcaaaaacacagccgcttcagcaccacaacttgctcgtctgctctgtgaacggattttaccccggctccatagaggtccggtggtttaggaatggtcaggaagaaaaaaccggagtggtctccacgggtctgatccagaacggcgattggaccttccagacccttgtgatgctggaaactgttcccaggagcggcgaagtgtatacatgtcaggttgaacacccgtctctgacctctccgttgacagttgagtggcgcgctagatccgaaagtgcccagtcaaaaatgctcagcggggtgggaggttttgtgctagggctactcttcctaggggcaggcctttttatttatttccgaaaccaaaagggccattctggcctacagcctacggggtag

SEQ ID NO: 123240 - DNA, 141 bp, synthetic construct
  misc_feature 1..141: note = Description of Artificial Sequence: Synthetic coding sequence
  source 1..141: mol_type = other DNA
cactccgggcttcagcctactggcaacacctttagttcaagtttgaggaacaggttcggggggcaggcccagcacgcctgcaatccgtccactctgggagggcgggggggaagaataatgcgaatccctgagctgaagtag

SEQ ID NO: 123241 - DNA, 891 bp, synthetic construct
  misc_feature 1..891: note = Description of Artificial Sequence: Synthetic coding sequence
  source 1..891: mol_type = other DNA
atggtctgtctgaagttcccgggcgggtcctgcatggccgcactgactgtcactctgatggttctgtcaagtcctcttgctttggctggtgacactagaccacggtttctcgaacaggtgaagcatgagtgccacttttttaatggaaccgagcgcgtgagatttttggacagatacttttaccatcaggaggaatacgtcaggttcgacagtgatgtgggagaataccgggctgtgactgaactgggcagacccgacgctgagtattggaatagtcagaaggatctgctggagcagcgtagggccgaggttgatacttattgtagacacaattatggcgtcgtggaatctttcactgtgcaacgccgagtttacccagaagtaaccgtgtaccccgccaaaacacaaccgctgcaacatcacaatttgctggtgtgttcggttaacggtttttacccaggcagcatcgaagtgaggtggttccggaacggccaggaagagaaaacaggcgtcgtctcaactggcctgattcaaaatggtgactggacattccagacactggtgatgcttgaaacggttccaagatccggagaagtttatacgtgccaggttgagcatccctccctgacttctcctctgacggtggaatggcgagcaaggagcgagtctgcacaatctaaaatgctgtctggtgtcggcggatttgtgcttggtttgctgttccttggtgcggggctctttatttacttccggaatcagaagggccactctggtttacaaccgacaggtaatacctttagctcatctcttcggaatcgctttggcggtcaggcacagtggctgactcccgtcatcccagctctttgggaggccgaggctggcgagagttag

SEQ ID NO: 123242 - DNA, 801 bp, synthetic construct
  misc_feature 1..801: note = Description of Artificial Sequence: Synthetic coding sequence
  source 1..801: mol_type = other DNA
atggtctgcctgaagctgcctggggggtcctccctggcggcactgacggtcaccctgatggtgctgagctcacgcctggcttttgcgggcgatacgcggcctcgatttctggaactcctgaagagtgaatgccatttcttcaacggcactgagcgggtgcgctttctcgagcgccactttcacaatcaggaggagtacgcgcggttcgatagtgacgtaggcgagtaccgggcagttcgcgaactcggcagacctgacgccgagtattggaactcccagaaggatctcctcgaacagaaacgcggacaggtggataactattgtcgacataattatggagtgggggagagcttcaccgtgcaaaggagagtgcacccccaagtcactgtttatccagcgaaaacccagccactgcagcaccacaacctcctggtgtgctcagtgtcagggttttatcccggttctatcgaggtgcgctggtttcgaaacggacaggaagagaaggctggcgttgtgagtacagggctgatccaaaatggagactggacttttcagactctcgttatgctcgagaccgtgccccgcagtggcgaggtatacacgtgccaagtggagcatccttctgtaacttcccctcttaccgtggagtggagcgccagatcagagtccgctcagagtaaaatgctgagcggagtaggcggattcgtgctgggacttctcttcctgggagccgggctcttcatctacttccgtaatcaaaaaggccatagcgggttgcagccaacaggcttcctctcatag

SEQ ID NO: 123243 - DNA, 801 bp, synthetic construct
  misc_feature 1..801: note = Description of Artificial Sequence: Synthetic coding sequence
  source 1..801: mol_type = other DNA
atggtttgtctgaaactgcctgggggaagttctctggctgccttaaccgtgaccctgatggtactgtcaagtcgtttagcctttgccggggacacgaggccacgctttctggagctgagaaagagcgaatgccacttttttaatgggacggagagagtgagatatctcgatcgatattttcataatcaggaagagttcctgcgttttgactccgatgtgggtgaataccgcgcggtcactgagctcggcaggccggtggccgagagctggaattcccagaaggacctgttagagcagaagagaggcagggtggacaactattgtcggcacaactacggagtgggtgagtccttcactgtgcagcggcgggtccacccacaggtcaccgtataccccgccaaaacgcaacccctgcagcaccacaacctgcttgtctgttcggtttctggcttctatcctggtagcattgaggtccgatggttcaggaacggccaggaagaaaaagcaggggttgtgtctacaggactgattcagaacggcgattggacctttcagaccctggtgatgctggagacagtccccaggagtggggaggtctatacatgtcaggtagagcatccaagcgtgacttccgcccttacggttgagtggagagccaggtcagaatcagcgcagtcaaaaatgctctccggggtcggcggctttgtgctggggctgctattcttgggagcaggcttgtttatctatttcaggaatcaaaaggggcatagcggacttcagcccaccggcttcctatcatag

SEQ ID NO: 123244 - DNA, 801 bp, synthetic construct
  misc_feature 1..801: note = Description of Artificial Sequence: Synthetic coding sequence
  source 1..801: mol_type = other DNA
atggtttgtttaaagttgcctgggggatcatctctggctgcgctgacagtgaccctgatggtgctgagcagcagactggcctttgccggtgatactcgaccgaggtttctagagctgctcaaatccgagtgtcactttttcaatggcaccgaacgcgtcagattcctggagaggcattttcacaaccaggaagagtatgcaaggttcgactccgacgtgggggagtacagggccgtgcgagaactgggcagaccagatgctgaatattggaatagccagaaagacctcctcgagcaaaagcgagggcaggtagataattactgtcgccacaactacggggtaggagagagttttacggtgcagcggagagtgcacccacaggtgactgtctaccccgcaaaaacacagcctctccaacatcacaatctgctggtctgtagcgtcagcgggttctacccaggaagtatagaagtgaggtggtttcggaatgggcaggaagaaaaagctggcgtggtgagcacgggactaatccagaacggggattggactttccaaacccttgtcatgctagagaccgtgccccgtagcggggaagtgtacacttgtcaggtcgaacatccatccgtgacatcaccacttaccgtggagtggtcagctaggtcggaaagcgcgcagtcaaagatgttgtctggcgtgggggggttcgttctgggcttgctctttctgggggccggccttttcatctactttcggaatcagaagggccactctggtctccagccgacagggtttctctcatag

SEQ ID NO: 123245 - DNA, 801 bp, synthetic construct
  misc_feature 1..801: note = Description of Artificial Sequence: Synthetic coding sequence
  source 1..801: mol_type = other DNA
atggtctgtctcaaactgcccggaggcagctacatggctaagttgacggtgacactgatggtgctgtcctcccccttagccctggccggggatacccgaccgaggttcctgcagcaggataagtacgagtgccactttttcaacggaaccgaaagagttagattcctgcaccgcgatatctataaccaagaggaagatcttcggtttgactctgacgttggggaatacagagctgtaacagaattgggaagacctgacgctgagtattggaactctcagaaagactttctcgaagataggcgcgccgctgtggatacatattgtcgacacaactatggagtgggagagagcttcaccgtacaacggcgcgttgaacctaaagtcaccgtgtacccagcgaggacacagacgttacagcaccataatcttttagtgtgttctgtcaatggattttaccccgggtccatagaagtccggtggtttcggaatagccaagaggaaaaagcaggggtcgtttccaccggcctgatccagaacggcgattggacctttcagacactcgtgatgctggagaccgtcccccggtctggagaagtgtacacctgccaggtcgagcatccctctgtcacgtctccactcactgtggaatggcgtgctcagtcagagtcagcccaatcaaagatgttgtccggggtggggggcttcgtgttgggtctgttatttctgggggccggccttttcatttatttcaagaaccagaaaggacattctggactgcatccaacaggcttagtgtcctag

SEQ ID NO: 123246 - DNA, 891 bp, synthetic construct
  misc_feature 1..891: note = Description of Artificial Sequence: Synthetic coding sequence
  source 1..891: mol_type = other DNA
atgggagagctcatggcatttctgctccccctgattatcgtcttaatggttaagcactctgatagcagaactcactcattaaggtacttcaggttaggggtgagcgacccgattcatggagtcccagagtttattagcgtaggctacgttgacagtcatccgataacgacttatgactccgttactcgacagaaggagcccagagccccctggatggccgagaatctagcccctgaccactgggagcggtatacacaactgctcagaggatggcaacagatgtttaaggtggaactgaaaagactgcagcgccactataatcacagcgacaacgtcgcacatacaattaaacaggcttgggaggccaaccagcacgagctcctataccagaaaaattggcttgaggaagagtgcatagcctggctgaagaggttcctcgagtacggtaaggataccctgcagaggaccgaaccgccattagtgagagtgaataggaaggaaacgttcccgggcgtaaccgcactcttctgcaaggcccacggcttctatcccccagaaatctacatgacctggatgaagaatggcgaggagattgtccaggagatagattacggcgacatcctgccctcgggtgacggcacctatcaggcttgggctagcatagagcttgaccctcaaagtagtaacctttacagctgccatgttgagcactgcggcgttcatatggttctgcaggtaccacaggaaagtgagacaattccattagtcatgaaggccgtgtctgggtccattgtcttggtcatcgtgctggccggcgtcggcgttctggtatggagaaggaggccacgggaacagaatggagctatttacctccccaccccggataggtag

SEQ ID NO: 123247 - DNA, 1026 bp, synthetic construct
  misc_feature 1..1026: note = Description of Artificial Sequence: Synthetic coding sequence
  source 1..1026: mol_type = other DNA
atgggagaactgatggcttttcttttgccccttattatcgtactgatggtgaaacatagcgattcacggacccacagtctgcggtatttccgcctgggggtgtcagacccaattcacggggtccctgaattcatctctgtgggatatgttgactctcaccccatcaccacatacgatagcgtgacccgccagaaggaaccacgagcaccatggatggcagagaatctggcaccagatcattgggaaaggtacacacagctgctgagagggtggcagcagatgttcaaggtggagttgaagcgcttacaacggcactacaaccacagtggatcccatacataccagcggatgatcggctgtgaactcctggaggacgggtcaaccacaggctttctgcagtacgcctatgacggacaggactttctgatcttcaataaggacacactgagttggctggctgtggataatgtggcccacaccatcaaacaggcgtgggaggccaatcaacatgagcttctctatcagaagaactggctggaggaagagtgtattgcctggctaaaaaggtttctggagtatgggaaggacaccctacaacggacggaaccccccctggtgagggtgaacagaaaagagactttccctggtgtaactgccctgttttgcaaagcccacggattttatccaccggaaatttacatgacatggatgaagaacggcgaagagattgtacaggagattgactatggcgacattctccctagcggagatgggacgtaccaggcttgggctagcatcgaactggaccctcaaagctcaaatctttattcgtgtcatgtagagcattgtggcgtgcacatggtgctacaggtaccccaggaaagtgaaaccatcccattagtcatgaaggccgtgtccggatcaatcgttcttgttatcgtcttggccggtgtgggagtactcgtctggcgacgacgcccaagagagcaaaacggagcaatctacctgcccaccccggaccggtag

SEQ ID NO: 123248 - DNA, 645 bp, synthetic construct
  misc_feature 1..645: note = Description of Artificial Sequence: Synthetic coding sequence
  source 1..645: mol_type = other DNA
atgggggaacttatggcatttctgctccctctgattatagtgctgatggtcaagcattccgattcccgcacccatagcctccgctacttccgcttaggcgtaagcgacccgattcacggagtcccggaattcatttccgtaggttacgtcgatagtcaccccatcacaacgtacgactccgttacaaggcagaaggagcctcgcgccccgtggatggctgagaacctagcaccagaccactgggaacgctacactcagttattacgaggctggcagcagatgttcaaggtcgagttgaaaagattacagcgacattataatcactccggctctcatacctatcagcggatgatcgggtgcgagctcctcgaggatggctcaactaccgggttcctacaatatgcctatgatgggcaagactttctgatttttaataaggacacactctcatggctggcggtggacaacgtggctcataccattaagcaagcctgggaggccaatcaacatgagctcctgtaccagaagaactggctggaggaagagtgtattgcctggttaaaaaggttccttgagtacggcaaagatacactgcagaggactgagcagaatggagcaatctacctcccaaccccggatagatag

SEQ ID NO: 123249 - DNA, 792 bp, synthetic construct
  misc_feature 1..792: note = Description of Artificial Sequence: Synthetic coding sequence
  source 1..792: mol_type = other DNA
atgtgggagcttcgttccgcaagcttttggcgagcgatcttcgctgaattctttgccacactcttttatgtgttctttgggcttggatcttccctcaggtgggcaccgggaccacttcatgtgctgcaggtcgctatggcatttggcctggcactggcaacattggtgcagtctgtaggccacattagcggggcacacgtgaacccggccgtgacattcgccttcttggtcggcagtcagatgagtctgttgcgcgctttctgttatatggcagcccagttgttgggagctgtggctggcgccgctgtgctctatagcgtcactcctccagccgtgagagggaacctggcgctcaacacactgcatcctgccgtcagcgtgggccaagccaccaccgtcgagatatttctgacactgcagtttgtgctgtgtatttttgccacgtatgatgaaagaagaaacgggcagctgggctcggtggccctggctgtagggtttagcttggcgctcggccacctcttcggaatgtactacacaggtgctggcatgaatcctgcccgatcatttgctccggctattctgaccgggaactttactaaccactgggtctattgggtggggccaatcattggtggaggtctgggttcactattatacgactttcttcttttccctcgcctcaaatcaatctctgaacggctgtcagtgttgaaaggagcgaaacccgacgtgtccaatggacaaccagaggttaccggggaacctgtggagctcaacactcaggcactttag

SEQ ID NO: 123250 - DNA, 2682 bp, synthetic construct
  misc_feature 1..2682: note = Description of Artificial Sequence: Synthetic coding sequence
  source 1..2682: mol_type = other DNA
atggccaccgaagagtttatcattagaattccaccctaccactacattcatgtgctcgatcagaatagcaacgtcagcagggtggaagtgggacccaagacatatatcagacaggacaacgagagagtcctgtttgcaccgatgcgaatggttaccgtccccccacgccactattgcactgtggcgaaccccgtatcaagggatgcccaagggttggtcctctttgatgtcacaggacaggtgcgtctacgtcatgcggacttggaaatacggcttgcccaggatcccttccctctatacccaggggaggtgcttgagaaggatatcacacctcttcaggtcgttctgcctaacacagcgctgcatctgaaggctttactggacttcgaagacaaggacggcgacaaggttgtcgctggggacgagtggcttttcgagggacccggtacatatatcccacgtaaagaagtggaagtcgtggagatcatccaggctacaataattagacagaaccaggctttgagattacgggccaggaaggaatgctgggacagggatggcaaggagcgcgtgactggcgaggaatggttagtgacaacagtgggggcttacctacccgcagtttttgaggaggtgctcgatctggtcgatgccgtgattctcaccgagaaaactgccctgcacctgagggcacgccgcaatttcagggacttcagaggggtgagccggcgaactggcgaagaatggctagtgaccgtccaggatactgaagctcatgtacccgacgtgcacgaggaggtattgggcgtggtgcctattactacactgggaccccacaactactgcgtgatactggatccagtcggaccagacggaaaaaaccagctggggcagaagcgggtggtgaagggtgaaaagagtttttttctgcagccaggggaacagcttgagcagggtatacaggacgtttacgtacttagcgaacaacaagggctcctattgcgggcccttcaaccattggaggagggagaggatgaagaaaaggtgagccaccaggccggagaccactggcttattagaggtcctctagagtacgttccttcagccaaagtcgaagttgtggaagagaggcaagcaattccactggacgaaaatgaaggcatctacgttcaggacgtaaagactggcaaggtgagagctgttatcggcagcacgtatatgcttacccaggatgaggtcctttgggaaaaggagctgccccctggcgtagaagaattgcttaataagggtcaagatcctctggctgatcggggcgagaaagatactgcaaaaagcctgcaaccccttgcccctagaaataaaactcgggtagtttcctatcgggttccacataatgccgccgtgcaggtatatgactacagggaaaaacgagccagagtcgtcttcggaccagagttagtttcgctgggcccggaggagcagttcactgtcctctctttaagtgctgggaggcccaaaagaccacacgcccggagggcattatgccttttactgggcccagacttctttaccgacgtgatcacaatcgagaccgccgatcacgctaggctgcagctccagttggcatataattggcatttcgaggttaacgacagaaaggacccccaggaaacagcgaagttattctccgtgccagacttcgtgggggatgcctgtaaggcaatagccagccgagtaagaggggcagtggcctcagtaacttttgacgatttccacaagaatagtgccaggatcatccggactgctgtgttcgggttcgagactagcgaagctaaaggaccagatgggatggccctgccacggcctcgggatcaggcagtgttcccccagaacggactcgtcgtctcttcagtggatgtgcaatcagtggagcctgtagatcagagaacccgagatgcactccagagaagtgtccagctggctatcgaaattacaaccaattcccaagaggctgccgctaagcacgaggctcagcgactcgagcaagaagcaaggggaaggctcgaacgacaaaaaatactcgatcagagcgaagccgaaaaagcgcggaaagagctgttggagcttgaagccctgtccatggccgtcgagagtaccggaacggccaaggccgaggccgagagcagagccgaggccgctcgaatcgaaggcgaaggatcagttcttcaagccaagttgaaggctcaggccctggctatagaaaccgaagcagagctgcaacgagtccagaaggtgcgtgagcttgaactggtttacgctcgggcccagctagaacttgaagttagcaaggcccagcaactggccgaagtagaagtgaagaagttcaagcagatgacggaagccattggtccctcaacaattcgagacttggccgtggccggaccggaaatgcaggtcaagctgctccagagcttggggttaaagagcaccctcattaccgacggatctacccccattaacctgttcaacacagcctttggacttctgggcatgggaccggaagggcagccgctggggcgacgagttgcgtccggtccaagccccggagagggcatctccccacagagtgcccaagcaccccaggcgcccggggacaatcatgtcgtccccgtcctgcgctag

SEQ ID NO: 123251 - DNA, 2682 bp, synthetic construct
  misc_feature 1..2682: note = Description of Artificial Sequence: Synthetic coding sequence
  source 1..2682: mol_type = other DNA
atggcaacagaggagtttatcatccgaatccctccctatcactacatacacgtgctggatcagaactctaatgtgagccgggtcgaggtcgggcccaagacatacattaggcaggacaatgagcgggtattgttcgcccctatgcggatggtgactgttcccccccgccactactgcaccgttgctaaccccgtgtcgcgtgacgcacagggcttggtgctcttcgatgtcacgggccaagtccgcttgcgtcatgctgacctggagattagacttgcacaggacccctttccactctatcctggagaggtgctggaaaaggacatcacaccccttcaggtcgtgctacccaacaccgccctccatctcaaggcgctgttagatttcgaggataaagatggcgacaaggttgtcgcaggagatgaatggctatttgagggcccaggaacttatatccctcgcaaagaggtggaggtcgtcgaaattattcaggcaactatcataagacagaatcaagctctccgtctacgagcacgcaaagagtgttgggatcgcgatgggaaggagcgcgtgaccggggaagagtggttggtgacaactgtgggcgcctacctgcccgccgtgtttgaggaagtacttgacctggtggatgctgtgatcctcaccgagaaaacagccctccacctaagggcacggcgcaattttagggatttcagaggcgtgagtcggcgaacaggggaagagtggttagtcacagtgcaggacaccgaggcccacgttccagacgttcatgaagaggtgctgggtgtggtcccgattaccaccttaggtcctcacaactattgtgtgatcctggaccccgtgggcccagacggaaaaaaccagctgggccagaaaagagtcgtgaagggagagaagtctttctttttacagccgggggaacaacttgagcagggtatacaggacgtgtacgtcttatcagagcaacaaggtcttctccttagagcactccagcctctggaagagggagaagacgaggaaaaagtgtctcaccaggccggagaccactggcttatcagagggcctctcgagtacgtcccaagcgccaaggttgaagtcgtggaggagcggcaggccatacctctggatgagaacgaaggcatatacgtgcaagacgttaaaaccggcaaagtgcgggctgtgatcgggagcacctatatgctcactcaggacgaggtcctgtgggaaaaagagttacccccgggagtggaggagctgctgaacaaagggcaggatcccctcgccgaccgcggggaaaaagatacggccaagtcgctacagccattagccccacgcaacaagacacgggtggtcagttaccgggttccacataatgccgcagttcaggtgtatgactatcgggagaaaagagctcgtgttgtgttcggacccgaactggtgtccctcggacctgaggagcagttcactgtactatctctatcagcaggacgacccaagaggccacacgcaagacgtgcactttgcctgctgttgggcccggactttttcaccgatgttataaccattgagactgcagatcacgctagacttcagctccaactggcctacaattggcacttcgaagtgaacgatcggaaggacccccaggagaccgcaaaactgttcagcgtgcccgattttgtaggagatgcatgtaaagctatagcctctcgggtccgaggagctgtagcgtccgtaactttcgacgacttccataaaaattctgcacgaatcattcggacagctgtgtttggcttcgagacatccgaggccaagggccccgacggcatggcactaccaagacctcgagaccaggcagtattccctcagaatggactcgtggtgagcagcgtggacgtgcaaagcgtagaacctgtagaccagcggacaagagatgccctgcaacggagtgtgcagcttgctatcgaaatcacaacaaattcccaggaagccgcagcaaaacacgaggctcaacgactggagcaggaagcacggggccggctcgagcgccagaagatcttagaccagagcgaagccgagaaggctcgcaaggagttgctggagctcgaggccctctctatggccgtagaatcgaccggtaccgcaaaagcggaggctgaatctagagccgaggctgcacgcatagaaggcgaaggctctgtattgcaggctaaactgaaggctcaggctctcgcaatcgagacagaagcagaactccaaagggtgcagaaggtgagagaactggaattggtctatgcccgtgcccagcttgagttagaagtctccaaggcacagcaacttgccgaggttgaagtgaaaaagttcaaacagatgacggaagctatcggtccatctacaatcagggaccttgcagttgccggccccgagatgcaggtaaagctcctgcaatcgctgggcctgaagtctactttgatcaccgacggctctacacctattaatctgttcaacaccgcctttggactgctcggcatggggcccgagggtcagcctctcgggcggagggttgcgtccggcccctctccaggagagggaatatcacctcagtcagcccaagcaccacaggcgcctggtgataaccacgtggtgccggtgttgcggtag

SEQ ID NO: 123252 - DNA, 480 bp, synthetic construct
  misc_feature 1..480: note = Description of Artificial Sequence: Synthetic coding sequence
  source 1..480: mol_type = other DNA
atgtgctggactaggacggccacttgtccagtttggagatcagggcagcgcccgacaagcggccgcacaatgagaggaagcggcttcggaggcaggaggcatccatacggtaaagacagccctgctcctccaggctctgcagagttgcccgggctccagggtagcgtgccccctcactggggtggcgtggccgggaatagtgctgggcaccgtggcccacgtgcccggtgtccacgcggaggggccggaggttgcgctcaccaccacccagggcccccccaattactgagggattctaggccatgtcgaaccggatggcaagagtccgctggcgctgaggccaggggacaggggcgtgaggtctttttccctccggcacgcagagctgcaggcactagacacccaggatgtgtttgtgccgtcggcgctgccggagctgcagccgaaggccccgccgcacctggcggcggaggaggatag

SEQ ID NO: 123253 - DNA, 1251 bp, synthetic construct
  misc_feature 1..1251: note = Description of Artificial Sequence: Synthetic coding sequence
  source 1..1251: mol_type = other DNA
atgtcaacaaagcagatcacatgcagatatttcatgcacggcgtgtgcagagaaggcagccagtgcctgttctcacatgacttagccaacagcaaaccctccactatatgtaaatattaccaaaaaggttactgcgcatacggaacaagatgtagatacgaccatactcgtccttcagctgcagccggaggagccgttggcaccatggcccactccgtcccgagcccagcattccattccccccacccgccctctgaagtcactgcaagtattgtgaaaactaattcccacgagccagggaaacgggagaaaagaactctcgtgttgcgggataggaacctgtccgggatggctgaaaggaagacccagccttccatggtgagcaatcctggatcatgcagtgacccccaaccctctccagaaatgaagccccatagttatctggacgccatccgatcagggctcgatgatgttgaagccagctctagttacagcaacgagcagcaactgtgcccttatgcagccgcaggcgaatgccgcttcggagatgcgtgtgtttacctccacggcgaagtgtgcgagatctgccgattgcaggtcctgcatcctttcgaccccgaacagcggaaggctcatgaaaagatctgcatgcttaccttcgagcatgagatggaaaaagccttcgcttttcaggcaagccaggataaggtctgttcgatatgcatggaagtgatcctggagaaggcctcagctagtgagcggcgcttcgggatcctgtcgaattgcaaccatacctattgtctgtcctgtatccgacagtggcgctgtgccaaacagttcgagaaccctattattaagagctgccctgagtgccgtgtgatctccgagttcgttattccatctgtgtactgggtggaagaccaaaataagaagaacgagctcatcgaagctttcaaacaggggatggggaaaaaagcctgcaaatactttgagcaaggcaaaggcacctgtcctttcggatccaagtgtttgtatcgtcacgcttaccccgacgggcgcctggctgagccagaaaagccccgcaagcagctgtcctcacaaggtaccgtccgctttttcaattcagtgcgactgtgggacttcatcgagaatagagagtccaggcatgtgcctaataacgaagacgtagacatgaccgaactgggagatctgtttatgcacctatctggagtggaatcatccgagccatag

SEQ ID NO: 123254 - DNA, 1524 bp, synthetic construct
  misc_feature 1..1524: note = Description of Artificial Sequence: Synthetic coding sequence
  source 1..1524: mol_type = other DNA
atggaggagcccgctgccccctccgaggcacacgaggctgctggagcccaggccggtgctgaagcggccagggaaggtgtgtcaggtcctgatctgcctgtctgtgagcccagcggggagagcgccgctcctgacagtgcactcccacacgctgcaagagggtgggcgcccttccccgtcgcaccagtgcccgcccacttgagacgtgggggcctacgaccagcaccagcaagtggcggcggggcttggccctccccgctgccgtccaggagcagcgggatctggacaaaacagattatctgccggtattatatccatggacagtgcaaggaaggtgaaaactgtagatatagtcacgatttgtccggccgcaagatggccaccgagggtggagtgagcccccctggtgccagtgctggtggaggcccttctaccgccgcccatattgagcccccaactcaggaggtggccgaagctccaccagccgcttccagcctgagtctgccagtgattgggtctgccgctgagcgggggttctttgaggccgaaagggataacgctgatcggggcgccgcagggggggcaggcgttgagtcctgggccgacgctatcgagtttgttcctgggcagccctatagaggtcggtgggtggcctcagccccggaggcaccgctccagtcctctgagaccgagaggaaacaaatggctgtaggtagtggccttaggttctgttactacgcaagtcgcggcgtctgcttcagaggcgagtcgtgtatgtatcttcacggcgatatctgtgatatgtgcggacttcagacactgcaccccatggacgctgctcagcgggaggagcatatgcgtgcttgtatagaggctcacgagaaagatatggagctcagttttgctgtacagcgcgggatggataaagtgtgtggtatttgcatggaagtggtatatgagaaagcaaacccaaatgaccgtagattcggcatcctctcaaattgtaaccattccttctgcatcaggtgcatccgccggtggaggtcagccaggcaatttgagaatcgcattgtaaagagctgtccacagtgccgtgtaacaagtgaactggtcatcccatctgaattttgggtcgaggaagaggaggagaagcaaaagctgattcagcaatataaagaagccatgtcgaacaaggcatgtcgttacttcgccgaaggaagagggaactgcccatttggtgatacatgcttttataaacacgaataccccgaaggctggggagacgagcctccaggccccggtgggggttcattctctgcctactggcaccagcttgtcgaaccagtccggatgggcgagggcaacatgctgtacaaaagtattaagaaagaactggtggtgctgcgcctggcttctcttctgtttaaacggtttctgagcctacgcgatgagcttcccttttctgaggaccagtgggacctgttacactacgaactggaagaatacttcaaccttatcctgtag

SEQ ID NO: 123255 - DNA, 462 bp, synthetic construct
  misc_feature 1..462: note = Description of Artificial Sequence: Synthetic coding sequence
  source 1..462: mol_type = other DNA
atggccccagcggccgccacgggcggatctaccttacctagcggcttctccgtctttaccacgttacccgacctgttatttatcttcgagttcatttttggggggttggtctggatactcgttgcatcctcccttgttccttggcctctggtgcagggttgggtaatgttcgtatccgtgttttgctttgttgctactaccaccctcattattctttatatcatcggagcacatgggggcgagacatcctgggtaactctggacgccgcctatcattgcaccgcagccctcttttatttaagcgccagcgtgcttgaggctcttgccaccatcaccatgcaggatgggtttacgtacaggcactaccacgaaaacattgctgccgtcgtgttctcatacatcgcgaccttactgtatgtagttcacgcggtcttctccctcatcaggtggaagtcatcgtag

SEQ ID NO: 123256 - DNA, 168 bp, synthetic construct
  misc_feature 1..168: note = Description of Artificial Sequence: Synthetic coding sequence
  source 1..168: mol_type = other DNA
atggcaccagccgctgctacgggaggcagcactcttccttccggatttagcgtcttcacaactctccccgatctcctctttatctttgagtttgtgtttagctatattgccacactactgtacgtggtgcacgcggtcttctctctgattaggtggaaaagcagctag

SEQ ID NO: 123257 - DNA, 336 bp, synthetic construct
  misc_feature 1..336: note = Description of Artificial Sequence: Synthetic coding sequence
  source 1..336: mol_type = other DNA
atggcgcccgccgccgcaacgggaggctccacattgccaagcggatttagtgtgttcaccactctccccgacctcctgttcattttcgagtttatattcggcgggttggtgtggattctggtggcctcctctctggtgccatggcctttagtccaaggatgggttatgttcgtgagcgtgttttgctttgtagctacgacaaccttgatcattctgtatatcattggggcacacggtggggaaacatcctgggttaccctcgtgtttagctacattgcaactttgctgtacgtagtccatgccgtattctccctcataaggtggaaatccagttag

SEQ ID NO: 123258 - DNA, 294 bp, synthetic construct
  misc_feature 1..294: note = Description of Artificial Sequence: Synthetic coding sequence
  source 1..294: mol_type = other DNA
atggcaccagccgctgctaccggcggttccacgctaccgtctggtttttcagttttcaccaccctgcccgacctcctattcatatttgagttcgatgcagcctatcactgtaccgccgctctgttctatctgagtgctagcgtgctcgaggctttggcaaccatcacgatgcaagatggcttcacttaccgtcattaccatgaaaacatcgctgccgtcgttttttcctacattgcaacactcctctatgtagtgcacgctgtatttagcttgatccgctggaaatccagttag

SEQ ID NO: 123259 - DNA, 462 bp, synthetic construct
  misc_feature 1..462: note = Description of Artificial Sequence: Synthetic coding sequence
  source 1..462: mol_type = other DNA
atggccagccctgatccaccagcaacctcttacgccccctcggacgtccccagcggcgttgcactgttcttgacaattccatttgccttcttcctgcccgagctcatcttcgggtttctggtttggacaatggtagccgctacacacattgtgtaccctttactgcaggggtgggtaatgtacgtgtcactaacctcgtttcttatcagcctgatgtttctgctcagttacttgttcggtttttacaagaggttcgagtcctggcgggtactggactcgctctaccacggcaccaccgggatcttgtacatgagtgccgctgtcctgcaagtgcacgcgacaatcgttagcgaaaagctgctggatcccagaatttactatataaattccgcagctagtttcttcgcatttatcgctacgcttctgtatatactacatgccttctccatctactatcactag

SEQ ID NO: 123260 - DNA, 6216 bp, synthetic construct
  misc_feature 1..6216: note = Description of Artificial Sequence: Synthetic coding sequence
  source 1..6216: mol_type = other DNA
atggaactggctcatagtctattactgaacgaagaggccctcgctcaaatcacagaggctaaaagacccgtgttcatatttgagtggctgcggtttttagacaaggtgcttgttgctgccaataagacagacgtcaaagaaaaacagaagaagctggtggagcagttaacagggctgatctccagttcccctgggccccctacgcggaagttgcttgctaaaaatttggccgccctgtatagcataggggatacgtttacagtgttccaaaccctagataaatgcaatgacataatacgcaacaaagacgacaccgcagcttacttgcccacgaagctcgcagctgtggcctgtgtgggtgcattttacgaaaaaatgggaagaatgctgggcagtgccttccctgaaaccgtaaataatctactgaagagcttgaagtctgctgaaagccagggaagatccgagattcttatgtcccttcagaaggtgttatccggacttggcggcgccgcagccagtagccatcgtgacatttacaagaatgctcgctcactgctaacagaccggagcatggctgtgcgatgcgcggtcgccaagtgcctgttagaattgcagaacgaggccgtgttcatgtggacggccgagctggaaaatattgccactctgtgctttaaggctttagaaaactctaactatggcgtgcgcgtggcagtcagcaagctgctggggacggtcatggccacagctcttatgccaaagcaggctaccgtgatgaggcagaatgttaagcgtgcaaccttcgacgaagttctcgaactgatggccaccggatttttacgtggcgggagtggctttctgaagagcggaggtgagatgctgaaagtggggggcagtgttaacagggaggtgcgagtgggggtgacccaagcgtatgtggtgttcgtcacgactctcggcgggcagtggttagagaggagcttcgcaaccttcctatctcacgtgctagacttggtgtcccatccacgggccactcagacacatgtggaggcagtgtacagtaggagatgcgtcagttttattctgcgggcaaccgtcggctccctcctgggggagaaagctcagattgcagccgccaaagagatctgccaagccattggtaaacagatgaaggcagtcgaagctgtagtgaacgacacttcaggagagaataaatctggcgccgcagatattgctgctagccagcacgtcatggtgtgtgcactgcaggaactgggctcactggtccagtccctgaacgctacagcctcaccgctcatccaggaggcaagcatagggctgctggagatcgtcacttctgtgcttcttcaccctagcatggccgcaaggttggccgccgcatggtgtctccggtgtgttgcggtggcactgccctttcaactgaccccctttcttgacaggtgtgctgagaggctgaacaacctgaagacctcccctgaggcggtttctggatattccttcgcgatggccgccctgttgggaggcgtgcaccagtgccccctgggaatacctcacgccaagggtaaaatggtcgtaagcattgcggaagacctgttgaggacagctgcccagaacagtcgcctctccctccagcgaacccaggcaggttggctgctgctcggcgccttaatgacgctggggccaagcgttgtccgataccatctgcctaaaatgctccttctgtggcgtaatgtgtttccccgctcattgaaggagctcgaggccgagaaagcacggggggatagctttacctggcaagtcacactggaggggcgcgcaggagccctttgcgcaatgcgctcgttcgttgctcactgccctgagctgctgaccgaggacgtcattaggaagcttatgactcctatcgaatgcgccatgactatgatgtcacatattccgtcagtaatgaaggcccacggagcacaccttaaggcatctgcagcaatggttcggctgcgactgtatgatatcttggccctgctcccccccaagacctacgaaggttcttttaacgcactgttgcgcgaacttgtggccgagttcacccttacagataacagcgctaacactacgacaagtctgctgcgatctttatgccactacgatgactccgtcctccttgggtcttggcttcaggaaacagaccataagtcgatcgaggatcaactgcagccgaactcggccagcggatccggggcactggaacacgacccatcctccatctaccttcgcatcccagctggtgaggccgtgcctgggcctctccccctgggggtgtcggtgatcgacgcatcggtcgcgctcttcggcgtggtgttccctcacgtatcctataaacatcgactgcagatgttggatcacttcgccgaatgcgtgaagcaggctaagggggtgagacagcaggctgtccagctgaacattttcaccgctgtcttgtccgccttaaagggccttgccgagaataaatcaacactcgggcctgaggaagtgcgaaagtctgctctgacgctcgtgatgggtcccctcgacaaccccaatcctattttacgatgcgctgccggggaggccttgggacggatggcccaagtcgtgggcgaagccacttttatcgcccgaatggcacagtactccttcgacaagctgaagagtgcgagggacgttgtgagcagaaccggtcacagcttggccctgggttgcctccaccgttatgttggtggtatcgggagtggccaacacctcaaaacctccgttagcattctgctggcgctcgcccaggacggaacttctcctgaagtgcaaacttggagcctgcacagcttggcgttgattgtggacagttccggaccaatgtataggggttatgtggagccgaccctcagccttgttctgaccttgttactgaccgttcctccctcacacactgaggtgcatcagtgcctagggcggtgtttgggggcaatcatcactactgttggaccggaactgcaggggaatggagctacaactagcactattcggagcagttgccttgtaggctgcgcgattactcaagatcatagcgacagcttagtgcaggctgctgcaatttcctgtctgcagcagctccacatgttcgcaccccggcatgttaatctgtctagcttggtgccttccctctgcgtgcatctctgttcatcccacctgctgctgaggcgcgccgccgtcgcttgtctgcggcagcttgcccagcgcgaagccgccgaggtgtgcgaatatgcgatgagcttagccaagaataccggcgacaaagaatcatcatccgccaatgtctctccgtttgcgcccggagttagctcgagaaccgatattcactgtcggcaccaaggcgtcaacataactgagaccggtctcgaaggccttctgttcggcatgttagatagggaaacagatcggaagttgtgttccgacatccatgacacgctgggacacatgctgtcctcactcgcagtggaaaagctcagccattggttgatgctgtgtaaggacgtcctggccgcgagctccgatatgagcaccgctacgctgctgtctagtggcaaggatgaagaggcggaaaagaaagacgagatggacgatgacactatgttcactactctgggagaggaagacaaatcaaaaccgttcgtagccccccgatgggccaccagagttttcgctgctgactgcctgtgcaggataatcaacctgtgtgaaaacgccgaccaggcccacttcgaccttgcactggccagatcagccaagctgcggaaccctacgaatgacctcttggtgcttcacctgtcagatctgatcagaatggcctttatggccgcaaccgatcattcaaatcagctgagaatggccggtctgcaagctctcgaggacatcataaagaagttcgcttcagtccccgagccagaatttcctgggcacgtgattttggaacaatatcaggcaaacgtcggtgctgctctacgacccgccttcagtcaggacaccccctcagacattatagcgaaagcatgccaggtttgttctacctggattggaagtggtgtggtgtcagaccttaacgatttgcgtagagtacacaacctactcgtgtcaagcctggacaaggtccaggcgggcaagggcagtagtagccaactgtatagggagtccgctaccaccatggaaaagttagcggtgctgaaggcctgggccgaagtgtatgtggtagctatgaacattaagaaagaggcagagagcaaaccaaaacgcgccattaaaaatacagatgacgacgacgacgattgtggaactatcgatgaactcccgccggacagtttgatcacactcgtgcagcctgagctgcccacactgtctagactttggctcgcagccctgaaagactatgccctccttacgctgccggcggagttcagctcccaactgccccctgacggcggcgcgttttatacgcccgagaccatcgacaccgctcggctgcattaccgtaatagctgggcaccaatcctgcacgctgtggctctctggttgaactcaaccggcttcacgtgcagcgagagcaccgaggcggctgccatatccggactccaaaagcgcagtaccagtgtgaacctcaaccaggcctctggggctgtcggatctgctaaatcactcccggagataaataaggaccgaatgcacctcatcttgggagtaagtattcaatttctgtgtagccctcggcctgaggagccaattgagcacgtaacagcttgtctacaggctctccacaccctcctcgatagcccctatgctcgagtacacatcgctgaggatcagctgatcggcgtggaactactttcagtacttcataggcttcttctgacatggaaccctagctctgtgcagttgttagtgaccggggtagtgcagcagatcgtacgggcggcgcaagattatctacaggagaaacgcaatacactgaacgaggacgatatggaaaaggaggcatgtaccgtgctaggcgagggaggtgacagcggtggcctcattcccggaaagagcctggttttcgcaacaatggaactgttgatgttcatactagtaagacacatgcctcacctttctacaaaagtaagcgattcaccatctcatatcgcgactaagacaaggctgtccgaagaaagcgcaagactcgttgccgccaccgtgaccatcttgagcgacttgccttcactgtgtagtcctgcaggctgtatgacaatacttcctacaattctgtttttgatcgcacgcattttgaaggatacggccatcaaatcagccgacaatcaggtcccaccaccagtgtctgcagccctgcaggggatcaagtccattgttacactcagcatggccaagaccgaagccggagtacagaagcagtggaccgcactaataaggtccacgctggcgtgtatcctcgagtacagtcagcccgaagacagcgtgccgacgccagatgaagtctcaatgcttaccgcaattgctctgtttctgtggtccgccagcaacgagattatcggagtgcagtctcttcagaatggctgtatgaatcgctttaaaaacgcactcaattcttgcgatccttgggtgcaggcgaaatgttaccaacttctgctcagtgtgtttcagcatagtaatcgggcactctcaaccccatatatccacagccttgccccaatcgtggttgagaaattgaaggctgttgagagaaataggcctgcctcaaacatcgagctgctggctgtgcaggagggcattaaagtgctggagactttggtcgccctgggagaggagcagaacagggtccagctcctcgccctgctggtccctaccttaatttcctacctgttggatgaaaactcctttgcgtctgcgtcgagcgcatccaaggatcttcatgaatttgccctgcaaaatctgatgcatatagggcccttgtatcctcacgccttcaagactgtaatgggagccgctcctgagctgaaggtgcgactggagactgcagttcgagcatcacaggccagtaaggctaaggctgctgcacgccaaccggccccggctatacattcggcccctactatcaagctgaaaacgagtttcttttag

SEQ ID NO: 123261 - DNA, 1005 bp, synthetic construct
  misc_feature 1..1005: note = Description of Artificial Sequence: Synthetic coding sequence
  source 1..1005: mol_type = other DNA
atgtccgaacccataagggtgctcgtgaccggcgctgcgggccaaatagcctactctctactgtactctatcggcaatgggagtgtgtttggaaaggatcagcctatcatactggttttgctggatattactcccatgatgggcgtcttggatggtgtgctgatggaactgcaggattgcgcattgcctttattgaaagacgtgatcgcgaccgacaaggaggatgttgcctttaaggacctggacgtggccattttggtggggagcatgcccaggagggagggaatggagcggaaggatctgctaaaggccaacgtaaagatattcaagtctcagggcgcggctctggataagtacgccaagaagagtgtcaaggtaattgtggttggcaatcccgccaatactaactgtctgaccgcaagcaagtcagcacctagtataccaaaggagaacttcagctgcctgacacgccttgaccataaccgagccaaggcccagattgcccttaaacttggcgttacagccaatgatgttaagaacgtgatcatctgggggaaccactcctcaacccaataccctgacgtaaaccatgcaaaagtcaaactgcagggaaaggaagtgggagtctatgaggccctgaaagacgacagctggttgaaaggcgaattcgtaacgactgtacagcagcgcggagccgcagtcattaaagcccgtaaactgtcatcagctatgagtgccgctaaagccatttgtgaccacgtcagggatatctggttcgggacgccagaaggggagtttgtgagtatgggggtgatctccgatggaaactcatacggcgtgccggatgatctgttgtactcctttccggttgttatcaaaaataaaacctggaaatttgtcgaggggttgcccatcaacgacttttcaagagagaagatggatctgacagccaaagaattgacagaggaaaaggagtctgctttcgaatttttgtcttcagcctag

SEQ ID NO: 123262 - DNA, 1059 bp, synthetic construct
  misc_feature 1..1059: note = Description of Artificial Sequence: Synthetic coding sequence
  source 1..1059: mol_type = other DNA
atgcgcagatgcagttattttccaaaggatgtgactgtgttcgacaaggacgataaatcagagcctattcgcgtgctcgtcactggcgctgcggggcagattgcctacagcttattgtatagtattgggaatggcagcgtttttggcaaagaccagccaatcatcctcgtcctgttagacataactcctatgatgggggttcttgacggggtgctgatggaactgcaggactgcgcactcccactcttgaaagatgtgattgcaacagataaagaagacgtcgctttcaaagatctcgacgttgccatattggtaggaagtatgccccgacgtgaaggtatggaacggaaggacctgcttaaggctaacgtgaaaatcttcaaaagccaaggagctgccctggataaatacgctaagaaaagtgtaaaggtgatcgtggtcggcaaccccgcaaacacaaactgtcttaccgctagcaaaagcgcaccttccatccctaaggaaaactttagttgcttaacccgcttggatcacaatcgagcaaaggcccagatcgctctgaagttaggagtgactgccaacgacgtcaaaaacgttattatctgggggaatcactcgtccacccaatatccagatgttaaccatgctaaagtgaagctgcagggcaaagaggtgggcgtgtacgaggcactgaaggatgacagctggttaaagggcgaattcgtcacaactgttcagcaaagaggggctgcagtgataaaggcccgcaagttaagcagcgcaatgtcagcggccaaagcgatttgcgatcacgtgcgcgacatttggtttggcactccagaaggggagttcgtgagcatgggtgtcatttcagatggaaacagctacggggtccccgacgacttattgtatagctttcccgtggttatcaaaaataagacctggaaatttgtagaaggcctccctatcaacgacttctctagggagaaaatggaccttacggccaaggaactgacggaagaaaaagaaagcgcttttgagtttttatcgagcgcgtag

SEQ ID NO: 123263 - DNA, 738 bp, synthetic construct
  misc_feature 1..738: note = Description of Artificial Sequence: Synthetic coding sequence
  source 1..738: mol_type = other DNA
atgccgaggagggaggggatggagagaaaggatcttctgaaggctaacgtgaagatcttcaagagccaaggagccgccctggacaaatacgcgaagaagtcagtgaaagtcatcgttgttggcaaccccgcgaatactaactgcctgacagcctcaaaaagtgcaccttcaatacccaaggagaacttctcctgcctaaccagactggatcacaatcgagcaaaagcccagatcgctttgaagcttggagtgaccgccaacgatgtcaaaaatgtgatcatatgggggaatcactcatccacgcaataccctgacgtcaatcatgccaaagtcaaactgcagggtaaggaagtcggcgtgtacgaggccctgaaggacgattcttggttaaaaggagagtttgtgaccactgtgcaacagaggggcgccgcagtgattaaagcacggaaattaagctctgcaatgtccgccgctaaggccatctgcgaccacgttagggacatttggtttggcactccggaaggggagttcgtatccatgggggtcatttctgacggtaacagctatggagtgcccgacgatctactgtactcttttcctgtggtgatcaagaataagacttggaagttcgttgaaggcctccccattaacgatttcagtagggagaagatggacctgaccgctaaagagctcacagaggagaaagagagcgcatttgaatttctgagctcagcctag

SEQ ID NO: 123264 - DNA, 1017 bp, synthetic construct
  misc_feature 1..1017: note = Description of Artificial Sequence: Synthetic coding sequence
  source 1..1017: mol_type = other DNA
atgctctccgcacttgccagacccgcaagcgcggccctgcgacggtccttcagtacgtcagcccagaacaatgccaaggttgctgttctaggtgcctcaggcggcatcggacagccactatcgctgcttctgaagaacagtccccttgtgagtagactcaccctgtacgacatcgctcacactccaggggtggcggccgacttgtctcacatcgagaccaaagctgctgttaagggctacctcgggccggagcagctccctgattgcctaaaaggttgtgacgttgtagtcatccctgctggtgtacctagaaaaccaggcatgacccgagacgacctctttaacaccaacgccaccatcgtggccacgctgactgctgcttgtgctcaacactgccctgaagctatgatctgcgtgatcgctaatccagtgaacagcactattccaatcacagccgaagtatttaaaaaacacggggtttataatccaaataaaattttcggagtgaccaccctggatatcgtccgggcaaatacatttgttgcggaactgaagggtctggaccctgcaagagtgaatgtgccagtcataggtggacacgctggcaaaaccataattcctctcattagccaatgcacaccaaaagtagatttccctcaggatcagcttacagctttaactggtagaattcaggaagccggaacagaagtggtcaaagcaaaggcaggggcaggaagcgcaactctatccatggcttatgcaggcgcccgattcgtgttcagcttggtagacgccatgaatggaaaggaaggggtggtagagtgttctttcgtgaagtcccaggagacagagtgtacttacttttctaccccacttctgttggggaaaaagggcattgaaaagaatctgggaatcggcaaggttagctcctttgaagaaaaaatgatctctgacgccatccccgaactgaaagccagtatcaagaagggcgaggatttcgttaagactctcaagtag

SEQ ID NO: 123265 - DNA, 1872 bp, synthetic construct
  misc_feature 1..1872: note = Description of Artificial Sequence: Synthetic coding sequence
  source 1..1872: mol_type = other DNA
atgaacaggtacacgactatgcgtcagctgggagatgggacatatggatctgtcctgatgggaaagtccaacgaatccggggagcttgtagccatcaagcggatgaagcgaaagttctattcttgggacgaatgtatgaacttacgggaggtgaagtccctgaaaaaactgaaccacgcaaatgtgataaaattaaaggaagttatccgcgagaacgatcatctttactttatttttgagtatatgaaagagaatctgtaccaactgatgaaagaccgaaacaaactttttcccgagtccgtaatcaggaatataatgtatcagatactgcaaggcttagccttcatccacaagcatgggttctttcatcgggacatgaagcccgagaacttactgtgcatggggcccgaactcgtcaagatagcagacttcggcttagctcgagaattgcgatcccagcccccatacaccgactacgtgagcacgcgctggtatagagcccctgaagttctgctgaggtcttcagtgtactcatccccaattgatgtctgggccgtggggtccataatggcagagctgtacatgctgcgcccgttatttcccgggacctcagaagtagatgagatcttcaagatatgtcaggtccttggaacaccaaagaagtcagattggcccgaaggctatcagctcgccagtagtatgaacttcaggttcccccaatgtgtgccgatcaacctaaagacactgatacctaatgcaagtaatgaagcaattcaacttatgacggaaatgctgaattgggatcccaagaaaagacctaccgcctctcaggcgcttaagcatccatactttcaggtcggacaggtgctaggcccaagtagcaaccatttagaatctaaacagagcctgaacaaacagctccagcctttggaaagtaagccgagtctggtcgaagtagagcccaagcctctacccgacattattgatcaagtggtggggcagccccagcccaaaacgagtcagcagccactgcagcccattcagcccccccaaaacttatcggtgcaacagccgccaaaacaacagtcccaggaaaagccccctcagaccctcttcccatctatcgtcaagaacatgccaaccaaacccaacggaacgctgagtcacaaaagcggacgccgcagatggggtcagactatattcaaatccggagatagttgggaggaacttgaagactacgactttggggcaagccatagcaagaaaccaagcatgggtgtcttcaaggaaaaacggaagaaagactcgcctttcagactccctgaacctgtcccatctggttcgaaccatagcaccggagaaaacaaaagtcttcctgcggtcaccagcctcaagtctgattccgagctatccactgcccctacgagtaagcagtattatctgaagcaaagtagatacctccccggggttaaccctaagaaagtgagcctcattgctagcggaaaagaaataaacccccatacttggagcaatcagctatttccgaaatctctgggtcccgtgggtgccgagttggcatttaaacgatctaatgctggtaatctggggtcatatgcaacatacaaccagtccggctacatccctagcttcctgaagaaggaggttcagtctgcgggccagaggatccacttagctcccttgaacgcgaccgccagcgaatacacttggaacacgaagacgggccggggacagtttagtggacgtacttacaatccaaccgctaaaaatcttaacatagtgaacagagctcaacctataccatcagtccacggacgaaccgactgggtggctaaatacggaggacatcgatag

SEQ ID NO: 123266 - DNA, 1872 bp, synthetic construct
  misc_feature 1..1872: note = Description of Artificial Sequence: Synthetic coding sequence
  source 1..1872: mol_type = other DNA
atgaacaggtatacgacaatgaggcagcttggcgacgggacttacggtagtgtgctgatgggtaagagcaatgaaagtggcgagttagttgccataaagcgcatgaaacgaaaattctattcttgggacgaatgtatgaatctcagagaagtgaagtctctgaagaaactgaaccatgccaatgttattaaactgaaagaagttatccgggaaaatgatcatctatacttcatcttcgagtacatgaaagagaacctctaccagctgatgaaggaccgtaataaactgtttcccgagagtgtgatccgtaatatcatgtatcaaattctccagggcctggcctttattcacaagcacgggttcttccatcgcgatatgaaacccgagaatctgctgtgcatggggccagaactggtaaagatcgcagactttgggctggcacgagagttgagatcacaaccaccatacactgactacgtgtcaactaggtggtacagagcacctgaagtactgttgcgatctagcgtctactcctcacccatagatgtgtgggctgttggatccattatggcagagctgtatatgcttaggcccctgttccctggcaccagcgaagttgatgaaattttcaaaatctgtcaggtattggggactccaaagaaatcagactggcctgaaggctaccagctggcatcgtctatgaacttccgtttcccccagtgtgtcccgattaatctcaaaacccttatcccaaacgcttcaaacgaagctattcaactaatgaccgaaatgctgaactgggatcctaagaaacgccccacagcctcccaggccctgaaacacccttacttccaggttggccaggtcctcgggccttcctccaaccacctagagtcaaagcagtccctgaacaaacagctgcagcccctggaatccaagccctccttagtggaggtggaacctaagcctctgcctgacatcatcgaccaggtggtgggacaacctcagcctaagacttcacagcagcctcttcagcccattcagccgccacagaacctctccgtccagcagccccctaagcagcaatctcaggaaaaaccgcctcagaccctcttcccttccatcgtgaaaaatatgcctactaaaccaaacggcaccttgagccacaagtcaggccggaggcgctggggtcagacaattttcaaatctggcgattcctgggaagagctcgaggattacgatttcggcgcctcacatagcaagaagccctctatgggagtatttaaggagaaaagaaagaaagattcacctttccgactgcctgagcctgtgccctccggatcaaatcactcgacaggggaaaacaaatccttgcccgctgtgacctccctcaagtcagatagtgagcttagtaccgctccaacatctaagcagtactatctaaagcagtcccggtacctgcccggcgtaaaccctaagaaggtgagcctcattgcgtccggcaaggaaattaaccctcacacatggagtaatcagctctttcctaaaagtctgggcccagtgggagcagagctggcttttaagcgatcgaatgccggcaatttaggctcctatgcaacttataaccagtctgggtacatcccatccttcctcaagaaagaagtccagtccgccggccagaggatccatctggctcctcttaacgccacagcctctgagtacacctggaacacaaagaccggtcgggggcaatttagcggcagaacttataacccaactgctaagaacttgaatatagtgaatcgggcccaacccataccctccgtccatggccgcaccgactgggtagccaagtacggcggacaccggtag

SEQ ID NO: 123267 - DNA, 867 bp, synthetic construct
  misc_feature 1..867: note = Description of Artificial Sequence: Synthetic coding sequence
  source 1..867: mol_type = other DNA
atgaatcggtacacaaccatgcgacagctgggagatggaacttacggttccgtgctcatgggtaagagcaacgaatcaggagagttagtggctatcaaaaggatgaagcgaaaattttactcgtgggatgaatgtatgaatctgagagaggttaagtctctcaaaaaactcaatcatgctaatgttattaaactgaaggaagtgatccgggaaaacgatcatctgtacttcattttcgagtacatgaaggagaacctctaccagctgatgaaggatagaaataaactgtttccggaatccgtgatccgcaatataatgtatcagatccttcagggattggccttcattcacaagcacggtttttttcatagggatatgaagcccgagaacctattgtgtatgggacccgaactggtgaaaatcgcggattttggcctagctcgggagctgcgcagtcagccgccctatacagattacgtttctaccaggtggtatcgcgcaccagaggtgctacttcggtcctctgtgtattcctcccctattgatgtttgggctgtcggctcaatcatggcagagctgtacatgctgcggcctcttttcccggggacaagtgaggtagatgagatcttcaagatctgccaagtcttaggaacccccaaaaagagcgactggccagaagggtatcagctagccagtagtatgaatttcaggttccctcagtgtgttccgatcaatctcaagacactgattccaaatgcttctaacgaagcaatccagctgatgaccgagatgctgaattgggacccaaaaaaaaggcctacagcatctcagccttgttttctagttgaggttgagcggccgaactag

SEQ ID NO: 123268 - DNA, 1374 bp, synthetic construct
  misc_feature 1..1374: note = Description of Artificial Sequence: Synthetic coding sequence
  source 1..1374: mol_type = other DNA
atgaacagatacactactatgaggcaattaggagacggcacttacggcagcgtattaatgggtaagagtaacgagtcgggtgaacttgtggctattaagcgaatgaaacggaagttttattcctgggacgaatgcatgaacctgagggaggttaagagcctcaagaaactcaatcacgcaaacgtgatcaagctgaaggaggtgatacgagagaacgatcatctgtattttatctttgaatacatgaaagaaaacctctatcagttaatgaaggacaggaacaagctattccctgaatctgtgatccggaacataatgtatcagattctccagggcctcgcctttatacacaaacatggattcttccatcgagatatgaagcctgaaaacctactttgtatgggaccagaactggtcaaaattgctgactttggcctggcgagagaactgcgttcccagcccccctacaccgattatgtgtctactagatggtatcgcgcccccgaagttctcctacgatctagtgtgtactcctcccctatcgacgtgtgggccgtcggaagtatcatggccgaactgtatatgctgaggcctctcttcccaggcacgtcggaagtggatgagatctttaagatttgtcaggtgttgggcaccccaaaaaaatccgactggccggaagggtatcagctcgcgtcctccatgaattttagattcccccagtgtgttcccataaacttgaaaacgcttataccgaacgcgtctaatgaggccattcaactgatgactgaaatgctgaactgggatccaaagaaacgtcctacagctagccaagcactcaagcatccttactttcaggtgggtcaggtcctgggccccagcagcaatcacctggaatccaaacagtctctgaacaaacagctgcagcctctggaatctaagccatctctggttgaggttgaacccaaacctctacctgacattatcgatcaagtggtaggacaaccgcagcccaaaaccagccagcagcccctacagccgatccagccaccccagaatctgtctgtccagcagccccccaagcagcaatcccaagaaaaacccccacagactctattcccctcaattgtgaaaaatatgccaaccaaacctaacggcactctgtcccacaagtccggacggcggagatgggggcagacaattttcaagtctggagactcttgggaggagctcgaggactacgatttcggggcatcccactcaaagaagccaagtatgggggtcttcaaggagaagagaaagaaggattcaccttttagacagcaggtaaaaatggcagttatttctctgtccgctcatcaattccccactttgtag

SEQ ID NO: 123269 - DNA, 942 bp, synthetic construct
  misc_feature 1..942: note = Description of Artificial Sequence: Synthetic coding sequence
  source 1..942: mol_type = other DNA
atggaggagatgagcggagagtccgtggtgagctctgcagtgccggccgccgcgacacgcacgacatctttcaagggaaccagcccgagttcaaagtacgtcaagttaaacgtgggaggcgccctgtactatacaacaatgcagacgctgaccaagcaagatactatgctgaaggccatgttttccggtaggatggaggtgctgacagactcagagggttggatcctaattgatcgatgcggcaaacactttggcactatacttaattacctgcgcgacggcgcggtgcccttaccagagagccgacgggagatcgaggagttacttgccgaggctaagtattacctagtgcagggattggtggaggaatgtcaggccgctctgcaaaacaaagatacatacgaaccgttctgtaaggtacctgtcataacctcatcaaaggaagaacagaaactgatcgctactagcaataagcctgccgtgaaactcctatacaaccgcagcaataacaaatacagctatacgtccaactccgatgataacatgctgaagaatatcgagctctttgataagctgagcctgcgctttaatgggagggtcctcttcataaaggatgtcatcggagacgagatatgttgctggagcttctatggtcagggcagaaaaatcgccgaggtctgttgcacatcgatcgtctacgccacagagaagaagcagactaaagttgaatttcccgaagcccggatctatgaggagacattaaacatcctgctttatgaggcccaggacggcaggggcccggacaatgcactcctggaggctacaggtggcgcagcaggcaggagtcaccacctggacgaggatgaagaaagagaacgaatcgagagagtgaggaggattcacatcaagcgtcctgatgatagagcgcatctgcaccaatag

SEQ ID NO: 123270 - DNA, 558 bp, synthetic construct
  misc_feature 1..558: note = Description of Artificial Sequence: Synthetic coding sequence
  source 1..558: mol_type = other DNA
atggggcctgagcgacacctcagcggtgcgccagctcgaatggcaaccgtcgtcctcggtggagataccatgggacccgagagaatttttcctaaccagacagaagagctggggcatcaggggcccagtgagggtaccggggattggtcctctgaggaacctgaagaggagcaggaggagaccggttcaggacctgcaggctactcttatcagccactcaatcaagatcctgagcaggaggaggtggagcttgctccagttggagacggagatgtggtggcagacatccaggacagaattcaagccttaggactccatctccccgacccaccactggaatctgaggatgaggacgaggagggtgcaaccgccctcaacaaccacagctcaattccaatggaccctgagcacgtcgagctggtaaaacgcaccatggcaggcgtcagcctgccagcccctggcgtgcctgcgtgggcaagagagatcagtgatgcccagtgggaagacgtggtacagaaagctctgcaggcgcgccaggcttcccccgcatggaagtag

SEQ ID NO: 123271 - DNA, 1719 bp, synthetic construct
  misc_feature 1..1719: note = Description of Artificial Sequence: Synthetic coding sequence
  source 1..1719: mol_type = other DNA
atggagcctgaggctcctcggcgcagacacacacaccaacgagggtaccttctgacaaggaacccacatctgaacaaagatttggcctttacattagaggagcgacagcagctgaacattcacggtctcttgcctccttctttcaacagtcaggagatccaggtgttgcgcgtcgtgaagaatttcgaacatttgaacagcgattttgatagatacctcctgctgatggacctgcaggaccgcaatgagaaactgttttatagggtcctgacctcagatatagaaaagttcatgcctattgtttacacacccaccgttggcctcgcttgccagcagtattcgttggtgttccgcaagcctaggggactcttcatcacaatacacgatcgcggacatatcgctagtgtactcaacgcatggcccgaggacgtgatcaaagccattgtggtgactgacggggaacgaatcctcggactgggggacctcggttgtaatgggatggggatccccgtgggaaagttagcactatataccgcgtgtggagggatgaatccgcaagaatgtctgcctgttatccttgacgtcggcacagagaatgaggaacttttgaaagaccctctgtacattggcctacgacagcgcagggtgcgtggatccgaatacgacgactttctcgacgaattcatggaggctgtcagcagcaaatatggcatgaattgcttaattcagttcgaagatttcgcgaacgtaaatgcattcaggctgctgaacaagtacaggaaccagtattgtacgtttaatgacgatattcaaggcacggcctctgtcgccgtcgccgggctgctggcagctctgcgcataaccaaaaacaaactcagcgatcagaccattttgtttcagggagcaggggaggcggctctgggcatcgcccacctgattgtgatggcgcttgagaaagaaggtctgcccaaagagaaagccatcaaaaagatctggctcgtcgatagcaagggtctcattgtcaaaggccgggcatcactgactcaggagaaggagaagtttgcccacgaacatgaagaaatgaagaacttggaggccatcgtgcaagaaataaaaccaaccgcactcataggggtggcggccatcgggggagctttcagtgaacagattctcaaggacatggccgcgtttaacgaaagacctattatattcgctctgtccaaccctacttccaaggccgaatgttctgccgagcagtgttataagatcactaagggccgggcaattttcgcatccggatccccttttgaccccgttacactaccaaatggccagactctctaccccggccagggtaataactcctatgtgttccccggggttgccttgggggttgtcgcatgcggcttgcggcagatcacagataatatattcttgactacggccgaagtgatcgctcagcaggtgagcgataaacatttagaggaaggtcgtctctaccccccacttaacaccatccgagatgtgtcgctaaagatcgcagaaaaaatcgtcaaggatgcttaccaagaaaagacagcaacggtctacccagagccacagaataaggaggcatttgtgaggtcccagatgtactctactgactatgatcagatactccccgactgctactcctggccagaggaagtacagaagatccaaaccaaagtcgatcagtag

SEQ ID NO: 123272 - DNA, 699 bp, synthetic construct
  misc_feature 1..699: note = Description of Artificial Sequence: Synthetic coding sequence
  source 1..699: mol_type = other DNA
gtcaaggggagagcgagcctgacacaagaaaaagagaagttcgcccatgagcacgaggagatgaagaacctggaggctattgtccaggagattaagcctaccgcactgattggggtagcagccatcggtggggctttttcagagcaaattctgaaggacatggccgcctttaacgagcgacctatcatttttgctctgtctaatcccactagcaaagctgagtgctccgctgaacagtgttacaaaatcaccaaaggccgcgccatctttgccagcggatctccgtttgatccagtgaccctgcccaatgggcagaccttgtaccccggacaagggaacaactcctacgtgtttccaggggttgcactcggcgtggtggcttgcggccttagacagattaccgacaatatttttctgactactgcggaggtaattgctcagcaggtgagcgataaacacctggaagaaggccgactctaccctcctttgaatacaatccgggatgtgtcactaaagattgccgagaaaattgtcaaggacgcttaccaggagaagacagctaccgtgtaccccgaacctcagaataaagaggccttcgtccgctctcaaatgtatagcaccgattacgatcaaatcctgcccgactgttactcttggcctgaagaggtacagaagatccagaccaaggtggaccagtag

SEQ ID NO: 123273 - DNA, 1221 bp, synthetic construct
  misc_feature 1..1221: note = Description of Artificial Sequence: Synthetic coding sequence
  source 1..1221: mol_type = other DNA
atgggcataccagtgggtaagttagcactctacacagcatgtggtggaatgaatccacaggagtgcttacccgtcattctggacgtgggaacggagaacgaggagctcctgaaagatcccctgtacataggtctcagacagagacgcgttagaggctctgagtacgacgacttcctggacgagttcatggaggctgtgtcctccaagtacgggatgaactgtctgatacagtttgaggactttgcaaacgtcaatgcattccggctgctgaataagtaccgcaaccagtattgtacattcaacgacgacatacaggggaccgccagtgtcgcagtggctggtcttctggccgccttaaggattactaagaacaaactttctgaccagacgattttatttcagggtgcaggcgaggccgcgctgggcatcgcacacttaatcgtaatggccttagagaaagagggtttaccaaaagaaaaggctatcaaaaaaatctggctggtcgattcaaaaggactgatagtcaaggggcgcgccagcctgacccaggaaaaagagaaattcgctcacgaacacgaggaaatgaaaaatctggaggcaatagtgcaggagataaagcctactgccttaatcggggtcgccgccattggaggcgctttctctgagcagatcctgaaagatatggcggccttcaacgagcggccaatcatcttcgcgctgtccaatcccacttccaaagcagaatgctctgcagagcagtgttacaaaatcactaagggacgggcgatttttgccagcgggagcccctttgatccagtgactcttccaaacggtcaaacgctgtacccaggtcaggggaacaattcatatgtgttcccaggcgtcgctttgggggttgttgcttgcggtcttagacagatcacggataatatcttcctgacgaccgctgaggtcatcgcgcaacaggtgtcagacaaacacctagaggagggccgactgtatcctcccttgaataccatcagggatgtaagcctcaagatcgcggagaaaattgtgaaagatgcctaccaggagaaaacggctacagtataccccgaaccacagaataaggaagcatttgtgcgcagtcagatgtacagcactgactatgaccagattttgcctgattgctacagttggccagaggaagtgcaaaagatccagactaaggtggatcaatag

SEQ ID NO: 123274 - DNA, 1494 bp, synthetic construct
  misc_feature 1..1494: note = Description of Artificial Sequence: Synthetic coding sequence
  source 1..1494: mol_type = other DNA
atggatctccaggatcggaacgaaaagctgttctaccgagtcttaaccagtgatatcgaaaaatttatgcctatcgtgtatacaccgaccgtgggcctggcatgccaacaatacagtttagtcttcaggaagccgagagggctcttcatcaccatccatgataggggccacatcgcttccgttctgaacgcatggccagaggatgttatcaaggccatcgtggttacagacggtgaaagaatcttggggttaggcgatcttggatgcaatggtatggggatacccgtgggcaaactggcactgtatacagcatgcggtggcatgaaccctcaggagtgcctcccggtgatattagacgttgggactgagaatgaggagctgttaaaggatccgctctacattggcctgcgtcagcgtagggtcagagggtcggagtatgacgacttcctggatgaattcatggaggccgtttccagcaagtacggtatgaattgtttgatccagtttgaagacttcgcaaatgtgaacgctttccgactgcttaataagtatagaaaccagtactgcaccttcaacgatgacatccaaggcactgcctccgtcgcagttgcagggctgcttgccgctctccgcatcaccaaaaataagctgtctgaccagactattttgtttcagggcgcgggggaggcagccttagggatcgcacacttgatcgtgatggctttagaaaaggaaggcttgccgaaggaaaaagccataaaaaagatttggttggtggactctaaggggctgattgtcaaggggagggccagtctcacccaggaaaaggagaagtttgcgcatgagcacgaagagatgaagaacctagaggctatcgttcaggagataaaacccactgcactcatcggtgtggccgccatcggcggagctttttctgaacagatcctgaaggatatggccgcattcaatgagaggcctatcatctttgcactgtccaaccctactagcaaagccgagtgctccgcagagcagtgctacaagattaccaaaggacgggctatcttcgcatctggtagcccatttgaccccgtgactctgcccaatggacaaacactgtacccaggccaagggaacaacagctatgtgtttccaggggttgctctgggtgtagtcgcatgcggcttacgtcaaatcaccgataacatttttctgaccacagcggaggtcatcgctcaacaggtttcagataagcatctagaggagggccgtctgtaccctcccctaaacaccattagagacgtgtccctaaaaattgccgaaaaaatcgtcaaggacgcttaccaggagaaaacagccacagtatacccagaacctcagaacaaagaagccttcgtaaggtcgcagatgtactccactgactacgatcagattctgcccgactgctacagctggcctgaagaagtgcagaagatccagaccaaggttgaccagtag

SEQ ID NO: 123275 - DNA, 1755 bp, synthetic construct
  misc_feature 1..1755: note = Description of Artificial Sequence: Synthetic coding sequence
  source 1..1755: mol_type = other DNA
atgctaagccgattgcgagtagtgagcacgacctgtaccctggcctgtcgccatctgcacataaaggagaaaggcaaacctttaatgctgaaccccagaacaaataaagggatggcatttacgcttcaagagcgtcagatgctcggacttcagggcctgctgccgccaaagatagagactcaagacatacaagcattaagattccacagaaacctcaagaaaatgacatcacccctggagaaatacatatacatcatggggatccaggagaggaatgaaaagctattctaccgtatcctccaggacgacattgaatctctgatgcccattgtatacactcctaccgtcggcctggcctgttcccagtacggacacatctttcgcaggcccaaaggcctgtttatttctattagcgaccgcggccacgtgcgctcgatcgtggacaattggccagaaaaccatgtgaaagccgtggtcgtcactgatggtgagcggatcttgggacttggtgacctgggtgtgtacggaatgggcatccccgtgggaaagctgtgcctttatacagcgtgcgccggcatccggcctgacaggtgtctgcccgtgtgcatagatgtgggcaccgacaacatcgctcttctgaaagaccctttctacatgggtttgtatcagaaacgcgaccgaacccagcagtacgacgatctaatcgacgagttcatgaaggccataacggacaggtacgggagaaatacattgattcagttcgaggacttcggaaaccataacgcgttcaggttcctccgcaaatacagggagaagtattgtacttttaatgatgacattcaaggaactgctgccgtcgcgttagccggacttctggccgctcagaaagtgatcagcaagccaatcagtgagcacaaaattctgttcttgggcgcaggcgaagcggctcttgggatcgccaacctgattgtgatgagtatggtggagaacggtctgtcggaacaggaagcccagaaaaagatctggatgttcgataagtacggactgctggtcaaaggccggaaagctaaaattgattcatatcaggaaccattcacacactcagcaccagagagtattccggacacctttgaggatgcagtgaacattctgaagcctagcaccatcatcggtgtggccggcgctggaaggttgttcactcctgacgttattcgcgctatggctagcatcaatgaaagacctgttatctttgccctgtctaacccaactgcacaggccgagtgcacagcagaagaagcctacacactgacagaaggcagatgtcttttcgcatctggctcaccttttggccctgtgaagctgaccgatggcagggtattcacccccgggcaaggaaacaatgtctatatcttccctggtgtagccctggcggtaattttatgcaacactcggcacattagcgacagcgtcttcctagaagcagcaaaggctctcacatcccaattgaccgatgaggagcttgctcaaggacgcctgtatccaccactggccaatattcaggaagtctctattaacattgcaattaaggtcaccgagtatctctacgcaaacaaaatggcctttcgataccccgagccagaagacaaggccaaatacgtgaaagagagaacctggcgttctgagtacgattcactccttccagatgtatatgagtggcccgagagcgctagctccccgcctgttatcaccgaatag

SEQ ID NO: 123276 - DNA, 1440 bp, synthetic construct
  misc_feature 1..1440: note = Description of Artificial Sequence: Synthetic coding sequence
  source 1..1440: mol_type = other DNA
atgctgtctcgactgagggtagtctctacaacatgcaccttggcctgtcggcacctgcatatcaaagaaaaaggaaaacccttaatgctgaacccccggacgaataaaggaatggcatttaccctgcaggagagacagatgcttggcctccaggggctgctgcctccaaaaatcgaaacacaggatattcaagccttgcgctttcatagaaacctgaaaaagatgacgtcacccctcgagaaatacatctatattatggggatccaggagaggaatgaaaagttattctacaggattttgcaggatgacatcgagtccctcatgccaatcgtgtacacacccacagttggactcgcatgctcccagtacggacacattttccggagaccaaaaggtctttttatctcaatctcagatagagggcatgtgcgcagtatcgtggacaactggcctgaaaatcacgtgaaagccgtggttgtgacagacggagagagaatcctgggtctaggtgatctgggcgtgtatgggatggggattccagtggggaagctgtgtctgtacaccgcctgtgccggtataaggccagatcgctgcttaccagtctgcatcgacgtcgggaccgacaacatcgcattgctcaaagatcccttctacatgggcctctatcagaagcgggaccgcacgcagcagtatgatgatctcatcgacgagtttatgaaagccatcacagatcggtacgggcgaaatactctaatccagttcgaagattttgggaatcacaatgccttccggttcctcaggaaataccgagaaaagtactgcacctttaatgatgatatccaggggacggctgcagttgcactggccggcttgctggctgctcaaaaggtcatcagcaaacctatctctgagcataaaattttattcctcggtgccggcgaagctgctttgggcatcgctaatctgatcgttatgagcatggttgagaatggactgtctgaacaggaggcccaaaagaaaatctggatgttcgataagtacggcctgctggttaaaggtagaaaggcgaagatagacagctaccaggagccctttacacactccgctcccgagtctatacccgatactttcgaagacgctgtgaacatattaaagcccagcaccataatcggagtggctggtgccggccggctgttcactcctgacgttatccgggccatggccagcatcaatgaacgccctgttattttcgcactttctaatccgacagcccaggcagagtgcaccgccgaggaggcttacaccttgaccgagggccggtgtttatttgcaagcggtagcccatttggcccagtaaagctgaccgatggccgagtgtttacacctggacaggggaacaacgtttatatctttcccggatatcgcattcctatatgttag

SEQ ID NO: 123277 - DNA, 780 bp, synthetic construct
  misc_feature 1..780: note = Description of Artificial Sequence: Synthetic coding sequence
  source 1..780: mol_type = other DNA
atggcattcacactggaagaaaggctgcagcttggaatccatggactgatcccaccttgctttctgtcccaagatgtgcagctccttcggattatgcgctactacgagaggcaacagtctgatcttgataagtatataattcttatgacactgcaggatagaaatgagaagctgttttacagagtgttaactagtgacgttgaaaaattcatgccaatcgtatataccccaactgttggcctggcctgccagcactacggcttgacttttcgtagaccgagaggcctgtttattacaattcacgacaagggccatcttgcaacaatgttaaatagctggccagaggacaatatcaaggccgtcgtcgtgaccgatggcgaaaggatcctcggcctgggggacctggggtgttacgggatggggattcccgtcggaaaactcgctctgtatacggcctgtgggggtgtgaatccacagcagtgcctacccgtgctcctggacgtggggactaacaatgaagaactcctacgcgatccactgtatatcggcctgaagcaccagagagtgcacggcaaggcctatgacgatctgttagacgaattcatgcaggctgttactgataaattcggcattaactgtcttattcaattcgaggatttcgccaacgccaacgcctttaggctgctgaataaatatcgaaataaatattgtatgttcaacgacgacatccaagatgacttttctaggggcccaaaaagaagccaactgttcttcaagtag

SEQ ID NO: 123278 - DNA, 1815 bp, synthetic construct
  misc_feature 1..1815: note = Description of Artificial Sequence: Synthetic coding sequence
  source 1..1815: mol_type = other DNA
atgggggcggctcttggaactgggacaaggcttgctccctggcccggacgcgcttgtggggcactgccgcgctggacaccgaccgcgcctgcccagggttgccactccaaaccaggcccagcgagaccagtccccttgaaaaaacgcgggtatgacgtgacgcggaacccccatctgaacaaaggtatggcctttactctggaagaaaggctgcagttaggcattcacgggttgataccaccttgctttttgtctcaggacgtgcagctactgcggataatgcggtattatgaacgccaacaatcagatcttgataagtacatcattctgatgacactgcaggatcgcaatgaaaaactcttttacagggtgcttacctcagatgtagaaaaatttatgccaattgtctatacgccaactgtgggattggcatgccagcattacgggcttaccttccggcgcccgagaggactattcataacaatccatgacaaaggtcacctggcaaccatgcttaatagctggcctgaagataacatcaaggccgtcgtggtcacagacggtgaacggattcttggactaggagatctcgggtgctacggcatggggatacccgtgggaaagctcgccctgtacactgcttgtggaggcgtgaatccccagcagtgcctgccggttctgttagacgtgggaactaataacgaggagctccttcgagatcccttatacattggcctaaagcatcagagagtccacggtaaagcctatgacgacttgctggatgaattcatgcaggccgtcaccgataagtttggaataaactgcttgattcagttcgaagattttgcgaatgcgaacgcctttcgcttattaaataaataccgcaacaaatattgcatgtttaacgatgacatccaaggaactgcgtccgtcgccgttgctggaattctggcggctctcagaattacaaaaaacaagctcagcaaccacgtgttcgtatttcagggggctggcgaggccgctatgggcattgctcatctgctggtgatggccctggagaaggaaggggtccctaaggccgaagcaacccggaagatatggatggtggatagcaagggcttaatagttaagggacggtcacacctcaaccacgaaaaggagatgttcgcgcaggatcacccggaggtcaactcactggaggaagtggtgcgcctggttaagcctactgccatcatcggggtggccgccatcgctggcgcatttaccgaacagatccttagggacatggcctcgttccatgagcggcccataatatttgccctttctaatccaacgtcgaaagcggagtgtacagccgaaaagtgctacagggtgacagaaggccggggtatctttgcttcaggaagcccgtttaagtccgtgacactcgaagatggcaagacattcatccccggccaggggaataacgcatatgtgtttcccggcgtcgccctgggcgtcatcgctggggggatcaggcacatcccagatgaaattttccttctgaccgctgagcagattgctcaggaggtgagcgaacaacatctcagccaggggcggttataccctccactgtctacaattcgcgatgtctccttaaggatcgccatcaaagtgctcgactatgcctataaacacaacttagcctcttattaccctgaacccaaggataaagaggctttcgttaggtccttggtttataccccagactacgacagctttaccttggactcctatacctggccaaaagaggctatgaatgtgcagaccgtgtag

SEQ ID NO: 123279 - DNA, 1815 bp, synthetic construct
  misc_feature 1..1815: note = Description of Artificial Sequence: Synthetic coding sequence
  source 1..1815: mol_type = other DNA
atgggcgcagccctgggcacaggcacccgcttggcaccttggcctggccgagcctgtggagcactgccccggtggaccccgactgccccagctcaaggatgtcacagtaagcccggacccgccagacctgtgccactcaagaagcgaggatatgatgtcacacggaaccctcaccttaataaagggatggcgtttacacttgaggaaaggctacaactcggtatccacggcctgatcccgccctgcttccttagccaggacgtccagttgctgcggataatgcgatattacgaacgtcagcagtcagacttggataagtatattatactgatgactctgcaggatcggaacgagaagctattttaccgcgtgcttacaagtgatgtggagaagttcatgcctattgtttacactccaacagtgggcctggcctgtcaacattacgggctgacattccgcaggcctcgcgggttgtttattaccattcatgataaagggcatctggcgactatgctgaattcctggcccgaagataacattaaggctgtggttgttacggatggcgagagaatcctaggattgggggacttgggctgctatgggatgggcattcctgtcggcaagctggccctctacaccgcctgcggcggcgttaatccccaacagtgcctgcccgtactgctggatgtcgggacgaacaatgaggaactactccgagatcctctctacatcggcttaaaacaccaacgggtacacggaaaagcctacgatgacttacttgatgaattcatgcaggcggtgaccgataagtttgggattaattgtctgattcagttcgaagactttgccaacgctaatgccttccggttgctgaataagtatcgaaacaagtattgtatgttcaatgacgatattcagggcacagccagcgtggcggttgcgggcattcttgccgccctccggataacgaaaaataaactatccaaccatgttttcgtctttcagggagcgggagaggccgctatgggaatagcccatctgctggtcatggctcttgagaaagagggcgtcccaaaggccgaggccacacggaagatttggatggtggactcaaaggggctcatagtcaaagggcgtagccatctcaatcacgagaaggagatgtttgctcaggaccatcctgaggtaaactccctggaggaagtcgtgaggttggtgaagcccaccgctattattggagtggcagcaattgcaggcgcgttcaccgagcagatcttgagagacatggcatcctttcatgagaggccaatcatcttcgccctgagtaatccaacctctaaggctgagtgtactgccgagaaatgttatcgggtgaccgagggaaggggaatttttgcgtctggcagccctttcaagtctgttacactggaagacggtaaaaccttcattcccgggcaaggaaataatgcctatgttttcccaggcgtagctcttggagtgattgccggaggaataaggcacattccagatgagatttttctgcttactgccgagcagattgcacaagaagtgtccgagcagcacctgtctcaaggtcgactgtaccctcctctgtccaccattcgcgatgtgagtcttaggattgccatcaaagttctcgactacgcctataaacacaaccttgcatcatattacccggagccaaaggacaaagaagcctttgtgcgtagtctcgtctacacccctgactatgactcattcactttagactcctatacttggccaaaagaggctatgaatgtgcagaccgtctag

SEQ ID NO: 123280 - DNA, 1746 bp, synthetic construct
  misc_feature 1..1746: note = Description of Artificial Sequence: Synthetic coding sequence
  source 1..1746: mol_type = other DNA
atgggtgccgcactcggaacaggcactagactcgctccatggccagggcgcgcatgtggggcactgccccggtggacgccaaccgctcccgcacaggggtgccactccaagccaggacctgccaggccggtaccacttaaaaagaggggctacgacgtgacgaggaaccctcacttaaacaagggaatggcgtttactctagaggagcgactccagctaggtatccatggcctgattccaccatgcttcctcagccaagacgtccagctactccgcattatgcgatattacgaaagacaacagtccgatcttgacaaatacattatccttatgactctccaggataggaacgaaaaactcttttaccgggtgcttacatccgacgtcgaaaagttcatgcctattgtatatacccctaccgtgggactcgcgtgccagcactacggccttacgtttaggcgacccagaggtctgtttattaccatccacgataaagggcacctggccactatgttgaactcctggccagaagataacattaaggctgttgttgtgaccgatggagagaggattctgggactgggcgacctaggttgttatgggatgggaatccccgtggggaaactggctctctacactgcttgtggaggcgtgaatccccagcaatgtctcccggtactcctggatgtcggtactaataacgaggagctcctccgggaccccctgtatataggcttaaagcatcagagagtccacggtaaggcctatgacgacttactggatgagtttatgcaagccgtgactgacaagttcggaataaattgcttaattcaatttgaggatttcgcaaacgccaatgcgtttcgcctccttaataagtaccggaataagtactgtatgttcaatgacgacatccaagggaccgccagcgttgctgttgcgggcatcctggccgcccttcgcattactaagaacaagttatcgaatcacgtatttgtcttccagggagccggggaggccgcaatgggtattgcacatctgctcgtcatggccctcgagaaggaaggcgtccccaaggctgaggccacccggaagatttggatggtggactccaagggacttatcgtaaaggggagaagccatcttaaccacgaaaaggagatgttcgcccaggaccacccagaggtaaatagtttagaggaggtggtgaggctggtgaaaccaaccgcaatcatcggggtagcagctatagccggtgcattcacagaacagattttgcgcgacatggcctcatttcacgaacgtccgatcatctttgccctcagcaacccaacttctaaagctgagtgtactgccgaaaagtgctacagagtcaccgaggggaggggcatatttgccagcggatcacctttcaagagtgtgacgcttgaggacggtaaaacgttcattccaggccagggcaataatgcctatgtctttccaggagtcgctctcggcgttatagcgggtggcatacggcatatccccgacgagatatttctgctgacggctgagcaaatcgcgcaagaagtgtccgaacagcatttgtctcaaggccgcctgtatccaccccttagcacaattagagacgtctcactgcggattgcaattaaggtgctggactacgcctataagcataatctcgcatcctattacccggagcctaaagataaggaagcctttgtccgctccctggtctacacgtag

SEQ ID NO: 123281 - DNA, 1029 bp, synthetic construct
  misc_feature 1..1029: note = Description of Artificial Sequence: Synthetic coding sequence
  source 1..1029: mol_type = other DNA
atgggggccgcccttgggacaggcactcggcttgctccctggccaggccgggcatgcggagcgttgccgagatggactcctacagcgcctgcccaagggtgtcactccaagcccgggcctgctagaccggtgccactgaaaaaacgcgggtacgatgtaacccggaacccacatctcaataaggggatggcgtttactttagaagagcgtctgcaactcggaatacacggcctcatccccccctgcttcctgtctcaggatgtgcagttgttacgaattatgcgttattacgagcgccagcaaagcgatcttgacaagtacattatcctgatgaccctgcaagatagaaacgaaaaattgttctaccgggtgctgacatccgatgttgagaaatttatgcccatcgtatatacccccacagtaggtcttgcgtgccaacattacggcctgacctttcggaggccacgcggcctttttataactatccacgacaaggggcatctggcgaccatgctgaactcgtggcctgaggacaatataaaggcagtcgtcgtcacagatggagaacgtatcctaggccttggcgatctgggatgctatgggatggggatccccgttggaaaactcgccctgtacactgcttgcggcggggtgaatcctcagcagtgtctccccgtccttctggacgtgggaaccaacaatgaagaattgttaagggaccccctttatattgggctcaagcaccagcgcgtccacgggaaggcctacgacgacttgcttgatgaattcatgcaggctgtgacagataaatttggaattaactgtctgatacagttcgaggactttgccaacgctaatgccttcaggttgctcaataaatacagaaacaaatattgcatgttcaacgatgacattcagggtaccacatgtcacacattcagttgtccctggcatctgtgggcacaggtgatgtttcaacatattcctggacctatgggcttttccgagtggctcccaaggaactcatag

SEQ ID NO: 123282 - DNA, 189 bp, synthetic construct
  misc_feature 1..189: note = Description of Artificial Sequence: Synthetic coding sequence
  source 1..189: mol_type = other DNA
atgggggcggccttgggtaccgggactcgcctagcaccctggccaggacgggcctgcggtgcacttccgcggtggacacccacggcccctgcgcagggttgccatagcaaacccggacccgccagaccagtgcctttaaagaagcgtggttacgatgtcaccagaaacccccatctgaacaaggtctag

SEQ ID NO: 123283 - DNA, 186 bp, synthetic construct
  misc_feature 1..186: note = Description of Artificial Sequence: Synthetic coding sequence
  source 1..186: mol_type = other DNA
atgggagccgcgctggggacaggcacccgattggccccgtggcctggcagggcctgtggcgcacttccacgctggacacccacagcccctgcccagggatgtcactctaagcctggacccgcccgccccgtgccactgaaaaagcgcggatacgatgtgacgcgcaatccacacctgaacaaatag

SEQ ID NO: 123284 - DNA, 456 bp, synthetic construct
  misc_feature 1..456: note = Description of Artificial Sequence: Synthetic coding sequence
  source 1..456: mol_type = other DNA
atgggagcagccctgggcacaggtactcgactggctccgtggcctggacgggcatgtggggccttacctcgctggacccccacggcccccgcacagggctgccactcgaaaccaggacctgcccggcctgtcccactcaagaaaagaggttacgatgtgaccaggaatccacatttgaataaaggtatggcattcacccttgaggaacggttgcaactgggtattcacggattgatccctccctgtttcctctcacaagacgttcagctgctgagaatcatgcgatactatgagagacaacaaagcgatctggataagtacatcatcctcatgacccttcaggaccgaaacgagaagctgttctatagagttctgacctccgacgtcgaaaaattcatgcccatcgtttacacacccacagtggggctggcctgtcagcactatggcctcacatag

SEQ ID NO: 123285 - DNA, 240 bp, synthetic construct
  misc_feature 1..240: note = Description of Artificial Sequence: Synthetic coding sequence
  source 1..240: mol_type = other DNA
atgggcgccgcactcggaaccgggacacggttggctccatggcccggacgggcctgcggcgccttgccccgttggacacctactgctcccgcgcaaggctgtcactctaagcccgggcccgcaaggcccgtacccctgaagaaaagaggttacgatgtcacccggaacccacatctcaacaaggtgatggggcaacgagccggtaggcctgctctgcggagcaggggctgtcgaaaatag

SEQ ID NO: 123286 - DNA, 1815 bp, synthetic construct
  misc_feature 1..1815: note = Description of Artificial Sequence: Synthetic coding sequence
  source 1..1815: mol_type = other DNA
atgggcgctgcacttggaacaggaacccggctggcgccctggccgggccgtgcttgcggagctctaccccggtggaccccaacagcccctgcccagggctgccacagtaagcccggccccgcacggcccgtccctctgaagaagcgcggctacgatgtgacgaggaatccccatctgaataagggcatggctttcactctggaagaaagactgcagctcggtatccacgggctgatcccgccttgctttctgagccaggacgtgcaactgcttcgcattatgcggtattacgaacggcagcaaagcgatctggacaagtacattatcttaatgactctgcaggatcggaacgaaaaactgttttatcgtgtcctcacttctgatgtggagaaatttatgccaattgtatacacaccgacggtcggattggcgtgtcagcactatggtttgacgtttcgtcgccccaggggactctttatcactatacacgacaagggccatttggcgacaatgttaaatagctggcctgaggataacattaaggccgtcgtggtgactgatggcgagcgcattctaggcctgggcgacctgggttgttacggcatgggaatcccagtgggaaaactcgccttgtacacagcgtgcggaggcgttaatccccaacagtgtctcccggtcctgctagacgtggggaccaacaacgaggagctcctgagggaccctctgtatattggattaaaacaccagagagtccacggaaaagcctacgacgatctgttggacgagtttatgcaagctgttaccgacaagtttggtatcaattgcctcatccagtttgaggacttcgccaatgctaatgcgttccgcttgctgaacaagtacaggaataaatactgcatgttcaacgacgatattcagggaaccgctagcgttgcggtggctggaattttggccgcgctcaggatcactaaaaacaagctgtctaaccacgtgttcgtgtttcagggagcaggcgaggctgccatgggtatcgcgcacttacttgtgatggctctggaaaaggaaggggtcccgaaagccgaagcaactcgcaagatatggatggtggattctaaaggtctgatcgtgaagggcagatctcatctgaaccatgaaaaggagatgttcgcccaggaccaccccgaggtgaatagtctcgaagaggttgtgagattggtcaagcccacagctatcatcggcgtggctgctattgcgggagccttcacagaacagattctgagagatatggctagtttccacgagcgacccattatcttcgccttgtctaaccccacctcaaaagctgaatgtaccgcagagaagtgttatcgagtaaccgagggccgcggcatcttcgcgtccgggagcccgtttaagtcagtaaccttagaagatgggaagacgttcatacctggccagggaaataatgcttatgtgtttcccggcgtcgccctaggtgttatcgccggaggtattcgacacatcccagacgaaatctttctgctcacggctgaacaaatcgcccaggaagtctcagagcagcacctctctcagggcagattgtatcctcctttatcaacaatacgggacgtctccttacgtattgcgattaaagtccttgactatgcctacaagcacaatttagcctcctactacccagagccaaaggacaaagaggctttcgtgcggtccctcgtgtacaccccagactacgatagctttacattggactcttatacgtggccaaaggaggccatgaatgtccagaccgtttag

SEQ ID NO: 123287 - DNA, 759 bp, synthetic construct
  misc_feature 1..759: note = Description of Artificial Sequence: Synthetic coding sequence
  source 1..759: mol_type = other DNA
atggcattcacactggaggagcgtctgcagctgggaatccacggcctaatcccaccgtgttttctgtctcaggacgtgcagctgttacgaattatgcgatactatgagcgtcagcagagcgacctcgacaagtacatcatactgatgacactgcaagataggaatgaaaagttgttctatagagtgttgacatccgatgtagagaaatttatgccaatcgtgtacactcctacggtaggtcttgcctgtcaacattacggccttacttttcggcgtcccaggggacttttcatcacaatacacgacaagggtcacttagccacgatgttaaatagttggcctgaagataatattaaggcagtggtcgtgacagacggcgagcggatcctggggctgggtgatctgggctgctacggtatgggcattcccgtgggcaaactggccctctatacagcctgtggaggcgtgaaccctcagcaatgcttgcctgtcctgttggatgtcgggaccaacaatgaggaactccttagagaccccttgtacatagggctgaaacatcagcgggtccacggaaaggcctatgatgatctcttggacgaatttatgcaggccgttaccgacaaattcggaatcaattgcctgatccagtttgaagacttcgcaaacgctaatgccttccggctcttaaataagtaccgtaacaaatactgcatgttcaacgacgatatccaggcgccctcaaccgctcccgcaacatag

SEQ ID NO: 123288 - DNA, 1482 bp, synthetic construct
  misc_feature 1..1482: note = Description of Artificial Sequence: Synthetic coding sequence
  source 1..1482: mol_type = other DNA
atgagaggcttcggacctggattgaccgcgaggcgcctgcttcccttacgcctgcctcctcggccaccaggcccaaggctggcatctggccaggctgccggtgccttggagagggctatggatgagctgctgcggagggctgtccccccaacaccggcttatgaactgagggaaaagactcctgcacctgctgaggggcagtgcgccgattttgtatcattttacgggggactcgcagagaccgcacagcgcgcagagctacttggtcgcctggcacgcggctttggcgtggatcacggccaggttgccgagcagtcagcaggagttctgcacctgaggcaacagcaacgagaggcagcggttctgctgcaggcggaggatcggctccgatacgcgctggtccccaggtatcggggactgttccaccacatcagcaaactggatggcggtgttcgatttcttgtacagctgcgcgcagacttgctcgaagcacaggccctgaagcttgtagaaggaccagatgttagagaaatgaatggagttctcaagggaatgctcagtgagtggttcagctctggctttctgaatctggaacgcgtgacatggcacagtccatgtgaggtccttcagaaaatcagcgaagctgaggcagttcatcctgtgaaaaactggatggacatgaagcgccgggtcggtccttatcgaaggtgttactttttcagtcactgtagcacaccaggtgagcccctggtcgtgctgcacgtggctcttaccggcgatatttcaagtaacattcaggctatcgtgaaggagcatcctccttcggagacagaagaaaagaacaagatcactgcagccatcttctactccatctccttgacgcagcaggggctgcagggagtcgagctgggcacctttctgataaaacgcgtagtgaaagagctgcaaagggaattcccccacctgggcgtcttcagctccctttctcctattcccggatttacaaagtggcttctgggcttactaaatagccagactaaggagcatggcaggaacgaactttttacagacagcgagtgtaaagagatatccgagattacagggggtcccattaatgagaccctcaagctccttctttcttcctccgaatgggtccagagtgagaagctcgtacgggccttacagacccctttaatgcggctctgtgcctggtacttatacggcgagaaacacagggggtatgcgctgaaccctgtcgccaattttcatttgcagaatggggccgtcctctggcgcataaactggatggccgacgtgagtctgagaggtatcaccggctcttgtggactgatggcgaactatcgttacttcctcgaggagacgggtccaaattctacatcatacttgggttcaaaaattataaaagcgtcggagcaagtcctgtcactggtggcccaattccagaagaacagcaaactgtag

SEQ ID NO: 123289 - DNA, 558 bp, synthetic construct
  misc_feature 1..558: note = Description of Artificial Sequence: Synthetic coding sequence
  source 1..558: mol_type = other DNA
atggcaagaaagaagctcaagaagtttacaaccttagaaattgtcctatccgtgctgctgctggtgttattcataatttccattgtcctgattgtattattagctaaggaatccctgaaatccaccgccccagaccccgggactaccgggacaccagaccccgggacaacggggacacctgaccccggaaccactggcaccacccatgctcgcaccacaggaccacccgaccctggaactaccggcaccaccccggttagcgcagagtgcccagtggtaaacgaattagagcgaatcaattgcatcccagatcaaccaccaacaaaagctacatgcgatcagcgagggtgctgttggaacccacagggcgccgtctctgtgccctggtgctattattcaaaaaaccactcttatcacgtggagggcaacttagtgaataccaatgctggattcactgcaaggctgaaaaacctaccaagctcaccagtatttggaagcaacgtggataatgttctgctcaccgccgagtaccagacttcaaacaggtttcatttttag

SEQ ID NO: 123290 - DNA, 4989 bp, synthetic construct
  misc_feature 1..4989: note = Description of Artificial Sequence: Synthetic coding sequence
  source 1..4989: mol_type = other DNA
gctgtctctgtgccctggtgctactactccaaaaatcactcctatcacgtcgagggcaacctggttaataccaatgctggcttcacagctaggttaaaaaatctcccaagctccccggtgtttggatctaatgttgacaacgtgctgctcactgcagaataccaaacatctaaccgcttccacttcaaacttaccgatcaaaccaacaatcggttcgaggttccccacgagcacgtacagtctttctcaggaaatgccgcggcctctttgacctaccaagtcgaaatctctagacagccattcagtatcaaagttaccaggagatccaataaccgggttctgtttgatagctcaataggtcccctactgtttgcagatcagttcctccagctttctacgcgcctgccgtccactaacgtttatggccttggcgagcacgtgcaccagcaatacagacatgatatgaactggaaaacatggcctatctttaatcgggacacaacccccaatggtaacgggaccaatctctacggagctcagaccttcttcctgtgtctggaggatgcctccggactgtcctttggcgtgttcctaatgaattctaacgccatggaggtggtgctgcagccggccccagccatcacctatagaactattggagggattctggacttttacgtttttctcggcaatacccccgagcaggtcgtccaggagtacctcgaactgattggacgcccagctctgccatcttactgggcactcggctttcacttaagcagatatgaatacggaacgttggacaacatgcgggaggttgtggaacgcaaccgcgccgcacagttaccgtacgacgtgcagcacgccgatatcgactacatggatgagcgaagggacttcacttatgacagtgtggattttaaaggctttcctgagtttgtgaatgagttgcacaataacggccagaaactcgtgataatagtggaccctgctatctcaaacaactcaagctcttcaaagccctacgggccgtacgaccgcggctccgatatgaagatatgggtgaatagtagcgatggagttactccactgatcggggaagtgtggcccggtcagaccgtgttccccgactataccaaccccaactgcgctgtctggtggaccaaggagttcgaactgtttcacaatcaagtggagttcgatggcatttggatcgacatgaacgaagtaagtaacttcgtggacggctccgtctccggctgttccactaacaacctcaacaatcctccattcacccctcggatcctcgacggctatctcttctgtaaaaccctttgcatggacgctgtccaacattggggcaagcagtacgatattcataatctgtacggctacagcatggcagtggcaaccgcggaggcagccaagacagtttttccaaacaaacggagtttcattttaacgaggtctaccttcgctggcagcgggaagttcgccgcacactggctaggagataacacagctacctgggatgacctccgatggtctattccaggcgtccttgagtttaacctcttcggcattcctatggtgggaccagatatttgtggcttcgccctagacacacccgaggaattgtgtaggcggtggatgcagctgggagctttttatcccttcagccggaatcataacgggcaaggttacaaagaccaggacccggcctcattcggcgctgattccttattacttaattctagtcgacactacctgaacattagatacaccctgcttccgtacttatacaccctctttttccgagcacactcccgaggggatacagtggcgaggccacttctgcatgaattttacgaagataattccacctgggacgtgcatcagcaattcctgtggggaccagggctgctcatcacccccgtcctagatgagggtgccgagaaagttatggcctacgtccccgacgcagtatggtatgattacgagacaggatcccaggtgagatggcggaagcagaaggttgaaatggagctgccgggagacaagatcggccttcatttgcggggcgggtatattttcccaactcaacagcccaacactaccactctggcatccaggaaaaacccactgggtctaataattgccctggacgagaacaaggaggcgaaaggggaattattctgggataacggggagacgaaggacactgtcgccaataaagtatacttgctttgtgagttctcagttacccagaacagacttgaggtgaacatcagccaatccacgtataaagaccctaataacctggctttcaatgaaatcaagatcttgggtacagaggaaccctccaatgtgactgtgaagcataatggggttccttcacaaacctcacccacagtcacatacgattccaacttaaaagtggctattattaccgacattgacctgcttctaggtgaagcgtacaccgtcgagtggagcattaagataagggatgaagagaagatcgactgctacccagatgagaatggggctagcgctgagaattgtaccgctcggggctgcatctgggaggcaagcaattctagcggggttcccttctgctattttgtcaatgacctatactccgtgagcgacgtgcaatacaattctcatggagcaaccgcggacatctccttgaagtcttccgtttatgcaaacgcattcccttccacacccgtgaatcctctgcgcctcgatgtcacctaccataagaacgagatgttgcagtttaagatttacgatcccaataagaatcgttatgaagtgccggtcccattaaatatcccctctatgcctagtagcactcccgagggccaactctatgacgtgctcatcaagaaaaaccctttcggcatcgaaataagacgtaaatccacagggaccatcatttgggacagtcagctgctgggctttaccttctcagacatgtttatcaggattagcaccaggctgccttcaaaatacctgtacggcttcggcgagactgagcaccggagttacaggcgggatttggagtggcacacttggggtatgttctcccgcgaccagcctcctgggtataagaaaaacagttatggagtccacccttactatatgggactcgaagaagatggttctgcacatggggttcttcttttgaatagcaatgcaatggacgtgacttttcaacccctgcccgctctcacctaccggacaacaggcggtgtcctcgatttttatgtctttttaggcccgactcccgagctggtcacccaacagtacaccgagctgattggtcgtccagtgatggtgccatattggtcactggggtttcaactttgtcgatacggctaccaaaacgattccgagattgcaagtctgtatgatgagatggtggctgctcagattccctatgatgtgcaatattccgatatcgattatatggagcggcagctggattttactctttccccaaagtttgcaggatttcccgcactaatcaacagaatgaaggcagacggcatgagagtgatcctgatcctagatcccgccatctcaggaaacgaaacccagccttaccccgcatttacccggggggtcgaggacgacgttttcatcaagtatccaaatgatggggatattgtttggggcaaggtctggcctgactttcctgatgtggtggtaaacggatcccttgattgggactcgcaggtggagctgtacagggcctacgtggcatttcccgatttttttcggaatagcacggccaagtggtggaaacgggagatcgaggagttgtacaacaaccctcagaaccccgagcggtcccttaagtttgatggcatgtggatagatatgaacgaaccgagctctttcgtaaatggcgcagtctcaccaggttgcagagatgcatctttgaatcatccaccttacatgccccacctggaaagcagagacaggggactctcctccaagacactttgtatggaaagccagcagatcttaccggacggttccttggttcaacactataacgtgcataacctgtacgggtggagtcagactaggcctacctacgaagctgtgcaggaagtgaccggtcagcggggggttgttatcaccaggagtacgtttccctcgtcgggacgctgggccggtcactggcttggggacaataccgcagcctgggatcagctgaagaaatctattataggaatgatggaattctccctcttcggaataagctacactggggccgatatctgtgggttctttcaggatgccgagtacgagatgtgtgttaggtggatgcaactcggagccttttatccattctcaagaaaccacaacactatcgggactcggaggcaggaccctgttagttgggatgctgcttttgtgaacatttcccggaacgttctgcagactcgatataccctgctcccttatctgtacaccctcatgcaaaaggcacataccgaaggtgtcacagtggttcggccccttttgcatgaattcgtttccgatcaggttacctgggatattgattcccagtttttgctgggcccagctttcttggttagtcctgttttggaacgcaatgcacgcaacgtgactgcttatttcccaagagcccggtggtatgactattacacaggggtcgacataaacgccaggggcgagtggaagacactccccgctcctctggaccacattaacctgcatgtgaggggtggatatatacttccttggcaagagccggcgctcaatactcacttgtccagaaagaacccattagggctcataattgctcttgacgaaaacaaagaagcgaagggagaactcttctgggatgatggccagactaaggataccgtggcgaaaaaggtgtaccttctgtgcgaattttccgttactcaacaggtagtgttcctcaatatcgtgttcaactag

SEQ ID NO: 123291 - DNA, 5574 bp, synthetic construct
  misc_feature 1..5574: note = Description of Artificial Sequence: Synthetic coding sequence
  source 1..5574: mol_type = other DNA
atggcacgtaaaaaactaaagaaatttactaccctggaaatcgtactatccgttctccttttggtcctgtttatcatatctatcgtcctgatcgtgctccttgccaaggagagcctgaaaagtactgctccggatcctgggacaaccggcacgcctgatcctggcaccaccgggacccctgatcccggcaccacaggcacaacccacgctaggactactggcccgccagaccccggaacaacaggcacgacaccggttagcgcagaatgtcccgttgtcaacgagctagagagaatcaattgtatcccagatcaaccccccactaaggccacatgtgatcaacggggatgttgctggaacccccaaggcgcagtctctgtgccatggtgctattactcaaagaatcactcatatcatgtggaagggaacctcgtgaacacaaatgccggcttcaccgcccgcctgaaaaaccttcctagctcccccgtgtttggttctaacgtggataacgtcctgctgacagccgagtatcagacatccaaccggttccattttaagcttacggaccaaaccaacaacagattcgaggtgcctcatgagcacgtgcagagtttttctggtaatgctgcagcttctctcacttaccaggttgagatttcacgacaaccattttccattaaagtaactcggagaagtaataatcgggttctgtttgattcgtccatcgggccacttctgtttgcagatcagttcctgcagcttagcacacggctcccatcaactaacgtgtacggactgggggagcatgtgcaccagcagtacaggcacgatatgaactggaagacgtggcccatttttaacagagacactacccccaacggcaatgggactaacctgtacggagcccaaacattctttctctgtctggaggatgcatccggtctctcatttggtgtgtttctcatgaatagcaatgcaatggaggtggttctccagcctgccccagctatcacttatcggaccattggaggcattctcgacttttacgtgttccttggcaacaccccagagcaggtcgttcaggaatacttggagctaatcgggcggcctgctctgccatcatactgggcactggggtttcatctcagcagatacgagtatgggactctcgataacatgagagaggttgttgaacgcaatagggccgcccaacttccttacgatgtgcagcatgcagatatagattacatggatgaacggcgggacttcacctacgacagtgtggatttcaaaggatttcctgaatttgtgaatgagctccacaataatgggcagaagctggtgattatcgttgaccctgccatttccaacaactcgagctcatccaaaccctacggaccctatgatcggggcagcgatatgaaaatttgggtcaactctagcgatggggttactccactgattggggaggtctggccaggtcagactgtgtttccagattacactaatccaaactgcgctgtctggtggaccaaagagttcgagttgttccacaaccaagtggagttcgatggcatatggatcgatatgaatgaggtgtctaacttcgtagacgggtcagtgtccggctgtagtaccaataatctcaacaaccctcctttcactccaaggatcctagatggatatctgttctgcaagaccctctgcatggatgcagttcagcactggggaaagcagtacgatatccataacctctatggttactccatggctgtggccacagccgaagctgcaaagacggtattccccaataagaggagctttatactgaccagaagtacgttcgcgggatccggcaaattcgccgcacattggctaggggacaacaccgcaacctgggacgacttgcgctggtcaattcccggcgttcttgagttcaacctgttcgggattcctatggtaggcccggacatctgcggatttgccctggatacaccagaggagttgtgccgccggtggatgcagctcggcgccttttaccctttttcccgtaatcacaacgggcaggggtacaaggatcaagacccggcgtctttcggggccgatagccttttgctgaactcaagtagacactatcttaatatccgatacacgcttcttccttatctctataccttgttcttccgggcgcattcgcggggtgacaccgtagctcgtcccctccttcacgaattttacgaggataacagtacctgggatgtacaccagcagtttctgtgggggcccgggctgctaattacgcccgtcctggacgagggagcagagaaagtaatggcctatgtgcccgatgccgtctggtacgattatgagacaggttcccaagtgcgatggcgtaagcaaaaagtggaaatggaactgccaggtgacaaaataggactccatcttcgtggaggatatatatttccgactcaacagccaaacaccacaaccctggcctctcggaaaaatccactcgggctaattattgctctggacgagaataaggaggctaagggagagctgttttgggataacggagagactaaagatactgtcgccaacaaagtgtatctgttatgcgagttcagtgttacacagaatcggctggaagtaaacatctcccaaagtacctataaagaccccaacaatctagcattcaacgaaatcaagattctggggaccgaagagccctccaacgttaccgtgaaacacaacggggttccttctcagacttcaccaaccgtgacctatgactctaacctaaaggtcgcaatcattaccgacatagacctgctgctcggggaagcctacaccgtcgagtggtccattaaaatccgagacgaagagaagattgactgctatcctgatgagaacggagccagcgccgagaattgcactgctcgtggttgcatttgggaagcctccaattctagcggcgtcccgttttgctacttcgtgaatgatctgtacagtgtgtcagacgtacaatacaatagtcacggagctacagctgacatctctttaaaatcatccgtgtacgctaacgcttttccctctacccccgttaatcctttgcgactggacgtgacttaccacaagaatgagatgttgcagttcaagatctatgatcccaacaagaaccggtacgaagtgccggtgcctctcaacataccctccatgccctcttctactccagagggccagctgtatgatgtcttgatcaaaaagaatccttttggcattgagatccggagaaagagcacgggaactattatctgggattcccagctgctgggttttacattttctgatatgttcatccgaatatctacgagactaccatctaaatatttatatgggttcggggagacagaacacagatcatacagacgggatctggagtggcacacgtggggaatgttctcgcgagatcagccaccggggtacaagaagaactcctacggcgtccatccttattatatggggcttgaggaggacggtagcgcgcacggtgtcctgctgctgaactctaatgccatggacgttacttttcagccactgcctgcactcacttatcgcaccaccggtggcgttctggacttttatgtgtttctggggccaacccccgaactggtgacccagcagtacaccgaactaatcggacgtcctgtaatggttccatactggtcgcttggatttcagttgtgtcggtatggctaccagaacgacagtgagatcgcatcactctacgatgagatggtcgccgcccagatcccctacgacgtgcagtactccgatatagactatatggagagacaattggatttcactctgtctcctaaatttgccggatttccagccttgattaatagaatgaaagccgatggaatgcgggtcatcctcattctcgaccccgctatcagcgggaatgaaacccagccctaccccgcttttacccggggtgtggaagacgatgtcttcataaaataccccaacgacggagatatcgtatggggtaaggtttggccagacttcccagatgtcgttgtgaacggaagcctggattgggactcccaagtggagttgtatcgcgcctatgtggccttccctgacttctttaggaattccacagccaaatggtggaaaagagagattgaggagttgtataacaacccccagaacccagagcggtctttaaagtttgacgggatgtggattgacatgaatgagccatccagctttgtgaacggggctgttagtcctggttgcagagatgcatctctcaatcaccccccatacatgccgcacctcgagtcccgagatcgtggcctttcatctaaaactctgtgcatggaaagccagcagatccttcctgacggaagcctggtacagcattataacgttcacaacctctatggctggtcccagacccgccccacttatgaggccgtgcaggaagtgaccggccagcgtggagtggtgataactaggtcaacatttccgagttctggtaggtgggccgggcactggctgggagacaatacagcggcctgggatcaactcaaaaaaagcattattggaatgatggagttttccctatttggaatctcttacaccggggctgatatctgcggattcttccaggacgctgaatatgaaatgtgcgtgaggtggatgcaactcggcgcgttttacccattttctcgcaaccacaacaccatcgggaccaggcggcaggacccggtttcgtgggatgttgcctttgtcaatatatcccgtactgtcctgcagacaagatataccctgctaccctacctgtatacacttatgcataaggcacacacagagggcgttacagtggtgcgcccactcctgcacgagttcgtcagtgaccaggtaacttgggatatcgacagccagttcttgctcggacccgcctttcttgttagccccgtcctggagagaaacgctcgcaacgtaaccgcttacttccccagagcacgctggtacgattactatactggagtggacattaacgctagaggggagtggaaaacactgcccgctccattggaccatatcaatctgcacgtgagaggagggtatatccttccctggcaagagccagctctgaatactcatctttcgcgccagaagttcatgggctttaaaattgcgctcgacgacgaagggactgccggtgggtggttattttgggatgacggccagtcgattgacacttacggaaaggggctgtactatttggcatcatttagtgcctcacagaacaccatgcaaagccatatcattttcaacaattatattaccggtacaaaccctcttaagcttggatacatagagatctggggagtgggatccgtgccggtaacatcagtgtcaatcagcgtgagcggaatggtcattaccccaagttttaacaacgatcctacaacccaggtcctgtccattgacgtgaccgacagaaacatctctctgcacaacttcacatcgctgacgtggatcagtacgttgtag

SEQ ID NO: 123292 - DNA, 2061 bp, synthetic construct
  misc_feature 1..2061: note = Description of Artificial Sequence: Synthetic coding sequence
  source 1..2061: mol_type = other DNA
atgctactgagaggagtcctgctcgcactgcaggccctccagttggcgggtgcacttgatctgccagccggcagctgcgcttttgaggaaagtacgtgtgggttcgactccgttctggccagtcttccatggatccttaacgaggaggggcactacatctacgtggataccagttttggcaagcagggggagaaagccgtcttactgtccccagatctgcaggctgaagagtggtcttgtctcaggctcgtctaccagatcactacatcttctgaatcgctgtccgatccgtcacagctcaacctgtatatgagattcgaggatgagtccttcgataggctgctctggtccgccaaagagccttccgactcttggctcatcgcgagtttagatttacagaactcaagcaaaaagtttaagatcttaatcgaaggagttctgggccagggaaacaccgcgtcaatcgctctgtttgagattaaaatgaccactggatactgcattgaatgtgattttgaagagaatcacttgtgtggctttgttaaccggtggaaccctaatgtcaattggtttgtggggggcggatctattagaaatgtacacagcatactgccccaggatcacacattcaagtccgagctgggacactatatgtacgtcgattcagtgtacgtcaagcatttccaggaagtggcccaactgatctcgccactaactaccgcacccatggcaggctgcctgtcattttattatcagattcagcaaggaaatgacaatgtcttctcattgtataccagagacgttgccggcttatacgaggagatttggaaggcagaccgccccggcaacgcagcttggaatctggctgaggtggaattcagcgctccttaccccatggaggttattttcgaggttgcattcaatggtccaaaaggagggtacgtggcattagacgatattagctttagcccagttcattgccagaaccagacagagctgctcttctccgccgtagaagccagctgcaactttgagcaggacctgtgtaatttttaccaagacaaagaaggccccggctggacccgcgtcaaggttaaacctaacatgtaccgggccggagatcacactaccggccttggttattaccttctggcaaatacaaaatttacctctcaaccaggttatattggtcgcctgtatgggccaagcctgcccggcaatctccagtactgcttgagattccactacgccatctatggatttctcaaaatgagtgacaccctggcagtctacatcttcgaagaaaaccatgtggtgcaagagaagatctggagcgtgttagagtcgccacgaggggtctggatgcaggccgagatcaccttcaaaaagccgatgccgacgaaggtggtttttatgtctctgtgcaagtcattttgggattgtgggttggtcgccttggacgatatcacaatccagctaggcagctgttcttccagtgaaaaattgccaccaccaccaggtgaatgcacctttgagcaagacgagtgtacctttacacaggagaaacggaaccgttcgagctggcatcgaagaagaggcgaaacaccaacaagttatacagggccgaagggcgaccacacaactggggtcggctactacatgtacattgaggcatcacacatggtttacggtcagaaggctcggctcctttcccgccccctgagaggtgtgtccggaaagcactgtcttacattcttctaccatatgtacggtggaggcaccgggttattgtcagtctacctcaagaaggaagaggatagtgaggagtccctgctgtggaggcgtcgaggagagcaatccatcagctggcttcgggcactgatcgagtatagctgcgaacgccaacatcagatcattttcgaagccatccgaggagtgtctatacgctcagatattgccatcgatgatgtcaaattccaggctgggccgtgtggcgagatggaagacaccacccagcagagctcgggttatagcgaggacctgaacgagatagagtactag

SEQ ID NO: 123293 - DNA, 2880 bp, synthetic construct
  misc_feature 1..2880: note = Description of Artificial Sequence: Synthetic coding sequence
  source 1..2880: mol_type = other DNA
atggaagtaacttgcttgctgctccttgccctcattccattccattgccgaggccagggggtgtatgctcccgcccaagcgcagatcgtgcacgccggccaggcctgtgtggtcaaggaggacaacatctcagagcgagtgtatacaatcagggagggagatactctgatgcttcaatgtctcgtaactggccatcctaggccccaagttcgttggaccaaaaccgccggctcagctagtgataagtttcaggagacatctgtttttaatgaaaccctccgcattgagaggatcgcccggacacaaggagggcgatactactgcaaggctgaaaatggggtgggggtgccagccattaaatcgattcgcgttgacgtccagtatctcgatgaacccatgctcacagttcaccagacggtcagtgacgtgagggggaatttctaccaggagaaaaccgtcttcctgcgatgcacagtaaactcaaaccccccagccagatttatatggaaacgcggcagcgataccctgagccattctcaggataatggagttgacatctacgagcccttatatactcagggagagaccaaggtgttgaagctgaagaacttgaggccgcaggactacgcatcttatacatgccaggtctctgtgcgaaacgtttgtggaatccccgataaagctattaccttccggctgactaacactacagcaccccccgctctcaagctcagcgtcaatgagacactggtggtgaatccaggcgagaatgtcaccgttcagtgcctgcttacgggcggcgatcccttgccccagctccaatggtctcatgggcccggtcccctccctctgggggctctcgcacagggtggcaccctgtcaatacctagtgtgcaggccagggacagtggatactacaactgtaccgctactaacaacgttgggaaccctgcaaagaaaaccgtcaacttactcgtccggtccatgaaaaacgctacattccagattaccccagacgtcattaaggaatccgagaatatccagttagggcaggacttgaagctttcttgtcacgtggacgctgtaccccaggagaaagtcacataccaatggttcaagaatggaaaacccgccaggatgtctaagcggctgctcgtcacgagaaacgacccggaacttcccgctgttacctcttctcttgagttaattgacctccacttttccgattatggaacttatctttgtatggcatcctttccgggcgctccggtgcccgacctgtcagttgaagtgaatatctcatccgaaaccgtgccacctacaatctccgtacccaagggcagggctgtggtcaccgttcgcgaagggagcccagccgaactgcaatgcgaagttaggggaaagccccggccacctgtgttgtggagccgggtggataaggaagccgccctccttccctctggactgccattggaggagactccggatggtaaactgagactagagcgggtgtctcgtgatatgagcgggacatacagatgccagaccgcccggtataatgggttcaacgtgcgacctagggaggcccaggttcagctgaatgtgcagagcccttgttttccacccgaagtcgaaccttctagtcaggacgtccgccaggctctcggcagacctgtgctgttgagatgtagcctgttacggggctctccccagcgcatagcctcagctgtctggcgttttaaagggcagcttctgcctccccctcccgtggtgcccgctgccgccgaggccccggaccacgcggaattgagattggatgctgtcacacgggattctagcggctcatatgagtgttcggtctctaacgatgtggggagcgccgcctgcctgttccaggtctccgcaaaagcttactcgccggagttctacttcgacacccccaaccccaccaggagtcataaactcagcaagaattactcatacgtactgcagtggactcagcgagaacccgatgccgtggatcctgttttaaactaccgcttgtcgatccgacagctgaatcagcataatgctgtcgtcaaggctatccctgttcggcgagttgagaagggccagcttttggagtacatcttgaccgacttgagggtgccacatagctacgaggtgcgcctcaccccatataccacctttggggccggagacatggccagccgaataattcattataccgagctgcttgccttgcggactctatcttccgacaatacctgtcactttgaggacgaaaagatctgtggctacacgcaggacctgaccgacaattttgactggacgagacagaatgcgttaacgcagaaccccaagcgctcccctaatactgggcctccgaccgatattagcggcactcctgagggatactatatgtttatcgaaactagcaggccccgagagctgggagaccgagcgagattggtctccccgttgtataatgccagcgctaagttctattgcgtctcatttttctatcacatgtatggcaaacatatcggttcgctcaatctcctagtgaggagccgcaataaaggtgcactggatacccatgcttggtcgctttccggcaataagggcaacgtctggcaacaggcacatgtacctattagcccctctggtcccttccagattatttttgaaggcgtgcggggacctggatacttgggggacattgctatcgacgacgtgaccctcaagaagggagagtgcccaaggaagcagactgatcccaataaggtggtggttatgcctggctctggcgctccctgccagtcttctccgcagctgtggggccctatggccatattcctcctcgcgctccaacgatag

SEQ ID NO: 123294 - DNA, 2868 bp, synthetic construct
  misc_feature 1..2868: note = Description of Artificial Sequence: Synthetic coding sequence
  source 1..2868: mol_type = other DNA
atggaggtcacctgcctcttacttctggccctaattccgttccactgcaggggccaaggtgtgtatgcacctgcacaggcacaaatcgtgcacgccggccaggcctgcgtagtgaaggaggataacattagcgagagagtgtatacaattcgtgaaggtgatactctgatgctgcaatgcttagtgactgggcaccccagacctcaggtgaggtggacaaagactgcaggttccgcttccgataaattccaggaaacatctgtcttcaacgagaccctgcggattgagaggatagccaggactcaaggaggtcgctattattgcaaggcagagaacggagtgggggttcctgccattaagtccatccgggttgatgtgcagtaccttgatgagccaatgctgacagtccatcagaccgtgagcgacgtgcgaggaaatttctaccaggagaagactgtgtttctgagatgtaccgtgaactccaaccctcctgccagatttatttggaagcggggctccgataccctgagccatagtcaggacaacggggttgatatttacgagccactctacacccagggcgaaacaaaagtgctgaagctaaaaaatcttcgccctcaggactacgcatcatacacctgccaagtgagcgttcgcaacgtttgtgggattccagataaagccatcaccttcaggctgacgaacaccaccgccccacccgccttgaagctgagcgtgaatgagaccctggtggtgaatcccggagagaacgtcacggtccaatgtcttttaaccggcggcgacccgctgccccaactccagtggtcccacggacccgggccactgcccctcggcgcactcgcacagggcggcacgctgagtatcccctccgtgcaggccagggactctggatattacaactgtaccgcaactaataatgtcggcaacccagctaagaagactgtgaacctactcgtgcggagcatgaaaaatgccacttttcagataacccctgatgttattaaggaatctgagaatattcagctcggacaggatttgaaactgtcctgtcacgttgacgccgtgccccaggaaaaagtgacatatcaatggtttaagaacggcaaaccagctcgtatgagtaagagactgcttgtgacaagaaatgatcccgagctgcctgccgtcaccagtagtctggaacttatagacttacacttctccgactatgggacatacctttgcatggccagttttccgggggccccagtgccagacctcagcgtcgaggttaacattagttccgaaaccgtcccacccacaatctccgttcccaaaggaagagccgttgtgacagtcagagaggggtccccggctgagctgcaatgcgaagttagagggaagccgaggcctccggtcttgtggagcagagtggacaaagaggcggctctactcccctccggtctcccactagaagaaacccctgatggaaagttgaggctcgagagagtgagccgggacatgagcggtacgtacagatgccaaacagcccgctacaacgggttcaacgtccgtcctcgcgaggcccaggtgcaacttaacgtgcagttcccccccgaagtcgaaccttcatcccaggacgtccgtcaggccctgggccggcccgtccttttacgatgtagtctccttagaggatccccccagcgaatagcctcagcagtgtggcgattcaagggacagctcctgccacctcccccagtcgtgccagccgctgccgaggcacctgatcatgccgaactccgtttggatgcggtcacgagagactcatcagggtcttatgagtgcagtgtcagcaatgacgtgggttcagccgcctgcttgtttcaggtgagtgcaaaagcatacagccccgagttctattttgacacccctaaccccactagatcacacaaactttccaagaattactcctacgtcctgcaatggactcaaagagaacctgacgctgttgacccagtgttaaattaccgcctgagcattcgccagttgaaccagcacaacgccgtggtcaaagccatacccgtgcgccgtgtcgagaaaggacagttgcttgaatacatactgactgatctgagggtaccacatagctacgaggtccgactcaccccttatactactttcggggcgggcgatatggcttctaggattatccactatacggagcccattaactcaccaaacctgagtgataatacatgccactttgaagatgagaaaatttgtggctacacccaggacctcacagataacttcgactggacacgtcagaatgcacttacccagaatcctaaaaggtctcctaacaccggccccccgactgacatcagcggtaccccagaaggctactatatgtttatcgaaacctcccgcccaagggagctcggggatagggctaggctggtaagtccactgtacaatgcctcagccaagttctattgcgtttctttcttttaccacatgtacggtaaacacataggctcactgaatcttcttgttcgtagcagaaacaagggggctttggacacgcacgcctggagcctgtccggaaataagggtaatgtgtggcagcaggcacacgttcctatttctccatccggcccttttcaaatcattttcgaaggcgtcagaggacctggatatctgggcgatatcgcgattgacgacgtcaccctgaagaaaggtgagtgcccccgtaaacagaccgatcctaataaggtggtagtgatgcccggctccggtgccccttgccagtcaagcccacaactctggggccccatggcaatattcctcctggctttgcaacgatag

SEQ ID NO: 123295 - DNA, 2922 bp, synthetic construct
  misc_feature 1..2922: note = Description of Artificial Sequence: Synthetic coding sequence
  source 1..2922: mol_type = other DNA
atggaggtgacttgtctgctccttctggctcttattccctttcattgcagagggcaaggagtctatgcacctgcccaggcgcagatcgtccatgcaggacaggcctgcgtggtgaaggaggataacatatctgagagagtgtacaccatccgagagggtgatacacttatgctccaatgccttgtgactggccatcctcgaccacaggttaggtggaccaaaaccgctgggtctgctagcgataaattccaggagaccagcgtgtttaatgagacactgaggatcgagcgcatagctcgcacacagggcggtcgctactattgcaaagctgagaacggagtcggtgttcctgccataaagtcgatccgagtcgacgttcaatatttagatgagcctatgttaacggttcaccagaccgtgtccgacgtgagaggaaatttttatcaagagaaaactgtcttcctgcgctgcacagtcaattccaacccccctgctcggttcatttggaaaaggggtagcgacaccttgtctcactcccaggataatggggttgatatctatgagccactctatacccagggtgaaaccaaggtgctcaaacttaagaacctacgcccgcaagattatgcaagttacacgtgccaggtctcagtccgcaatgtgtgtggcattcccgataaagccatcacctttcgcctgaccaacactacagccccgcctgctctgaagttaagcgtaaatgaaacgcttgtggtcaatccgggagagaatgtgacagtgcagtgtctgttgactggcggagacccactgccgcagcttcaatggtcccacggacctgggcccttacctctgggagctttggcccaaggaggtactctcagtatcccctcagttcaggccagggacagtgggtattacaattgcactgccacaaataatgtgggtaatcctgccaaaaaaacagtgaatcttcttgtaaggtcaatgaagaatgcaaccttccagattactcccgatgttatcaaagaatccgagaatattcagctagggcaggatctgaaattgagttgccatgttgatgccgtcccccaggaaaaagtgacttaccagtggtttaagaacgggaaacctgcgcggatgagcaaacggctgctggtgactcgcaacgatccagaactccctgccgtaacctctagcctggaattaatcgatctacacttcagcgattacgggacctacctgtgtatggccagctttcccggcgccccggtccccgacctgtctgtggaggtgaatatctctagcgaaaccgtccccccgaccataagcgtacctaagggcagggccgtagttaccgtgagggagggaagccctgctgagttgcaatgtgaggtgaggggtaaaccaagaccacccgtactttggagtagggtggataaagaggccgcgcttcttccgtctggtctgccactggaggagacacctgacggcaagctgcgtctggagcgagtgtcacgggacatgagtggaacttataggtgccagaccgcgcggtacaatggctttaatgtgcgccctcgggaagcccaagttcaactgaatgttcagttcccgccagaggttgagcctagctcccaggatgttagacaagcattgggcaggccagtgcttctgcgctgttcgctgctgcggggatctccccaaagaattgctagtgccgtgtggaggtttaagggtcaactgctgcctcctccccccgtggtcccagccgccgccgaggccccagatcacgccgaactaaggctggacgcggtgacgcgcgactcatctggatcatacgaatgtagcgtaagtaacgatgtgggaagcgcagcgtgtctgttccaggtgtcagccaaggcttattcaccagagttttattttgatacaccaaatccaacccgttcgcacaagctgagcaaaaattacagctacgttcttcagtggacacagagggagccagacgccgtggatcctgtcctgaactatagactcagcattcggcagctgaatcagcacaacgccgtggtcaaggcgattcccgtgagaagggtcgagaaggggcaactcctcgagtatattttgacggatctgcgcgttccccactcctacgaggtgagactgacaccttacaccactttcggagccggcgatatggccagcaggatcatacactacacggagccaattaacagccctaacttgtcagacaacacgtgccatttcgaggatgagaaaatttgtggctacacacaggatctgaccgataacttcgactggacgcgacagaacgctctgacccagaaccccaagaggtctcctaatacaggcccccccacagacatctccgggacacctgagggatactacatgtttatagagacatctaggccacgggaattgggagaccgcgcacgcctagtgtcccccttgtacaacgcctccgccaagttttattgcgtgagctttttttatcacatgtatggtaagcatataggctctcttaatctcctagtgcgcagccgcaataagggcgcactcgatacccacgcctggagtctctcaggcaacaaggggaacgtgtggcagcaagctcatgtgcccatcagcccgtctggcccttttcaaataatctttgaaggcgtccgagggcccggctatctgggtgacattgctattgacgacgtaacactgaagaaaggggagtgcccccgaaagcagacagaccccaacaagggtgccaggcgggagggggggggaggtgccgaatccggtggctcgtgtgcctggagaggcttcctgtctgtagagggaggctgtctcgggcttaatcgggggtccgagtgcctgtctgatggaaaccacgtcgctttgacagtctag

SEQ ID NO: 123296 - DNA, 2184 bp, synthetic construct
  misc_feature 1..2184: note = Description of Artificial Sequence: Synthetic coding sequence
  source 1..2184: mol_type = other DNA
atggtttcatttaggctgtcgaacaagacagcttctccctccatcaaactcctggtagacgaccccatcgttgtcaacccaggagaagccatcacactggtctgtgtgacaactggaggggagcctgctccgtcactcacctgggtacggagcttcggcaccctgcctgagaaaactgtcctgaacggcgggactcttacaataccagcaattacatctgatgacgccgggacctactcctgcattgccaacaacaatgttggtaatcctgccaagaaatcgacaaatatcattgtgagagccctgaagaaagggcggttctggataacccccgacccatatcacaaggatgataatatacagattgggagggaagtgaaaataagttgtcaggtggaagcagttcccagtgaggaactcaccttctcttggtttaaaaatggaaggcctttgcgaagtagtgaacgaatggtgattacccaaactgacccggacgtaagccccgggaccacgaatctcgacattatcgacctgaaatttactgacttcggcacctacacgtgcgtagccagtctgaaaggaggagggatctctgacatatccatagacgtgaacatttcaagcagtaccgtgcccccgaatttgactgtgcctcaggaaaagagcccactggtaactcgagagggggacaccatcgagctgcagtgccaggtcactggaaagccaaagcccattatactatggtcccgcgccgataaagaggtggctatgcctgacggatctatgcagatggagtcctatgatgggaccctcagaatcgtcaatgtgtcgcgggaaatgtcaggaatgtatagatgccagacatcccaatataacgggttcaatgtcaagccgcgcgaagctttagtgcagttaatcgtccaatacccacccgccgtggagcctgcctttttggaaatccgccaggggcaagatcggagcgtgactatgtcttgccgtgtgttgcgagcatatcctatccgagtgctgacttatgagtggcggctcgggaacaagctcttacggacaggccagtttgatagtcaggaatacaccgaatacgccgtaaaaagtctgtctaacgaaaactatggggtgtacaactgttcaatcatcaacgaggccggggccggacgttgtagcttcctggtcaccggcaaagcgtatgcgccagagttttactatgatacttataacccagtgtggcagaaccgccatagggtgtacagctacagcctgcagtggacccagatgaatccggatgctgtcgaccgaattgttgcataccgtctggggatccgacaggcaggccagcaaagatggtgggagcaggagataaagataaacgggaacatccagaagggagagcttataacatataacctgactgagttaataaaaccagaagcttatgaagtgcggctgacccctctgaccaagttcggtgaaggcgactccactatccgggtgataaagtattctgccccagtcaatcctcatctgagggagtttcactgtgggttcgaagatggcaatatttgcttattcacccaggatgataccgacaactttgattggacaaagcagtctacagccacaagaaacacgaaatacaccccaaatacaggcccaaatgccgaccgatctggatccaaagagggtttttatatgtacattgaaacatctagacctcgcctagagggagaaaaggcgagactgcttagccccgtgttcagcattgcacctaagaacccgtatggcccaacaaatacagcctactgtttttcctttttctatcatatgtacggacagcacatcggcgtgttgaacgtatatctacgcttaaaagggcaaacaacaatcgagaatcctctgtggtcctcctcggggaataagggacagcgatggaatgaggcacacgtgaatatctacccaatcacaagcttccagttaatatttgaggggatacggggcccagggatcgagggcgacattgctatcgacgacgtgtctatcgctgagggagaatgtgccaaacaggatcttgccaccaaaaattcagtagacggcgcagtgggcatactcgtgcatatttggctgtttccgatcattgtgctgatctctatcctgtcccctcgccgctag

SEQ ID NO: 123297 - DNA, 477 bp, synthetic construct
  misc_feature 1..477: note = Description of Artificial Sequence: Synthetic coding sequence
  source 1..477: mol_type = other DNA
atgtacatcgagactagccgtccaagactggagggagagaaggccaggcttctgagccctgtcttttctatagcgcccaaaaacccttacggccctaccaacaccgcctactgtttcagtttcttttaccacatgtacggccaacacatcggagttctgaacgtatacctgcgactgaaaggacagacgactatcgagaatccgctgtggtcctcctccggcaataagggccaaaggtggaatgaggctcatgttaacatctaccccatcacatcatttcaactgatttttgagggaatccgaggccccgggatcgagggcgacattgcaatcgacgacgtgagcatcgctgaaggcgaatgcgcgaaacaggacctggctaccaaaaattccgtggacggagctgtgggaatcctggtccatatctggctgtttccgattatcgtcctgataagcattctgtcccctcgccgatag

SEQ ID NO: 123298 - DNA, 3078 bp, synthetic construct
  misc_feature 1..3078: note = Description of Artificial Sequence: Synthetic coding sequence
  source 1..3078: mol_type = other DNA
atgtctgtgtggtcggctggtctgctccggtctgcaaggaggagacggcgaggccggaccgacggaaggagattcctacttaggagggcggtgcctggccacctcggtctggcacgcgccagagttgagagagcatggctggcagcaggactgctcaaggtgccactgaggacaccttgggccgggtatgtacatgtgcacgtcaaaatggacctcttatatggtctggtctggctgctcactgtgctcctggaaggtataagtgggcagggcgtctatgcccctccaacagttaggatcgtgcactccggacttgcctgtaatattgaggaggagaggtatagtgagcgagtttataccatccgggagggtgaaacattggagttaacatgcctggtaaccgggcatccaagaccgcagattcgctggaccaagactgcaggatcagcgtcggataggttccaggactcttcggtattcaacgagactctgaggatcacaaatattcagcggcatcaggggggacgctactattgcaaggcggaaaacggtctcgggtccccagccatcaaatcgatccgagtagatgtgtattacttagatgaccctgtagtcaccgtacaccagtcaattggggaagctaaggagcaattttattacgagcgcaccgtgttcctgcggtgcgtggctaatagcaaccccccggtgcgctatagttggcggaggggccaggaggttttattgcagggctccgacaaaggagtcgaaatctacgaaccgttctttacgcagggcgagactaagattctgaagctgaagaacctgcgcccacaggactatgctaactattcatgcatcgcctccgtgaggaatgtctgcaatatccctgacaaaatggtttcctttaggctgtcaaacaaaacagcctccccttccattaagctgctggtggatgaccctattgttgtgaaccctggggaagcaataactctagtgtgcgtgaccacaggtggagagcctgccccttctcttacctgggtgaggtcgttcggaaccctgcctgaaaaaactgtgcttaacggtggaaccttgacaatccctgccatcacaagtgacgacgctggaacctactcatgtatagcaaacaacaatgtgggaaatccagccaaaaagtccactaacattattgtgagggcactcaaaaaagggaggttctggatcacacctgacccgtatcataaggatgacaatatacagattggtagggaggtgaaaatttcatgccaggtcgaggctgtaccgtccgaggagctcacatttagctggtttaagaatggccgacccctgcgttcctctgagaggatggttatcactcaaacagacccggacgtgagtccaggcaccaccaatttagatatcatagatctgaagttcacagactttgggacttacacttgcgttgcttccctcaaaggaggaggaatctcagatatatctatcgacgtgaatatctctagctccactgtcccacccaatctaacagtgccacaagaaaagtcaccgctcgttactcgcgaaggcgacaccatcgaactgcagtgccaagtcactggcaagcccaagcctatcatactgtggagccgagcggacaaggaggtagctatgcccgatggcagcatgcagatggagtcttatgacgggactttgagaatcgtcaatgttagtagagagatgtctggcatgtatcggtgccagacatcccagtataatggatttaatgtgaagccacgggaggccctcgtccaacttatcgtacagtaccctcccgctgtggagcccgcctttctggagattcggcaagggcaggacagaagcgtcaccatgtcttgtcgcgtgctacgggcataccctattcgtgtcctcacttatgaatggcggttgggcaacaagctgttaagaactggccaattcgacagccaggagtacacagaatacgcagtaaaaagccttagcaacgagaattacggggtgtataattgctccatcattaatgaggccggcgcgggcagatgcagtttcttggttacaggaaaggcctacgcccccgagttctactacgacacctacaaccccgtgtggcagaatcggcaccgggtttattcttatagcctgcagtggacacaaatgaaccccgatgctgtggacaggattgtggcatacagacttggaattcgccaggccggacaacagcgctggtgggagcaggagattaagattaacggcaacattcagaaaggtgagctaataacttacaacctgacggagctgatcaaaccagaagcctatgaggttaggcttacacccttgacaaagttcggtgagggagactcaacaatccgcgtgattaaatatagcgctcccgttaatcctcaccttcgtgagttccattgtggtttcgaagatggaaatatttgcctattcacccaggatgataccgacaattttgactggaccaaacaatcaacggctaccagaaatactaaatacacccccaacacaggcccaaacgccgaccgctcagggagtaaggaaggcttttacatgtatattgagaccagccgaccacgcctggaaggagaaaaggcaaggctcctgtctcccgtgttctctatcgcccctaaaaatccatacggcccaacaaacacggcctactgtttcagtttcttttatcatatgtacggccaacatattggcgtgctgaacgtgtacctgagacttaagggccagaccaccatagagaatccgctgtggtcaagctctgggaacaagggccagcgctggaacgaagctcatgtgaatatctatccgattacctctttccagctgatctttgaaggtatccgtggacctgggattgaaggcgacattgcaattgatgacgttagcatagcagaaggcgagtgcgcaaaacaggatcttgctacaaagaactcagtagacggggctgtgggcatactagtacatatctggctgtttccgatcattgttctaatttcgatcctgagtccgcgccgctag

SEQ ID NO: 123299 - DNA, 2184 bp, synthetic construct
  misc_feature 1..2184: note = Description of Artificial Sequence: Synthetic coding sequence
  source 1..2184: mol_type = other DNA
atggtctccttccgcctctctaacaagaccgcttcccccagcatcaagcttctcgtggacgaccctattgtcgtcaatcctggcgaggctatcacacttgtgtgtgtgaccaccggaggcgagccagcccctagcttgacctgggtgcgaagcttcggtaccttgccggaaaagacagtcctgaacggaggcactctcaccatcccagcaatcaccagcgacgatgcgggcacctattcttgcattgcaaataacaacgtaggaaacccagctaaaaagagcaccaacattattgtgagggccttaaagaagggcaggttttggattacgcctgatccatatcataaggatgataacattcagatcggtcgggaagtaaaaatcagctgccaagttgaggctgtcccatctgaggaactgaccttttcttggtttaagaacggccgccccctgcgatcctcagagcgtatggttatcactcagacggaccccgatgtcagtccaggcaccacgaacctggatataatcgatctaaaatttacagattttggtacatacacatgtgtggcttcactaaagggtggggggattagtgatatttccatagacgttaacatcagttcttcaacagttccaccgaatctcaccgtgccacaggagaaaagcccgctggtgacacgcgaaggcgataccatagaactccagtgccaggtgacaggcaaacctaagcccatcatcctctggtcccgcgctgataaagaggttgccatgccagacggctcaatgcagatggaatcttatgacggtacccttcgtatcgtcaatgtcagcagggaaatgtcaggcatgtatcggtgccaaacttcacaatataatggcttcaacgtgaaaccccgggaggcattagttcagctgattgtccagtaccctccggctgtcgaaccagcctttcttgagattaggcaggggcaggaccggagcgttacaatgtcctgtagggtgttaagggcatatcccattagggtgctgacatatgaatggcgcctcggaaataagctcctccgcaccggacagttcgactcacaagagtatactgaatacgccgtaaaatccctctccaacgaaaattatggggtgtataactgtagcattatcaatgaggccggtgcagggcgttgtagctttctagtgacaggcaaagcatatgctccggaattctattacgacacgtacaatcctgtctggcaaaataggcatcgtgtgtattcctacagcttacagtggactcagatgaatcccgatgccgtcgataggatcgttgcgtacagactgggtattagacaagctggccagcaaaggtggtgggagcaagagatcaagatcaatggaaatatacaaaagggagagctcattacctataatttgacggagcttataaaaccggaggcctacgaagtgcgactgactcctctgaccaaattcggggagggcgattcgacaatccgagtcatcaagtattctgcccccgtcaatccccatctgagggagttccactgcggattcgaggatggcaatatctgcctgttcacgcaggatgacacagataactttgattggaccaagcagtccacggcaaccaggaatacaaaatatactcctaacacaggaccgaatgctgaccggtctggttctaaagaggggttttatatgtacatcgaaaccagtcgcccacgcctagaaggcgaaaaggcccgcctgctctccccagtcttcagcattgctccaaagaatccctatggcccaacaaatacagcatattgcttctcattcttctaccacatgtacggccaacatatcggagtcctgaacgtctatctgcggctgaagggtcagacgaccattgagaaccctctgtggagttctagtggcaacaaaggacaacgctggaacgaagcccatgtcaatatttaccccattacgagcttccagctgattttcgagggtatccgcggcccgggaattgagggcgacatagcaattgatgacgtcagcatagccgagggagaatgcgcaaagcaggacctggccaccaagaactccgtggacggcgctgtcggcattctggtgcatatatggctgtttcctataattgtgttaatctccattttatctcctcgcagatag

SEQ ID NO: 123300 - DNA, 2871 bp, synthetic construct
  misc_feature 1..2871: note = Description of Artificial Sequence: Synthetic coding sequence
  source 1..2871: mol_type = other DNA
atggatcttctctatggacttgtctggctactcaccgtgctactggaaggaattagcggacagggtgtgtacgccccgccgaccgtgcgaatcgtccattctggacttgcttgcaatatagaagaagaaagatatagcgaaagagtatacaccattagagagggtgaaactctggagcttacatgcctggtaaccgggcaccccagaccacagatccgctggactaaaaccgctggatcagctagcgatcgcttccaggacagctccgtgtttaatgaaacattgcgcatcacaaatatccagcgccatcaggggggaagatactactgcaaggctgaaaatggtctcgggtctccagctatcaaaagcatacgggttgacgtgtactacctggatgatccagttgtgactgtccaccaaagcatcggtgaagccaaagagcaattctactatgagcggaccgtctttctgcgttgcgtggctaatagcaaccctcctgttcgatactcatggcgccgggggcaagaggttttgttgcagggttcggacaaaggggttgaaatttacgagccatttttcacccagggcgagacaaagatcctgaagctcaagaaccttcggcctcaggactatgcaaactactcttgcatcgccagcgttcggaatgtgtgcaacatcccagataagatggtctcgttcagactttctaataagaccgcttcgccttctatcaaactgttggtcgacgatccaattgttgttaatccaggcgaggctattaccctggtgtgcgtgacaactgggggtgagccggccccatctctaacatgggttcgctcatttgggacccttcctgaaaagacggttctgaacggaggcacgttgaccattccagctattactagcgatgatgccggtacgtatagctgcatcgccaacaacaacgtcggcaatccggccaaaaaaagcaccaacatcatcgttcgcgccttaaagaaagggcgattttggatcaccccggacccatatcataaggatgataatattcagatcggtcgagaggtgaagatatcatgccaggtcgaggcagtgcctagtgaagagctgacattcagttggtttaaaaatggcaggcctttgcgttctagtgagcgcatggttattactcagaccgacccagacgtcagccccggaactacgaacttagatatcatcgatttgaagttcacagattttgggacctatacgtgtgtcgcttccttgaagggcggcggaatatctgatattagcattgacgtgaacatcagttccagcaccgtgccccccaatttgacagttccgcaggagaaaagcccgctcgtcactcgtgaaggagacaccatcgagttacagtgtcaggtgaccgggaaacctaaaccaattattctttggagtagggccgataaggaggtggccatgcctgatggatctatgcaaatggaatcatacgacgggaccctgcgtattgtcaatgtctctagagagatgtctggcatgtatcggtgccagacaagtcagtacaacggttttaatgtgaaacccagagaagcgttggtgcagctcatagtgcagtatcccccagcagttgaacccgccttcctggagattcggcagggccaagatcggagtgtgacaatgtcctgtagggtactacgcgcttatcccatcagagttcttacttatgagtggagactgggaaataaattattgagaaccgggcagtttgactcccaagagtataccgagtacgctgtgaaatcactatccaatgagaactacggggtgtacaattgcagtatcatcaacgaagccggcgccggtcgctgcagcttcctggtgactggcaaggcctatgcaccggagttctactacgacacctacaaccctgtctggcagaatagacacagagtgtacagttactctcttcagtggactcaaatgaaccctgatgcggtggatcggatcgtggcttaccgcctaggaataaggcaggccgggcagcagcgttggtgggaacaagaaataaagattaacggtaatattcagaagggggaactgataacctacaacctgacagaactgattaagcctgaggcctacgaggtgcgccttacccctctcaccaaatttggcgagggtgatagtaccatccgcgtgattaaatactctgcccctgtcaatccccacttaagggagttccactgcgggttcgaagacggaaacatctgtctctttacccaggacgacacagacaattttgattggaccaaacagtccactgctactagaaacacgaagtacacacctaacaccgggcctaatgctgatcgctcgggcagtaaagaaggattctacatgtacatcgagacaagccgccctaggctcgaaggcgagaaggcccggttactgtcccctgtattcagtattgcacccaagaatccctatggccctacaaacaccgcctactgtttttccttcttctaccacatgtatggacagcacattggcgtgttgaacgtttatcttcggctcaagggccagacgaccatcgaaaacccgctgtggtccagttccggaaataaaggtcaaagatggaatgaggcccatgtcaatatttaccctattacctctttccagctgatattcgagggcattagagggcccggaattgagggcgacatcgctatcgatgacgttagcatcgccgagggcgagtgtgcaaaacaggaccttgcaacaaaaaatagtgtcgatggggccgttggtattctcgtacatatctggttgtttcccattatagtgctgatctcaattttgtccccaaggcgctag

SEQ ID NO: 123301 - DNA, 1143 bp, synthetic construct
  misc_feature 1..1143: note = Description of Artificial Sequence: Synthetic coding sequence
  source 1..1143: mol_type = other DNA
atgagatggctcttactgtactacgccctctgctttagcctgtctaaggcatctgcccacaccgttgaactgaataacatgttcggacagattcagtctcctgggtatcctgactcctacccatccgattcagaggtcacctggaacatcactgtcccagatgggttcagaatcaaactgtactttatgcacttcaacctggaatcttcctatctgtgcgagtacgattatgtaaaggttgagacagaagaccaggtgctggctactttttgtggccgcgaaacaactgatacagaacagacccccggccaggaggtggtcctgagtcctggctcatttatgagtatcactttccggtctgatttctcaaacgaggaacggttcaccggcttcgatgcccattacatggcagtggatgtcgacgagtgcaaggagcgggaggacgaggaactctcttgtgaccattattgtcataattacattgggggctattactgttcttgtaggtttggctatattttacacacagacaatcgcacatgtagggttgaatgctctgataatcttttcacacagcggaccggggtcattacgagccccgattttcccaacccttaccccaaatctagtgaatgtctatataccattgagctggaagaaggttttatggtgaatctgcagtttgaggatatctttgacatcgaagaccaccctgaggtgccttgcccctatgactacattaagattaaagtgggtccaaaagtactgggccctttctgcggcgaaaaggcccctgaacctattagcacgcagtcacattccgtgctcatcctgtttcattctgacaattctggcgaaaatcggggctggagactttcttatagagccgcgggtaacgaatgtccagagcttcagccccctgtacatgggaaaattgaaccatctcaggccaagtatttcttcaaagaccaggtgctcgtgagttgcgacaccggttataaagtactgaaagataacgtggagatggatacctttcagatcgaatgtctgaaggacggcacttggtccaacaagatccctacgtgtaagaagaatgagatagatttagagtcggaattgaagtccgaacaagtgacagagtag

SEQ ID NO: 123302 - DNA, 2187 bp, synthetic construct
  misc_feature 1..2187: note = Description of Artificial Sequence: Synthetic coding sequence
  source 1..2187: mol_type = other DNA
atgcggtggctcctgctctattacgccttgtgtttttctcttagtaaagcatctgcccatacagtagaattaaacaacatgtttgggcaaattcagtctcccggctatcctgactcttatccatcagactcagaggtgacttggaacatcacagttccagatggctttcgaatcaagttgtatttcatgcattttaacctggagtcgagctacctgtgtgagtatgattacgtcaaggtcgagacggaggatcaggtgctggcgactttctgcggacgggagacgacggacaccgaacaaacacccgggcaggaggtggttctcagccctggcagtttcatgtccataactttcagatccgactttagcaatgaggaaaggtttacagggttcgacgcacattacatggccgtcgacgtggacgaatgcaaggagcgagaggatgaggagcttagctgtgaccattattgccacaattacattgggggatactactgctcatgcagatttggatatatactgcatactgacaatcgcacgtgccgagtggaatgttccgataatctgtttacacaacggaccggtgtcatcacttcccctgatttcccaaacccctacccaaagtcaagcgagtgcttgtacactatagagctggaagaaggatttatggtgaacctgcagttcgaagatattttcgatatcgaagatcatccagaggtgccatgcccttacgactacatcaagattaaagtcggacctaaagtgcttggcccgttttgcggcgaaaaagctccggaacctatttccacgcagtcacattccgttctcatcttatttcattccgacaattccggcgagaacagaggttggcggctcagttacagagccgctggcaatgagtgccctgaactgcagcctcctgttcacgggaaaattgaacctagccaggccaagtacttctttaaagaccaagtcctcgtgtcctgcgacacaggatacaaggtcctgaaggataatgttgaaatggacacgtttcagattgaatgtctgaaggacggcacctggagcaataagattccaacctgtaagattgttgactgtagggctccaggtgaactggagcacggtctcatcaccttctccacccgcaacaatttgaccacatataaaagcgagatcaaatacagttgtcaggagccttattacaaaatgctgaacaataacactggcatttatacatgctcagcacagggggtgtggatgaacaaggttctcggcaggtctctgcccacatgtctgccagagtgtggacagccttcccgatctttgcccagcctcgttaagcgcatcatcgggggacgaaacgcagagcctggcctgttcccctggcaggccctgatcgtcgtcgaggacacatctagagtccccaatgataaatggttcgggagcggcgccctccttagcgcaagctggatcctcacggcggcccatgtgttaagaagccagagaagagatactaccgtgataccagtcagtaaggagcatgttaccgtctacctggggctacacgacgtaagagataagagcggcgctgtgaactcaagtgccgcccgcgttgtgctgcaccccgactttaatatacagaactacaaccatgacatagccttggtgcagctccaagagcccgtccctctgggcccacatgtgatgccagtctgtctacctagactcgagccagagggccccgccccccacatgctgggactggtggccggttgggggatcagcaatcccaacgttacagtcgacgagatcatatctagtggcaccagaacactctctgacgttctgcaatacgttaagttacccgtggtgccccacgcagagtgcaagaccagctacgaaagtagatctgggaattatagcgtaaccgagaacatgttctgcgctggatactatgagggcggcaaagatacatgcctgggcgactctgggggcgccttcgtcatttttgacgatctgtcacaaaggtgggtcgttcaaggattggtgtcgtggggagggcccgaagagtgtggctcgaaacaggtttatggtgtatacaccaaggtgtctaactacgtggattgggtctgggagcagatgggtttaccccagagcgtggtggagccccaggtggagcggtag

SEQ ID NO: 123303 - DNA, 2100 bp, synthetic construct
  misc_feature 1..2100: note = Description of Artificial Sequence: Synthetic coding sequence
  source 1..2100: mol_type = other DNA
atgaggtggctccttctttactatgccctgtgtttctctctgagtaaagcgagtgcacacacagtagagcttaacaatatgttcggccagatccagagtccgggataccctgatagctacccgtcagactccgaagttacttggaatatcactgtgccagacggcttccgaatcaagctgtatttcatgcacttcaatcttgaatcctcatatctctgtgagtatgactacgttaaggtggaaaccgaagaccaggtcttggccacattctgtggccgcgagacaactgacacggagcaaacccccggccaggaagtggtgctctctcccggtagcttcatgagcataacctttcgaagcgatttcagcaacgaggagcgctttacagggttcgacgcgcattatatggccgtggatgtggacgaatgtaaagaaagagaggatgaagaactgtcatgcgatcattattgtcataattacatcggcggctattactgctcctgccgattcggctatatcctacacacagacaatcggacatgcagagttgaatgcagcgacaacctctttacgcagcgaaccggtgttatcacaagcccggactttcccaacccttatccaaagagctcggaatgtttgtataccatcgaactcgaggagggtttcatggtaaatttgcagttcgaagatatcttcgacattgaggatcaccctgaggtgccttgcccatatgattacattaagataaaagtgggcccaaaagttctcggccctttctgtggagagaaagcacctgagccaataagcacccagagccatagtgtgttgatcctgttccattccgacaattcaggtgagaatcgcgggtggcgtctttcttatcgggcggctggaaacgagtgccccgagctgcagcctcccgtgcacggaaagattgagccctctcaggctaagtactttttcaaggaccaggtcttggtgagctgcgacaccggctataaagtgctgaaagacaacgtggagatggacacgttccagatcgaatgtcttaaggacggaacctggtccaacaagatcccaacttgcaagatcgtcgattgccgcgcgcccggagaattggaacacggcctgattacgtttagcactaggaacaatctgacgacttacaagagcgagattaagtattcgtgtcaggagccttattacaagatgcttaacaacaataccggtatatatacttgttcagcacagggcgtatggatgaataaggtccttggtagatcgctgcccacctgtctgcccgtctgtggtcttcctaagttctcccggaagttgatggcaagaatattcaacggcagaccagcccagaaaggaaccaccccatggattgccatgctgtcgcaccttaatggccaacctttctgtggcgggtctctgctgggctcctcgtggatcgtgactgccgcacattgccttcaccagtctctggaccccgaagatcccacattgcgggactcagatcttctgtccccctcggactttaagattattttagggaaacattggcggctgcgttcggatgaaaatgagcagcacctgggggtaaaacatacaaccctccacccacagtacgatcccaatacctttgagaacgacgtcgccctggtcgaactgctggaaagccccgtgctaaatgctttcgtgatgccaatttgtctgccagaggggccccaacaggagggcgccatggtgattgtctcagggtggggcaagcagttcttacaaagattccccgaaaccttgatggagatagagatcccaattgtcgatcacagcacttgtcaaaaagcatacgctcctctcaagaaaaaagtaacgagggacatgatctgtgccggtgaaaaggaaggtggcaaagacgcttgtgccggtgactccggggggccaatggtcacactcaatcgcgaacgcggccagtggtacctggttgggacagtgtcatggggagacgattgcggcaaaaaggataggtacggggtgtacagttacatacaccacaacaaggattggatacagcgggtgacaggggtccgaaattag

SEQ ID NO: 123304 - DNA, 1848 bp, synthetic construct
  misc_feature 1..1848: note = Description of Artificial Sequence: Synthetic coding sequence
  source 1..1848: mol_type = other DNA
atgtctatcacatttcgctccgacttttctaacgaggaacggttcactgggttcgacgcccactacatggccgtggatgtggacgagtgcaaagagcgtgaagacgaagaattatcctgtgatcactattgccacaactatattggtggatattactgtagctgcaggttcggctacattctccacacggataatcggacctgtcgtgtcgaatgtagcgataatcttttcacacagcgtactggagttataacatctccggatttccccaatccatatcctaagagcagcgagtgtctgtatactatcgagttggaggaaggctttatggtgaatctgcagttcgaggatatatttgacattgaggatcaccccgaggtgccttgcccatacgactacattaagattaaagtcggcccaaaagtgctgggccccttttgcggagagaaagctccagagcccatatccacacaaagccactccgtcttgattctgttccactccgacaattcaggcgaaaaccgaggttggcgactgtcttacagagcggctggaaatgaatgccccgagctgcagcccccagtgcatggtaagattgagccatcccaagctaagtacttcttcaaagaccaggtcttggtgtcttgcgataccgggtacaaggtcctgaaagacaatgtcgagatggacacatttcagatagaatgtctgaaggacggcacctggagcaataaaatcccgacctgcaaaatagtggactgcagagccccaggagaactagagcatggtcttatcacgttcagtacacggaataaccttactacatacaaatctgaaattaagtactcatgccaagagccctattacaagatgttgaataataatacaggcatatatacttgctccgcccagggcgtttggatgaacaaggtgctgggaaggtcactgcctacctgcctccccgagtgtgggcagcccagtcgatcgctgccgagtctcgttaaacggatcatcggcggccggaacgctgagcctggtctgttcccatggcaggcactcatagtggtggaagacacctcccgagtcccaaacgacaaatggttcggctccggcgccctgctttccgcttcctggatcctaacagccgctcatgtcctgagatcacaaaggagagataccacagtgatccctgtgagtaaggagcacgttaccgtgtatctggggctgcatgatgttagggataagtccggtgccgtaaattccagcgcagcccgcgtcgtgcttcaccccgacttcaatatccagaactacaaccatgacatagcccttgtgcaactccaggaacccgttcccctgggcccccacgtcatgcctgtgtgcttgccacgactggagcctgagggtccagctccgcatatgctgggactggtggctggatggggcataagtaacccaaacgtaacagtcgatgaaatcatctcctcaggcacgaggactctcagtgatgtgttgcaatatgtgaaactacctgttgtacctcacgcagaatgtaagacgtcctacgagtctaggtctgggaattatagtgtcacagagaatatgttttgcgccgggtactacgaaggaggtaaggatacatgcctgggagatagcggcggcgcatttgtgatttttgacgatctttcccagaggtgggtggtgcaggggctggtctcatggggcgggcctgaagaatgcggcagtaaacaggtgtatggggtttatacaaaggtgtcaaactacgtggactgggtgtgggagcaaatgggcttgcctcagagtgtggtggagccccaagtagaacggtag

SEQ ID NO: 123305 - DNA, 249 bp, synthetic construct
  misc_feature 1..249: note = Description of Artificial Sequence: Synthetic coding sequence
  source 1..249: mol_type = other DNA
atgttctgtgccgggtattacgaaggcggaaaggatacatgcctcggggactccggaggagctttcgtcatcttcgacgacctgtctcagcgatgggtggtgcaggggctcgtgtcctggggaggccccgaagaatgtggcagcaaacaggtgtacggggtctacaccaaggtctcaaactacgtggattgggtgtgggagcagatgggtctgcctcagtctgtggtcgagcctcaagttgaaaggtag

SEQ ID NO: 123306 - DNA, 1443 bp, synthetic construct
  misc_feature 1..1443: note = Description of Artificial Sequence: Synthetic coding sequence
  source 1..1443: mol_type = other DNA
atgagcattactttccggtctgatttttcgaatgaggaaaggttcacagggtttgatgcccactatatggctgtggatgtagacgaatgcaaggagcgcgaagacgaggagctcagctgtgatcattactgccacaactacatcgggggctactactgttcatgcagatttgggtacatcctgcataccgataataggacatgtagagtggagtgctctgataacctcttcactcagcgcacaggcgtgatcacatctcccgatttccccaatccttaccctaagtcgtctgaatgcctgtataccatcgagctggaagagggcttcatggttaacctgcaattcgaagacatattcgatatcgaggatcatcccgaagtcccgtgcccatacgattacattaaaatcaaggtgggccccaaggtgttaggtccattctgtggggagaaggcccctgaacccatctccactcagtcccattccgtcctgatcctcttccatagcgataattctggtgagaaccgtggatggaggctgtcttaccgagcggccgggaatgaatgtccagaactgcagcctcctgtgcacggcaaaatcgagccctctcaggcaaagtacttttttaaagaccaggttttagtcagctgtgacaccgggtataaagtcctgaaggataacgtagaaatggataccttccagatcgagtgtcttaaggacgggacttggtcgaataaaattcccacttgtaagatcgttgattgtcgcgcccccggggagctggaacacggtctgatcaccttcagcacccggaacaatctcacaacatataagtccgagatcaagtactcatgtcaggagccatactataagatgctcaataataatacaggtatttacacttgtagtgcacaaggagtttggatgaataaggttctcggtcgcagcctgcctacgtgcctgccggaatgcgggcagcccagtcgttctttaccttcactggtcaaacggatcattgggggccggaacgccgagccgggtctttttccctggcaggcccttatcgtggtggaagacacctctcgagtgccaaatgataaatggtttggttcaggggcactactctctgcatcctggattctcaccgccgcgcatgtgttaaggtctcagcgccgagacacgacagtaattcccgtgtccaaggaacacgtgacagtttatctcggactacacgacgtgcgggacaagtcaggcgccgttaatagctccgcagcacgggtggtcctacaccccgactttaatatccaaaattacaatcacgacatagccctggttcagctccaggagccagtacctctgggaccccatgttatgccagtttgcctgcctaggcttgagcctcccgggggccgcttagggcacctgcagtcccagtgcgacagctag

SEQ ID NO: 123307 - DNA, 2061 bp, synthetic construct
  misc_feature 1..2061: note = Description of Artificial Sequence: Synthetic coding sequence
  source 1..2061: mol_type = other DNA
atgagacttctcaccttactgggtctcctttgtggatcagtggcgactccactcggacccaagtggccggagcctgtgtttgggaggctcgcctcaccaggatttcccggtgagtacgccaatgaccaggagcgtcgttggaccttgactgcgcctcctgggtacagattgcgcttgtacttcacacactttgatctggaactgtcccacctgtgtgagtatgattttgttaagttgtcctcgggcgcaaaggtactagcaactttgtgtgggcaggagtctaccgatacggagagagctcctgggaaagacactttttactcactgggttcctccttagacataacttttcggtctgattattccaacgagaagccatttaccggattcgaggcgttctacgccgctgaggacattgacgagtgccaggtagctcccggtgaggcccctacttgcgatcatcattgccataatcatttgggtggattttattgctcttgtcgcgccggctacgtcttgcatcgaaataagcggacctgttccgcactttgcagcggtcaggtgttcacccaacgctcaggagagctcagctcacctgaatatcctagaccgtatccaaaattatctagttgtacatattcgatcagccttgaagaaggattctccgtgatcctggacttcgtggagagcttcgatgtagagacacaccctgaaaccctctgtccctacgactttctgaagattcagaccgatcgggaggagcacgggccgttctgtgggaagactctgccccacaggatcgagacaaagtcaaatacggtaactattacctttgtgactgatgaatctggggatcacaccggatggaaaatccactacacaagtacggcccagccctgtccataccctatggccccgcccaacgggcacgtgagccccgtgcaggcgaaatacatactgaaggacagcttcagcattttttgcgaaactggctacgagcttctgcaggggcatctgccactgaagtcatttactgcagtatgccagaaggacgggtcctgggacagacccatgcctgcctgcagtatcgtggactgtggtccccccgacgacctgccatctgggagagttgagtacattacagggccgggagtcacgacgtataaggcggtgatacaatacagctgtgaagagacgttctacactatgaaggtcaacgatggaaagtacgtgtgtgaagcggacggcttctggactagctcaaagggcgaaaaaagccttcccgtatgtgagcctgtgtgcgggctgtcagcccggacgaccgggggcagaatttacgggggccagaaagccaaacccggggacttcccatggcaagtgttaattctgggcgggacgacagccgcaggcgcattactctacgacaactgggttctgactgcggcgcatgctgtctatgagcaaaagcatgacgcttcagcactcgatattaggatgggcactttgaagcgactgagcccccactacacccaagcttggtctgaggctgtgttcatccatgaagggtacactcacgacgccggattcgataacgacattgcattgattaaactgaacaacaaggttgttattaatagcaacattacacctatctgtctgcctaggaaagaggccgagtctttcatgcgtactgatgatattggaacggcatcagggtgggggctcacacaacggggtttcttggccagaaatctcatgtatgtagacatccctatcgttgaccaccaaaagtgcaccgcagcatacgaaaaacccccatatccacggggttcagtgaccgccaatatgctttgcgctgggttggagagtgggggaaaggacagctgtagaggcgattcagggggagctctggttttcctcgattccgagacagaaagatggtttgtcggaggcatcgtctcttggggctcaatgaattgtggtgaggcaggtcaatacggtgtctacactaaggtgattaactacatcccttggattgagaacatcatctccgatttctag

SEQ ID NO: 123308 - DNA, 558 bp, synthetic construct
  misc_feature 1..558: note = Description of Artificial Sequence: Synthetic coding sequence
  source 1..558: mol_type = other DNA
atgcgactgctgaccctgctcggactgctttgtgggtccgtggcgacccctctgggaccaaaatggccagaacccgtgtttggtcgcttggcctcaccggggtttcccggggagtacgcaaacgatcaagagagacgctggaccttaacggctcctccaggctaccgcctccgactatacttcacgcattttgatctagagctttcacatctgtgtgagtacgactttgttaagcttagcagtggagccaaggtgctcgccacgctgtgtggccaggagtccactgacaccgagagggcccccgggaaggacacattctattctctggggagctcccttgatataaccttccgtagcgactattcaaacgagaaaccctttactggatttgaggcattctatgctgcagaagatatcgatgaatgtcaagtggccccaggggaggccccaacttgtgatcaccattgccataaccacctcggcggcttctactgctcctgccgcgccggatacgtgctgcatagaaataagaggacttgttctgagcagtccctctag

SEQ ID NO: 123309 - DNA, 1089 bp, synthetic construct
  misc_feature 1..1089: note = Description of Artificial Sequence: Synthetic coding sequence
  source 1..1089: mol_type = other DNA
atggccgcccccagagtctttcctctcagttgtgccgtgcagcagtatgcatggggaaagatggggtctaatagcgaagttgcaagactcttagcttcctcagatccgcttgcgcaaatcgctgaggacaaaccttatgcagagctttggatgggcacccatcccagaggagacgcaaagatcctagacaacagaatttcgcagaagactctatcacaatggattgccgagaatcaggattctctcggctccaaagtaaaagacactttcaatggaaacctgccttttctgtttaaggtattaagcgtcgagacccccttgtccatccaagcccaccctaacaaggagttggcagagaagttgcaccttcaggctccacagcactacccagatgctaatcataagcctgagatggctatcgctctaaccccattccagggactttgcgggtttcgtcctgtcgaggaaatcgtgaccttccttaaaactgccgctggtaacaacatggaagatatttttggagaattgctgctccagctgcatcagcagtacccgggggatattggatgctttgccatttacttcctcaacctcctgacgctgaagccaggtgaagcaatgttcctagaagctaacgtgccgcatgcctatctgaagggcgattgcgtcgagtgtatggcttgctctgacaacactgtccgagcaggtctcactccaaagttcatagacgtgccaaccctgtgtgaaatgctctcttacacgccgagctcgtccaaggatcgcctttttttgcccacccgcagtcaggaagatccatacctgagcatctacgatcccccggttccagacttcacaattatgaagacagaagttccagggagcgtgaccgaatacaaggtgctcgctttagactcggcttcaatcttgctcatggtgcaggggaccgtgatcgcatctacacctactacacagacacctattcctttgcaaaggggaggcgtgttgtttatcggagcaaatgaatcagtatcattgaaattaactgagcccaaagatctcctaatatttcgcgcttgctgcctgctgtag

SEQ ID NO: 123310 - DNA, 1272 bp, synthetic construct
  misc_feature 1..1272: note = Description of Artificial Sequence: Synthetic coding sequence
  source 1..1272: mol_type = other DNA
atggctgctcccagagtttttccactgagttgcgccgtacaacaatatgcttggggtaaaatgggctctaacagcgaggtggcacgactgctcgcaagctccgatccactagctcagatcgctgaggacaaaccctatgctgagctttggatggggacacacccacgcggggatgctaagatcctggataatcgcatcagccagaaaacgttgtcccagtggattgcagaaaaccaagactccctcgggtccaaagtcaaggacacatttaacggcaaccttccctttctttttaaggtcctctccgtcgaaacccctctgtctattcaggcccaccccaacaaggaactggctgagaaactgcacttgcaggctccccaacattaccccgacgcgaaccataagcctgaaatggctatcgctcttaccccattccaaggactctgcggattccgccctgtcgaggaaatcgtcacttttctgaagaaagttcctgaatttcagtttcttattggcgacgaggctgcgacccacttgaagcaaacaatgtctcatgacagccaggcggttgcatcgtctctgcagtcttgcttttcccatcttatgaaaagcgaaaaaaaggtagtagtagagcagctcaatctgttggtaaagaggatctcccagcaggcggccgctggcaacaatatggaggacatctttggtgaactgctcctgcagttacaccagcagtacccaggtgacattggatgttttgcaatctatttcctaaacctgctgactctgaaaccaggtgaggccatgtttttagaggcaaatgttccacatgcatacctgaagggcgactgcgtcgaatgtatggcgtgctccgacaatacagtccgtgccggtctcacaccaaaattcatagatgttcctaccctctgtgagatgctgagttacaccccgtccagctcaaaagacagactgtttttgccgacaaggtcacaggaggacccctacctctctatttatgacccacctgtgcccgatttcacaatcatgaagaccgaagtgcccggcagcgtgacggaatacaaagtattagcccttgactctgcatccatccttctcatggtccaaggcaccgtgatcgcctccactcccacaactcagacccccattccgctccagcggggcggcgtcctctttattggagccaacgaaagcgttagcctgaagctgacagagcccaaagacttgctgattttccgcgcgtgttgcctgttgtag

SEQ ID NO: 123311 - DNA, 804 bp, synthetic construct
  misc_feature 1..804: note = Description of Artificial Sequence: Synthetic coding sequence
  source 1..804: mol_type = other DNA
atgggaagcaattccgaggtggctagactcctcgcctcgtctgatccactggctcagatcgcagaagacaagccgtacgcagagctctggatgggtacccaccccagaggcgacgctaagatcctcgacaatagaattagccaaaaaaccctctcacagtggatcgccgaaaaccaggacagtttgggaagcaaagtgaaagatacatttaatggtaatctgccttttctgttcaaagtcctcagtgtggagacgcctttaagcattcaggcccatcctaataaagagctggccgagaagttacatttgcaggccccacagcattaccctgacgcgaaccacaaacccgagatggcgattgcactcaccccctttcaggggctgtgtgggtttcgacctgtggaggaaattgtgacctttctcaaaaaagtgcctgaatttcaatttctgatcggagatgaggccgctacccatttgaagcagacaatgagtcacgactctcaagctgttgcatcgagcctgcagtcttgtttcagccatctgatgaaatctgaaaaaaaggttgtggtggagcagctaaatctgctggtaaaacgcatttcacagcaagcggcagcgggcaataacatggaggatatcttcggcgagctgcttctgcagctacaccaacagtatcctggcgatattgggtgtttcgccatctactttctgaatctccttacccttaaacccggggaggctatgttcctggaggccaacgtacctcatgcatacctgaagggaggaccatggctgtgccactag

SEQ ID NO: 123312 - DNA, 1122 bp, synthetic construct
  misc_feature 1..1122: note = Description of Artificial Sequence: Synthetic coding sequence
  source 1..1122: mol_type = other DNA
atggggacacacccacggggcgacgcaaagatcttggacaatcgaatctcccaaaagaccctcagccagtggattgcggaaaatcaggactcgttgggcagcaaagttaaggataccttcaatgggaacctgccgtttctctttaaggttctatcggttgagacgcctctctccattcaggcacatcccaacaaagagctggcggagaaacttcatttgcaggctccccagcattatcccgatgctaaccacaagccagagatggcaattgcccttacgcctttccagggcctgtgtggttttcgtcccgtggaagagatagtgacctttttaaagaaggtccccgagttccagttcctgatcggagatgaagccgctacccacctgaaacaaacgatgagccacgacagtcaggccgtggcctcatctttgcaatcatgcttctcacacctcatgaagtcagaaaaaaaagtagttgtggagcagttgaatctgcttgtcaagcgtatctcacagcaggcagccgctggaaacaatatggaagatattttcggagagttgcttctgcagctacaccagcagtatccaggagacattgggtgctttgctatctattttctgaatctgttgacccttaaacccggtgaggctatgtttctggaagctaatgtcccccacgcctatctcaaaggtgactgtgtggagtgcatggcttgtagcgacaataccgtgagagctggactgacccccaaatttattgacgtgcctactttgtgcgaaatgctcagttataccccatctagcagcaaggatcgtctgtttctgcccacgaggagccaagaagatccttatctgagtatatacgatcctcctgtccctgatttcacgatcatgaagactgaagtgcctggttcagtgacagagtacaaggttcttgctctggactccgcgagcatcctgctgatggtccagggaactgtcatcgcaagtacccccaccactcagactcccatacctctacagcggggcggagtgctcttcataggcgctaatgagtctgtctctctgaagctcacagaacctaaagacctcctcattttccgagcttgctgcttgttgtag
